United States Patent Application Publication US 2013/0332133 A1 - sequence listing, part 27

SEQ ID NO: 221819 - DNA, 784 bp, Unknown
  Bacterial polypeptide expressing nucleotide sequence isolated from the Sargasso Sea
attgagggaaataagggtcaaccaagattgaaccctccttttccagctttaataggtctctatgggtgccctacaataatcaataatgtagaaacaatagcagtagttccaactattcttcgaagaggaggaaaatggtttgcatctttaggtagagaaaaaaatactggcactaaaattttttgtatatctggaaatgtaaacaatccatgcaatgttgaagaagagatgaatatacctttaaaagagctaatagaaattcatgctggaggtgtagtaggtggttgggaaaatttgcaagctgtaatcccaggtggatcctcaatgccattaatacctaaagaaaaatgtgaaacattgactatggactttgactctttgacggctgaaaaaagtggtttaggtactgcaggtgtagttgtcattaataaagatcaggacataattaaatgcatggcgaggatagcaagattttataagcatgaaagttgcggtcagtgtacgccatgtagagagggatctggctggatgtggagaatgcttgaaagaatggctaaaggagaagcatcaaaagaagaagtagatatgcttggtgatgttactaaacaaatagagggtcatacaatttgtgcttttggtgaaggatcttcttggccagtgcaaggcttattaagacattttaaagatgaaattaaaaaaagaaataaatttgatccaatcgttaaagaaactaaaaatattccatacttggtagatcaacacttgttagataaaaatgcttaaa

SEQ ID NO: 221820 - DNA, 947 bp, Unknown
  Bacterial polypeptide expressing nucleotide sequence isolated from the Sargasso Sea
agattttgttatcatgataaattgtcaattgctggtaattgcagaatgtgtttagtggaaatggaaaaatcaccaaaaccaattgcttcatgtgcaatgccagcttctgaaggtatggttataaaaacaaatactgaattagtaaaaaatgcaagaaaaggggtaatggaatttcttttaattaatcatccattagattgtccaatatgtgatcaaggaggagagtgtgatttgcaagatcaagccctgtattatggtcttgataaatcaagatatgaggaaaacaaaagagcagtcaaaaataaaaatatggggcctctagttagtactataatgaccagatgtattcactgtacaagatgtgtaagattctctactgaggtagcaggtgttgatgatattggaatgttaggaagaggagaaaatgcagaaattactacatatcttgaaaaaactattgagtcagaattatccggtaatgttatagatctttgtcctgtaggagctttaacaagtaagccatatgcatttcaggctcgaccatgggaattaaaaaaaacagaaactaccgacatatttgatgcaatgggatcaagtatcagaatcgactctttaggaaaaaaagccttaagagtattacctttgcttaatgaacaaattaatgaagaatggataagtgataaatcaagatttgctattgatggattagcaagacaaaggattgataatccttatataaaagatcaaggtaaattaaaacctagtgattggaatacagttttagaattaatttgtttgcaaattaataaattaggttctgcaaatactctagctattagcggtaaatttactgatgtagaaacaatatattcagcaaaaaagtttttagagtcattaaattcaaataattttgactgtcgatatgacaatagtcaatttattcaaaa

SEQ ID NO: 221821 - DNA, 595 bp, Unknown
  Bacterial polypeptide expressing nucleotide sequence isolated from the Sargasso Sea
ctggaaaatgtaaataatccatgtaatgttgaagaagaaatgagcatttcattaaaagagttaattgaggtacatgcaggaggagtaattggtggttgggataacttacaagccgtaattcctggtggttcatctatgccattaatacctaaggataaatgtgaaactctaaatatggattttgactctttaatggatgaaaaaagtggattagggacagctggtgttgttgtaataaataaagaccaagacataattaaatgtatggcaagaattgccagattttataaacatgaaagctgtggacagtgcactccatgtagagaaggttctggatggatgtggagaatgttagaacgaatggcaaagggagaggcatctagagacgaaattgatatgttgggagatgtcacaaatcaaatagctggtcatacaatttgtgcttttggagagggttcctcttggccagttcaaggtttacttagacatttttcaagtgaaattaaaagacgaaataaattcgatccgattgttaaagatcgaaaagatttaccttatttagttgatcaacatttattagataaaaatgcttaaa

SEQ ID NO: 221822 - DNA, 659 bp, Unknown
  Bacterial polypeptide expressing nucleotide sequence isolated from the Sargasso Sea
atggtttgcgtctattggaaaacccaaaaatacgggaacaaaaatattttgtatttcgggaaatgttaaaaatccatgcaatgtggaagaagaaatgggaatacctcttaaagaacttattgaaaaacatgcaggaggtgtaattggtggatgggacaatcttcaagctgtaattcctggaggttcgtctatgccactattacccaaagatgtttgtgaaactataacaatggactttgattccttgatacaacaaaagagtggattaggaacagctggaatagtcgtaataaataaagaccaagatattattaagtgtatggcaagaatagcaagattctacaaacatgaaagttgtggtcaatgtaccccttgtagagaaggatcagggtggatgtggagaatgttagaacgtatggcagaaggaaaagcatctaaagaagaagtagatatgcttatggatgttactaaacaaatagaaggtcatacgatatgtgcttttggtgagggatctgcttggccgatccaaggattgttaagacattttaaaaaagaaattgaaaaaagaaataattttaatcctttaataaatataaacaaagaaagaaatataccctatttggtggatcaacacttattagaaaaagaaaatgtttaaa

SEQ ID NO: 221823 - DNA, 438 bp, Unknown
  Bacterial polypeptide expressing nucleotide sequence isolated from the Sargasso Sea
aagatgtatgtgagacaatcaagatggattttgactctttggtggcagctaaaagtggattaggtacagcagcaataatagttataaataaagatgaagatattttaaaatgtatggccaggattgctaaattttacaaacatgagagttgtggccaatgtacaccatgtagggaaggagttgggtggatgtggcgaattcttgaaagagctgcaaaaggtgaagcaactaaaaacgatattgatttgctctcagatgtgactaagcaaatcgaggggcatacaatttgtgcttttggagagggatctgcgtggccagttcaagggctattaagacatttcagaaaagaaattgataagagatgtttttcagacccacttataaagaaaaaaagagacataccttatttagttgatcaacatttacttgaaaaataaa

SEQ ID NO: 221824 - DNA, 776 bp, Unknown
  Bacterial polypeptide expressing nucleotide sequence isolated from the Sargasso Sea
aatgctgaaactaaaagtaaatgatgtagaagttgaagtcgaggagggcttaactgttctacaagcttgtgaaaaagctggagtagaaataccaagattttgctatcatgaaaaattatcaatagcaggaaattgcagaatgtgtcttgttgaaatggaaaaatctccaaaacctatagcttcttgtgcgatgcctgctgctgagggaatggtaataaaaacaaacactcctaatatagagaaatctaggaagggtgtaatggaatttttattagctaaccatcctttagattgtcctgtttgtgatcaaggtggtgaatgtgaccttcaagatcaatctatgttttacggaattgataaatctcgatttaaagaaaataaaagagcagtacctgataaaaatatgggtccactaattaagacccaaatgaccagatgcatccattgtaccagatgtattagatttgcaacagaaattgctggtgtgccagaacttggcgcaataggtagaggtgaagatatgcaaatcacaacatatctagaaaaatcaatacagtcagaattgtcaggaaatgtaatagatctttgtcctgttggagctcttacctcaaaaccatatgtatttgaagcaagaccttgggagttaaaaaaaacagaaactatagatgtaatggatgctgttggatctaacataagagtagacacatacgactgggaagtaaaaagagtattaccaataatcaacgaggatataaatgaggaatggatatcagata

SEQ ID NO: 221825 - DNA, 610 bp, Unknown
  Bacterial polypeptide expressing nucleotide sequence isolated from the Sargasso Sea
atgcttaaaataaaagttaatgacactgatatagaagttgaagaaggtttgacagttcttcaagcatgtgaaaaagctggagttgaaattcctagattttgttatcacgaaaaactatcgattgccgggaattgtagaatgtgtttggttgagatggaaaaatcacctaaaccaattgcgtcatgtgcaatgccagcaactgaaggcatggtcataaaaactaatacaccaaaagttgagaaagcaagaaaaggtgttatggaatttttacttgctaatcatcctttagactgtcctgtttgtgatcagggtggggagtgtgatcttcaagatcaatcaatgtactatggtgtagataaatctagatatagtgaaaataaaagagctgtacctgacaaaaacatgggaccattaattaagacacagatgacaagatgtatccattgtactagatgcattagatttgcaacagaaattgccggagttccagaattaggagcaataggtagaggtgaagatatgcaaataacaacttatttagagcaatctattcaatctgagttatctggaaatgttatagatttgtgtccagttggtgcattaacataaa

SEQ ID NO: 221826 - DNA, 589 bp, Unknown
  Bacterial polypeptide expressing nucleotide sequence isolated from the Sargasso Sea
gttaataatccgtgtaatgtagaggaagaaatgggaattccattaaaagaattaatagaaaaacatgcaggtggagtaataggtggatgggataatttaaaagctgttattcctggtggttcctcaatgcctcttttacctaaaaaaatttgtgagacaattacaatggattttgactctttggtagaaaataaaagtggccttggaacagctggtatagttgttatcaataaggaccaagacataattaaatgtatggcaagaattgctagattttataaacatgaaagttgtggacagtgtacaccttgtagagaaggatctggatggatgtggcgaatgttggagagaatggcaaaaggggaggcctccaaagatgaagttgatatgctacttgatgtaactaagcaaattgaaggacatactatatgtgcttttggtgaaggttctgcttggccagtgcaaggtttgttaaggcattttaaaaaagaaatacaaaaaaggaataatttttcaccattagtggatacaaataaaaatattccttatttaattgatcaacatttattggaaaaagaaaatgcttaaa

SEQ ID NO: 221827 - DNA, 497 bp, Unknown
  Bacterial polypeptide expressing nucleotide sequence isolated from the Sargasso Sea
tatgcaattcaagccactaaatgttacatatacattaaggggcgaataccatcacgaatatgtccaattagaaaaggcaattgaagaggcatatgaacgaggctttatcggaaaaaatgcttgtggtagcggatttgattttgatctttatgttcacagaggtgctggtgcttacatatgtggagaagagacagctcttttagagagtttagaaggaaaaaaaggacaaccacgattaaaacctccttttcctgctggagtaggtttgtatggtatgccaacaactattaacaatgttgagtcaatcgcagtagttccaactattttaagaagaggtccagattggtttaagtcaattggcgctgaaaataatacaggcacaaaaattttttgcatatctggtaacgttaataaaccatgcacaatagaagaggaaatgggaataccacttaaagaattagtagaaaagcattgtgatggagttgagggaggatggg

SEQ ID NO: 221828 - DNA, 916 bp, Unknown
  Bacterial polypeptide expressing nucleotide sequence isolated from the Sargasso Sea
cgcagaaattccaagtttttgctatcatgagcgactatccatagctggaaattgtagaatgtgtttagttgaattagaaaagtcagcaaaacccatagcttcctgtgcaatgccagcagcagagggaatgaatattaaaacaaataccaaaatggtggaaaaggcaagaaaaggggttatggaatttcttttagccaatcatcctctagattgcccagtttgtgatcaaggtggtgagtgtgatttacaagatcaatctctctactacggtttcgataaatcaagatttaaagagaacaagagagaagtaaaagacaaatatatgggtccattaataaaaacacaaatgaccagatgtatacattgcacaaggtgtataaggtttgctacagaaattgcaggtgtttcagagctaggagctattggtagaggagaagacatgcaaataactacttatttagaaaaatcaatggagtccgaaatgtcaggtaatgtaattgacctttgtcctgttggagcacttacttcaaaaccttacgcttttgaagcaagaccatgggaattaaaaaaaacagagagcatagatgtaatggatgctgttggatcaaatataagaatagacagctatggttgggaagtaaaaagagtattaccaaggctgaataacaacataaatgaagaatggatctcagacaaaacaagatttgcatgtgacggtttattaaaacaaagattagataaaccttataaaagagtaaatggtaatctcgtagaaacaagttgggacgatgttatcgaattagtatcttcaaaaattacagcaaccgaacctaaatctatagctggtcatgtaggagatatgtcgagtttggaaacaataaagtctttcaaaagttttttagaatctttgggttca

SEQ ID NO: 221829 - DNA, 340 bp, Unknown
  Bacterial polypeptide expressing nucleotide sequence isolated from the Sargasso Sea
tatgactaataatcaaactacaaaaagcggtttaggtgatattatagtagctccgcttaataagcttgtaaactgggctagggctacatctccttggtactttcagttcggacttgcttgttgtgctatagaaatgatggcgacagcagcttctcggcatgatttggagcgtattgggatgatgccacgttcatctccccgacaagctgacgtaatgattgtggctgggacagttactttgaagatggcaacaagagtgaaaaagttatatgagcagatggctgacccaaaatatgtagtgtccatgggaagttgcgcaactagtggaggaccttattgg

SEQ ID NO: 221830 - DNA, 763 bp, Unknown
  Bacterial polypeptide expressing nucleotide sequence isolated from the Sargasso Sea
aaaaccttccatttttccagctttaataaggattatattggctgtccaacaattatcaacaatgttgaaactattgctgttgttccaacaatattaagaagaggaagcaaatggtttgcttctttaggaaaaccaaaaaatactggtactaaaattttttgtatttcaggaaatgttaataatccatgtaatgttgaagaagaaatgggaatttctttaaaaaatttaatagaaaatcatgccggaggagttattggtggatgggacaatttgaaagcagtaattcctggtggatcttcaatgccgttgttgccaaaaaaaatatgcgacacaatcacaatggattttgattcattgtcacaggaaaaaagcggactaggtactgcaggaatagttgtaataaataatgaccaagacataataaaatgtatggcaagaatcgctagattttataaacacgaaagttgtggtcaatgtactccatgcagagagggaaccggatggatgtggagaatgcttgagcgtatgtcaaaaggtgaagcatcaaaggatgaagttgccatgctaatggatgttacaaaacaaattgaaggacatacaatatgcgcttttggtgaaggctcagcttggcctgtacaaggattactaagaaattttaaaaaagaaattgagaagaaaaataactttagtccaattgtaaaacaaaataaaaatataccttatttaattgatcaacatttattagataaaaaaaatgcttaaa

SEQ ID NO: 221831 - DNA, 820 bp, Unknown
  Bacterial polypeptide expressing nucleotide sequence isolated from the Sargasso Sea
atgcccaaaataattataaataataaagaaatagattttgaagaaggcatgaccgttctacaggcgtgtgaattagctggagtagagattccaagattttgttatcacgaacgtttatctatagctggtaactgcagaatgtgtttggttgaaatggaaaaatcttctaaacctatcgcttcatgtgctatgccagctactgaaggaatgaatattaagacgaatacccttatggttgaaaaagcaaggaaaggagtaatggaatttttattggccaatcatccattagattgtccagtctgcgatcaaggaggggaatgtgatttacaagatcaatcactttattatggatttgataaatcaagatttaaagaaaacaaaagagaagtaaaagacaaatacatgggcccattaattaaaactataatgacaagatgcatacattgtacaaggtgtattagatttgcaaccgaagtaggaggagtaactgaacttggagctattggtagaggtgaaaatatggaaataactacatatttagaaaaatcaatggagtctgaactttctgcaaacgtaattgatctttgtccagtaggagctttaacttccaaaccatatgcttttgaagcaagaccgtgggaattaaaaaaaacagagaccatcgatgtaatggacgcagttggatctaatattagagtcgatacttacggttgggaggtaaaaagaattttaccgagattaaacaataatattaatgaagaatggatttcagataaaacaagatatgcttgcgatggtttattaaaacagagattagaca

SEQ ID NO: 221832 - DNA, 556 bp, Unknown
  Bacterial polypeptide expressing nucleotide sequence isolated from the Sargasso Sea
aatgagtattcctctcagagaactaatagaaactcatgctggtggtgtaattggaggttgggaaaatttgcaagctgttatacctggtggttcatcaatgccactaatcccaaaagataaatgtgaaactttaaatatggattttgactctttgatggctgaaaaaagtggactaggaacagcaggtgttgttgtaattaataaagatcaagacataatcaaatgtatggcaagaattgctaggttctataaacatgaaagttgtggccagtgcactccatgtagagagggatcaggttggatgtggagaatgcttgaaagaatggcaaaaggtgaagcttcaaaagatgaagtagaaatgctaggtgatgtaacaaaacaaattgaaggacatactatttgtgcatttggtgagggctcatcgtggcctgttcaggggttattgagacattttaaagatgaaattaaaaaacgtaatagatttgatccagttgtaaaagataataagaatattccttatttagtggatcaacacttattagataaaaatgcttaa

SEQ ID NO: 221833 - DNA, 238 bp, Unknown
  Bacterial polypeptide expressing nucleotide sequence isolated from the Sargasso Sea
accagcacttcgaaaagtttatgatcaaatgcctgaaccgcgctgggtaatatcaatgggttcttgtgcaaatggaggaggttattaccattactcatattcagtagttagaggatgtgatagaatagttccagtagatgtttatgttccaggctgtcctccaactgctgaggcactggtatatggaatacttcaacttcaaaaaaaaataagaagagaaaataagtttaaaagatag

SEQ ID NO: 221834 - DNA, 715 bp, Unknown
  Bacterial polypeptide expressing nucleotide sequence isolated from the Sargasso Sea
aatgccaaaaattattattgataataaagaaataaactttgaaaatggaatgaccgtaatgcaagtctgtgaacttgctcaaaaagagatacctcgtttttgttatcatgataagttgtcaattgctggtaattgcagaatgtgtttggttgaaatggataaatctccaaaaccaatagcatcttgtgcaatgcctgcagcagaaggcatgataataaaaactaatacagacttagtaaaggaggcaagaaaaggagtaatggaattcttgttaattaaccatcctcttgattgtccgatatgtgatcagggtggagaatgcgatttgcaagatcaggcacttcattatggatttgataaatcaaggtatgaagaaaataaaagggccgttcaaaataaacatatgggtcctttagtaagcactattatgacaaggtgtatccactgtactaggtgtgttcgtttttctactgaggtggcaggagttgatgatttaggtttgctagggagaggtgaaaatgctgaaattactacttatttagaaaaaactattaagtcagagttatctggaaatgttattgatctttgtcctgttggagctttaacaaacaaaccttatgcttttcaagcaaggccttgggagcttaagaaaacagaaactatagatacttttgatggtctaggtgcaagtataagaatagatagtagaggaaag

SEQ ID NO: 221835 - DNA, 261 bp, Unknown
  Bacterial polypeptide expressing nucleotide sequence isolated from the Sargasso Sea
aacatgaaagttgtggtcaatgcacgccatgcagagagggaacgggttggatgtttagaattatggaaaaaatgatatatggaaatcttcatcttcgagatattgacaaactattgtctgttacaaaacaagttgagggacacaccatatgtgccttaggagatgcggctgcttggcctattcaagggttaattagacattttagggatgaagttgaaaaaagaataaaagaaaacaataataatagagaagtagcttaat

SEQ ID NO: 221836 - DNA, 824 bp, Unknown
  Bacterial polypeptide expressing nucleotide sequence isolated from the Sargasso Sea
aatgatctcaaagaagcagaaggaagccgtcaccatcaacctcgatggcaaggaagttgaggtgcctgcgggcgttaatctcatcgaggccgcggccctgcacggtaaggagatccctcattattgctatcatccccagctcagtgttgccgggaattgccgcatgtgcctggtggaaatgggaaccccgatgagggaccgcggttcgggagagcctattctcgaggaagacggttcccccaagatcggctgggttcccaagcccgtcatcggctgcgccaccgacgtcatccccggcatgcacgtcaagaccgagtccgagacggtcctcgattgcagggagagcatcatggagtttctgctcgtcaatcatccccttgactgtcccatttgcgaccaggctggggagtgcaggctgcaggagtttgccaccgactacggccgaggctacagccgctacgaggagcggaagaacgtcaagcccaagcgaacccgccttgggccccgcgtcaccctggacgatgagcggtgcatcctttgctcccgttgcatccgtttttgccaggaggtggcggacgacgacgtccttgggttcgtcgaccggggaagcttttccaccctcacctgctttcccggccgggaattgtccaataattattcgctcaacacggtggacttgtgtcccgtgggagcccttacgagctcggatttcaggtttcagatgagggtctgggtcctcaaaggaacccccagcatctgcccggaaagcagtgccggtttgcacactctggtttcaagtcgggagggtgaaatctaccgtatta

SEQ ID NO: 221837 - DNA, 754 bp, Unknown
  Bacterial polypeptide expressing nucleotide sequence isolated from the Sargasso Sea
aatgcttaaacttaaagtaaatgatatcgatgttgaggtagaagaaggaaccacagtattgcaagcttgtgaacaagctggagcagagataccaaggttctgttatcacgaaaaattatctatagctggaaattgtagaatgtgtttagttgaaatggaaaaatctcctaagccaatagcctcttgcgctatgcctgctgcagaggggatggtacttaaaaccaatactgaaaaagtgaaaaaagccagaaaaggtgtaatggaatttttattagcaaaccatccactagattgtccagtatgtgatcaaggtggggaatgtgatttacaagaccaatccatgtattacggaattgataaatcaagatttaaagaaaataaaaggtatgtgcctgaaaaatatatgggtcctctaattaaaactcaaatgacaagatgtattcattgcacaagatgtattagatttgcaacagaagttgctggcgtaccagaactaggagcaattggcagaggtgagaacatgcaaatcaccacttatttagaaaaagcgatggagtctgaactctcagctaatgttattgatttatgtcctgtcggagcacttacatcaaaaccttatgtcttcgaagctagaccatgggaacttaaaaaaactgagacaattgatgtgatggatgctgttggatcaaatataagagtagatacgtatggttgggaggttaaaagagttcttccaagattaatgaggaaataa

SEQ ID NO: 221838 - DNA, 550 bp, Unknown
  Bacterial polypeptide expressing nucleotide sequence isolated from the Sargasso Sea
atgggaatatctttaaaagaattaattgataaacacgcaggtggagtagtgggaggttgggataatttaaaggcggtcattccaggaggatcttcaatgcctcttttgccaaaaaatatatgtgaaacaattactatggattttgacactttaatgaaacataaaagtggtttaggtacagctggcattatagtaatcaataaagatcaggatatcattaaatgtatggctaggattgcaagattttataagcatgaaagttgtggacagtgcaccccttgcagggaaggttcagggtggatgtggagaatgttggaaagaatggccaaaggagaagcttcacgagaagaagttgatatgttgatggatgttacaaaacaaatagaaggacatactatttgtgcttttggagaaggatcagcatggccagtgcaaggtttattgagacattttaagaaagaagtttctaaaagaaatgattttaatccattagtcgatagaaatagaaatattccatatttagtagaccagcatttgttagaaaaataaa

SEQ ID NO: 221839 - DNA, 543 bp, Unknown
  Bacterial polypeptide expressing nucleotide sequence isolated from the Sargasso Sea
tttggatatttatattcattacggtgcaggagcatatatttgtggagaagaaacagcattattagagagtatcgaaggaaaaaaaggacagccaagacttaaaccgccctttccagcactaataggattatacggatgtcctactataattaataacgtcgaaacaatttcagttgtaccaacaattttgagaagaggtgccaaatggtttgcctcattgggtagagaaagaaatactggaactaaaatttattgtatttctggcaatgtaaataatccttgtaatgttgaggaagaaatgggtgttcctttaaaagatcttatagagaaacatgctggaggagtagttggtggctgggataatcttaaagcagttattcccggaggatcttcaatgccattgttgccaaaaaatatttgtgacaatataaaaatggattttgatgcatgtgtagaaaataaaacaggattaggtacagctggtatagttgtcataaataatgaccaggatattattaaatgtatggcaagaattgcaagatt

SEQ ID NO: 221840 - DNA, 229 bp, Unknown
  Bacterial polypeptide expressing nucleotide sequence isolated from the Sargasso Sea
aatggcaaaagaaaaaaaaacactaaatttaaattttggaccacaacatcctgcagcacatggagttttaagattaatacttcaattagatggagaaattgttgaaaaagccgatccccatataggattattacaccgaggcactgagaagttaatagaaaacaaaacttatatccaagcagttccttattttgatcgtcttgattatgtagcaccaatgaatcaagag

SEQ ID NO: 221841 - DNA, 991 bp, Unknown
  Bacterial polypeptide expressing nucleotide sequence isolated from the Sargasso Sea
gcatgcgaattagctggagctgaaattccaagattttgttatcatgaaaaactttctatagctggaaactgtagaatgtgtcttgtgaaattagaaaaatcaccaaaacccgttgcttcttgtgcaatgcctgctgcagatggaatggtaattaaaacgaatacagaaaaagttgaaaaatctaggaaaggtgtaatggagtttcttcttgctaatcatccacttgattgtcccgtctgcgatcaaggtggtgagtgtgatcttcaggatcaatcaatgttttatggaattgataaaagtagatttaaagaaaacaaaagatatgtacctgaaaaatatatgggaccattgattaaaacccaaatgacaagatgtatacattgtactcgctgtataaggtttgcaactgaagtagcaggtgttcctgaattaggagctattggaagaggtgaagatatgcaaatcactacttatctagaaaaagcaatggagtctgaattatcagctaatgttattgatttatgtccagttggggcattgacctcaaaaccgtacgtattcgaagcaagaccctgggaattaaaaaaaacagagactatcgatgttatggatgcagttggatcaaatattagagtcgacacgtatggatgggaagtaaaaagagttttaccaaaaattaatgaagaaattaatgaagaatggatatcagataaaaccagatacgcctgcgatggtttaaaaaatcaaaggttagatgtaccatattttaaaacaaaaaataaatttgaaaaaatatcatggaaagagtcctatttaaaaatatttgataaaatttctaaagcaccctcggcaaaaattgcaggtattacaggtgatatgataaatatggagtctttatttgcgattaaagaattttttgaaaaaactattaaatcaaaaaatctagattcaagaagtgaaaatttttatgtaaattcaaaaaatagaagca

SEQ ID NO: 221842 - DNA, 852 bp, Unknown
  Bacterial polypeptide expressing nucleotide sequence isolated from the Sargasso Sea
aagattttgttatcatgaaaaattatctatcgcaggaaattgtagaatgtgtttagtagaaatagaaaaatctccaaaacctgttgcatcttgtgctatgccagttactgaaggcatgaatattaaaacaaatactagtatggtagaaaaagctcgaaagggtgtaatggaatttttgttagtaaatcatccattagattgtccagtttgtgatcaaggaggtgaatgtgatcttcaagatcagtcaatgttttatggtgtagataaatctaggtttaaagaaaataaaagatatgttcctgaaaaatatatggggcctttgataaaaacacaaatgacaagatgtatacactgcacaagatgcattagatttgcaactgaggttgcgggtgtacctgaattaggagcgataggaagaggtgaaaatatggaaattactacatatttagagaaagcaatggaatcagagttatcagcaaatgtaatagatctttgtcctgtcggtgccttaacatcaaaaccatatgtatttgaagctagaccttgggaaataaaaaaaactgagtcaattgatgtaatggatgctgtaggatcaaatataagagtagacacttatgggtgggaagtaaaaagaatcctcccaagaataaatgatgatatcaatgaagaatggatttctgataaaacaagatatgcctgcgatggcctcaaaaatcaacgtttagactcaccatttgtaagggaaggagacaaatttaaaaaaatttcttggaaagaggcttatagtattttgaaattaaaattagaaaatattagttcagataaaataggttgttttacaggcgatttaac

SEQ ID NO: 221843 - DNA, 547 bp, Unknown
  Bacterial polypeptide expressing nucleotide sequence isolated from the Sargasso Sea
aatgcttgaagataaagatagaatttttctaaatttatataacgatctaggctcagatctatcttcagctaaaaaaagaggtgactggagtaacactaaagatatttgtgaaaaaggaagagattggataattaaggaaattaaagactcacaacttagaggaagaggaggagctggttttccaacaggtttgaaatggtcttttgctcctaaagaagttggatccaggccgcattattttgttattaatgcagatgagtcagaacctggaacatgtaaagatagagatattttaagatttgaacctcataaattaattgaaggttgtttaattgcttcatatgcagttaatgcgcatgtatgttatatttatattagaggtgaatacctaagagaaggcaataaattgcaaaaagccattgatgaagcttacaaggatggattaattggaaaaaattcttcaggtacaggatgggatttagatatttatatacattatggtgcgggtgcatatatttgtggagaagaaacagcattactagagagt

SEQ ID NO: 221844 - DNA, 839 bp, Unknown
  Bacterial polypeptide expressing nucleotide sequence isolated from the Sargasso Sea
gatggatgcgccgaccaccgtgacggtcgtcatcaatggccgtgaagttcacgccgaacccggaagcatgattattgaagccgcggacgcggccaatatttacatcccgcgcttttgttatcacccaaaactgtcaattgcggcgaattgtcgcatgtgtctggtcgaggtagaaaaggcgcctaaacccttgccggcgtgtgccactcctgtggccgacgggatggtcgttcaaacgcgatcagccactgcggtcgaggcacagcaggggacgatggaatttctgctgatcaaccacccgcttgactgccctgtatgtgatcaaggcggggagtgccctcttcaggatcaggccatgggatacggtcaggattcttcccgatacgaggaagaaaaaagggccaagccgccgttggatcttggcccccttgtcgcgacggcgatgactcggtgtattcactgcacgcgatgtgttcgattcggacgagaaattgctgggacgatggagttgggtgcgacgggtcggggcgaggatatgacgatagaaacctacctcgatggctccgtcgacagcgaggtctcaggaaatattattgatctttgcccggttggggcattgacttcaaaaccctaccgattttctgcgcggccctgggaactattcagccatgaaggtatcagtcctcacgacagccttggcaccaacatcacgctacagacggctcaccagtctgtgaagcgcgtagttccccgaaacaacgagaaaatcaacgagtgctggatctcagatcgggacaggttcgcttacgaaggcgcagagtgtgacgatcggctgaccc

SEQ ID NO: 221845 - DNA, 463 bp, Unknown
  Bacterial polypeptide expressing nucleotide sequence isolated from the Sargasso Sea
atgcctttactgccaaaaaaaatatgtgaaactatcaaaatggattttgactctcttgtagaaaataaaagtggtttgggaactgcaggaatagtggttatcaataaagatcaggatattgtttcatgtatggcaagaatagcaagattctataaacatgagagctgtggtcagtgtaccccatgtagagaaggttcaggctggatgtggagaattttaaacagagcaacaaagggcgagacaacgttaagtgatattgatttattagaggatgtaacaaaacaaattgaaggccatacaatttgtgcttttggtgaaggttcagcttggcctgttcaaggattgttgagacattttagaaaagaaattgataaaaaatgtagcaatgaccctcttgtaaaaaagaaaaaagatgtgccttatttagttgatcaacatttacttgaaaaaaaaaatgcctaaa

SEQ ID NO: 221846 - DNA, 353 bp, Unknown
  Bacterial polypeptide expressing nucleotide sequence isolated from the Sargasso Sea
tcaagatattgtttcttgcatggcgagaatagcaaggttttataaacacgaaagttgtggtcagtgcactccttgtagagagggatcaggctggatgtggagaattttagatagagcaacaaaaggagaaacaactttaagcgatatagatttgttagatgacgttactaaacaaatcgaaggccacacaatctgtgcttttggtgaaggctcagcttggcctgttcagggattactgagacattttagaaaagaaatcgataaaaaatgtagtaatgaccctctaataaaaaagaaaaaagaggtaccttacttggttgatcaacacttattagaaaaaaagaatgcctaaa

SEQ ID NO: 221847 - DNA, 823 bp, Unknown
  Bacterial polypeptide expressing nucleotide sequence isolated from the Sargasso Sea
atggcaaaagaaaaaaaaacactaaatttaaattttggaccacaacatccagcagcacatggagtcttaagattaatacttcaattagatggagaagttgtagaaaaagccgatcctcatataggattattgcatcgaggtactgagaagttaatagaaaataaaacttatatccaagcagttccttattttgatcgtcttgattatgtagcaccaatgaatcaagaacatgcatttgctttagctatagaaaaaattcttaaaatcgaagttcctgagagagcgaaatatataagagttattttctgtgaaataggacgaatattaagtcacatattaaatgtaactactcaagcaatggatgtcggtgcacttacaccaacgttgtggggttttgaagaaagagaaaaattaatgggattttacgagagggtatcaggatcaaggttgcacgctaattattttagagcaggtggagtacataaagatttgccttcaggacttgacagtgacataagtgaattttgcgaaaaattcccaaaaattattgatgatttagaaactttacttaccgataacagaatatttaaacagagaaatgtagatataggaattgtatccaaacaagatgcattagattattctttttcaggagtaatgttaagaggctctggtgtagcttgggatttaagaaaaagtcaaccttatgatttatatgacgatttagaatttaaaattcctgttggaaaaaatggagattgttatgacagatatctttgcagaattgaagaaatgagagaaagcgtaaaaattattaaacagt

SEQ ID NO: 221848 - DNA, 232 bp, Unknown
  Bacterial polypeptide expressing nucleotide sequence isolated from the Sargasso Sea
ttaagaaaagtttatgaccagatgcctgaaccgagatatgtgatttctatgggcagttgtgcaaatggaggcggttattatcactattcatattcagttgttagaggttgcgatcgtattgttcctgtagatgtttacgtaccaggatgtccaccatcagcagaagctctgttatatggaattcttcaattgcaaaaaaaaattagaaaaaaaggatcttttattagatagt

SEQ ID NO: 221849 - DNA, 904 bp, Unknown
  Bacterial polypeptide expressing nucleotide sequence isolated from the Sargasso Sea
ttgcgtggtgagttcattaatgaacagagagaagcattttgtaatgctttagatgaagctcttaaacataatctcataggaaaaaatatactgtcatcaaaaatatctatagatcttcattgtttgttaggtgccggggcatatattgtaggtgaagagacagctatgctagaatcaattgaaggtaaaagaggaatgccaagaactaagcctccctttccagcagtaaaaggattatatggtaagcctacgatcattaataatacagaaaccttagcatcagttccaaaaataatgcttaaagataacaattggtataaaaatttaggagaaggtgattcagagggcattaaaatcttttgtatgagtggtcatataaataaaccaggcaactttgaaattcctctcggaactgagtttaaaactcttttaaatatggctggaggtgttaaaaatgatagaaaacttaaagcagttatacctggaggatcctctgtaccagttataaaaggtgatgatatgcttaaacttaaaatggattacgactcaataagtaacgctggttctatgttagggtctggaggagtgattataatggatgagacgacttgtatggttagtgtgctccacagaatttcaaggttctattatgaggagtcctgtggtcaatgcactccttgtagagagggcacaggttggcttcatagaatactcacaaatatactttcaggaaagggatcgattgaagatttaaatcaactaaatcgtattgcaaatcaaatcgaaggacattgtatttgtgctctgggagatgcagcagccatgccagtcagaagttttttacaacatttttgggacgagtttgaattttacgttgataaaaagaaatcattggtgtcataaa

SEQ ID NO: 221850 - DNA, 697 bp, Unknown
  Bacterial polypeptide expressing nucleotide sequence isolated from the Sargasso Sea
atgccaaaggttattgttgatggaattgaagttgaagtcccagagggctcgactgtgcttcaggcctgtgaagcggcaggtaaagaaattcctcgcttttgttaccatgatcgtctctcaattgctggaaattgtcgaatgtgcctggttgaggtttcaccagggcctcccaaacctcaagctagctgcgccctccccgcaatggataaccaggaaataaaaacgaatagcgaaatggttgtatccgctcgaaaaggagtaatggagttcttactcattaatcatcccctagactgccctatttgtgaccagggtggggaatgcgacctgcaagatcaagctatggggtacgggaacgatgcgacaagataccttgagcaaaagagagcagtaactagcaaagaaatgggccctcttatcaaaacaataatgacgcgttgtattcattgcacccggtgtgtgaggttttcgacggaggtcgctggcgtaactgatatgggggccttgggtcgtggtgagtccatggagattacaacttacctggaaaaagcgctagaatcagaactatctggtaacgtaatagatttgtgtcctgtcggagcattaacatcgaagccttactcctttgtttcaaggccttgggaattaaagaagactgaaacaatcgatgtgatggatgctataggttcaaatattc

SEQ ID NO: 221851 - DNA, 661 bp, Unknown
  Bacterial polypeptide expressing nucleotide sequence isolated from the Sargasso Sea
aatggctggtctatatggttgtcctaccactgttaacaatgttgaatctatcgctgtagtacctacaatactgagaagaggtgcttcttggttttcaaaatttggtagagcaaacaatactggtactaaattattttgtttgtctggtcatgttgaaaaaccttgtgttgttgaagaagaaatgtctattcctctaaaagagcttattgaaaaatacgctgggggtgtaataggtggttggaaaaatttaaaagcaattatacctggtggatcttcagttccactattaccagccaaattatgtaatgatgctcttatggattttgattggcttagagaaaaccaatctggactaggaactggcgctgttatagttatgaattctgatacagatattgtaaaagctatttggagattgtcgaaattttataatcacgaaagctgcggtcagtgcaccccttgcagagaaggtactggttggatgatgcgacttatgaataggttagttactggagatgcaaatttagaagaggttgaaaacctattggagataactaaacaagttgaagggcatacaatttgtgcattaggtgatgctgctgcatggccaattcagggtctttttaggcattttaggcatgagatcgaggacagaaattaa

SEQ ID NO: 221852 - DNA, 730 bp, Unknown
  Bacterial polypeptide expressing nucleotide sequence isolated from the Sargasso Sea
tggcctatatggatgcccaacaataattaataatgttgaaactatagcagtagtgccgactattcttagaagaggtggaaaatggtttgcatctttaggaagagaaaaaaatactggaactaaaatattttgtatatcgggtaatgtgaataatccctgtaatgttgaagaagaaatgaatattcctctgaaagaattaatcgaagtccatgcaggaggtgttattgggggttgggataatttaaaagctgtaattcctggtggatcctcaatgccattaataccaaaagacaaatgtgaaacattaactatggattttgactcgctaatggaagagaaaagtggattagggacagcaggcgttgttgtaattaacaaagatcaggacatcattaaatgtatggctagaattgcaagattttataagcatgaaagttgtggacagtgcaccccttgtagagaaggatcaggctggatgtggagaatgcttgaaagaatgtcaagaggagaagcatctaaagatgaaatagaaatgttaggtgatgtaacaaaacaaatagagggacatacaatttgtgcttttggtgaaggatcatcttggcctgtccaaggcttattgagacattttaaagatgaaatcaaaaaaagaaataaatttgacccgattgttaaagaaaataaaaatattccatatttagtagatcaacatttactggacaaaaatgcttaa

SEQ ID NO: 221853 - DNA, 317 bp, Unknown
  Bacterial polypeptide expressing nucleotide sequence isolated from the Sargasso Sea
tttttataaacatgaaagttgcggtcaatgcaccccttgtagagaaggctgtgggtggatgtggagaatgctagaaagaatagctgagaaagatgcaacctacaaagaaatagatctcttacacgatgttactaagcaaatagaaggacacacgatctgtgcttttggtgagggtgctgcttggcctgttcagggtttgcttcgccactttaggaaagaaatggagaaaagaagtcatgaagaaccattagttaagaaaaaaactaatatcccttatcttatcgatcaacatttattggagaaagatagtgcctaag

SEQ ID NO: 221854 - DNA, 535 bp, Unknown
  Bacterial polypeptide expressing nucleotide sequence isolated from the Sargasso Sea
atgcttaaagatcaggaccgtatttttacgaatatttatggatggacagaccccggtcttaaggccgcaaaggcccgcggtgattgggatggcactgcaaagttattgaagcttggtcatgatgaaattgtcgaacgaatgaaggcttctgggttgcgcgggcgtgggggcgctggattcccaacaggtcttaaatggtcatttatgccgaaagaggtcaaggagcggccgcattatctggtggtaaatgccgatgagtcagaacctggcacatgcaaggaccgggatattattcgtcacgaaccgcataaactgctcgaaggctgtttggtagctggttttgcgatgcgcgcgcatgcggcttacatttatattcggggcgaatttgtgaatgaagcacgcaggttgcaagcggcgattgacgaagcttatgatgctggcctgcttggcaaaaatgcggcaaaatccgggtgggattttgatattcatctgcaccgcggtgcgggggcgtatatttgcggtgaagaaacggctt

SEQ ID NO: 221855 - DNA, 985 bp, Unknown
  Bacterial polypeptide expressing nucleotide sequence isolated from the Sargasso Sea
ttacggttctacagcatgtgagaaagctggagcagaaattcctagattttgttatcatgaaaaattatctatagcaggtaactgtagaatgtgtttggttgaaatggaaaaatctccaaaaccaattgcttcttgtgcaatgccagctgcagatggcatgaatattaaaaccaacactccttttgttgaaaaggctcgaaaaggagtaatggaatttttgttagcgaaccatccattagattgcccagtttgtgaccaaggtggtgagtgtgaccttcaagatcagtctatgttttatggggtagataaatcgagatttaaagagaacaaaagaactgtaccagaaaaatatatgggaccattaattaagacccaaatgacaagatgtatacattgtactagatgcgtaagatttgcgactgaagttgctggagtgtctgagttaggagcaattggcagaggagaggatatgcaaattacaacttatttggagcagtcaatgcaatcagagttgtcagcaaatgtgatagatctttgtccagtgggtgctttaacttcaaaaccttatgtttttgaggcaagaccatgggagcttaaaaaaacagaaactgtcgatgtgatggacgctgttggatcaaatgtaagagtagatacatatgattgggaagtcaaaagagttttgccaataattaatgaagatataaatgaagagtggatttcagataaaacaagatacgcatgtgatggtttatcaaatcaaagactagatacacctttaattaaatataatggtaaatttgaaaaagcatcttggagtgaagtatttaagattattaaatcaaaatttgaaaattcatcaaatgataaagtttgcggtttcgttggagatctgaccaacatggagacaggttatatttttaaagagttttttgatagaacttttaacataaatactatgactcaaggtcagataacagatttttag

SEQ ID NO: 221856 - DNA, 877 bp, Unknown
  Bacterial polypeptide expressing nucleotide sequence isolated from the Sargasso Sea
atgattaaattaaaaattgataacaagaacatagaagttgaacctggaactacaattttacaagcgtgtgaaatagctggtaaagaaattccaagattttgttatcatgaaaaattatcgatagcaggtaattgcagaatgtgcttagttgaagtatcaggttcaaaaaaacctgtagcttcatgcgctatgcctgcagtcgatgggcaagaaataaaaactaactctgaaatggttaaaaaagctcgagaaggagttatggaatttttattagtaaatcatccattggattgtccaatttgtgatcagggtggagaatgtgatttgcaggatcaagcatttaattatggtggaggcaaatcgcgatacgaattaaacaaaagatcagttaaagaaaaaaatatggggccgttgataaaaactcatatgaatagatgtatacattgtacaagatgtattcgttttgcagaagagatagcaggtgtagaggaattaggagctattaatagaggtgaaaacatggaaatttctacttatttagaaaaagctgttacatcagaattttcggctaatttaattgatttatgcccagttggagcccttacttctaaaccttatgcttttgaagcaaggccatgggaacttaaaaaaacagaatctgtagatgtaatggatgctattggctcaaatattcgaattgatagcaaaggatgggaagtaaaaagaattttaccaaaaatcaatgaagatataaatgaagagtggatttctgataaaaccagattcgcatgtgacggattattaaataacaggatagatagcccttatataaaaattaatggtaaattagttgcaacctcttgggatagtgctttga

SEQ ID NO: 221857 - DNA, 130 bp, Unknown
  Bacterial polypeptide expressing nucleotide sequence isolated from the Sargasso Sea
catggccactatccacgtagacggcaaagcgctcgaagtcgatggggcggacaacctgttacaggcatgtctgtcactcggcctcgacatcccgtatttctgctggcaccccgctctcggtagcgtcggt

SEQ ID NO: 221858 - DNA, 274 bp, Unknown
  Bacterial polypeptide expressing nucleotide sequence isolated from the Sargasso Sea
gatgattgttgctggcacattaacaaataaaatggctcaaccattaagaaaagtttatgaccagatgcccgaaccaagatatgttatttctatgggcagctgtgctaatggaggtggttattatcattattcatattctgtagtcaggggatgtgatcggatagttccagtagatatttatgtaccaggatgcccacctacagcagaagctttgctctatggtattttacaactacaaaagaaaatcagaagagaaggcaatttaaaaagataa

SEQ ID NO: 221859 - DNA, 574 bp, Unknown
  Bacterial polypeptide expressing nucleotide sequence isolated from the Sargasso Sea
gggcaccaagcttttcaatatctccggccacgtgaacacgccgtgcactgtggaggaggaattgggaattcccatgaaagagctgattgagaagcatgctggaggtgtacgtggcggctggaacaatctgttagcggtaatcccgggtggggcctcggtgccggtgttgaataaggaacattgtgacacggtgactatggactatgacgcgctgcgagaactgcgctccggtctcggaacagccgccgttatggtcatggataaatctacggatatcgtccgggcgatcacccgtttatcggccttttacaagcatgaaagttgtggccaatgcactccgtgccgagaggggacgggctggatgtggcggatgatggaacgtatctgcaatggcgaggcgacactccaggaaattgatcttctggaagaggtcacctaccatatcgaaggccacactatctgtgctctgggcgacgcggcggcctggccaatccagggcctgatccgtaccttccgtcctgaaatggaacgacgaatcacacagtcgcccgtcaagaccgaccgggcggcctga

SEQ ID NO: 221860 - DNA, 834 bp, Unknown
  Bacterial polypeptide expressing nucleotide sequence isolated from the Sargasso Sea
ctgtgaggaagctggccttgaaatacctagattttgttaccatgatcgattgtctatagctggtaattgtcggatgtgccttgtagacgttgaaggcgctccaaaaccggtagcatcttgtgcaatgccaataaatgaaggcatgtctatccatacaaatacccaaacagttaaaaaagctcgagaaggtgttatggagtttcttctcataaaccacccacttgactgcccggtttgtgatcagggaggtgaatgtgacttacaagatcagacagttgcatttggacctgaaaactcaagatttaatgaaaataaaagatcagttgatgaaaagcacatgggtcctctcattaaaacatacatgacccgttgtattcattgtactagatgtattcgatttggcgacgaggttgccggtgttaatcaattgggtgcgcttaataggggtgagaacatggagataacaacttatcttgaaaaaacacttgactctgaactatctgccaacattgtggatctttgtcctgtaggagcgttaacttctaaaccttatcaatttgaagcaagaccatgggagctaaagaaaacagagtccattgatgtaatggatgctgtaggttcaaatataagagtagatacgtatgggtggaaagttaaaaggatcctgcctgtattaaatgaagacattaatgaagaatggatctctgataagactcgttatgcttgcgatggactattaacacaacgcattgacacgcctttaattaaaaataatggaaagtttgtagaaagtgattggaatgagtcacttttaaaagttacagaactttttaa

SEQ ID NO: 221861 - DNA, 514 bp, Unknown
  Bacterial polypeptide expressing nucleotide sequence isolated from the Sargasso Sea
aaaagatttaattgaaaaacatgcaggtggtgttgtaggtggatgggataatcttaaagcagtaatacctggaggttcctcaatgccgctattgccaaaagatatttgcgatacaataaaaatggattttgatgcatgtgttgaaaataaaacaggactgggtacagctggcatagtagttattaataatgatcaagacattatcaaatgcatggcaagaattgcaagattttataaacatgaaagttgtggtcaatgcacgccttgtagggaaggatctggatggatgtggagaatgctagaaagaatggctaaaggagaagcgtctagagaagaggttgatatgttaatggacgttacaaaacaaatagaaggtcatacaatttgtgcatttggagaaggatcagcatggccagttcaaggattgctgagacatttcaaaaaagaaatagaagaaagaaataattttaatccattaataaacactggtcaaaaaaatccatatttagttgat

SEQ ID NO: 221862 - DNA, 313 bp, Unknown
  Bacterial polypeptide expressing nucleotide sequence isolated from the Sargasso Sea
ttataaacatgaaagctgtggtcaatgcaccccatgtcgtgagggcgcaggatggatgtggcgaatattggatagagttgtaaaaagaaaagccacttttagtgatattgatttattagcagatgttacaaaacaaatagaaggtcatacaatttgtgcttttggagagggctctgcttggccagtacagggattattaagacactttagaaaagatattgaaaatcgttgcagagaggagccattaattaaaaagaaaattgataatccttatttagttgatcaacatctcttggagaataagaatgcctaa

SEQ ID NO: 221863 - DNA, 647 bp, Unknown
  Bacterial polypeptide expressing nucleotide sequence isolated from the Sargasso Sea
aatgcctaaaattataattaatggaaaagaaatagaattcgaaaaaggtatgacagtcctccaagcttgtgagctagcagaagtagaaataccaagattttgttatcatgagaaattatctattgcaggaaattgtagaatgtgcctggtggagttagagaaatcaccaaaacctattgcatcatgcgcaatgcctgctgctgagggtatgaacattaaaacaaacacttcctttgttcaaaaagcaagaaaaggtgtcatggaattcttacttgctaatcatcccttagactgtcctgtttgtgaccaaggaggtgaatgcgatctgcaagatcagtcaatgtattacggtgtagataaatcaagatttgttgaaaataaaagacaagttagagaaaaatacatgggtcctttaatcaaaactcaaatgactagatgtattcactgcacaagatgtgtgagatttgctaccgaaattgccggggttccagagcttggagcaataggtcgtggagaaaatatggagataactacttacttagaaaaagctatggaatcagaactttctgctaatgtaattgatttatgtcctgtaggcgctctcacatcaaaaccgtatgcattcgaagctcgaccatgggaactta

SEQ ID NO: 221864 - DNA, 648 bp, Unknown
  Bacterial polypeptide expressing nucleotide sequence isolated from the Sargasso Sea
aatgcttaaattaaaagttaatgatatcgaagtagaagttgaagaaggtttaacagtattacaagcttgtgaattagctggtgtagaaattccaagattttgttatcatgagaaactttctattgctggaaactgcagaatgtgtttagtggaaattgaaaaatctcccaaacctattgcctcttgtgcaatgccagctgcagatggaatggttattaaaactaatacagaaaaaatagaaaaatctagaaaaggagtaatggaatttcttcttgcaaatcaccctttggattgcccagtatgtgatcagggtggtgaatgcgatcttcaagatcaatctatgttttatggaattgataaaagcagatttaaagaaaataaaagatatgtacctgagaagtatatgggtccattaattaagactcaaatgactagatgtattcattgtactagatgcataagatttgcaactgaaatagctggagtacctgaactaggagccattggaagaggcgaagatatgcaaattacaacttatcttgaaaaagcaatggaatcagaaatgtctgcaaatgttatagatttatgcccagttggggcattaacctcaaaaccttatgtgttcgaagcaagaccctgggaattaaa

SEQ ID NO: 221865 - DNA, 592 bp, Unknown
  Bacterial polypeptide expressing nucleotide sequence isolated from the Sargasso Sea
ttgggaaatcctaaaaatactggtacaaaaattttcagtatatcaggtcatgttaataatccttgtaatgttgaagaagaaatggggatatctcttagaagtttaattgaaactcatgcaggcggagtaattggaggttgggataatttattagctgtcatacctggaggagcaagtgtgcctttaatccctaaagatatttgtgataatataaaaatggattttgatagtttaaaagatgtacaaagcgggcttggtacggcagcagtaatagtaatgaataaaagcactgatatcatagaggcaatttcaagattatctcatttttacaaacatgaaagttgtggccaatgcacaccatgcagagaaggtacaggatggatgtttagaatgatggaaaaaatgaaacatggaaatgcaaataaaaacgacattgataaattattaaatgtaactaaacaagttgaaggacataccatttgtgccctaggtgatgcagctgcatggcctattcaaggtttgatgagacattttagagatgaaattgaaagaagaattaaagattataataataaaattgaagctgcctaat

SEQ ID NO: 221866 - DNA, 292 bp, Unknown
  Bacterial polypeptide expressing nucleotide sequence isolated from the Sargasso Sea
atgtacactcctgacaatatttttactacaactatagataaagctgtcagatggtcaaggactcagtcaatgtggccagtcacatttggtctagcatgctgtgctattgaaatgatggcagctggaagtgctaaatatgacctagcaagatatggaatggaagtttttagagcatcaccccgacaagcagacttgatgattgtagctggaagagtatctcaaaaaatggcaccagtattaagacaagtttatgatcaaatggctgatcctaaatgggtaattgctatgggcg

SEQ ID NO: 221867 - DNA, 178 bp, Unknown
  Bacterial polypeptide expressing nucleotide sequence isolated from the Sargasso Sea
atggcaaaagaaaaaaaaaaattaaatttgaactttggaccgcaacacccagcagctcatggagtcttaagattaatacttcaattagacggagaagttgttgaaaaagctgaccctcatataggtttattgcacagaggaacagaaaagttaatcgagaataaaacttatactcaag

SEQ ID NO: 221868 - DNA, 526 bp, Unknown
  Bacterial polypeptide expressing nucleotide sequence isolated from the Sargasso Sea
catggctggaggtgtaattggtggctggtataatcttcaagcagtaatcccaggaggctcatcaatgccattactgtcaaaaaaaatctgtgatacaattacgatggactttgacgcattaatagcaaataaaagcggtttagggacagctgggatagtcgtaatcaataaagaccaagatattatttcttgcatggctagaattgctagattttataaacatgaaagctgcggtcaatgcacaccttgtcgagaaggagcaggatggatgtggagaatactggatagagtagaaaaaagaaaagcaacttttaatgatattgaactgttatctgatgttacaaaacaaatagagggtcatacaatttgtgcatttggtgagggttctgcttggccagttcagggtttattaagacattttagaaaagaaattgagagcagatgcagagaggaacccttgattaaaaagaaaactaacaacccttatttagttgatcaacatcttttggagaacaagaatgcctaa

SEQ ID NO: 221869 - DNA, 845 bp, Unknown
  Bacterial polypeptide expressing nucleotide sequence isolated from the Sargasso Sea
taaaataaatattgataacaaagaaatagagtttgagaatggaatgacagtaatgcaagcctgtgagcttgcaggatcagaaattccaagattttgttatcatgataaattatcaatcgctggtaattgtagaatgtgtctagttgaaatggaaaaatcaccgaagcctattgcttcttgtgcaatgccagctggtgaaggaatgaaaattaaaacgaattctaaacttgtaaaaaaagcaagaaaaggtgtgatggaatttttattaataaatcatcctttagattgtccaatatgtgatcaaggcggagaatgcgacttacaagatcaagcgctttattatggtttggataaatcacgatatgaagaaaataaaagagctgtaaaaaacaaatacatgggaccattagtaagcacaattatgactaggtgcattcattgcacaaggtgtgttaggtttgcaactgaagttgctggtgtgaatgatttaggtttattgggaaggggtgaaaaagctgaaataacttcatacctagaaaaaactattgattcagagctttcaggaaatgtaatagatttatgtcctgtaggagctttaactagtaagccctatgcattcaaatctagaccttgggaattaaaaaaaactgaatcatatgatgtttttgatgctattggttcaagtattagagttgactcaataggaaaatcggttttaagagttttgccaaggattaatgaagatattaatgaggaatggataagtgataagactagatatgcgattgatgggctttcaaaacaaaggttagataaagtttatattagagaaaacaataaataaa

SEQ ID NO: 221870 - DNA, 736 bp, Unknown
  Bacterial polypeptide expressing nucleotide sequence isolated from the Sargasso Sea
atgcttaaattaaaagttaatgatatagaagttgaggttgaagaaggacttactgttcttcaggcttgtgagaaagcaggtgtagaaatacctagattttgttatcatgagaaattatcaatagctggaaattgtagaatgtgtttagtagaaatggaaaaatctcctaaacctattgcttcatgtgcaatgcctgcagcagatggaatggttataaagactaatactccaaaaatagagaaatcaagaaaaggggtgatggagtttttattagcaaatcatccattagattgccctgtttgtgatcaagggggagaatgtgaccttcaggaccaatcaatgttttatggaatagataagtcaagatttaaagaaaataaaagagcagtacctgataaaaatatgggtccacttatcaaaacacaaatgacaagatgtattcactgtacaagatgtgtaagatttgcaacagaggtagcaggtgtgcctgagttaggagctattggaagaggtgaagatatgcagattactacatatttagagcaatcggttcaatcagaattatctggaaatgtaattgatctttgtccagttggagctcttacatccaaaccatacgtttttgaggcgagaccttgggaattaaaaaaaactgaaacaatagatgtaatggatgcagttggttcaaatattcgggtcgatacatatgattgggaagtaaaaagagtgttaccta

SEQ ID NO: 221871 - DNA, 467 bp, Unknown
  Bacterial polypeptide expressing nucleotide sequence isolated from the Sargasso Sea
tcatcaatgcttcttataccaaaaagaaaaatgtgagactttaacaatggattttgactcactagtatctgagaaaagtggactaggaactgcaggagtggtcgtaatcaataaagatcaagatattataaaatgtatggctagaatagctagattttacaaacacgaaagttgtggtcagtgtacaccatgtagggagggatctggctggatgtggagaatgctcgagagaatggcaaaaggtgaagcatcaaaagatgaaatagaaatgctaagtgatgtaacaaaacaaatagagggacatactatatgtgcttttggagaaggatcttcgtggccagttcaaggattgttaagacactttaaagatgaaattaaaaaaagaaacaaatttgaccctattgtcaaagaaaacaaaaatattccttatttggttgatcaacatttattagataaaaatgcttaaa

SEQ ID NO: 221872 - DNA, 751 bp, Unknown
  Bacterial polypeptide expressing nucleotide sequence isolated from the Sargasso Sea
atgactgaaaaaataaaaataaatgtagataataaaattctagagaccgagaaaggcaagcttcttattgaagcatgtgaagacaatgggatagatattcctagattttgttggcacaaaagaatggaccctgttggaatgtgcaggatgtgtttggttcaagttgaaactccaagaggaatggccttagttccttcctgcaccgcagatgtaacagaggatatgattgttgatacaacatctgacacagtaaaaaaggctcaagaaggtgttttagaattcttacttataaaccatccattagattgccctatttgtgacagagcaggtgagtgccctttgcaagatcaaactatgactcatggtccgggtgagagtaggtttatagaggagaaaagaaaatttgaaaagcctattcctatttctgatctaatacttttagacagagaaagatgcgtgctttgcgacagatgtacaagattttcagaagagatttcgggagatcctttaattcaatttgttcaaagaggaaataatacacaagtactcacctttcctgatgaaccatttaattcttatttttcagggaatacagtacagctatgtccagtaggagcattaacttcaacatcatatagatttaaagcaagaccatgggatctgaagtcaaatgagtcaacatgcaatcaatgttctattggttgttctatagatataaatgtatcacaagaaaaagttcttcgatatctgg

SEQ ID NO: 221873 - DNA, 496 bp, Unknown
  Bacterial polypeptide expressing nucleotide sequence isolated from the Sargasso Sea
gatgggactattaacaaataaatttcaagaagataatgtaattgttgaaaaacttgaaaagttacttaattggagcagaagtactagcccatggttctttcagttcggtaccgcctgttgtgcgattgaaatgatggctgctgcagcaccaagacacgatattaaaagaattggttttatcccaagatcatcccctaggcaagcagatgtgatgattgttgccggtactgtcacaatgaaaatggctatacgcgtaaaaaaactttatgagcaaatggcagaccctaaatatgttgttgcaatgggttcatgcgccactagtggtggaccatattggcagcacggctaccatgtattgaagggtgtagatattgtaattcctgttgacgtttatgttcctggttgcccacccaggcctgagtcgctaatagagggcctcttaaagcttgaagagcaaatacttgaagaccgtccactaacacgtaaaatgacatga

SEQ ID NO: 221874 - DNA, 402 bp, Unknown
  Bacterial polypeptide expressing nucleotide sequence isolated from the Sargasso Sea
gtttagtaagtcataaaagtggtttaagaacagcgggagttgtggtcatcaacaaggaccaagacataataaaatgtatggcgcgaattgcaagattttataaacatgaaagctgcgggcaatgcacgccttgtagagagggctcagggtggatgtggagaatgttagaaagaatggctaaaggtgaagcatctaaggatgaagttgatatgttaatggatgtaaccaaacaaatcgaaggtcatactatatgtgcatttggtgaaggatcatcttggccagttcaaggattaattagacattttaaggatgaaataattaaaagaaataattttgatcctttaattaagaaagatagaaatattccttatcttgtagaccaacacttattggaaaaataat

SEQ ID NO: 221875 - DNA, 682 bp, Unknown
  Bacterial polypeptide expressing nucleotide sequence isolated from the Sargasso Sea
aatgcctaagataattattaacggaaaagaaatagagttcgaaaaagggatgacagttttacaagcttgtgaacttgctaatgttgagataccaagattttgttatcatgagaaactttctatagcaggaaactgcagaatgtgtcttgtagaaatggaaaaatctccaaaaccaattgcttcatgtgctatgccagctactgaaggaatgaacataaaaactaatactaaatttgtagagaaagctagaaaaggtgttatggaatttttattagcaaaccatcctttagactgtcctgtttgtgaccaaggtggagaatgtgacttgcaagaccaatctctttattatggtgtagacaagtctagattttcagaaaataaaagagctgttaaagataagtatatgggtcctttgatcaaaacacaaatgaccagatgtattcactgcacaagatgtataagatttgcaacagaagttgctggggttccagaactaggagcagtaggacgcggcgaagatatggagatcacaacataccttgaaaaatcaatggaatcagaactatccgcaaatgtaattgacctgtgtccagttggagcacttacatccaaaccttatgcttttgaggcaagaccatgggaattaaaaaaaactgaaagtatagacgttatggatgctgtc

SEQ ID NO: 221876 - DNA, 730 bp, Unknown
  Bacterial polypeptide expressing nucleotide sequence isolated from the Sargasso Sea
aatgcttaaggataaagatagaatatttcaaaatctatataatgatatgggatctgatgtaacttcttctcaaaaaagaggtgattgggttaacactaaagaaattattgataaaggaagagaatggataatcaatgagattaaagactcacaacttagaggtagaggtggagctggatttccaacaggtttaaaatggtcttttgctcccaaagagttaggtgctagaccacattatttagttataaatggtgatgagtcagaaccaggaacttgcaaggatagagatatattaagatttgaacctcataaactaattgaaggttgtttgattgcatcatacgcagttcaagctcatgtttgttatatttatataaggggagagtattttattgatggtcaaaaacttcaagcagctattgatgaagcgtacgaaaaaaaattattaggtaaaaatgcagctggatcaggatgggatctggatatccatattcattatggtgctggtgcatatatttgtggagaagaaacagctctattagaaagtatagagggtaaaaaaggtcaaccaagattaaaaccaccttttccagcattaataggcctgtatggatgtccctacataattaaacatgtagaaactatagctgtagtaccaacgatacttagaagaggtggcaaatggtttgctttctctggaagagaaaaaatacaggcacaaaaatatttt

SEQ ID NO: 221877 - DNA, 505 bp, Unknown
  Bacterial polypeptide expressing nucleotide sequence isolated from the Sargasso Sea
acaaggtggatgggataacttaaaagctgttataccgggtggttcatctatgccactattaccaaaagatatatgcgaaacaataaccatggattttgatacattggtaaaacaaaaaagtggcctcggtaccgcaggcattattgttattaataaagatcaagacattattaaatgtatggctagaattgctagattctataaacatgaaagttgtggccagtgcacaccttgtagagaagggtcaggttggatgtggagaatgttagaaagaatgtctataggtgaggcctctagagaagaagttgatatgttattcgatgtaactaagcaaatcgaaggtcatactatctgtgcttttggagaaggttcttcatggccggttcaaggtcttttaagacattttaaaaaagaaatattaaaaagaaataactttaatccattaataaataaaaatagaaatattccttatttagtagatcaacacttattagagaaagaataa

SEQ ID NO: 221878 - DNA, 307 bp, Unknown
  Bacterial polypeptide expressing nucleotide sequence isolated from the Sargasso Sea
aatggcaaaagaaacaaaaaaattaaatttaaattttggtccccagcatccagctgcacatggtgttttaagattaattttgcaattagatggagaaattgttgagaaagcagacccacacattggattattacatcgaggtacagaaaaactaattgaaaataaaacttatatacaagctgtaccgtattttgacagattagattatgttgctccgatgaaccaggaacatgctttcgcattagcaattgagaaaattttaaaaataaatgttccgttaagagcccaatattcttcgagtaaatat

SEQ ID NO: 221879 - DNA, 615 bp, Unknown
  Bacterial polypeptide expressing nucleotide sequence isolated from the Sargasso Sea
atactggaacaaaaatttattgtattcagggaaatgttaacaatccttgtaatgttgaggaagaaatgggtattccattaaaagatttaattgaaaaacatgctggtggagtaattggtggctgggaaaatcttaaagcagttatacctggtggatcatctatgccacttctaccaaaaaatatttgtgaaacaattaagatggatttcgatacgttagtagagaataaaagtggattaggaactgcaggtatcgttgtcataaataaagatcaagatattattaaatgtatggcaagaatagcaagattttacaaacatgaaagttgtggtcagtgtacaccatgtagagaaggatctgggtggatgtggagaatgttagaaagaatggccaaaggagaagcttctagagaggaagtagatatgcttatggatgtaactaagcaaattgaaggtcacactatttgtgcttttggcgagggatctgcttggccagttcaaggtctacttagacattttaaaaaggaagttgcaaaaagaaataattttagtccattagtagatagaaacagagatattccatatctagtggatcaacatttattagaaaaataat

SEQ ID NO: 221880 - DNA, 424 bp, Unknown
  Bacterial polypeptide expressing nucleotide sequence isolated from the Sargasso Sea
gatggattttgactcattattagctgcgaaaagtggtcttggtacagctggaattgttgttattaataaagatcaagacatcattaagttcatggccagaattgcaaaattttataaacacgaaagctgtggtcaatgtaccccatgcagagaaggttcgggttggatgtggagaatcttagagagaactgcaaaaggagaagcaaccaaagaagatataaatttattatctgaagttacaaagcaaattgaaggacacacaatatgtgcgtttggagaaggatctgcttggccagttcagggtctattgaggcatttcagaaaggaaattgacaaaagatgtttttcagaaccgcttattaagaaaaaaagaaaaataccttatctagttgaccaacatttgctggaaacaaaagatgcctaa

SEQ ID NO: 221881 - DNA, 544 bp, Unknown
  Bacterial polypeptide expressing nucleotide sequence isolated from the Sargasso Sea
aaagaattaattgaaaaacatgcgggtggagtagtaggtggatgggataatttaaaagcagttatacctggaggttcatcaatgccattacttccaaaggaaacatgtgaaacaattaaaatggactttgatgcatgtgttgagaataaaactggtttaggaacagctggtattgtggttataaataaggatcaagacattattaagtgtatggctagaattgcaagattttataaacacgagagttgtggtcaatgtactccatgcagagaaggttctggttggatgtggagaatgttagagagaatggcaaaaggtgaagccacaagagatgaagtggacatgttattagatgtgacaaagcaaattgaaggtcatacaatttgtgcttttggagaaggatcttcatggcctgttcaaggattgatcagaaattttaaagatgaaataattgaaagaaacaagtttgatccaattgtgaaaaagcaaaaagatataccttatttaattgatcaacatttattagaaaaagaaaatgcttaaa

SEQ ID NO: 221882 - DNA, 589 bp, Unknown
  Bacterial polypeptide expressing nucleotide sequence isolated from the Sargasso Sea
aatgcttaaagaggaaaataaaatattcaaaaatttatataacgaacaaggttggcagttagaaaatgcttttaagagagatgattggttagatactaaaaaaattatagagaagggaagagactggattataaatgaaattaaagcctcggaactcagaggtagaggaggagctggtttttcaactggattgaaatggtctttcgcacccaaaaaagttggttcaagaccacattacttagttataaatgctgatgagtctgaacctggaacttgtaaagatagagatatacttagattcgagcctcaaaaattaatagaaggatgtttgatcgcttcttatgctgtaaatgcaaaagtttgttatgtttatataagaggagaatacttgaatgaaggtaaaagacttcaggaagctatagacgaggcatattcaaaaaatttaattggtaaaaatgcgtgtaattcaggatgggatttagatatttatattcactatggcgcaggagcatatatttgtggcgaggaaactgcacttcttgagagtttagaaggaaacagaggtcaaccaagattaaaaccacctttc

SEQ ID NO: 221883 - DNA, 496 bp, Unknown
  Bacterial polypeptide expressing nucleotide sequence isolated from the Sargasso Sea
aatgggattgttaacaaataagttttcggaagataatgtaattgttgctaagcttgaaaagttattgaattggagtcgttctacaagcccttggtttttccaatttggtaccgcatgttgcgcgattgaaatgatggcagctgcggccccacgccatgatattaaaagaattggatttattccaagatcatctccaaggcaagcagatgtaatgattgtcgcaggaacggtaaccatgaaaatggcaataagggttaaaaagctttatgagcaaatggccgaccctaaatacgttgttgcaatgggatcatgtgctaccagcggtggcccatattggcaacatgggtatcatgtattgaaaggggttgatattgttatcccggttgatgtttatgttcctggttgcccaccacgccccgaatcactgattgaaggactgctcaagcttgaagaacaaatacttgaagataggccgttaaccagaaaaatggcatga

SEQ ID NO: 221884 - DNA, 319 bp, Unknown
  Bacterial polypeptide expressing nucleotide sequence isolated from the Sargasso Sea
gaaggtgataaaggtcaacctagattaaaaccaccatttccagctttggtggggctatatggatgcccaactatagttaacaatgttgaaaccatagctgttattccaacaattttaagaagagggggcaaatggttttcttctattggtcgtccaaaaaacacaggcactaaaatattttgtatttcaggcaacgtgaaaactccttgcaatgttgaagaagctatgggtgttagtttaaaggaattgatagaaaaatatgctggtggtgttgaaggaggttggaataatttacaggcagttataccaggtggttctt

SEQ ID NO: 221885 - DNA, 352 bp, Unknown
  Bacterial polypeptide expressing nucleotide sequence isolated from the Sargasso Sea
aatgggagtagaaattaatgaagataattttggcgatgaactaaattctaaggggtttttagttgcaaattttgataaactcttaacatgggcaagaacaggttctttatggccaatgacttttggcttagcttgttgcggagttgaaatgatccatacatatatggctagatatgaccttgatagatacggtgtaattccaagaggaagtcctcgtcaatctgatgtaatgattgttgcaggaactttaactaataagatggcaccagcattaagaaaagtttatgaccaaatgccagaacctagatgggtaatatctatgggatcttgtgcaaatggtggaggatattat

SEQ ID NO: 221886 - DNA, 613 bp, Unknown
  Bacterial polypeptide expressing nucleotide sequence isolated from the Sargasso Sea
aaaatttattgtatatcgggtaatgtaaataatccttgtaacgttgaagaagaaatgggaatacatcttaaagatttaatcgaaaaacatgctggtggtgtagttggaggatgggataatttaaaagctgtaattccaggtggttcttcaatgcctttattgcctaagaaaatttgtgataaaataaaaatggattttgacgcatgtgtagaaaataaaacaggtcttggcacagcaggtatcgtagtaattaacaacgatcaagacattattaaatgtatggcaagaattgctagattttacaaacatgaaagttgtggtcaatgcactccttgtagagaaggatcaggttggatgtggagaatgctagaaagaatggcaaaaggtgaggccacaagagacgaagttgacatgctaatggatgttacaaaacaaattgaaggtcatactatttgtgcatttggtgaaggttcagcttggccagttcaaggattaattagacattttaaagatgaaataattgaaagaaacaaatttgatccagttataaaacagaaaaaaaatataccttatttagttgatcagcacttattggaaaaagaaaatgcttaaa

SEQ ID NO: 221887 - DNA, 817 bp, Unknown
  Bacterial polypeptide expressing nucleotide sequence isolated from the Sargasso Sea
aatgcttaaattgaaagttaatgaaaaagaaattgaaatagatgaaggtcttacagttctacaagcatgtgaacaagctggatatgaaataccaagattttgctaccatgaaaaattatctattgctggcaactgtagaatgtgccttgttgaaatagagaaatccccaaaacctgttgcttcttgtgcaatgccagccgctgaaggcatgaatattaaaaccaatacttctatggttgaaaaagcaagaaaaggtgtaatggaatttttattagttaatcatccattagattgtcccgtatgtgaccaaggtggagagtgtgatttgcaagatcaatctatgttctatggtgtagataaatcaagatttaaagaaaacaaaagacaggttccagaaaaatatatgggacctctaattaaaactcaaatgactagatgtatccactgtacaagatgtataagatttgcaacagaagtggcgggtgttcctgaactaggagcaatcggaagaggtgaaaatatgcaaatcaccacatatctcgagaaagcaatggaatcagaattgtcagctaatgtaattgacctttgtcctgtaggtgctttgacatcaaaaccctatgtttttgaggcaagaccttgggaattgaaaaaaacagagtcaatcgatgttatggatgcagttggatcaaatattagagtagatacttatggatgggaagttaaaagaattcttccaagaataaatgaagatataaatgaagagtggatttcagataaaacaagatacgcatgtgatggtttaaaaatccaagattag

SEQ ID NO: 221888 - DNA, 598 bp, Unknown
  Bacterial polypeptide expressing nucleotide sequence isolated from the Sargasso Sea
cttggaagagaaaataatacagggttcaaaattattctgtatttctggacatgtaaatcatccttgtaatgtagaggaggaaatgggtatttccttgagagacttaatcgaaaaacatgctggtggtgttagaggtggttgggaaaatcttttagctgtaattccgggtggttcatctactccgttattaacaaaaaaagtgtgtgatacaattttaatggattttgactctcttaaaaatgcaggcacaggtcttggtacagcaggtgtaattgttatggataagtcaacagatgttataaatgctattactaagttatcacatttttataaacatgagagctgtggccaatgcactccatgtcgtgagggtacaggttggatgtggagaatgatggagaggcttgtaactggaaatgcagagattgaagaaattgatgttcttttggaggtaactaaacaagttgaaggtcatactatatgcgcactaggtgacgcagcagcttggccaatacaaggattgattaaaaattttagacctctaattgaggaacgaattaatgattttcacttaaagaatgctgaagctgctgaataa

SEQ ID NO: 221889 - DNA, 538 bp, Unknown
  Bacterial polypeptide expressing nucleotide sequence isolated from the Sargasso Sea
atgatttacaagattatcctctttgcgcctctcatcggcgcgattatcgccggcttcggctggcgcgtcatcggcgacaagggcgcgcagtggctgaccaccggcctgttgttcctgtcggcgctgctcagctgggtcgtgttcctgcaaggtgcgcatcaggacgatccggtgcatatcctgacgtggattcaatccggcacgctggatacctcctggtcgatccgggtggatcgcctgaccaccaccatgttgatcgtggtgaccacggtttcggtcctcgtgcatctctattccatgggctacatggcgcatgacgagaatttcgacgatgcgaaagaaagctatcggccgcgctttttcgcctacctgagccttttcaccttcgcgatgctgatgctggtgacggcggataaccttgcccagatgttctttggctgggaaggtgtgggccttgcctcgtacctgctgatcggtttctatttccgcaaaccttcggccaatgccgcctcgatcaaggccttcgtggtcaacaggg

SEQ ID NO: 221890 - DNA, 440 bp, Unknown
  Bacterial polypeptide expressing nucleotide sequence isolated from the Sargasso Sea
aaaaaaaattgtgaaaacgattaatatggactttgactcactagtgaaagagaagagtggattaggtacagctggcattgtagttataaataaagatcaagatataattaaatgtatggctagaatagcaaggttttacaaacatgagagttgtggtcaatgtacaccatgtagagaaggatctggttggatgtggagaatgcttgagagaatgtcaaaaggggaagcgtcaagagatgaagttgatatgttgatggatgttacaaaacaaatagaaggtcatacaatttgtgcatttggagaagggtcttcttggcctgttcaaggtttgcttagacattttaaaaaagaagtagcaaaaagaaataattttaatccattaattaatacaaacaataaaattccttatctagtggatcaacacttattggaaaaataat

SEQ ID NO: 221891 - DNA, 383 bp, Unknown
  Bacterial polypeptide expressing nucleotide sequence isolated from the Sargasso Sea
acgggcaggaattattgtaataaataatgatcaagacataattaaatgtatggcaagaattgccagattttacaaacatgaaagttgtggtcaatgcaccccttgcagggaaggatcaggttggatgtggagaatgttagaaagaatggctaaaggagacgccacaagagatgaagttgatatgttaatggatgttacaaaacaaatagaaggtcatacaatctgtgcatttggcgaaggttcggcttggcctgttcaaggcctcatcagacattttaaagatgaaataattgaaagaaacaaatttgatccaattgtaaagcaaaaaaaagatattccttacttagtagatcaacacttactagaaaaagaaaatgcttaaa

SEQ ID NO: 221892 - DNA, 424 bp, Unknown
  Bacterial polypeptide expressing nucleotide sequence isolated from the Sargasso Sea
aatggattttgactcattaatcaaaaataatagtggtttaggtacagctggtatcgttgttataaataaacaacaagacattgtggcatgtatggcaagaatagcaaggttttataaacacgaaagttgtggtcaatgcactccttgtagagaaggtgctggctggatgtggagaatattagatagagttgttaaaagaaaagctaccttaaatgatatagatttactttcagatgttacaaagcagatagaagggcatactatttgtgcttttggagaagggtcagcttggccagttcaaggattattaagacattttagaaaagaagtagaaagtcgatgtagagaagaacctttaattaagaaaaaaataaataacccttatttagttgatcaacacttattagataataaaaatgcctaa

SEQ ID NO: 221893 - DNA, 523 bp, Unknown
  Bacterial polypeptide expressing nucleotide sequence isolated from the Sargasso Sea
gatggctaaagaaaaaaaaacattaaacttaaattttggaccacaacatccagcggctcatggagtcttaagattaatactgcaattagatggagaagttgttgaaaaagctgatccacatataggcttgttacacagaggaactgaaaagttaattgaaaataaaacttacactcaagctgttccatattttgatcgtcttgattatgtggcaccgatgaatcaagagcatgcattcgctttagccatagaaaaaattcttaaaattgaagttcctgctagagctaaatatataagagtaattttctgtgaaattggtcgaatattaagtcacatattgaatgtaactactcaagcaatggatgttggggctttaacaccaacattgtggggatttgaggaaagggaaaaattaatgggattttatgagagagtttctggatctagactgcatgccaattattttagagctggtggagtgcacaaagatcttccttctgggcttgacaatgatatcgatgaa

SEQ ID NO: 221894 - DNA, 715 bp, Unknown
  Bacterial polypeptide expressing nucleotide sequence isolated from the Sargasso Sea
tccggcacttataggactttatggatgtccaactataattaataatgttgagactatagcggtagttcctacaatacttagaagaggtggtaaatggtttgcttctctaggaagagaaaaaaatactggtaccaaaattttttgtatatctggcaatgtcaacaatccttgcaatgttgaagaagagatgaatatacctctcaaagaattaattgaagtgcatgcaggtggtgtagttggtggctgggataatttacaagctgtgattcctggtggatcttcaatgccattaattccaaaggaaaaatgtgaaacattaacaatggactttgactcattgacagcagaaaaaagtggcttaggaacagccggggtggttgtaatcaataaagaccaagacattatcaaatgtatggccagaatagcaaggttttataaacatgaaagttgtggtcagtgcacaccatgtagagaaggttcaggctggatgtggagaatgctagaaagaatggcaaaaggagaagcatcaaaagatgaagtagagatgttaggtgatgtaacaaaacaaatagaaggtcatactatatgtgcgtttggtgaaggttcttcatggccagtacaaggtttgctcagacattttaaagacgagataaaaagaagaaataaatttgacccgattgtaaaagaaaataaaaacatcccttatttagttgat

SEQ ID NO: 221895 - DNA, 715 bp, Unknown
  Bacterial polypeptide expressing nucleotide sequence isolated from the Sargasso Sea
cctcgatttaaacctccgtttccggcaaattttggtttatatggcagaccgacaacgattaataacacagagagctttgcctccgcccccagtattatccgtgaagggggaacttggtttgccaatcaaggcgtgcctaatagtggagggacaaagtgtttttctgttagcggacatgtaaataaacccggtaattttgaaatccctcttgggattccatttacaaaattattagaaatggcaggaggagtaagaaatggaaatcatttaaaagcagtgattccgggtggatgctcgatgccagtcttaccaggcgatgtcatgcttgaaacacgaatggattatgattcgattgcaaaagccggttcgatgttaggttcaggtgcggtgattgtgatggatgagacgacatgtatggttaaggcattagaacgactatctcgtttttaccatatggaatcgtgtggtcaatgcactccctgtcgtgaagggaccggttggttgcatcgtatgttattacgaattcttgcaggtgaaggtgttaagggtgatttagataagttggatgatgtcgccagtaaaatagaagggcgtactatttgtgcttttggtgatgccgcggcctggccagttcgaagttttattaaacattttcgtgatgaatttcaatattacattgataacaaatgtagtcttgtggagagtcaaaactaac

SEQ ID NO: 221896 - DNA, 907 bp, Unknown
  Bacterial polypeptide expressing nucleotide sequence isolated from the Sargasso Sea
acatgttaaagactctgaccgtatttttactaatttatatggattaaaagactggaaactcgcaggggcgaggagccgtggtgattgggacggtacgaaggaaattttgaacaaaggccgcgagtggattgtcgaggaggttaaatcatcaggacttcgcgggagaggcggcgcaggattcccaagcggacttaaatggtcttttatgcctaaggagcctactggtcgtccgcattatcttgtggttaatgctgacgagggtgagcccggcacctgtaaagatagggatatgttacggaacgatccccacaaactcatagagggttgccttttagcgggttttggtatgggtgcgaacgcagcctatatttatatacgaggtgagttttaccgggaggcggagcgcctccaatttgcaattgatgaagcttatgaggctggtctaatcggtcgaaatgcttgcggatctggatatgattttgatgtttacgtccatcgtggcgctggtgcatatatttgtggtgaagagatggccctgattgaaagcctggaaggaaaaaagggaatgccgaggctaaagccgccatttcctgcagctatgggactctatggttgcccaacaaccgttaataacgtcgaaacaattgcggtagcccctacaattctgcggcgaggagcggcttggttttcttctttaggacgcgaaaataatacagggacaaaggttttttgtatttcagggcatgtcaataacccctgtaacgttgaagaagaaatgggtattccactcaaggaactaattgaaaaacatgccggcggtgtcgttggaggttggaataacctaaaagcaattataccgggtggggcatctgttccaatgatacccaaatcgatttgtgacagtgtt

SEQ ID NO: 221897 - DNA, 769 bp, Unknown
  Bacterial polypeptide expressing nucleotide sequence isolated from the Sargasso Sea
aatgccaaaaataacaattaataataaagttatagattttcaaaatggtatgacagttatgcaggcatgtgaacttgctgatgtagaaattcctcgtttttgttatcatgataaattgtcaattgcaggtaattgcagaatgtgtttggttgaaatggaaaaatctcctaagcctattgcttcatgtgcgatgcctgctgcagaaggtatgaatataaaaactaatactgaattagtaaaaaaagctagaaaaggtgttatggaatttttgcttattaatcatcctttagattgtcctatatgtgatcaaggtggagaatgcgatttacaagatcaagctttgcattatggctttgacaaatctagatacgaagaaaacaaaagagctgttaagaataaatatatgggtccattagtaagcactatcatgaccaggtgtattcactgtacaagatgtgtccgcttttcaacagaaattgctggagttgatgatattggcttattaggtaggggggaaaatgcagaaattacaacttatttagaaaaaactattgagtctgagctatctggtaatgtcattgatctttgtcctgtaggagccctaactaataaaccttatgcttttcaatctagaccttgggaattaaagaagactgaatctgttgatgtttttgatggcatgggtgcaagtatcagaatagattctaaaggaaagaatgtgctaagagttttgccaagattaaatgaagaaattaatgaagagtggatt

SEQ ID NO: 221898 - DNA, 463 bp, Unknown
  Bacterial polypeptide expressing nucleotide sequence isolated from the Sargasso Sea
atgcctttggtacccaaaaaaatatgtgaaacactaaccatggactttgatgctctagtagctgaaaagagtggtttaggtactgcaggaatagttgtgataaataaagatcaagacattataaaatgtatggcaagaattgctaaattttataagcacgaaagttgtggccaatgtactccttgcagagaaggatctggatggatgtggagaatgcttgaaagaatgtcaaaaggcgaagcaactaaagatgaaattaacatgctaggagatgtaacaaatcaaatagctggacatactatttgtgcttttggtgaaggttcttcatggccagttcaaggtcttctaagacattttaaaagtgaaattgaggaaagaaataatttaaaccctataatagagaaaaaaaataatattccttatttagttgatcaacacttattagataaaaaaaatgcttaaa

SEQ ID NO: 221899 - DNA, 352 bp, Unknown
  Bacterial polypeptide expressing nucleotide sequence isolated from the Sargasso Sea
gcggtcatcgtcatggacaagtccacggatctgatccaggcgatcgcgcgcatcgcatacttctacaagcatgaaagctgcggtcagtgcacgccgtgccgagaaggcacaggctggatgtggcgcgtgctcgagcgcatggcgatcggcgatgcggagcatgatgatattgacatgctgctcgatgtcgctggccaagttgaaggccacaccatctgcgcgcttggtgatgcggcagcctggccggtccaaggcctgatccggcatttccgccatgagattgaagaccgcatcacaatgtatcgacgtccgcgtgccctggttcagggcgctacggttgcagcggagtagg

SEQ ID NO: 221900 - DNA, 607 bp, Unknown
  Bacterial polypeptide expressing nucleotide sequence isolated from the Sargasso Sea
atgattaacctgcacgtgacaaccgttctgatgccactgattgcttcaatcgttgccgggctttttggtgcaaagattggaagagagagatcgcatcaaattacaattgccgctgttggtctttcgtttttaatctcattgtatctattgattaattcattgggcgatgattttcagattcaaaactacaacttgtactcttgggcaatagttggaaatttgcatatggatattggttttctgattgatagattgtcattactcatgatggtggtggtgaccttcgtttctcttatggtgcatatatacacgattggttatatgcatgatgatccaggatatcaacggttcttcagttacatctctctctttacattcgctatgttgatgctggttatgtcgaataactttttacagctgttcttcgggtgggaggcggttggattggtatcatacttactgattggtttttggtttaaacgagaaagtgcggtgactgcaaacttaaaagcatttctggttaacagggtaggcgactttggtttcttgttggggatagctggaattgtattctttacaaactcccttgattactacgatgttttct

SEQ ID NO: 221901 - DNA, 504 bp, Unknown
  Bacterial polypeptide expressing nucleotide sequence isolated from the Sargasso Sea
gttgggataatttaaaagcagtaatacctggaggatcatcaatgcctttgttaccgaaagaagtttgcgaaactataagaatggattttgactcattaattaaagaaaaaagtggattaggaactgctggtattgtggttattaataaagatcaagatattataaaatgtatggcaagaattgctagattttacaaacatgaaagttgtggacagtgcaccccttgtagagagggatcaggatggatgtggcgaatgttagaaagaatggccaaaggtgaagcttctagagaagaagttgatatgctaatggatgttaccaaacaaattgaaggacatactatttgtgcttttggcgaaggatctgcttggccagtacaaggtttattacgtcattttaaaagagaggtttcaaaaagaaataattttaaccctttaataaaaacaaataaaaatattccttatttgattgaccaacatttattagaaaaagaaaatgcttaaa

SEQ ID NO: 221902 - DNA, 873 bp, Unknown
  Bacterial polypeptide expressing nucleotide sequence isolated from the Sargasso Sea
tctacgaaaaattataatagatgatcaagaagttggtgttaatcctgctatgtttatacttcaggcttgtgaacatataaataaagaaattccacggttttgttatcatgaaagattatctatagcaggcaattgtagaatgtgccttgttgaagtggtaggtggaccccctaagcctatggcttcatgtgctcttcaagttaaagatctaagacctggacctaatggtgaacctccagtgataaaaacaaattcaaagatggttaaaaaagctcgtgaaggtgttatggagtttttactgattaatcatccattagattgtccaatatgtgatcagggaggagaatgtgatttgcaggatcaagcactagcatttggtgttgatttttcaagatatacagaacctaaaagagctgttttagatgttgatttaggacctctagtcgaaacaaatatgaccagatgcatctcctgcaccaggtgtgtaagattttcaacagaagtagcaggaataccagaaatgggtcaaataggacgtggtgaaaatagtgaaattacatcatatctagggaagactttgaaaagtgaattacagggaaacattattgatttatgtcctgtcggagcactcacatctaagccatatgcatttacagctagaccttgggagttaactaaaacaaactgtattgatgtaatggatgctcttggatcaaatatccgtattgactcaaaaggaaaaaaaattatgcgtattattccaagaaatcatgatgagataaacgaagaatggttgtcagataaatctaggttcatttgggatggtttaaataaacaaagattagatgttccatatattaggaatgaagaacg

SEQ ID NO: 221903 - DNA, 982 bp, Unknown
  Bacterial polypeptide expressing nucleotide sequence isolated from the Sargasso Sea
ttgtagaatgtgtttagtgaaatgggaaaaatcaccaaaaccaatagcctcttgtgctatgccagctgcggaaggtatgagtattaaaactaacaccgcttatgttgaaaaagctagaaaaggtgtgatggaatttttattagcaaatcatcctttagattgccccgtatgtgatcagggaggtgaatgtgacttacaagatcaatcaatgtactacggagttgataagtcaagatttgttgaaaataaaagaacagttaaagaaaagtatatgggtcctttaataaaaacccaaatgacaagatgtattcattgcacgagatgtgtaagatttgcgacagaagtagctggagttccagaaataggtgctgtaggtcgtggcgaaaatatggaaattactacttatttagaaaaggcaatggagtccgaactttctgcaaacgttatagatctatgtccggtaggtgcattgacttcaaaaccttacgcatttgaggctagaccttgggaattaaaaaaaactgaaagcatagatgttatggatgctgttggatctaacattagagtggatacttacaactgggaagtaaaaagaattttaccaaggctaaacaatgagattaatgaagagtggatttctgataaaacaagatattcatgtgatggtcttttgaaacaaaggttagatactccgtatattaaaaaagataacaaattacaaaaatcaagttgggacgaagcgatagatcttattaaaaatcatattaactcaactaaacctgaggaaatagctggacatatcggagatatggttaatttagagaatgctttagcttttaagaaattatttaaaatttttaaaagtgaaaatttagaatttcgagaaaaatttttttatattaattcctctgaaaaaatgaattatttattcaattcttcaatatcaggtattgatcaatcagatttaattttattgataggc

SEQ ID NO: 221904 - DNA, 612 bp, Unknown
  Bacterial polypeptide expressing nucleotide sequence isolated from the Sargasso Sea
aatgcttaaattaaaggtcaacgatattgaagttgaagtcgaagagggattaactgtgcttcaagcttgtgaaaaagcgggggcagaaatcccaagattttgctatcatgaaaaattatcaatagctggaaattgtagaatgtgtttggtcgaaatggaaaaatctccaaaaccaatagcttcatgcgcaatgccagcagcagatggaatgattataaaaaccaacactcctaaaatagagaaatcaagaaaaggtgtgatggagtttttattagcaaatcatccattggattgcccggtttgtgatcaaggaggagaatgtgatctccaagatcagtcaatgttttatggaatagacaaatcaagatttaaagaaaataaaagagctgtgcctgataagaatatgggtcctcttattaaaactcaaatgacaagatgcattcattgtacaagatgtgtcagatttgcaacggaagtagcaggtgtaccggaactgggtgcaattggaagaggagaagatatgcaaataactacttacctagagcaatcagttcaatcagagttatctggaaatgtaattgatctttgtcctgttggagccctaacctctaa

SEQ ID NO: 221905 - DNA, 583 bp, Unknown
  Bacterial polypeptide expressing nucleotide sequence isolated from the Sargasso Sea
atgcttgaagataaaaatagaatttttcaaaacctatataatgataatggagcagacatagattcttctaaaaaaagaggtgattggagcaatataaaagaaatatgtgaaaaaggaagggattggattattaatgaaattaaagcttcggagttaagaggaagaggtggggcaggttttcccacaggtttaaaatggtcatttgctccaaaagaaattggcacaagacctcattatttagttataaatgctgatgagtctgaacctggaacatgtaaagatcgtgatattttacgatttgaaccacataagttaatagaaggatgttttattgcctcttatgcagttaatgctcatacttgttatatttatatacgaggtgaatattttaacgaaggacaaaaattacaaaaagcaattgacgaagcatatgaaaaaaacttaataggaaaaaatgcttcaggaataggttgggatttagatatttatattcactatggtgccggtgcctatatttgcggtgaagagacggctttattagaaagtctagaaggtaaaaaaggtcaacctagactaaaacctc

SEQ ID NO: 221906 - DNA, 781 bp, Unknown
  Bacterial polypeptide expressing nucleotide sequence isolated from the Sargasso Sea
atgcctaaaattctaattaatggaaaagagattgaatttgaaaaaggcatgactgttcttcaagcatgtgagcttgccgaggtcgaaataccaagattttgctatcacgagaaattatctattgcaggaaattgtagaatgtgtcttgttgaaatggaaaagtcaccaaaaccaattgcttcgtgtgcaatgcctgcaacagaaggtatgaacataaaaacaaacactgctttagttgaaaaagccagaaaaggtgtaatggaatttcttttagccaaccatcctttagattgtccagtttgtgatcaaggcggagagtgtgatttgcaggatcagtcaatgtattacggagtagataaatccagatttatagaaaataaaagacaagtaaaagaaaaatatatgggccctctcattaaaactcaaatgacaagatgcattcattgcacaagatgtgtaagatttgctacagaagtagctggagtgccagaaatcggcgctatcggtcgtggagagaatatggaaattacgacttacttagaaaaagcaatggaatcagaattgtcagcaaacgtaattgatttatgtcctgttggagctcttacatcaaaaccatatgcttttgaagctagaccttgggaattgaaaaaaaccgaaagtgtagatgtgatggacgcggttggatcaaatattagggtagatacctataattgggaagtgaaacgtatattaccaagactcaataacgacattaatgaagaatggattcagacaaaacaag

SEQ ID NO: 221907 - DNA, 854 bp, Unknown
  Bacterial polypeptide expressing nucleotide sequence isolated from the Sargasso Sea
gatggaagaaacacttgtccttttcaaaaacataaaaaatcccaaatacagcaagtctctcgaagggtacaaaaaagctggaggataccagactttgaaaaaagtcttgggtatgacgccggaagaagttgttcagacagttaaggattctggcgttcgcggacgaggcggagcaggattccctacaggtctgaagtggagtttcatgccaaaaggaactggcaagccaagttatcttattgccaacgccgatgaatctgagcctggaacatgcaaggacagagaactgatgcttaaggatccgcatctttttttggaaggcatgatgatcggatgttatgctgtaggatgtcatcatggctatgtttatataaggggcgagttttttccagcaattaagtctttaaataccgctgttgaagaactatatgcagatagtatgcttggtcccgatcccttgggcagtggatttaatctggaccttacaattcacagcggagctggtgcatatatttgtggagaagaatccgcattgcttgattctctggagggcaagcgtggtcagccacgagtcaaacctcctttcccggcgatatctggttttaatggatgtccgacaagtgtaaacaatgtggaaacactagcatgcatgccctttattctaggcgatgggggagttgatgccttcaaaagttttggcccagagaataattctggaactcatcttgtcagtctgagcggccatgtgaataaacctggggtttacgagttacgaatggatgtaaacatgaaagacattatttacgagattggaggaggtatcaaaaacggaaaaaagcttaaaggtgtaattc

SEQ ID NO: 221908 - DNA, 547 bp, Unknown
  Bacterial polypeptide expressing nucleotide sequence isolated from the Sargasso Sea
atggcaaaagaaaaaaaaacactaaatttaaattttggaccacaacatcctgcggcacatggagttttaagattaatacttcaattagatggagaagttgttgaaaaagctgatccccatatagggttattgcaccgaggtactgaaaagttaatagaaaacaaaacctatatccaagcagttccttattttgatcgtttggattatgtagcaccgatgaatcaggaacatgcattcgctttagctatagaaaaaattttaaaaatcgaagttccttctagagcgaaatatataagagtaattttctgtgaaataggtcgaatattaagtcacatattgaatgtaactactcaagcaatggatgttggggcgttaacgccaactttatggggatttgaggaacgagaaaaattaatgggattttatgagagggtatccggatcaaggttgcacgctaattattttagagctggtggagtacataaagatcttcctagtggacttgaaagtgatattgatgaattttgtgaaaaattccaaagattat

SEQ ID NO: 221909 - DNA, 424 bp, Unknown
  Bacterial polypeptide expressing nucleotide sequence isolated from the Sargasso Sea
aatggactttgatgcatgtgtcgagaataaaaccggtttaggaacagctggtattgtggttataaataaagatcaagacattattaagtgcatgtctagaatagcaagattttataaacatgagagttgtggtcaatgtacaccatgtagagaaggttctggttggatgtggagaatgttagagagaatggccaaaggtgaagccacaagagatgaagtagatatgttattagatgtaacaaaacaaattgaaggccatacaatttgtgcttttggagaaggatcttcatggcctgttcagggattaataagaaattttaaagatgaaataattgaaagaaataagtttgatccaattgtgaaaaaacaaaaagatataccgtatttagttgaccaacatttattagaaaaagaaaatgcttaa

SEQ ID NO: 221910 - DNA, 712 bp, Unknown
  Bacterial polypeptide expressing nucleotide sequence isolated from the Sargasso Sea
cacaataattaataatgttgagactatagctgttgttccgactattttaagaagaggaggtaaatggtttgcatctttaggcagagaaaaaaatacaggtactaagattttttgtatatctggaaatgtaaacaccccttgtaacgttgaggaggaaatgaatatacctttaaaagaattaatagaggtgcatgctggaggagtaattggtgggtgggataatttacaagctgtaataccaggtggatcgtcaatgccgttaataccaaaagaaaaatgtgaaacattaactatggattttgactcattaatggctgaaaaaagtggactaggtacagcaggcgttgttgtaattaacaaagatcaagacattattaaatgtatggctagaatcgcaagattttataaacatgaaagttgtggtcaatgtacaccatgcagagagggatctggttggatgtggagaatgcttgaaagaatggccaaaggtgaggcatcaaaagatgaagtagatatgttaggtgatgtaacaaaacaaatagagggtcatactatttgtgcttttggagagggctcttcatggcctgtgcaaggattattaagacattttaaagatgaaattaaaaagagaaataaatttgatccaattgtaaaagaaaataaaaatattccatatttagtggatcaacacttattggataagaatgcttaa

SEQ ID NO: 221911 - DNA, 551 bp, Unknown
  Bacterial polypeptide expressing nucleotide sequence isolated from the Sargasso Sea
aataccattaaaagaaataatcgagatacatgctggaggagttattggtggttgggaaaatttacaagcagttataccaggtggttcatcaatgccattaatcccaaaacatatatgtgaaactttaactatggattttgacgctttagttgaacaaaaaagcggattaggaactgctggagttgtcgtaattaataaagatcaggacattattaaatgtatggcaagaattgcaagattttataaacatgaaagttgtggacagtgcacaccatgtagagagggctcaggttggatgtggcgaatgctggaacggatgtcaaaaggagaggcatctagagacgaaattgatatgctagaggatgttacaaatcaaattgctggtcatactatttgtgcttttggagaaggttcctcatggccagtccaaggtttattaagacatttctcaaaagaggtaaaaaaaagaaataaatttgatccaattattaaaaaacaaaaaaatataccttatttagttgatcaacatttattggataaaaatgcttaaa

SEQ ID NO: 221912 - DNA, 603 bp, Unknown
  Bacterial polypeptide expressing nucleotide sequence isolated from the Sargasso Sea
tttgtatatctggtaatgttaacaatccatgtaatgttgaggaagaaatgaatattcctttaaaagaattaatcgaagtccatgctggtggtgttataggtggttgggacaatttacaagctgttattccaggtgggtcatcaatgccgttaataccaaaagataaatgtgagacattgactatggactttgactcattaatggcagaaaaaagtggattaggaacagctggagtagtcgtcataaacaaggatcaggatattattaaatgtatggctagaattgcaagattttacaaacatgaaagttgtggtcaatgtacaccttgtagagaaggatcaggctggatgtggagaatgcttgaaagaatggttaaaggagaagcatcaaaagatgaaatagatatgttggctgatgtaacaaaacaaattgaaggacatacaatttgtgcatttggtgaaggatcttcttggccagttcaaggtttattaagacactttaaacatgaaattaaaaaaagaaataaatttgaccctatagttaaagaaaataaaaatataccttacttaatagatcaacatttattggataaaaatgcttaaa

SEQ ID NO: 221913 - DNA, 724 bp, Unknown
  Bacterial polypeptide expressing nucleotide sequence isolated from the Sargasso Sea
ggatgcccaacaattattaataatgttgaaacgatagcagttgttccaacaattcttagaagaggtggaaaatggttttcgtcgttaggaagagaaaaaaatacaggtacaaaaattttttgtatttcaggcaatgtgaataatccatgtaatgtagaggaagaaatgaatattcctttaaaagaattaattgaggtccatgctggaggagttgttggtggatgggaaaatttacaagctgtaattccaggtggttcatcaatgccactaataccaaaggaaaaatgtgaaacgttaacaatggactttgactcattaacggcggaaaaaagtggattaggaactgctgggattgtggttattaacaaggatcaggacatcattaaatgtatggcgaggatagctagattttataaacacgaaagttgtggccagtgtacaccatgtagagagggctcaggatggatgtggagaatgctagagcgaatggcaaaaggtgaggctacaaaagatgaagtggatatgcttggtgatgtaacaaaccaaattgcaggccatactatttgtgcatttggtgaaggatcatcatggcctgtacagggattgttaagacattttaaaaaagaaattgaggaaagaaacaatttagaccctattgttcagaaaaaaaataatattccttatttagttgatcaacatttattagataaaaaaaatgcctaaa

SEQ ID NO: 221914 - DNA, 648 bp, Unknown
  Bacterial polypeptide expressing nucleotide sequence isolated from the Sargasso Sea
aatgggcaatagtagacaagtcattatcgatggaaataaaatcgaagttgaccccgcattgacgataatacaagcctgtgaagtgcttggtatcgagatccctcgtttctgctatcatgagagactttcaatagcgggaaactgcagaatgtgcttggtggaggttgttggtgggcctcctaaaccaactgcatcctgcgcaatgcaaataaaggatttaaggcccggacccaatggagaaccaccagaaataaagacgaagtcacccatggtcaaaaaggcccgggaaggcgtaatggaatttcttttaattaaccacccgttggattgtccaatatgtgatcaaggtggcgagtgcgacttacaagatcaggcggtcggatatgggatagatttttcgcgttatcgcgaacccaaaagagccgcggaagatcttgaccttggtcctctggtggagacccacatgaccaggtgtatatcttgcactcgctgtgtccgttttaccaccgaagtcgcaggaattagtcaaatggggcaggttggaagaggtgaagatagtgagataactagttatctcaatgaaactctatcaagcgaattacaagggaatattatcgatttgtgtcctgtgggagcgcttacatccaa

SEQ ID NO: 221915 - DNA, 265 bp, Unknown
  Bacterial polypeptide expressing nucleotide sequence isolated from the Sargasso Sea
tgcaggaacgttaacaataaaatggcaccagctttaagaaaggtttatgaccagatgcctgaaccaagatatgtaatttctatgggtagttgtgcaaatggtggtgggtattaccattactcatattcagttgttagaggttgtgatcgtattgttcctgtagatatttatgtaccaggatgccctccatcagcagaggctttattgtatggaattcttcaattacaaaaaaaaattagaaaaaaaggatcttttattagatagt

SEQ ID NO: 221916 - DNA, 631 bp, Unknown
  Bacterial polypeptide expressing nucleotide sequence isolated from the Sargasso Sea
atgcttaaattgaaagttaatgaaatcgaagttgaagttgaagaaggtttaactgttcttcaagcttgtgaaaaagctggggttgaaatcccaagattttgttatcatgaaaaattatcgatagcaggtaattgtagaatgtgtttagttgaaatggaaaaatctcctaaaccaattgcttcatgtgctatgcctgctgctgagggtatgaatattaaaacaaatactgctcttgttgaaaaagctcgtaagggtgtaatggaatttttgttagctaaccatcccttagattgcccagtgtgtgatcaaggaggtgaatgtgatctccaagatcaatcaatgtactatggggtagacaaatcaagatttaaagaaaacaaaagggcagtccctgaaaaaaatatgggaccattgattaaaactcaaatgaccagatgtattcattgtacgaggtgtgtaagatttgcaacagaagtagcaggggttccagaactaggtgctataggtagaggggaagatatgcaaattaccacttatttagaacaatcaatgcaatctgaattgtctgctaacgttgtagatttatgtccagtaggagcccttacctcaaaaccttatgtttttgaaaact

SEQ ID NO: 221917 - DNA, 312 bp, Unknown
  Bacterial polypeptide expressing nucleotide sequence isolated from the Sargasso Sea
tctacgcagcgaaaagcatagtaagtttttttgctcatgaatcttgtggtcaatgtactccttgtagagaaggaactacatggttagaaatgatactggagcgaatagcaagcggaagaggaaggctgtcagacataagcttgttggtagatgtttgtgataatatttcaccaggtttgtcgtggccacctaaaatgacaacaatatgtcctttaggtccatctgcagtatctccaataacgtctttgttagataatttttcagatgaattaatgaaaatgttaccaacaaaaattcctattgctcaatgag

SEQ ID NO: 221918 - DNA, 607 bp, Unknown
  Bacterial polypeptide expressing nucleotide sequence isolated from the Sargasso Sea
ccttacttcccagcagtaaaaggtttatacatgaaaccaactttggtaaataacgttgaaacaatttcctctgtaccttggataattgagaatggtggcgaagagtacaacaagttgggcgttgaaggctctacaggtactaggatttttagtttgtctggacatgtaaataacccaggaaactatgaaatcgaaatgggcagttcttttggtgaatttgtagaaacacttggtggaggtataagaaataataaaaaagtcaaagcttatatacctggaggtgcttctgcaccatggtttagaggagatcagctagacataaaaatgacaattgatgatgtagctaacaacaattcaatgcttggctcaggtgctgtggtaatgatggacgaagataccaatcttgtaagtgcggcaaaaagcatagtcagtttttttgcacatgaatcatgtggtcaatgcactccatgtcgtgaaggaacaacgtggcttgaaatgatactagataggatagctagtggtagagggagaacttctgaaaagaatttactacttgatgtttgcgacaacatctcaccaggcttgtcatggccgcctaaaatgacca

SEQ ID NO: 221919 - DNA, 460 bp, Unknown
  Bacterial polypeptide expressing nucleotide sequence isolated from the Sargasso Sea
aatgccattaataccaaaagataaatgtgagactttgactatggacttcgactcattgatggctgaaaaaagtggactaggtacagctggtgtagttgtgattaataaagatcaagacattataaaatgtatggctcgaatagcgagattttacaaacatgaaagttgtggtcaatgcacaccttgtagagaaggttcgggctggatgtggagaatgcttgaaagaatggcaaaaggagaagcgtccaaagatgagataaacatgttgggtgatgttacaaaacaaatagaaggtcatacgatttgtgcatttggcgagggttcttcttggccagttcaaggtttattaagacatttcaaagatgaaattaaaaaaagaaataaatttgatccaattgtaaaagaaaataaaaatataccttatttggtagatcaacacttattggataaaaatgcttaa

SEQ ID NO: 221920 - DNA, 772 bp, Unknown
  Bacterial polypeptide expressing nucleotide sequence isolated from the Sargasso Sea
catgcaagcatgtgaagcagcaggagaggaaatacccaggttttgttatcatgaaaaattatcaatagctggaaattgcagaatgtgtttagtagatattgagaaatcaccaaagcctgttgcatcatgtgctatgcctgccacaaatgaaatggttattaaaactaatacagaaaaagttgaaaaggcaagaaaaggagtaatggagtttttattaattaatcaccctttagattgccctatctgcgaccaaggaggagaatgtgatcttcaagaccaatcactttactttggtaaatctaaaagcagatatgaagacacaaaaagggctgtagaagataaaaattttggccctttaattaaaaccgttatgacaagatgtattcattgcactagatgtgtaaggtttatggatgaaattgctggtactcacgaattaggtgcagttaatagaggtgaaggaatggaaataacttcttctatagagggtggattaacaagtgagctttctggtaatattatcgatctctgtcctgtaggagcattgacttcaaaaccatatgcttttacagcgaggtcttgggagcttaaccattttgactcaatagatattagcgatgcagtagggtcaaatactagaattgatgaatttaatggagaaataaaaagaattcttcccagagaaaatgatgaaataaaccaagaatggttatctgataaagcaagatttttttatgacggtttagaaaatcaaagacttgataaacctttc

SEQ ID NO: 221921 - DNA, 751 bp, Unknown
  Bacterial polypeptide expressing nucleotide sequence isolated from the Sargasso Sea
aatgcccaaggtaaccgtcgacggaaccgaaatcgaagtcccgcagggcgcgaccgtcctgcaggcgtgcgagcttgcggggaaggaaatcccgcgtttctgctatcatgagcggctgtcgatcgccggcaactgccgcatgtgcctggtcgaggtgaagcccggaccgcccaagccgcaggcaagctgcgcgctgccggcgagcgagggtcaggaaatccgtaccgacacgccgatggtaaaggcagcgcgcgaaggcgtgatggaattcctgctgatcaatcacccgctcgattgcccgatctgcgatcagggcggcgagtgcgatctgcaggatcaggcgatggcctatggcaagggccatagccgctatgacgagaacaagcgcgcggtcactgagaaatatatgggcccgatcgtcaagacgatcatgacccgctgcatccattgcacccgctgcgtccgtttcgccgaagaggttgcgggcgtggaggaaatcggcgcgatctatcgcggtgaggatatgcagatcaccagctatctcgaacatgcggtgtcgagcgagctgtcgggcaatgtcgtcgacctgtgcccggtcggcgcgctgacgagcaagccttatgcgttcgaagcgcggccgtgggaactcaacaagacactcgccattgatgtgatggacgcggtcggcaccaatatccggctcgacagccggggtcgtcaggtgctgcgcagccttccgcgcgtcaatgac

SEQ ID NO: 221922 - DNA, 384 bp, Unknown
  Bacterial polypeptide expressing nucleotide sequence isolated from the Sargasso Sea
taaaattttttgtatttcaggaaatgtcaataatccttgcaatgttgaagaagaaatggggattccattaaaaaatttaatagaaaatcatgcaggaggagtaattggcggatgggaaaatttgaaagcagtaattcctggtggatcttcaatgcctttgttgccaaaaaaaacatgcgatacaatcacaatggattttgattcattaattcaggaaaaaagtggactaggcactgcaggagtagttgtaataaataacgatcaagacataattaaatgcatagcaagaattgctaggttttataaacatgaaagttgtggccaatgtacaccatgtagagagggaactggatggatgtggagaatgcttgaacgtatgtcaag

SEQ ID NO: 221923 - DNA, 700 bp, Unknown
  Bacterial polypeptide expressing nucleotide sequence isolated from the Sargasso Sea
atgggactatacaacaaaccaacactagtaaataatgtagaaacaatatcttcagttccttggataattcaaaattcggggaaagagtattcaaaacttggtgttgaaggatcaactggaacaagaatttttagcttgtcaggccacgtaaataatcctggaaattttgaaattgaaatgggtcaaagctttggtgaatttatagatacatttggaaaaggaatcaaaaataacaaaaatgtcaaagcttatattcccggaggtgcttcagcgccatggttcaccggtgatcagttagatataaaaatgacaattgatgatgttgcaaatgcaggatcaatgttgggttctggtgcggtagttgtgatggatgaagatactaatttagtttatgctgctaagagtatcgtaagtttttttgctcatgaatcatgtggtcaatgtactccctgcagagaagggacaacttggctagagatgattttagaaagaattgcgagcggcagaggtagactttctgatattagtttgttgattgatatttgcgacaatatttcacctggattagattggccaccaaaaatgacaacaatatgtccacttggtccttcagctgtatctccaattacatcattgctaaataacttttcagaagagataacaaatatgcttccaacaaaaattccaattacacaatgac

SEQ ID NO: 221924 - DNA, 681 bp, Unknown
  Bacterial polypeptide expressing nucleotide sequence isolated from the Sargasso Sea
aatgcttaagttaaaagtaaacgatattgaagtagaagttgaagagggactaactgttcttcaagcttgtgaaaaagctggagctgaaataccaaggttctgctatcatgaaaaattatcaatcgctggaaattgcaggatgtgcttagttgaaatggaaaaatctccaaaaccaatagcatcgtgcgcaatgccagcagcagacggaatgataattaaaacgaatactcctaaaattgagaaatcaagaaaaggtgtgatggaatttttactggcaaatcaccctttagactgtcccgtttgtgatcaaggaggtgaatgtgatttacaagatcaatcaatgttttatggaatagataagtctagatttaaagaaaataaaagagcagttcctgataaaaatatgggaccacttatcaaaactcaaatgacaagatgtattcattgcactcgatgtgtaaggttcgcaactgagatagctggtgttccagagttgggagcaattggtagaggtgaagatatgcaaataaccacttatttagaacaatcagttcaatcagaattatcgggaaatgtaattgatctttgtccagttggagctcttacatctaaaccttatgtttttgaggctagaccatgggaattaaaaaaaactgagacaattgatgttatggatgcagt

SEQ ID NO: 221925 - DNA, 652 bp, Unknown
  Bacterial polypeptide expressing nucleotide sequence isolated from the Sargasso Sea
tcatcccttggtagaccaaaaaatactggatctaaaatatattgtatttcaggaaatgtgaataatccctgcaacgtagaagaagaaatgggaattcctttaaaagaattaattgaaaaacatgcaggtggagtaataggtggatgggaaaatttaaaagcagttatacctggcggttcatcgatgcctttactaccaaaagagacatgtgaaacaattaaaatggactttgatgcatgtgttgagaataaaactggtttaggaacagctggtattgtggttataaataaagatcaagatataattaagtgtatggctagaattgcaagattttataaacacgagagctgtggtcaatgtacaccatgtagagaaggttctggttggatgtggagaatgttagaaagaatggcaaaaggtgaagccacaagagatgaagtagatatgttattagatgtaacaaaacaaattgaaggtcatactatttgtgcttttggagaaggatcttcgtggcctgttcagggattaatcagaaattttaaagatgaaataattgaaagaaataagtttgatccaattgtgaaaaagcaaaaagatataccttatttagttgatcaacatttattagaaaaagaaaatgctaaaacttaaa

SEQ ID NO: 221926 - DNA, 707 bp, Unknown
  Bacterial polypeptide expressing nucleotide sequence isolated from the Sargasso Sea
aatgcctaaaattataataaatggtaacgaaattgaatttaaaaaaggcatgacagtacttcaagcttgcgaactagcaaacgttgaaataccaagattttgttatcatgaaaaattatccattgctggtaattgcaggatgtgtctagttgagttggaaaaatcacctaaaccaatagcctcgtgcgcaatgcctgctgctgaaggtatgaatattaaaaccaatactgcctttgtggaaaaagccagaaaaggagttatggaatttttacttgcaaatcacccattagactgcccggtttgtgaccaaggaggcgaatgtgatttacaagatcaatcaatgtattatggagtagacaaatcaagatttgtcgaaaacaaaagacaagttaaagaaaaatatatgggtcctttgattaaaactcaaatgactagatgtatccattgcacaaggtgtgtgagatttgcgactgaggttgctggtgttcctgagattggagcaataggtcgaggtgagaatatggagataactacttacttagaaaaagcaatgcagtcagaactatcagcaaacgttattgatttatgtccagttggagcccttacttcaaaaccatatgcatttgaggctcgaccttgggaactaaaaaaaactgaaagtgtagacgttatggacgctgttggctcgaatataagagttgatactt

SEQ ID NO: 221927 - DNA, 628 bp, Unknown
  Bacterial polypeptide expressing nucleotide sequence isolated from the Sargasso Sea
gatggcggtagcacagtcgggttcaaccggtcttgaacttccagagaacgttgttgtcagtcgactcgatgaactagcgagttggtgccgaaaaaacagtttgtggcctatgccatttgcaactgcctgttgtggtattgagctcatggcaactggagctgccaaacatgacctcgctcgattcggtgctgaagtttttcgtttcagccctcgtcaatgtgacttgatgatcgttgctggtcgggtcgtcatgaaaatgctgcctgtgctccaaagaatttggcagcaaatgcacgagccaaagtggtgcatatcgatgggtgcctgtgcaagcaccggcggcgtttttgacacctatgccgtcgttcagggaattgatcggtttattccggttgatatgtatgtgcctggttgtcctccacgcccagaacaactcatacaagcgatcattgatttacaagacaagattcaacaagaaggcacacttaagggccgtgagttcaatacccgtcaacgtcaggaacaaaagcgtgctcttgtggaatacccagagattctttcactcgacgcgtcccgtaatccaaatttgcaacgcgagctttcaaatcctgtcactaatccaaactaa

SEQ ID NO: 221928 - DNA, 853 bp, Unknown
  Bacterial polypeptide expressing nucleotide sequence isolated from the Sargasso Sea
atgcctaaaattataataaacgataaagagatagaatttgattcgggcatgactgtgctccaagcttgcgagcttgctgatgttgaaattcctagattttgttatcacgaaaaattatctatagctggcaattgtagaatgtgtcttgttgaaatggagaaatcagcgaagcccatcgcatcctgtgcaatgcctgcagctgaaggaatgaaaattaaaactaataccccaatggtagagaaagctagaaaaggtgtaatggaatttttacttgcaaatcatccattagattgtccagtttgtgatcaaggtggagagtgtgatttgcaggatcaatcaatgtattacggtttagacaaatcaagatttgttgaaaacaaaagacaagttaaagataaatatatgggaccgttaattaagactcaaatgacgagatgtattcattgtacaagatgtgtaagatttgcaacagaagtagcaggagtgcaagaaataggagcgataggtcgtggagaaaacatggagattactacttatcttgaaaaatcaatgatgtctgaactttcagcaaacgtcatagatctctgtccagtaggagccttaacctcaaaaccatatgcatttgaggcaagaccttgggagttaaaaaaaactgagagtatcgatgtaatggatgctgttgggtcaaatatcagagttgatacatacaattgggaagtaaaaagaattttacctcgtatgaataacgatattaatgaagagtggatttctgataaaactcgatattcttgtgatggtttgcttaaacaaagattagatgtcccttatattaagagaaataataaactcgaaa

SEQ ID NO: 221929 - DNA, 853 bp, Unknown
  Bacterial polypeptide expressing nucleotide sequence isolated from the Sargasso Sea
aaagtttttgagacagaaaaagggaaacttcttattgaagcatgtgaagataatggtctagaaattcctagattttgttggcacaaaagaatggagcctgttggaatgtgcagaatgtgtttagttgaagttgaaactccaagagggaaggctttagttccttcttgcacccaagaggtaacagagggtatggtagtcgatacaacatcggaagtagttcaaaaggcacaagaaggtgttttagaattcttactaataaatcacccattagattgtcccgtatgtgatagagcaggagagtgccctttgcaagatcagactatggctcatggtccaggtgagagcaggtttatagagccaaaaagaaagtttgaaaagccaattcctatatccgacctcatacttttagatagagaaaggtgtgtactttgtgacaggtgtacaaggttctcagaggagatttctggagatcctttaattcagtttgttcaaagaggaaataatactcaaattcttacttttcctgacgaaccattcaactcttatttttcagggaatacagtacagctatgtccagtaggtgccctaacctcaacatcttataggtttaaagctaggccgtgggacctaaaagagttttcctcagtttgcaatggttgttcaacaggttgttctgtcgagctaaatacatctcaagaaaaaatgttaagaatacttggtgaagataatgaccatacaaatcaaggttggatatgtgataagagtaggtatggctttgaatatattcattcagaaaacaggatagtaaacccacacattaaggcggaaaatgaatttgttgaaacaaattgga

SEQ ID NO: 221930 - DNA, 539 bp, Unknown
  Bacterial polypeptide expressing nucleotide sequence isolated from the Sargasso Sea
actaatcgaaaaccatgcaggaggagtagtcggtggttgggaaaacctaaaagctgtaattcctggtggttcttcaatgcctttactaccaaaaaatatttgtgagacaatttcaatggattttgactcactaattgcaaacaaaagtggtttaggtaccgctggaatagtcgtaataaataaagatcaagatattattaaatgcatggcaagaatcgcaagattctataaacatgaaagttgtggacaatgcacgccatgcagagaaggttctggatggatgtggagaatgttagaaagaatggcaagtggagaagcttctaaagaggaagtcgatatgctttttgatgtaacaaaacaaatagaaggccataccatatgtgcttttggagaaggatctgcttggccagttcaaggattattaaggcattttaaagacgaagtagtaaaaagaaataactttaacccattaatagatagagataaaaaaataccttatttagtagatcaacatttattagaaaaagacaatgcttaaa

SEQ ID NO: 221931 - DNA, 535 bp, Unknown
  Bacterial polypeptide expressing nucleotide sequence isolated from the Sargasso Sea
atgcttaaagatcaggatagaatatttaaaaacttatataatgacatgggcgcagatgttgctgctgctcaaacaagaggggattgggtaaatacctctgatttaacctcaaaaggaagagattggataattaacgaaataaaagactctcaattaagaggtagaggaggtgcaggtttccctactggtttaaaatggtcttttgctccaaaagaagttggttctagacctcattatttagtcattaatgctgacgagtcagaaccaggcacgtgtaaagatagagatattttaagatttgaacctcataaattaattgagggatgtttgatagcctcatacgctgttcaagcacatgtttgttatatttatatcagaggtgaatattttatagagggtcaaaaattacaaacagccattgatgaggcttatgaaaagaagttattaggtaaagatgctgctggaactggatgggatttagatatctacattcactatggagcaggtgcttatatttgtggtgaagaaacagctt

SEQ ID NO: 221932 - DNA, 413 bp, Unknown
  Bacterial polypeptide expressing nucleotide sequence isolated from the Sargasso Sea
taaaatattttgtatttcaggaaatgttaatagcccatgtaacgttgaggaagagatgggtattaaattaaaagatttaatagaaaaacatgctggtggagttgttgggggatgggataatttacaagctgttattccaggaggttcatctatgccaatgttaagcaaagaaataagtgaaaatataactatggactttgattcactagtggaaaataacagtggtttaggaacagcaggaataattgttataaataaagatcaagacattattaaatgtatggctagaatagccagattttataaacatgaaagttgtggacaatgtacaccttgtagagaaggttcaggctggatgtggagaattttagaaagaatggcaaagggagaagcatccaaagatgaggttaata

SEQ ID NO: 221933 - DNA, 925 bp, Unknown
  Bacterial polypeptide expressing nucleotide sequence isolated from the Sargasso Sea
aagaaaatgcttaaacttaaagtaaatgatattgatgttgaagtagaagaaggaacaactgttttacaagcctgtgaacaagcaggtgcagagataccaaggttctgttatcacgaaaaattatcaatagctggtaattgtaggatgtgtttagttgaaatggaaaaatctcctaaaccaatcgcatcttgcgcaatgcctgctgcagaggggatggtgctgaaaactaatactgaaaaagtgaaaaaagcaagaaaaggtgtaatggaatttttactagcaaaccatccacttgattgtccagtatgtgatcaaggcggagaatgtgatttacaagatcaatccatgtattacggaattgataaatcaagatttaaagaaaataaaagatatgtacccgaaaaatatatgggtccactaattaaaactcaaatgacaagatgcattcattgcacaagatgtattagatttgcaacagaagttgctggagttcctgagcttggagcaattggcagaggtgagaatatgcaaatcaccacttatttagaaaaagcgatggaatctgaactctcagctaatgttattgatttatgtcctgtcggtgctcttacatcaaaaccttatgtcttcgaagcaagaccttgggaactaaaaaaaactgagacaattgatgtgatggatgctgttggatcaaatataagagtggatacatacggatgggaagttaaaagagttcttccaagaattaatgaagaaataaatgaagaatggatatcagataaaactagatatgcatgtgatggcttaaaaaatcaaagattagatacaccctatgttaagattaataataaattaaagccatcaagttgggatgaagcttttaaagctgtatctgaaagaatttcaaaaacaaagtctgaaaaaa

SEQ ID NO: 221934 - DNA, 556 bp, Unknown
  Bacterial polypeptide expressing nucleotide sequence isolated from the Sargasso Sea
atgaatattcctttaaaagaattaatagaagttcatgctggaggagtagttggtggatgggataatttacaggcagtgattcctggtggttcttcaatgccactaattcctaaggaaaaatgtgaaacattgactatggattttgactccttagtagcagaaaaaagtggactaggaactgccggtatagttgtaattaataaagatcaagacatcattaaatgcatggcaagaattgcaagattttataaacatgaaagttgtggacaatgcacaccgtgtagagagggctctggttggatgtggagaatgttagaacgaatggctaaaggtgaagcttctagagatgagattgatatgttaggtgatgttacaaaccaaatagctggtcatactatttgtgcttttggagaaggttcttcttggccagttcagggtttgctaaggcatttttcgaaagaaatcaaaaaacggaataaatttgatccaattataaaagaacaaaaagatataccttatttagttgatcaacacttattggataaaaatgcttaaa

SEQ ID NO: 221935 - DNA, 421 bp, Unknown
  Bacterial polypeptide expressing nucleotide sequence isolated from the Sargasso Sea
tatggattttgactccttaatggcagaaaaaagtggattaggaacagctggagtggttgtaattaacaaggatcaagacatcatcaaatgtatggcaagaattgctagattctataaacatgagagttgtggtcaatgcacaccttgtagagagggatcaggttggatgtggagaatgttagagagaatggctagaggagaggcatctaaagatgaagttgatatgttaagtgatgtaacaaaacaaatagagggtcatactatttgtgcttttggagaaggatcttcttggcctgtacaaggtttgttaagacattttaaagatgaaatcaaaaaaagaaataaatttgatccaattgtaaaagagaataaaaatattccttatttagtggatcaacacttgttggataaaaatgcttaa

SEQ ID NO: 221936 - DNA, 661 bp, Unknown
  Bacterial polypeptide expressing nucleotide sequence isolated from the Sargasso Sea
gatgcctaaaattaaaattaacgataaagaaatagagtttgaaaatggaatgactgttttacaagcatgtgaaatggcaggagcagagattccaagattttgttatcatgaacgtctttcaatagcgggaaattgtagaatgtgtttggtcgaaatggaaaaatcatcaaaacctattgcttcttgtgcaatgcctgcagcagagggaatgagcattaaaactaatactcagatggtagagaaagcaagaaagggggttatggaatttcttttagcaaaccatcctttagattgcccagtttgtgaccagggaggagaatgtgatttgcaagaccagtctttatattatggttttgataaatctagattcaaagaaaataaaagagcagtcgaagataaatatatgggtccactaatcaagacacaaatgaccagatgtattcattgtactagatgtataagatttgcaactgaagttgctggagtttcagaattaggtgctatcggaagaggagaggatatgcaaatagctacttatttagaaaaatcaatggagtcggagctttcggggaatgttattgatctctgcccagttggagcattaacttcaaaaccttatgcttttgaagctagaccttgggaactaaaaaaaactgaaagt

SEQ ID NO: 221937 - DNA, 736 bp, Unknown
  Bacterial polypeptide expressing nucleotide sequence isolated from the Sargasso Sea
ccagcattaataggattatatggttgtccaaccattgtgaataatgtcgagacagttgctgttgttcctacaattttaaaaagaggaagtaaatggtttgcttcactaggtaaaaagaagaacacaggtacaaaaatattttgtatttctggaaatgttaataatccatgtaatgtagaagaggaaatgggtatttctttaaaagagttaatagaaaaacatgcgggaggagtaattggtggttgggataatttgaaagcagttataccaggaggatcatcaatgccacttttacctaaagaaatatgtgaaaaacttacaatggattttgacacattaattgaaaacaaaagtggattaggaacagctggcataattgttataaacaatgatcaagatattattaaatgtatggccagaatagcacgtttttataaacacgaaagttgtggacaatgtacaccttgtagagagggatcaggatggatgtggagaatgttagaaagaatggctcggggagaagcatcaagagaagaagttgatatgttattagatgtaactaaacaaatagaggggcatactatatgtgcttttggagaaggttcagcctggccgatacaaggattgttaaggcattttaaaaaagaggttgccaaaagaaatgatttcaatcctttagtaaacaaaaatagaaatataccttatttagtagatcaacatttactagaaaaataaa

SEQ ID NO: 221938 - DNA, 386 bp, Unknown
  Bacterial polypeptide expressing nucleotide sequence isolated from the Sargasso Sea
aggtaccgcaggaatagttgtaataaataatgatcaagacatcattaagtgtatggcaagaatagcaagattttataaacatgaaagttgtggccaatgtactccatgtagagaaggatcaggctggatgtggagaatgttagaaagaatggcaaaaggagaagcatcgagagaagaagttgatatgctgatggatgttacaaaacaaatagaaggtcataccatttgcgcatttggagaaggatctgcttggccagttcaaggtttattaagacattttaaaaaagaaattgaaaaaagaaataattttaatccattaataaatacaggacaaaaaaatccatatttagttgatcaacatttattagaaaaagaaaatgcttaaa

SEQ ID NO: 221939 - DNA, 742 bp, Unknown
  Bacterial polypeptide expressing nucleotide sequence isolated from the Sargasso Sea
aatgaaagaaactttattacttaccaaacacatgcgcgattttcctgagaacagtcacaatattgatgtttatgaaaaaaataatggctacagtgctttaaaaaaagtcttaaaagaagacaatccagaaaatgtaattaacgaaattaaagattcaaacataagaggtagaggaggagcaggttttcctacaggggtaaagtggggctttttagccgaggatgaagacaggtatttagtaattaatggtgatgaatctgagccgggtacatttaaagataggattttattggaaagagatccacaccaattaattgaaggtgtaataattacatgttttgcatcaaatattaaaaaagcattcatttatattcgtggtgaatatgcaaaaccggcaagaagagtacaagaagctgtagagcaagcttatgagaaaggatatctgggcgataacatacttggaaccaatttatcacttgatattgtagttcacctaggggcaggagcatatatatgtggagaagaaactgctcttctaaactcacttgaaggaaagagaggagaaccgagactaaaaccaccttactttcctgccgtgatgggattatataacaaaccaactttggttaataatgttgaaacaatatcttcagttccatggatcataaataattcaggaaaagagtatgcaaagcttggagtagagggttcaacaggaacaagaatctttatctttcaggac

SEQ ID NO: 221940 - DNA, 841 bp, Unknown
  Bacterial polypeptide expressing nucleotide sequence isolated from the Sargasso Sea
caagcatgcgaattggccgatatagaaataccaagattttgttatcacgaaagactttcaatagctggaaactgtagaatgtgtttagtagaaatggataaatctcgcaaaccgatagcgtcctgcgcaatgccagcagcagaaggaatgaatataaaaactaatactcaaatggttgaaaaagctagaaaaggtgtaatggaatttcttttagctaaccatcctttagattgtccagtatgtgatcaaggtggggagtgtgatcttcaggatcaatcactctattatggtgtagataaatcaagattttcagaaaacaaaagatttgttagtgaaaaatatatgggtccattaatcaaaacgcagatgacaagatgtattcattgtactcgatgtgtaagattcgccacggaggtagctggagtgcctgagataggagctgtaggaagaggagagaatatggagataacaacttatttagaaaaatcaatggagtcggagttgtctggcaatgtaattgatctgtgtccagttggcgcgttaacttcaaaaccatatgctttttcagctagaccttgggaattaaagaaaactgaaagtattgacgtattagatgctgttggttctaacattagagtagacacatatggatgggaagtaaaacgaatacttcctaggttaaatgaagatattaacgaagagtggatatcagacaagacaagatactcttgtgatggtttgcttaaacaaagattagatatcccttatattaaaaagaataataaattaataaaatctagttgggatgaagcaatagaaattatcataaaaaaattaaaga

SEQ ID NO: 221941 - DNA, 645 bp, Unknown
  Bacterial polypeptide expressing nucleotide sequence isolated from the Sargasso Sea
tgtgaacaggcgggcgttgaggttccaaggttttgttaccatgataaattgtctatagcaggaaattgtagaatgtgtttggttgaagttacaccgggccctcccaaacctcaagctagttgtgctcttcctgctactaacggacaagttatatctactaagtctaaaatggtcgtagacgccagaaaaggtgtgatggagtttttacttattaaccatccacttgactgtccaatctgtgaccagggaggagagtgtgatcttcaggatcaggcaatggaatacggctcaggaaaatcaaggtttactgaaaataaacgtgctgttaatgaaaaatcaatgggcccattaattaaaactcatatgaccagatgtattcattgtacaagatgtgtaaggttttcaactgaagttgcaggagtgaacgatcttggagctttaggaagaggtgaaaatatggagataactacatatttggaaaaatctatttcttctgaactttctgcatgtgtaatagatttatgtccagtaggagcgttaacaagtaaaccttatgcttttaatgcaaggccttgggaattagataaaatagaatctgtcgatgtaatggatgctataggtagtaatattagaattgatgttcga

SEQ ID NO: 221942 - DNA, 502 bp, Unknown
  Bacterial polypeptide expressing nucleotide sequence isolated from the Sargasso Sea
gttggaaaatttacaagcagtaataccaggtggatcttcaatgcccctcatccctaaagatatgtgtgagactataaaaatggattttgattcacttgtagcagcaaaaagtggacttggaactgctggaatagtcgtaataaacaaggaccaggacattattaaatgcatggcaagaatagcaaaattctacaaacatgaaagctgtggtcagtgcacgccttgtagagagggtgtaggatggatgtggagaatattggagagaacagcccggggcgaagctactaaagatgatattaatttattatccgacgttacaaaacaaattgagggacacaccatatgtgcttttggagaaggatcagcctggcctgttcagggattattaagacacttcagaaaagaaatagacaagagatgtttttctgaaccaacatataaaaagaaaagaaaaataccgtatcttgtagatcaacacttattagatagaaaagatgcctaa

SEQ ID NO: 221943 - DNA, 642 bp, Unknown
  Bacterial polypeptide expressing nucleotide sequence isolated from the Sargasso Sea
aatgcttaaattaaaagtaaatgaagttgaagttgaagttgaagaaggtttaactgttcttcaagcttgcgaaaaagctggagttgaaataccacgattttgttaccatgaaaaattatctatagcaggtaactgcagaatgtgtttagttgaaatggaaaaatctcccaaaccaattgcttcatgtgctatgccagctgctgaaggtatgaatattaaaacaaatactactttagtagaaaaagctcgtaagggagtgatggaatttttattagccaaccatcccttagattgtccagtatgtgatcaaggtggtgaatgcgatcttcaagatcaatcaatgtactatggagtagacaaatcaagatttaaagaaaataaaagagctgttcctgaaaaaaatatgggaccattgattaaaactcaaatgacaagatgcattcactgtacaagatgtgtgagatttgcaacggaagttgctggagttcaagagcttggtgctattggaagaggtgaagatatgcaaattacaacctatctagagcaatcaatgcaatctgaattgtctgctaacgttgtagatttatgtccagtaggagcactgacatcaaaaccctatgtgtttgaagctagaccatggga

SEQ ID NO: 221944 - DNA, 824 bp, Unknown
  Bacterial polypeptide expressing nucleotide sequence isolated from the Sargasso Sea
catgagtacggacgcagtggagatcccggtcgtcgagatacaggtagacggcgagacggtggccgcccacccgggtgaactgctgatcgaggcttgcgagcgcgccggtacctacatcccgaggttctgccaccacagtcggatgaagccggttggcatgtgccgaatgtgcctcgttgaggtcgacacaggccggggctccactttgcagccctcgtgcatgctcgagtgtgcacccgggatgatcgttgacaccgaatccgagcgcacccgtaaggcccaagacggggtgctggagttcctgctcgtcaaccacccgctggactgcccggtctgcgacaagggcggcgagtgtcccctccaggaccagaccatggcctttggcccgggggagagccggttcgttgaggagaagcggcacttcgagaaaccgattcctgtcaacaacaatgtgcaactggaccgtgagcggtgcatcctctgtgaccggtgcacccggttcgccggcgaggtggcgggcgaccaactcattcacttcatggaccggggcggtcagactcaagtcaataccttccccgagcagccattttcttcgtacttcagtggtaacacggtgcagatctgtccggtgggtgcgctgacagccactccctaccgtttcaaggcccgcccctgggacctcgacgaggtggagtcgaccagcacgctcgacagcgtgggcagtcggatcgccgtgcagtcgtcacatgaccgagtgttgcgattccagggcgtggatgccgacgccgtcaactggggatggttgtcggacaaggaacggttcg

SEQ ID NO: 221945 - DNA, 727 bp, Unknown
  Bacterial polypeptide expressing nucleotide sequence isolated from the Sargasso Sea
tatgttgaaggacgctgatcgaatatttactaacatatacggtttggatgactggcgccttgaaggcgcgcgcgggcgtggagattgggatggcaccaaagagatcatgtctaagggccgggactgggtcgtcgaagaagtaaagtcttctggtttaagagggcggggcggcgccggttttcccagtggcctaaagtggtcatttatgccaaaggagccaactggtagaccgcactatctagtcgttaatgctgatgaaggtgaaccaggaacttgcaaagatcgcgacatgatgcgtaacgatccccacaagttagttgaaggttgcttgctcgctggatttgggatgggggccgacgctgcttatatctatattcgaggagaattctatcgagaggctgagcacctacagtctgccattgacgaggcatacgaagccggtttgattggtaaagacgcctgtggttctggctacaactttgatgtttatgtgcataggggtgcgggtgcctatatttgtggagaagaaatggccctcattgagagccttgagggcaaaaagggaatgccacgtttgaagccgccctttcccgctgttatggggctttatggctgtccaacaacggtaaacaatgttgagactatagcggtcgttccaacaatattgcgtcggggtggcgactggttttcgtctttcggtcgggaaaataatactggaacaaaggtt

SEQ ID NO: 221946 - DNA, 717 bp, Unknown
  Bacterial polypeptide expressing nucleotide sequence isolated from the Sargasso Sea
aatgcttaaacttaaagtaaatgatattgatgttgaggtagaagaaggaactacagtattgcaagcatgcgaacaagctggagcagaaataccaagattctgttatcatgaaaaattatcgatagctggtaattgtagaatgtgtttagttgaaatggaaaaatctcctaaaccaatagcctcttgtgcgatgccagctgcagaaggaatggtgcttaaaactaataccgaaaaagtgaaaaaagctagaaaaggtgtaatggaatttttattagcaaaccatccacttgattgtccagtatgtgatcaaggtggggagtgtgatttacaagatcaatctatgtattacggaattgataaatcaagatttaaagaaaacaaaagatatgtacctgaaaaatacatgggtccactaattaaaactcagatgacaagatgcattcattgtacaagatgtattagatttgcaaccgaagttgctggagttcctgagcttggagcaattggtagaggtgagaatatgcaaattactacttatttagaaaaagctatggagtctgaactctcagctaatgttattgatttatgtcctgttggtgcacttacatcaaagccttatgtcttcgaagctagaccgtgggaacttaaaaaaaccgaaacaattgatgtgatggatgctgttggatcaaatataagagttgatacatacggatggga

SEQ ID NO: 221947 - DNA, 883 bp, Unknown
  Bacterial polypeptide expressing nucleotide sequence isolated from the Sargasso Sea
ttaaaaaaagtcttaggcatgaagccggaagaagttgttcagactgtgaaggattctggccttcgtggaagaggtggagcaggtttccctacaggactaaagtggagtttcatgtcaaaagggactgggaagcccagctaccttattgccaacgccgatgaatcagaacctggaacatgcaaagacagagaactcatgctcaaggatccacatatttttttggaaggcatgatgataggttgttacgctatagggtgtcatcatggatatatatatataaggggtgagtttttcccggcaatcaagtctttaaatacagcagttgaagaattatatgcagatggtctgcttggtccggatcccttaggtagtggttttgatctggaccttacaattcacagcggagctggagcatatatttgtggagaagaatcagcattgcttgattctttggagggtaagcgtggtcagccccgagtcaaacctcctttccctgcgatatccggatttaatggttgtccaactagtgtaaataatgtggaaacgctggcatgtatgccatttattctaagtgatggcggtgttgatgcctttaaaagttttggtccagagaataattctggaacccatctggtcagtttgagtggtcatgtaagaaaaccgggggtttacgagctaaaaatggatgtaagcatgaaggatattatttacagtattggaggaggaattcgcaacggcaaaaaactcaaaggagtaattcccggaggatcatcttcatccgtaatgactgcagatgaagttgatgtactttacaattttgatgaactcacaaatattgatacaatgcttggctcagcagcaatgatggtattcgacgaagata

SEQ ID NO: 221948 - DNA, 802 bp, Unknown
  Bacterial polypeptide expressing nucleotide sequence isolated from the Sargasso Sea
attgatcaacatcttttggagaaagacagtgcctaaaattacagtgaataataaagaagttgaatttgaagaaggtatgaccgtacttcaggcctgtgaattagctggtgccgaaataccaagattttgttatcacgaaagactttctatagctggtaattgcagaatgtgtctggttgaaatggaaaaatctgctaagccaatagcctcatgtgcaatgcctgcaactgatggaatgaaaattaaaactaatacaccctttgtagacaaagcaagaaaaggtgtaatggaatttttattagcaaatcatcctttggattgtccagtatgtgatcagggaggagaatgtgatttgcaagatcaatcacttttttatggttttgataattctagatataaagaaaataaaagacaggttaaagaaaaatatatgggtcctttaattaaaacacaaatgaccagatgcattcattgtacacgatgcataagatttgcaactgaagttgctggtatacctgaactaggtgctataggaagaggagaagatactgaaatcactacctacttggaaaaatcaatggagtcagaattatcagctaatgtaatagatttgtgcccagtaggtgcgcttacatcaaaaccttatgcttttgaagcaaggccttgggacttaaaaaaaactgaaacaattgatgtcatggacgctattggatcaaatattagagttgatacctatggatgggaagttaagagagtcttacctagagtaaatgaggatattaacgaggagtggatatcagat

SEQ ID NO: 221949 - DNA, 310 bp, Unknown
  Bacterial polypeptide expressing nucleotide sequence isolated from the Sargasso Sea
gatattgggcgctggattgtgtcaggcgattttgccgcgcaatggagcctgcgctttgatacgatgaccgcggttatgctgattgtcgtgactggcgtgtcatcgatggtgcatgtgtattcgattggatatatgtcgcacgacaacgggcgggcgcgtttcatggcgtatctgtccttgtttacctttgccatgttaatgctggtaacagcggataatctggttcagttgttttttggatgggaaggtgttggcgtcgcctcttacttgctgatcggcttttggtataaaaaagagtcagcgccttcag

SEQ ID NO: 221950 - DNA, 646 bp, Unknown
  Bacterial polypeptide expressing nucleotide sequence isolated from the Sargasso Sea
aatgcctaaaataaatattgataacaaagaaatagagtttgagaatggaatgacagtaatgcaagcctgtgagcttgcaggatcagaaattccaagattttgttatcatgataaattatcaatcgctggtaattgtagaatgtgtctagttgaaatggaaaaatcaccgaagcctattgcttcttgtgcaatgccagctggtgaaggaatgaaaattaaaacgaattctaaacttgtaaaaaaagcaagaaaaggtgtgatggaatttttattaataaatcatcctttagattgtccaatatgtgatcaaggcggagaatgcgacttacaagatcaagcgctttattatggtttggataaatcacgatatgaagaaaataaaagagctgtaaaaaacaaatacatgggaccattagtaagcacaattatgactaggtgcattcattgcacaaggtgtgttaggtttgcaactgaagttgctggtgtgaatgatttaggtttattgggaaggggtgaaaaagctgaaataacttcatacctagaaaaaactattgattcagagctttcaggaaatgtaatagatttatgtcctgtaggagctttaactagtaagccctatgcattcaaatctagaccttgggaataa

SEQ ID NO: 221951 - DNA, 484 bp, Unknown
  Bacterial polypeptide expressing nucleotide sequence isolated from the Sargasso Sea
aatggtttatcttattgtctttttacctttattgggttctataattgctggtttttttggtagtaaacttggtgataaatttagtttatatctaacatcatctttactaataatatcgatggttttaggatggtatgaattttttcagctttcaactaatcacttagataaaacttatccattgatgacatggattaatgttggtgactttaacgttgtttggtcacttagatatgacatgctttcagctgttatgataatagttataacaacagtttcagccatggttcacgtttattctattggttatatgagtcatgataattctaaaccaagatttatgtcttatttaagtttatttacctttgcgatgttaatgctggtaactgcagataacctcatccaactattttttgggtgggaaggtgttggtgttgcttcttatttattaattggtttttggtatcataagcctactgctcat

SEQ ID NO: 221952 - DNA, 838 bp, Unknown
  Bacterial polypeptide expressing nucleotide sequence isolated from the Sargasso Sea
ggtgtggaaattcctagattttgctatcatgaaaaattgtcaattgctggaaattgtagaatgtgcttagtggaaatggaaaaatctcctaaacctatagcatcttgtgctatgcctgccgctgaaggaatgaatattaaaactaatactgcatttgtagagaaagctagaaaaggagtgatggaatttttacttgcaaatcatcctttagattgtccagtttgtgatcaaggtggagagtgtgatcttcaagatcagtcaatgttttatggtgttgataaatcacgttttaaggaaaacaaaagatctgttcctgaaaaaaatatgggaccactaattaaaactcaaatgacaagatgtattcactgtactagatgcgtaaggtttgcaacggaggttgctggagttcctgaaataggagcaataggaagaggtgaagatatgcaaataacaacctatttagaacaatctgtgcagtcagaattatcagggaatgtaattgatctttgtccagtcggggcacttacatctaaaccatatgtttttgaggcaagaccatgggaattaaaaaagacagagtctatagatgttatggatgctattggttctaatataagagtagatacttatggttgggaggtcaaaagagttttgccattgattaatgaggatataaacgaagagtggatatctgataaaactagatatgcctgtgatggtttatcttaccaaagactcgatacaccttttattaaatataatggtaaattcgaaaaagccagttgggaggaaacatttaaaatcataaaatccaaaatgaaggatacttcaaatgata

SEQ ID NO: 221953 - DNA, 613 bp, Unknown
  Bacterial polypeptide expressing nucleotide sequence isolated from the Sargasso Sea
actgggaacaaaaatttattgtatttcaggtaatgttaattatccatgcaatgttgaagaggaaatgggaatttcactaaaagatttaatagaaaagcatgcaggaggagtaattggtggatgggacaatctaaaagcagttataccaggaggttcttctatgccattattgcctaaaaatgtttgtgaaacaattaagatggattttgactcattagttgaacaaaaaagtggattaggtacagcgggcattgtagttattaataaagatcaagatataattaaatgtatggctagaattgcaagattctacaaacatgaaagttgtggtcaatgcactccttgtagggaagggtcaggatggatgtggagaatgttagagagaatggccaaaggtgaagcttcaaaagatgaagttgatatgcttatggatgttactaagcaaatagaaggacatacgatttgtgcatttggagaaggctctgcatggcctgtgcaaggattgcttagacattttaaaaaggaagtagcaaaaagaaataattttgatccattagttaatacgaataaaaaaattccttacttagtggatcaacatttactagacaaataa

SEQ ID NO: 221954 - DNA, 601 bp, Unknown
  Bacterial polypeptide expressing nucleotide sequence isolated from the Sargasso Sea
aatattttgtatctccggcaatgtaaacaaaccctgtaatgtagaagaggaaatgggaatctcactaaaaacattaatcgatactcatgcaggaggtgttgttggtggatgggacaatttaaaggcagttatcccaggaggttcatcaatgcccttacttccaaaaaatatatgtgaaactatcactatggactttgactctttagttaaagaaaaaagtggtttgggtactgcagggattgtagttattaataaagaccaggatatcattaaatgttttgcaagaattgctagattttataagcacgagagttgtgggcagtgtacaccatgtagagaagggtctggatggatgtggagaatgttagaaagaatgactaaaggcgaagcctcaaaagatgaagttaatatgttaatggatgttacaaaacaaatagaaggtcatacaatatgtgcttttggtgaaggttctgcttggccagtacagggtttgttaagacattttaaaaaagaagtcgaaaaaaggaataattttaatcctcttgtaaacgaaaataaaaatattccgtatttagttgatcaacatttgttagaaaaatag

SEQ ID NO: 221955 - DNA, 604 bp, Unknown
  Bacterial polypeptide expressing nucleotide sequence isolated from the Sargasso Sea
ttttgtatatctggaaatgtaaataatccttgtaatgttgaggaagaaatgaacattccattaaaagaactaattgaagtacatgctgggggtgtcataggtggctgggataatttgcaagctgtcatacctggtggatcatcaatgccattaataccaaaagataaatgtgagactttgactatggacttcgactcattaatggctgaaaaaagtggattaggtacagctggtgtagttgtgattaataaagatcaagacattataaaatgtatggctcgaatagcgagattttacaaacacgaaagttgtggccaatgtacaccttgtagagaaggttcaggctggatgtggagaatgcttgaaagaatggcaaaaggagaagcatctaaagatgagatagacatgctgggtgatgttacaaaacaaattgaaggtcatacgatttgtgcatttggtgagggttcttcgtggccagttcaaggtttattgagacatttcaaagatgaaattaaaaaaagaaataaatttgatccaattgtaaaagaaaataagaatattccgtatttagtagatcaacacttattggataaaaatgcttaaa

SEQ ID NO: 221956 - DNA, 529 bp, Unknown
  Bacterial polypeptide expressing nucleotide sequence isolated from the Sargasso Sea
agaggcgctaagtggttttcatctattggaaaaccaaaaaatactggtaccaaaattttttgtatttcaggaaatgtgaattccccatgtaatgttgaggaagaaatgggaattcctttgaaagatctaattgagaaacatgcaggtggagtagttggaggatgggataatcttcaagcagttataccgggcggctcatccatgcctttattacctaaaaaaatttgtgatacaattacaatggattttgattctttaattgaaaacaaaagcgggttaggaactgcaggtgtcgtagtaataaataaagaccaagatattgtcgaatgcatggcgagaatagcaaggttttataaacatgagagttgtggacaatgcaccccttgcagagaaggatcaggttggatgtggagaattttagatagagtcgtgaaaagaaaagcaacttttagtgatgtagaattactttcagacgtaactaaacaaatagagggtcatacaatttgtgcttttggagaaggttctgctt

SEQ ID NO: 221957 - DNA, 571 bp, Unknown
  Bacterial polypeptide expressing nucleotide sequence isolated from the Sargasso Sea
actgggcacaaaaatttttagtatttctggacatgtaaataatccttgtaatgtagaagaagaaatgggtatcggattaaaagaattaatcgaaactcatgctggaggagttataggaggatgggataatttgttagctgtcattcctggtggagctagcgtgcctttaattccaaaatcaatttgcgatactgtaaaaatggactttgatagtttgaaagaagttcaaagtggccttggcactgcagcagtaatagtaatgaataaatctacagacattgttgatgcaatttgtagactatcacatttttataaacacgaaagctgtggtcaatgtacaccatgcagagaaggaactggatggatgtttagaatgatggagaaaatggttaaaggtgatgctgaagtaaatgacattgataaacttctagatgttaccaagcaaatagaagggcatacaatatgcgcactaggagatgctgctgcgtggcctattcaaggtttaatgagacattttcgaccagaagtagagcgcagaatcaaagaatatagaataagtgaggttgcgtaa

SEQ ID NO: 221958 - DNA, 664 bp, Unknown
  Bacterial polypeptide expressing nucleotide sequence isolated from the Sargasso Sea
tacaacagttacgaatgtggaaacaattgcagttgctccaactataattataagaggtgcttcttggtttaattctattggcagagagaacaacacaggtacaaaaatttttagtatttcaggtcacgtaaataacccttgtaatgttgaagaagaaatgggtattggattaaaagagttaatcgaaactcatgctggcggtgttataggaggatgggataatcttttagctgtaattcctggtggagctagcgtacctttaattccaaaatcaatttgcgataccgtaaaaatggactttgatagtttgaaggaagttcaaagcggtcttggtactgcagcggtaatagtaatgaataaatctacagacatcgtggatgcaatatctagactttcacatttttataaacatgaaagttgtggtcaatgtacaccatgcagagaaggtactggatggatgtttagaatgatggagaaaatggttaaaggtgatgctgaagtaaatgatattgataaacttttagatgttaccaagcaaatagaagggcatacaatatgcgcactaggggatgctgctgcgtggcctattcaaggtttaatgagacattttcgaccagaagttgagagaagaattaaagaatacagaataagcgaggtggcataa

SEQ ID NO: 221959 - DNA, 577 bp, Unknown
  Bacterial polypeptide expressing nucleotide sequence isolated from the Sargasso Sea
atacaggaacaaagctattttgtatctcttggtcatgtaaattcgccctgcgttgttgaggaagagatgggtatccctctaaaagatttattagaattacatgcaggaggagttattggcggttgggataatttgttagctgttattcctggagggtcatcaactccactaattcctaatacaatatgcgaagatgtaattatggattttgattctttaaaaaatgtgggtacaggtttaggtacagcaggcgttatagttatggataaatctacggatataattaaagctatttggagattatcaaaattttataagcatgaatcttgtggacaatgcactccatgtcgggaaggaactggttgggtgatgagatctatggaaaaactaatacatggtaatgctgacatcaaagatatcgatatactgaaaaatgtttgtgatcaaatagaagggcactctatttgtgctcttggtgatgcagcagcatggcctgttcagggattaataaaacattttagacatgaaatagaaaatagaattaataactataatattttgaaagtagctgagtagg

SEQ ID NO: 221960 - DNA, 625 bp, Unknown
  Bacterial polypeptide expressing nucleotide sequence isolated from the Sargasso Sea
atggaaaaaaagaataaaactttaagtcttaattttggtccacaacatcctgctgctcatggggttcttagacttattttgcagttagatggagaagttgttgagaaagctgatccacatattggtttgttacatagagggactgaaaaacttatagaacacaagacatacacccaagctttaccatattttgatagactagattatgtagctccaatgaatcaagaacacgcttttgctttagcaacagaaaaattattaaatattgaaataccaatccgagctaaatacataagggtgatgttttgtgaaataggaagaatattaagtcatattttaaacatcacaacacaagcgctcgacgtaggtgcattaacaccatctttatggggattcgaggagagagaaacattgatgactttctatgaacgtgcctcaggctcaagattacacgcaaattattttagaacagggggcgtacaccaagatcttcccacaaagctaattgatgatatttcaaaattttgtgagagttttccaaatattattaatgatttagaggaacttcttactgataacagaatatttaagcaaagaaatgttgaaattggtattgtatcaaaac

SEQ ID NO: 221961 - DNA, 538 bp, Unknown
  Bacterial polypeptide expressing nucleotide sequence isolated from the Sargasso Sea
atgcttaaagatcaggatagaatttttaaaaatttatataatgatatggggtctgacgttgattcatctcaaaaaagaggagattgggttaacacgaaagatttaacagaaaaaggaagagattggataattaatgaaattaaagactcagaattaagaggcagaggcggtgctggatttccaacaggtttaaaatggtcttttgctccgaaagaaattggttcaagacctcattatttagtaattaacgccgatgagtcagaacctggaacatgtaaagatagagatattttaagatttgaacctcataaattaatcgaaggttgtcttattgcatcatacgctgttcaagctcatgtttgttacatatatataagaggtgaatattttattgatggtcaaaaacttcaaacagccattgatgaagcgtatgagaaaaacttacttggaaaaaatgctgcaggaactggttgggatttagatatttatatccattatggtgccggcgcatacatttgtggagaagaaacagcattac

SEQ ID NO: 221962 - DNA, 256 bp, Unknown
  Bacterial polypeptide expressing nucleotide sequence isolated from the Sargasso Sea
ctcaccaacaagatggcgcccgctatccgcaaggtctacgaccagatgcccgagccgcgctatgtgatctccatgggctcgtgcgccaacggcggtggctactaccactacagctactcggtggtgcggggttgcgaccgcatcgtgccggtggatgtgtatgtgcccggctgcccgcccacagccgaggcgctgctctacggcatcctgcagttgcaggccaagatcaagcggccccgggtgatccagcggtaaa

SEQ ID NO: 221963 - DNA, 223 bp, Unknown
  Bacterial polypeptide expressing nucleotide sequence isolated from the Sargasso Sea
atgtatacacctgacaacattcttacaacaacaattgataaagcggtaaggtggtctcgaactcaatctatgtggccagtaacctttggacttgcatgttgtgcaatagaaatgatggcagctggtagcgcaaagtatgatttagcaagatatggaatggaagtttttagagcatctccaagacaagcagatttaatgattgttgccggaagagctcacaaaa

SEQ ID NO: 221964 - DNA, 286 bp, Unknown
  Bacterial polypeptide expressing nucleotide sequence isolated from the Sargasso Sea
atggcaaaagaaacaaaaactttgaatctaaattttggacctcaacatcctgctgctcatggagttctgcgattaatattgcaattagatggtgaaattgttgaaaaagcagatccacatattggtttattacataggggaacagaaaaattaattgaaaacaaaacttatactcaagctgttccgtattttgatcgactagattatgttgccccaatgaaccaagaacatgcttttgccttagcaattgaaaaaatattaaaaatagaagttccgataagagctc

SEQ ID NO: 221965 - DNA, 505 bp, Unknown
  Bacterial polypeptide expressing nucleotide sequence isolated from the Sargasso Sea
gtggctgggacaacttgcaagcagttatacctgggtggatcatcgatgccacttataccaaaagaaaagtgtgaaactttaacaatggattttgactcattagtagctgaaaaaagtggacttggaacagccggagtggtcgttattaataaagatcaagatattattaaatgtatggctagaattgcaagattttataaacatgaaagttgtggacagtgtactccttgtagagaaggttctggatggatgtggagaatgcttgaaagaatggcaagaggcgaggcatcaaaagatgaagttgaaatgttgggtgatgtaacaaaacaaatagaaggtcatactatttgtgcttttggagaaggatcttcttggccagttcaaggtttgttaagacattttaaagatgaaataaaaaaaagaaataaatttgatccaattgtaaaagagaataaaaatattccttatcttgtggatcagcacctaatggataaaaatgcttaaa

SEQ ID NO: 221966 - DNA, 694 bp, Unknown
  Bacterial polypeptide expressing nucleotide sequence isolated from the Sargasso Sea
aatggcaaaagaaactaaaactttaaatctaaattttggacctcagcatcctgctgctcatggagttttgaggttaattttacagttggatggtgaaatagttcaaaaagcagatccacatattggtttattgcatagaggaacagaaaaattaattgaaaacaaaacatatactcaagctgttccgtattttgataggctagattatgttgcaccaatgaatcaagaacatgcttttgccttagcaattgaaaaaatattaaaaatagaagttccaataagagctcaatacataagagtaatgttttgtgagattggaagaatacttagtcatattttgaatgtcacaacacaagcaatggatgttggtgcattaactccgactttatggggatttgaagaaagagaaatattaatgggtttttatgaaaaagtttctggttctagattgcatgctaactattttagagctggaggagtacatcaagatctaccaaaaggattagataaagagatcggaaaattttgtgaaagatttccaaagataataaatgatttagaattacttttaactgacaaccgaatttttaagcaaaggaatgttgatataggagtagtatcaaaacaagatgctctcgattactctttttctggtgttatgttgagaggatctggcgttccatgggatttaaga

SEQ ID NO: 221967 - DNA, 533 bp, Unknown
  Bacterial polypeptide expressing nucleotide sequence isolated from the Sargasso Sea
tggtggtgttattggtggttgggaaaatcttaaagctataatacctggtggttcctcaatgcctatgcttccaaaagaaatttgtgagattattaaaatggattttgactctttagttgaacaaaaaagtggcctaggaacagctggaattgttgttatcaataaagaccaagacataattcaatgtatggctaggatcgcaagattttataaacatgaaagttgtggacagtgtactccatgcagagaggggtctggctggatgtggagaatgcttgagaggatggcaaaaggtgaagcctcaagagaggaagttgacatgcttatggacgtcacaaaacaaattgaaggacatacaatttgtgcttttggagagggttcatcatggcctgttcaaggattattaagacatttcaaaaaagaaattgtaaaaagaaataattttaatccacttgtaaataaagataataaaattccgtaccttgtagaccaacatttactagagaatgacaatgctgaaattaaaagttaat

SEQ ID NO: 221968 - DNA, 622 bp, Unknown
  Bacterial polypeptide expressing nucleotide sequence isolated from the Sargasso Sea
actggatctaaaatatatatgtatttcaggaaatgtaaataatccttgcaacgtagaagaggaaatgggaattccattaaaagaattaattgaaaaacatgcaggtggagtaataggtggatgggataatctaaaagcagtaatacctggtggttcatcaatgccattacttccaaaagaaacatgtgagacaattaaaatggactttgatgcatgtgtcgagaataaaactggtttaggaaccgctggtattgtggttataaataaagatcaagacataattaagtgtatggctagaatagcaagattttataaacacgagagttgtggtcaatgtacaccatgcagagaaggttctggatggatgtggagaatgttagagagaatggccaaaggcgaagcaacaagagatgaagtagatatgttattagatgtgacaaaacaaattgaaggtcatacaatttgtgcttttggagaaggatcttcatggcctgttcaaggattgatcagaaattttaaagatgaaataattgagagaaacaagtttgatccaattgtgaaaaaacaaaaagatataccttatttagttgatcaacatttattagaaaaagaaaatgcttaa

SEQ ID NO: 221969 - DNA, 883 bp, Unknown
  Bacterial polypeptide expressing nucleotide sequence isolated from the Sargasso Sea
gaatttgaaaatggtatgactgttatgcaagcttgtgaacttgctggaactgaaattcctagattttgctatcatgaaaaactttctatagctggaaattgtagaatgtgtttagtagaaatggaaaaagctccaaaacctattgcttcatgtgcaatgccagctgctgatggaatgattataaaaacaaacaccgatattgttaaaaaagcacgtaaaggcgtaatggaatttttattaatcaatcatcctttagattgtccaatctgtgatcaaggaggagaatgcgacctacaagatcaagcaatgtattatggctttgataaaactagatatgaagaaaataaaagagcagttcaaaacaaaaatatgggaccattaattaagacaataatgacacgatgtattcattgcacaagatgtgtaagattctctaccgaagtagcaggtgtcgatgatatcggtttattaggtcgaggagaaaatgcagaaattaccacttatcttgaaaagacaattgcatctgagctttcaggcaatgttatagacctttgtcctgtcggtgctttaacaagtaagccgtatgcatttaaatcaaggccatgggaactaactaaaacagaaacgtttgatgtatttgatggattaggttcaagtatcagaattgatacaagaggtaaaaaagtattaagagctttaccaagaataaatgaagaaataaatgatgaatggataagtgataagtctagatttgcaattgatggcctttcaaatcaaagacttgatagtgtttatttaaaatcaaatggtaatttaaaaaaatcctcatgggacgatgtatttactaatattaaagatcaaataattactagaggcaaaaaaa

SEQ ID NO: 221970 - DNA, 628 bp, Unknown
  Bacterial polypeptide expressing nucleotide sequence isolated from the Sargasso Sea
gatggcggtagcacagtcgggttcaaccagccttgaacttccagaaaatgttgttgtcagtcggctcgatgagctagcgagttggtgtagaaaaaatagtttgtggccaatgccatttgcaacagcgtgttgtggtattgagctcatggcaactggagctgccaaacatgatctcgctcgtttcggtgctgaagtttttcgtttcagccctcgtcaatgcgacttgatgatcgttgctggtcgcgtcgtcatgaaaatgctgcctgtgctccaaagaatttggcagcaaatgcacgagccgaagtggtgcatatcgatgggcgcctgtgcaagcactggtggtgtttttgacacctatgctgtcgttcagggaattgaccggttcattcctgttgatatgtatgttcctggttgtcctccccgtcccgaacaactcatacaagcgatcattgatttacaagacaagattcaacaagaaggcacacttaagggccgtgagttcaacacccgtcaacgtcaggaccaaaagcgtgctctcgtggaatgccccgagattctttcactcgacgcatcccgtaatccaaatttgcaacgcgagctttcaaattctgtcactaatccacactaa

SEQ ID NO: 221971 - DNA, 627 bp, Unknown
  Bacterial polypeptide expressing nucleotide sequence isolated from the Sargasso Sea
aaaatactgggactaaaatattttgtatatcaggaaacgtaaatgccccatgcaacgtcgaggaagaaatgggaattcctctaaaagatttaatagaaaaacatgcagggggagtagttggaggttgggataatcttcaagcagttattccaggtggttcatctatgcctttattgccaaaaaaagtttgcgatacgttaacaatggattttgactctctaattgaaaataaaagcgggttaggcactgcggggatagtagttattaataaagatcaggatattgttgagtgcatggctagaattgctaggttttataaacacgaaagttgtggtcaatgtactccatgcagagagggatcaggttggatgtggagaattttagatagagtggttaaaagaaaatctacttttagtgatatagatttactttctgatgtaacaaaacaaattgaaggacatactatttgtgcttttggcgaaggatcagcttggccagttcaaggtttgttaagacattttagaaaagaggtagaaagtcgttgtagagaagaacctttgattaagaaaaaattgaataacccttatttagttgatcaacatctattggagaataaaaatgcctaag

SEQ ID NO: 221972 - DNA, 211 bp, Unknown
  Bacterial polypeptide expressing nucleotide sequence isolated from the Sargasso Sea
atggcaaaagaaataaaaaaacttaatttaaattttggaccacaacatccagcagctcatggtgtgctaagattaattttacagttagatggtgaagttgttgaaaaagcagatccacatatcgggttattacacagaggaactgaaaaacttatagaaaataaaacatatatgcaagcagtaccatattttgataggctagattatgtgc

SEQ ID NO: 221973 - DNA, 807 bp, Unknown
  Bacterial polypeptide expressing nucleotide sequence isolated from the Sargasso Sea
atagcaggtaattgtagaatgtgtttagtagagttagaaaaatctcctaaaccaatagcatcttgcgcaatgccagcggcagatggaatgaaaattaaaactaatactccattcgtagataaggctagaaaaggtgtaatggaatttttactagctaatcatccattagattgtccagtgtgtgatcaaggaggagagtgtgatttgcaagatcaatcacttttttatggttttgataaatcaaggtttaaagaaaataaaagacaggtaggcgaaaaaaatatgggtcctttaattaaaacacaaatgacacgatgtatccactgtactagatgcataagattcgctaccgaagtagccggagtacctgagttaggagctattggaaggggagaagatatggaaataacaacctatctagaaagatctatggaatctgaactttcgggaaacgttatagatttatgtcctgttggagcattaacatcaaaaccatatgcttttgaagctagaccttgggatttaaaaaaaacagaaacaatcgatgtaatggatgcagttggttctaacattcgaatagacacttatggctgggaagtaaagagagttttacccagaattaatgaagatattaacgaagaatggatatctgataaaacgcgttatgcatgtgacggacttttgaaacagaggctggatgttccatacattagagaaaatggaaaattaaaaaaagcttcatgggatgaagcatttaaacttttgattcacaaattgaaattttttaagcctgatgaaattgcagga

SEQ ID NO: 221974 - DNA, 334 bp, Unknown
  Bacterial polypeptide expressing nucleotide sequence isolated from the Sargasso Sea
tatggcaagaatagcaaaattttataaacatgaaagctgcggacaatgtactccatgtagagaaggatcaggatggatgtggagaattttagagagagcagcaaagggagatgcaactaaagaggatattaatctattatctgaagttacaaagcaaattgaaggacacacaatatgtgcttttggtgaggggtccgcttggcctgtacaaggattattaagacattttagaagtgaaatagataaaagatgttttaatgaaccattgattaagaagaagagaaaaataccatatctcgttgaccaacatctgctagaaggtaaggatgcctaa

SEQ ID NO: 221975 - DNA, 492 bp, Unknown
  Bacterial polypeptide expressing nucleotide sequence isolated from the Sargasso Sea
tgaaagatctgattgaaaaacatgcaggtggtgtaattggaggttgggaaaatttattagctgtaattcctggtggagcaagtgtacctttattgcctaagtctatttgcgatacagttaaaatggattttgatagcctaaaagaagttcaaagtggattaggaactgctgctgttattgtaatgaataaatcaacagatatagttgaagcaatagctagattatcacatttttataagcatgaaagttgcggtcaatgtacaccttgcagagaaggtactggatggatgtacagaatgatggaaaaaatgattcatggaaatgttgaacatcaagatattgataaaattttagatgtgactaagcaaattgaaggtcatactatttgtgccttaggtgatgctgctgcttggcctattcaaggtttgtttagacattttagacctgaaattgaaaaaagaattcaagaaagaaatagaagagtagcctagt

SEQ ID NO: 221976 - DNA, 198 bp, Unknown
  Bacterial polypeptide expressing nucleotide sequence isolated from the Sargasso Sea
gatggttaaagaaaaaaaaacattaaatttaaattttggtccacaacaccctgcagctcatggtgttttaagattgatacttcagttagacggagaggtggttgagaaggctgatccccatataggattattacacagaggaacagaaaaattaatagaaaacaaaacatatattcaagctgtgccatactttgatcg

SEQ ID NO: 221977 - DNA, 826 bp, Unknown
  Bacterial polypeptide expressing nucleotide sequence isolated from the Sargasso Sea
gaagtcgaagttgaagaaggtttaactgttcttcaggcttgtgaaaaagctggcgttgaaattccaagattttgttatcatgaaaaattatcgatagcaggtaattgtagaatgtgcttagttgaaatggaaaaatcccctaagccaatagcttcatgtgctatgcctgctgctgagggtatgaatattaaaacaaatactgctttagtagaaaaagctcgtaagggagtaatggaatttttgttagctaaccatcctttagattgcccagtgtgtgatcaagggggtgaatgtgatctccaagatcaatcaatgtactatggggtagacaaatcaagatttaaagaaaacaaaagagcagttcctgaaaaaaatatgggaccattgattaaaactcaaatgactagatgtattcattgtacgagatgtgtaagatttgcaacagaagtagcaggagttccagaactaggtgctataggcagaggggaagatatgcaaattactacttacttagaacaatcaatgcaatctgaattatctgctaacgttgtagatttatgtccagtaggagcccttacatcaaaaccttatgtttttgaagctagaccgtgggaactaaagaaaactgaaacaattgatgtaatggatgcaattggatcaaatgtaagagtagacacatacgattgggaagtcaaaagggtacttccaattataaatgaagatattaatgaggagtggatctctgacaaaacgagatatgcatgtgatggacttctacatcaaagattagacaccccatttattaaatacaatggtaagtttgaga

SEQ ID NO: 221978 - DNA, 355 bp, Unknown
  Bacterial polypeptide expressing nucleotide sequence isolated from the Sargasso Sea
gatcaagacatcatcaagtgtatggcaagaattgctagattttataaacatgaaagttgtggtcaatgtacgccttgcagagaaggctgcggctggatgtggagaatgttagaaagaatggctaaaggagattctacatataaagaaatagatttattacaagacgtcaccaaacaaattgaaggtcatactatttgtgcatttggagaaggttctgcttggccagtgcaaggactccttcgtcattttagaaaggaaatagaaaaaagaagtcatgaggaaccattagttaagaaaaaaactaatattccttacttaattgaccaacatcttttggagaaggatagtgcctaag

SEQ ID NO: 221979 - DNA, 748 bp, Unknown
  Bacterial polypeptide expressing nucleotide sequence isolated from the Sargasso Sea
tccttttcctgcattaattggtttatacggatgccctaccattattaataatgttgaaactattgcagttgttccaacaatacttagaagaggaagtaaatggtttgctaacttgggtaaatcgaaaaatacaggaacaaaaattttttgcatttctggaaatgtaaacaaaccttgtaatgttgaggaagaaatgggtatttccttaaaagaattaattgaaatacacgcaggtggagttgaaggaggttgggataatttgcaagcagttatacctggtggttcttcaatgccattattgccaaaagaaatttgtgatacaattaatatggattttgactcattgatagctgaaaagagtggtttaggaactgctggaattgtagttattaataaagaccaagacattatcaaatgtatggcaagaatagctagattttataaacatgagagctgtggtcaatgtacaccttgcagagaaggatctggttggatgtggaggatgcttgagagaatggctagaggagaagccactagagatgaggttgatatgttgatggatgtaactaaacaaattgagggccacactatttgtgcatttggagaaggttcatcttggccagtacaaggtttattgagacattttaaaaacgaaattaaaaaaagaaataaatttgatccaatcgttaaggaagacaaaaatattccttatttggtagatcaacacttacttgataaaaatgtttaa

SEQ ID NO: 221980 - DNA, 831 bp, Unknown
  Bacterial polypeptide expressing nucleotide sequence isolated from the Sargasso Sea
aatggcaaaagaaaccaaaaaaataaatcttaactttggcccccaacatcctgcggcacatggagttctgagattaattttgcaattagatggtgaagtagttgaaaaagccgatcctcacataggactacttcacagaggaactgaaaaacttattgaaaataaaacttatatacaagctgttccttattttgatagacttgactatgtagctccaatgaatcaagaacatgcatttgctttagcaattgaaagaattttaaaaattgatgttccaataagagcccaatatttaagagttattttttgcgaaattggaagaattcttagtcatattttaaacgttacaacacaagcaatggatgtaggagctttaacacccacattatggggttttgaagaaagagaaactttgatgggtttttatgaaaaagtttctggatcacgtctccatgcaaattattttagagcaggtggtgtgcaccaagatttaccaaaaggtcttgatttagaaataagtaaattttgtgaaaaatttcctaaaataatagatgatctagaaacacttttaacagataatagaatatttaagcaaagaaatgttgatataggagttgtatctaagcaagatgctctagattattcattttctggagtaatgctaagaggttctggagtgccatgggatttaagaaaatctcagccgtatgattgctatgatcaattaaaatttaaaattccaatcggtaagaatggtgattgctatgatagatatctatgcagaattgaagaaatgagagagagcgtttacattattaaatcatgccttgc

SEQ ID NO: 221981 - DNA, 343 bp, Unknown
  Bacterial polypeptide expressing nucleotide sequence isolated from the Sargasso Sea
gttggggtctggcggcgtcattatcatggatgaaaccacgtgcttggtgaaggcgctgaagcgtttgatgaaattctacatgcatgagtcttgtgggcagtgcactccgtgccgtgagggcagcgggtgggtgtatcgcttggtcagcaaaattgaatcgggccaaggtacaccacaagacatcgatgagttgggtcgagtggccaaaagcatcgaagggcgcaccatttgcgtctttggcgaggccattgcctggccggtggcaggcatgttgaaacactttaggcacgaatttgaatatctagccgagcacggccgcagtatggtcgcgcaagcacaataa

SEQ ID NO: 221982 - DNA, 850 bp, Unknown
  Bacterial polypeptide expressing nucleotide sequence isolated from the Sargasso Sea
aatgcttaaattaaaagtaaacgatatagatgttgaggtcgaggaaggcttaactgttctacaagcttgtgaaaaagctggagtagaaataccaagattttgttatcatgaaaaattatcaatagcagggaattgtagaatgtgtcttgttgaaatggaaaaatctccaaaacctatagcttcttgtgcaatgcctgctgctgagggaatgatcataaaaacaaatacacctaaaatagaaaaatctagaaagggcgtaatggaatttttattagcgaaccatcctttagattgtcctgtttgtgatcaaggtggtgaatgtgaccttcaagatcaatctatgttttatggtattgataaatctcgttttaaagaaaataaaagagcagtacctgataaaaatatgggtccactaattaagacccaaatgactagatgcatccattgcactagatgtattagatttgcaacagaaatagctggtgtacccgaacttggcgcaataggtagaggtgaagatatgcaaatcaccacatacctagaaaaatcgatacagtcagaattgtcaggtaatgtaatagatctttgccctgtaggagctctaacctctaaaccatatgtatttgaagcaagaccttgggagctaaaaaaaacagaaaccatagatgtaatggatgctgttggatccaacataagagtagatacatacgactgggaagtaaaaagagttctaccaataatcaatgaagatataaatgaggaatggatatcagacaaaacaagatatgcttgcgatggtttgctaaatcaaagacttgatacaccatttatcaaatataataataaattc

SEQ ID NO: 221983 - DNA, 508 bp, Unknown
  Bacterial polypeptide expressing nucleotide sequence isolated from the Sargasso Sea
atgcgagataatccggaagacagccatctaattgatagctatgaaaaaaacaatgggtactcaactgcaaaaaaaacaatcttagaaagctctcctgaaaaaatattagaagaaattaaggcatcaaatataagaggaagaggtggtgcaggattcccaaccggagttaagtggggatttttggctgaagatgaagatcgatacttagttataaatgcagacgagtcagaaccaggtacattcaaggataggattttattggaaagagatcctcaccaactccttgaaggtattatcattacttgtttttcagcaaacataaaagaagcttttatatacataagaggagagtatgcgaagcctgctagaagagttcagcaagcagtagaacaagcatatcaaaaaggatatttgggaaagaatatttttggttccgagatcaatcttgacgtagttgtccatctaggagcaggggcgtatatatgtggtgaagaaaccgcactgctca

SEQ ID NO: 221984 - DNA, 244 bp, Unknown
  Bacterial polypeptide expressing nucleotide sequence isolated from the Sargasso Sea
gatggcaccagcgttacgaaaagtttatgaccagatgccagagccaagatatgtagtctctatgggaagctgcgcaaacggtggcggttactatcattattcttactctgttgtaagaggttgtgataaaattgtacctgttgacatttatattcctggttgccctccatcagccgaggctcttttgtatggaattttacaactacaaaaaaaaattagaagagaaggttcattaaaaaggtaa

SEQ ID NO: 221985 - DNA, 820 bp, Unknown
  Bacterial polypeptide expressing nucleotide sequence isolated from the Sargasso Sea
atgcctaagataattataaatggaaaagaaattgagttcgaaccaggcatgactgtgcttcaagcttgcgaattagctgatgtagaaataccaagattttgttatcatgaaaggttatccattgcaggcaattgtagaatgtgtcttgttgaaatggaaaaatctaataagccgatcgcttcatgtgctatgccagcttccgagggaatgaatattaaaacaaataccaatttagtagaaaaggcgagaaaaggagtaatggaatttttattagctaatcatccattggattgtccagtttgtgaccaaggcggagaatgtgatctccaagaccaatctttatattacggggttgataaatcaagattttcagaaaacaaaagatatgtgagtgaaaaatatatgggtcctttaattaaaacccaaatgacaagatgtattcattgtacgagatgcgtaagatttgcaactgagattgcaggagttcctgaaataggagcggtaggtagaggcgaaaacatggaaatcacaacttatttagaaaaatcgatggagtctgagttatcaggaaatgtaattgatttatgcccagttggggctttaacttcaaaaccttacgcgttctctgctagaccttgggaattaaaaaaaactgaaagtatcgatgttcttgatgctgtcggttcaaatataagagtagacacctatggatgggaagtgaaaagaattctcccgagattaaatgaggatatcaatgaagaatggatttcagataaaacaagatactcatgtgatggattattaaagccaaagacttgat

SEQ ID NO: 221986 - DNA, 892 bp, Unknown
  Bacterial polypeptide expressing nucleotide sequence isolated from the Sargasso Sea
agattttgttatcatgaaagactttctatagctggaaattgtagaatgtgtttagttgaaatggaaaaatctcctaaacctattgcttcatgtgctatgccagctgctgatggaatgaaaattaaaacaaatacacctttcgtggataaagcgagaaaaggtgtaatggaatttttgttagccaatcatccacttgattgtcctgtatgtgaccaaggaggagaatgtgatcttcaagatcaatctcttttttatggttttgatcactcaagatacacagaaaataaaaggcaggttaaagaaaaatatatgggacctttaatcaaaacacaaatgacaagatgtattcactgcacaagatgtattaggtttgcagaggaagttgctggtacaactgaacttggtgctataggtagaggagaagatatggaaataacaacttatcttgaaaaatctatggagtcagaattatctgctaatgttatagatttatgtccagttggtgcattaacttctaaaccttatgcttttgaagcgcgtccttgggaactaaaaaaaacagaaacaattgatgtaatggatggagtaggatcaaatatacgagttgacacgtacggttgggaggtcaaaagagttttacctagagttaatgaagatataaatgaagaatggatttcagacaaaacaagatatgcgtgtgatggtctttcaaaacagagattagatacaccacttattagaaaaaatggaagattacaaaaaagtacttgggaagaggcattaaaatttttaatcactaaattaaaatcttttaaatcaaatgaagtagctggaattgtaggagatttagcagatttagaaatgatttatagttttaaagttttctttaata

SEQ ID NO: 221987 - DNA, 789 bp, Unknown
  Bacterial polypeptide expressing nucleotide sequence isolated from the Sargasso Sea
ttaacggtattacaagcatgtgagaaagctggagcggaaattcctagattttgttatcacgaaaaattatctatagcaggcaactgtagaatgtgtttggttgaaatggaaaagtctccaaaaccaattgcttcctgtgcaatgccagctgcagagggaatgaatattaaaactaatactccttttgttgaaaaggctcgaaagggagttatggagttcttattggctaaccatcctttggattgtccagtgtgtgaccaaggtggtgagtgtgatcttcaagatcagtcaatgttttatggggtggataagtcaagatttaaagagaataaaagatctgtacctgaaaaacatatgggaccattaattaagacccaaatgacaagatgcatacattgtactcggtgtgtaagatttgcgacggaagttgctggagtatcagagcttggagcaattggaagaggtgaggatatgcaaattacaacttatttggaacaatcaatgcaatctgaattgtcagcaaatgtaatagatctttgtccagttggtgctttaacctctaaaccttatgtttttgaagcaaggccttgggaacttaaaaaaactgagactgttgatgtgatggacgctgttggatcaaatgtaagagtagatacgtatgattgggaagttaaaagagttttgcctataattaatgaggatatcaatgaagagtggatttcagataagacgagatacgcttgcgatggtctgttaaatcaaagactagacactccttttattaaatat

SEQ ID NO: 221988 - DNA, 560 bp, Unknown
  Bacterial polypeptide expressing nucleotide sequence isolated from the Sargasso Sea
aaagaagaaggtggatttaataaatacaatgaagtcaacgcatgttgctcctttccctgaacctataatcaataatgatgatttagataaaaatgttgtagtctcatcggtagatcagcttcttaattgggctcgtaaatcaagccttttccccttacaatttggattagcctgttgtgcttttgagatgatagcaactgcaatgagtaggtttgatatttcaagatttgggatggaagtttttagagcaactccaagacaagctgatttgatgattgttgcaggcacagtgacatggaaaatggcagttcctctaagaagactttatgatcaaatggcagaaccaaaatgggttatatctatgggtgtttgtgcaacatctggggggccatattatgagagttattctgttgttcctggtgtaaatcatatagttcctgttgatgtatatgttccgggttgtcctcctcgaccagatgcattgctttatggaataatgcagttgcatgaaaaaataaaaaaatatagcttgactggtgaaagagcaggagaggtataat

SEQ ID NO: 221989 - DNA, 241 bp, Unknown
  Bacterial polypeptide expressing nucleotide sequence isolated from the Sargasso Sea
ggcaacagcattaagaaaagtttatgatcaaatgcctgaaccaagatgggttatctctatgggatcttgtgcaaatggcggaggttattaccactactcttattcagtagtaagaggatgtgatagaattgttccagttgatatttatgtgcctggatgccccccaactgcagaagctcttgtttatggaattttacaactccagaaaaaaattaaaagacaaaattctcaaaaaaaataa

SEQ ID NO: 221990 - DNA, 949 bp, Unknown
  Bacterial polypeptide expressing nucleotide sequence isolated from the Sargasso Sea
atgcctactattactattgataataaaaaagttgaatttgaaaatggtatgacggtaatgcaagcctgtgagctagctggtgctgaaattccaagattttgttaccatgaaaaattatccattgctggaaattgtagaatgtgccttgtagaaatggagaaaggcccaccaaaaccaatcgcttcttgtgctatgcctgctggggatggaatggtgattaagacagattctgaaatggttaaaaaagcaagaaaaggtgttatggaatttcttttgattaatcaccccctagattgcccaatttgtgatcaaggaggtgagtgtgatctccaggaccaagctctacattatggttttgataaatcaagatatgaagaaaataaaagagctgtaaaaaataaacacatgggcccattagtaagcactatcatgacaagatgtattcattgcacaagatgtgtaagattctccactgagatagccggtgttgatgatttgggacttcttggaagaggagagaacgctgaaattacaacttatctagaaaaaactatcgactctgaattatccggaaatgttattgatttatgtccagtaggcgctttaacaagcaaaccttactcatttaaatctagaccttgggaattaagtaaaactgaaactcacgatgttttagatggaattggatccagtataagagttgatacaaggggtaaacaagttttaagagtattgcctcgaataaatgaagatacaaatgaagaatggattaatgataaaactagatttgcgatagatggactatcaagacaaagattagataaggtttatattagggaagataataagctaaatgtttctgattgggataatgcattagataaaataaaaaatgaaataaacaaaagaggaaaagataaaactataactctatctggaaaatttacag

SEQ ID NO: 221991 - DNA, 667 bp, Unknown
  Bacterial polypeptide expressing nucleotide sequence isolated from the Sargasso Sea
atgcttagagatagcgaccgtatttttaccaatatttatggttatgatgatccctttatcgaaggcgcgaaatcccgaggcgactgggacgctacgaaaaagcttattgagatgggaagagaggcgatcattgaaaatgtcaaagactctggtcttcgaggacggggaggtgccggatttagcacggggcttaaatggtcgttcatgcccaaggaatccgatggacggccacattatctggtcgttaacgcagatgaaggtgaacccggaacatgcaaggaccgggaaattatgcgccatgatccccacaagttgattgaaggatgtttgattgccagcttcgccatgggagccaatgacgcgtatatctatgttagaggagaattttatcgggaaattgaagctcttcaacgggctgtcgatgaagcttatgacgctggcttcattggcaaagatgcctgtggggccggatttgattttaatctttacatccatcgcgggtcaggagcctatatttgcggggaggaaaccgcgctgatcgagagcctcgaggggaaaaagggtcagccgagattaaagccgccgtttcccgcgaattctggactttatggttgccccaccacagtgaataacgttgaatccatcgctgtcgtaccgaccattctcc

SEQ ID NO: 221992 - DNA, 865 bp, Unknown
  Bacterial polypeptide expressing nucleotide sequence isolated from the Sargasso Sea
atgctcaaattaaaagttaataatttagatatagaagtagaagaaggattaacagttcttcaagcttgcgaaaaagctggagtagaaattcctagattttgttatcatgaaaaattatcaatagctggtaattgcagaatgtgtttagttgaaatagaaaaatctcccaagccagttgcttcatgcgctatgccagtcagtgaaggcatgaatataaaaaccaacacatcacttgtagaaaaatctagaaaaggtgtaatggaatttctacttgcaaaccaccctttggactgtccggtttgcgatcaaggaggagaatgtgatttgcaagatcaatccatgttttatggtattgacaaatctagatacaatgaaaataaacgatcagtcccagaaaaaaacatgggtcctttaatcaaaacacaaatgacgagatgtattcattgcactagatgtataagatttgccactgaaatagcaggagtccctgaattaggagctattggaagaggagaaaatatggaaataacgacttatttagaaaaatcaatggaatcagaattgtctgcaaatgtaattgatttatgcccagttggagctttaacctcaaaaccatacgcatttgaagcaagaccatgggaactaaaaaaaacggaaacaattgatgttatggatgctgtagggtcgaacataagagtggacacatatggatgggaagttaaaagaattttaccgaaaattaatgaagatattaatgaagaatggatttcagataaaacaaggtatgcatgcgatggattattaaatcagagattggatacaccatttgttaaatataaaaacggaaaattgaaaagcttctgaa

SEQ ID NO: 221993 - DNA, 562 bp, Unknown
  Bacterial polypeptide expressing nucleotide sequence isolated from the Sargasso Sea
catgcttaaaccagaaaataagatatttaaaaatctttataatgatcttggttgggaaatagaggcagctcttaatagagatgattggaaagacactaaaaatataatttctaaaggaagagaatggattatcaatgaggtaaaaacttcggaattaagaggaagaggaggtgctggattttccacaggtcttaaatggtcttttgcacctaaagaggttggttcaagaccacattatttagtaattaatgcagatgagtcagaacctggaacatgtaaagatagagatatactcagatttgaacctcaaaagttaattgaagggtgtttaatagctggttatgctgtaaatgctcatgtttgctacatttatataaggggagaatattacaaagaagggcaaagattacaaagtgcaattaatcaagcatatgaaaaaaaatacttaggaaaaaatgcctgtggatctggttgggattttgacattcatatacattacggagccggagcttatatatgtggtgaagaaactgccttattagaaagtattgaggggaaataa

SEQ ID NO: 221994 - DNA, 449 bp, Unknown
  Bacterial polypeptide expressing nucleotide sequence isolated from the Sargasso Sea
aaaaaaaatatgtgatacgattactatggactttgactcacttattgaaaataaaagtggattaggtacagcaggtgtagttgttattaataaagatcaagatatcgtcaagtgtatggctagaattgctagattttacaaacatgagagttgtggtcaatgtaccccttgtcgtgagggttctggatggatgtggagaatattggatagagttgaaaaaagaaaggccacttttagcgatatagagttactgtcggatgtaacaaaacaaatagagggtcatacaatttgtgcatttggagagggatcggcttggcctgtgcaaggattgttaagacactttaagaaagaagttgaaagccgttgccgggaagagccattgattaagaaaaagttaaataatccttatttggttgatcaacatttactggaaaataaaaatgcctaaa

SEQ ID NO: 221995 - DNA, 532 bp, Unknown
  Bacterial polypeptide expressing nucleotide sequence isolated from the Sargasso Sea
atggtaaaacaaactaaaaagcttaatttaaattttggacctcagcatccagcagctcatggtgttttaaggttgattttacaattagatggagaagttgttgaaaaagcagatccacatattggactgctacataggggtaccgaaaaacttatagaaaataaaacctacactcaagcagtgccatattttgatagattagattatgttgcgcctatgaatcaagaacacgcatttgcactagcaattgaaaaaattttaaaaattaatgtacctataagagctcaatacctaagagttatattttgtgaaataggtagaatacttagtcatattttgaatgttacaactcaagcaatggatgttggagctttgacaccaacgctatggggttttgaagaaagagaaatattaatgggtttttatgaaaaagtttcaggctctcgtctacatgcaaattattttagagctggcggagtacatcaagatttaccaaaaggattagattctgaaatttcagaattttgtcaaa

SEQ ID NO: 221996 - DNA, 232 bp, Unknown
  Bacterial polypeptide expressing nucleotide sequence isolated from the Sargasso Sea
ttaagaaaggtttatgatcaaatgccagaaccaagatatgttatatcgatgggcagttgtgcaaatggcggaggatattatcattactcatattctgtggttagaggttgcgatagaattgttccagttgatatatatgttcctgggtgtccaccttcggctgaggcattattgtatggaataatgcagttacaaaaaaaaattagaaacaatggatctttagctagataaa

SEQ ID NO: 221997 - DNA, 795 bp, Unknown
  Bacterial polypeptide expressing nucleotide sequence isolated from the Sargasso Sea
aatgcttaaattaaaagtaaatgaaattgaaattgaagttgaagagggtttaactgttcttcaagcttgtgaaaaagccggtgttgaaattccaagattttgttaccatgaaaaattatcaatagcaggtaactgtagaatgtgtttagtagaaatggaaaaatctcctaaaccaatagcatcatgtgctatgcctgcaacagagggcatgaatattaaaacaaatactgctctagtcgaaaaagcccgtaaaggagtaatggaatttttattagccaaccaccctttagattgtccagtatgtgatcaaggtggtgaatgtgatcttcaagatcaatctatgtattatggggtagataaatcaagatttaaagaaaacaaaagatcagtcccagaaaaaaatatgggcccacttatcaaaactcaaatgacaagatgtattcattgtaccaggtgtgtaagatttgcaactgaagttgcaggagttccagagcttggtgctataggtagaggtgaagatatgcaaattacaacttatctggagcaatcaatgcaatctgaattatctgctaatgtagttgatttatgcccagtaggtgctcttacatcaaaaccttatgtttttgaggctagaccatgggaattaaagaaaacagaaacaattgatgtaatggatgcaattggatcaaatgtgagagtagatacatatgactgggaggtcaaaagagttctcccaattattaacgaagatatcaacgaggaatggatttctgataaaacaagatatgcttgcga

SEQ ID NO: 221998 - DNA, 682 bp, Unknown
  Bacterial polypeptide expressing nucleotide sequence isolated from the Sargasso Sea
acttattgaaggttgtttaatttcttcattcgcggttcaagcacacgtatgttatatttatattagaggagaatattttaatgaaggtcaaattcttcaaaaagcaataaatgaagcttatgaaaaaaaattaattggaaaaaattcatgtgatacaggatgggattttgatatatttattcactatggtgcaggagcatatatttgtggtgaggaaactgcacttttagaaagtttagagggaaacaaaggtcaaccaagattaaaaccaccttttccagcgcttattggtttatatggatgccccactatagttaacaatgtggaaactatagctgtagtacctacaattttaaaaaaaggttcaaaatggttttcttctataggaagacctaaaaatactggaacaaaaattttctgtatatcgggcaacgttaataatccttgtaatgtggaagaacaaatgggagtccctttaaaggaactaatagatagccacgcaggaggagttgttggaggatgggacaatcttcaggctgtaattccaggaggatcatcaatgcctatgcttccaaaaaaaacatgtgaaactattaaaatggattttgactcacttattgaaaacaaaagcggattaggaacagctggagtaattgttataaataaagatcaagacataata

SEQ ID NO: 221999 - DNA, 877 bp, Unknown
  Bacterial polypeptide expressing nucleotide sequence isolated from the Sargasso Sea
gaaaacggcatgactgtaatgcaagcatgtgaacaagcaggaactgaaattccaagattttgttatcatgaaaaactctcaatagcaggaaactgtagaatgtgtttagtagaaatggaaaaagctccaaaacctattgcatcatgtgccatgccagctgcagatggaatggttataaaaacaaatacagaaacagttaaaaaagctcgaaaaggtgtaatggagtttcttcttattaatcatccattggattgccctatttgtgatcaagggggagaatgtgatcttcaagatcaagcgatgtattatggttttgataaaactagatatgaagaaaataaaagagcagttcaaaataaaaatatgggaccacttgtaaaaacaattatgacaagatgtatacattgtacaagatgcgtaaggttttctacagaagttgcaggcgttgatgatatagggctgcttggcagaggtgaaaatgctgagattacgacgtacttagaaaaaactattgagtcagaattatctggaaatgtaattgatttatgtcctgtaggtgctttaacaagtaaaccatatgcatttaaatctagaccatgggaactaactaagacagaaacatttgatgtgtttgatggtttaggctcaagtataagaattgatacaagaggaaaaaaagttttaagagctcttcctagaataaatgaagaaatcaatgaagaatggataagtgataaatctagatttgcagttgatggactctcaagtcaaagattggatagtgtatattctaaatcaaataaaaaactccaaaaatcttcatgggatgaagcatttgaattaataaaaaaagaaattacaaaaagaggtaaagaaa

SEQ ID NO: 222000 - DNA, 568 bp, Unknown
  Bacterial polypeptide expressing nucleotide sequence isolated from the Sargasso Sea
taaaatattttgcatatctggaaatgtaaactcaccttgtaatgttgaggaggaaatgggaattcctttaaaagaattaatcgataaacatgcaggtggggtagtagggggttgggaaaatcttcaagctgtaatccccggaggttcctcaatgcctttacttacaaaaaaaatatgcgatacaatcactatggactttgactctctaattgagaataaaagtggtctaggaacagctggaatagtagttattaataaagatcaagacatcattgcttgcatggcaagaatagcaaggttttataaacatgaaagttgcggtcaatgcaccccatgcagagagggcgcagggtggatgtatagaattcttgatagagttgttaaaagaaaagcaacatttagtgatatagatctattgtccgatgtaacaaaacaaatagagggccatacaatttgtgcatttggagagggatcagcctggcctgtacaagggttgctgaggcatttcaggaaagagatcgatagtcgttgtagagaagaacctttaattaaaaaaaagaacaaataa

SEQ ID NO: 222001 - DNA, 670 bp, Unknown
  Bacterial polypeptide expressing nucleotide sequence isolated from the Sargasso Sea
aatgcttaaattaaaagtaaatgacattgatgtagaggttgaagaaggactaacagttcttcaagcctgtgaaaaagcaggtgttgagatacctagattttgttatcatgaaaaattatctatagctggaaattgtagaatgtgtttggtggaaatggagaaatcaccgaaacctatcgcatcatgcgcaatgcctgcagctgagggaatgaacattaaaacaaatacaagtttagttgaaaaggctagaaaaggtgtaatggaatttttactagcaaatcatcctttagattgcccagtatgtgaccagggtggtgagtgtgatcttcaagatcaatcaatgttttatggggtagataaatcaagatttaaagaaaataaaaggtcagttccagaaaaaaatatgggaccattaatcaaaactcaaatgacaagatgtatacattgtacaagatgtgtgcgatttgctactgaagttgcaggcgttccagaacttggtgctataggtagaggtgaggatatgcagattacaacatatcttgagcaatcaatgcaatcagaattatctgctaatgtagttgatttatgtcctgttggagcattgacatcaaaaccttatgtctttgaagcaagaccgtgggagttaaaaagacagaaacaattgatgtaa

SEQ ID NO: 222002 - DNA, 304 bp, Unknown
  Bacterial polypeptide expressing nucleotide sequence isolated from the Sargasso Sea
atgggtttattagaaaataaatttcaagataatgtagttgttgcatcgctagataaaattttagggtgggcacgttcaacctcaccatggtatttccaatttggattggcttgttgcgcaattgaaatgatggcatctgcagctagtaggcatgatcttgaaagaattggcatgatgccgcgttcatcacctagacaggcagatgtaatgattgtggctggtacagtaactatgaaaatggctctcagagtgaaaaaactatacgaacaaatggccgatcctaaatacgtgatttcaatgggca

SEQ ID NO: 222003 - DNA, 724 bp, Unknown
  Bacterial polypeptide expressing nucleotide sequence isolated from the Sargasso Sea
gctgaaattaaaagttaacgatattgatattgaagttgaagaaggcttgacggttttacaagcttgtgagcaagctggagccgaaattccaagattttgctatcatgaaaaactttctatagcaggaaattgcaggatgtgtttagttgaaatggaaaaatcacctaaacctattgcctcatgtgctatgccagcagcaaatggaatggtaataaaaactaatacagaaaaagtcgaaaaatctagaaaaggtgttatggagtttttattagccaatcatccgttggattgtcccgtatgtgatcaaggtggagaatgcgatttacaagatcaatcaatgttttatggaattgataaatcaagatttaaagaaaataagagatacgtaccagaaaaatatatgggaccacttataaagactcaaatgacaagatgtattcattgcaccagatgtattagatttgctacagaagttgctggtgtcccagaattaggagcaattggcagaggtgaaaatatggagattacaacatatttagaaagatcaatggagtcagaaatgtcagcaaatgtaattgatttatgtccagttggtgcattaacttcaaaaccatatgtttttgaagctagaccatgggagttaaaaaaaactgaaacaatcgatgtgatggatgcggtaggctcaaatataagagttgatacatatggatgggaagtaaaaaga

SEQ ID NO: 222004 - DNA, 248 bp, Unknown
  Bacterial polypeptide expressing nucleotide sequence isolated from the Sargasso Sea
taaaatggctcctgctttgaggaaagtgtacgaccaaatgccagaaccaagatacgtaatatcaatgggaagctgtgcgaatggcggaggatattatcactactcttactcagttgtaagaggatgcgatagaattgttcctgttgatgtttatgttccaggatgccctccatcagctgaagctcttttatatggaataatgcagttacaaaaaaagataagaaaaaaaggatcaatagaaagataaa

SEQ ID NO: 222005 - DNA, 413 bp, Unknown
  Bacterial polypeptide expressing nucleotide sequence isolated from the Sargasso Sea
tgactctttagtaaatgaaaaaagtgggttaggaacagctggaattgttgtaattaataaggatcaagacattattaagtgtatggcaagaattgcaagattttacaaacatgagagttgtggacaatgtacaccttgtagagagggatcaggttggatgtggagaatgttagagagaatggctaagggtgaagcaacaaaagatgaagttgatatgttaggtgatgttacaaatcaaatagctggccatacaatttgtgcttttggagagggttcttcttggccagttcaaggattattacggcattttaaaaaagaaattaaagaaagaaataaatttgatcctatagtcaaagataataaaaatattccttatttagtggatcaacatttattggataaaaatgcttaaa

SEQ ID NO: 222006 - DNA, 580 bp, Unknown
  Bacterial polypeptide expressing nucleotide sequence isolated from the Sargasso Sea
ttgataggtctttatgggtgccctacaataatcaataatgttgaaacaattgcagtggttccaactattttaagaagaggagctaaatggtttgcttctttaggaagagaaaaaaatactggaactaagattttctgcatttctggaaatgtaaacaatccttgtaatgttgaagaagaaatgagtattcctttaaaagaattaatagaagttcatgctggtggtgtaattggtggatgggaaaatttacaagctgtaatacctggaggttcttcaatgccattaatacctaaagaaagatgtgaaactttaaaaatggactttgatgcatgcgttgaagaaaaaagtggacttggtacagcaggtatagtcgtaattaataaagatcaagacataattaaatgcatggcaaggatcgcaagattttacaaacatgagagctgtggacaatgtacaccttgtagagaaggttctggatggatgtggagaatgcttgagagaatggcaaaaggtgaagcaaccaaagatgaggtagatatgttaggcgatgtaacaaatcaaattgctggtcatacaatct

SEQ ID NO: 222007 - DNA, 550 bp, Unknown
  Bacterial polypeptide expressing nucleotide sequence isolated from the Sargasso Sea
aatgcttgaagataaagatagaatttttaaaaacctttataaagattttggagttgatgtattgtcatctaaaaaaagaggtgattggttaaatgttaaagaaatttgtttaaagggtagagaatggattattaatgaaatcaaatcttcagaattaagaggaagaggaggtgccggctttcccactggtttaaaatggtcatttgcccctaaagaaattggttcaagacctcattatttagtaataaatgctgatgagtctgaacctggtacgtgtaaagatagagatatattaagatttgagccacataaacttatcgaaggatgtctaattacttcttacgctgttaatgcacacatatgttatatttatataagaggtgaatattttaatgaaggagaaaaacttcaaaaagcgattaatgaagcatatgaaaagaaattaattggtaaaaatgcgtccgacacaggatgggatttagatatttatattcattatggagcgggagcttatatatgtggtgaagaaacagctttattagaaagtcta

SEQ ID NO: 222008 - DNA, 973 bp, Unknown
  Bacterial polypeptide expressing nucleotide sequence isolated from the Sargasso Sea
atgctctatgatctgtttgggatagatgaacgcaccagagtgcatcgcagtgatcagccttccgcagacttcacagtggtttatcaattgttatcaatcaaaagaaatgatgacctgcggatcaaagttgcccttcaggaatcagatcttaatctgccttcgatcattgacgtttggcccaacgctaattggtatgaaagagaagcttgggatatgtttggagtagttttcaaaggtcatcccacgctcttccgaatccttttgccaccaacctgggaagggcatgccctacgaaaggatcatccggcgcgagcgacagagatggggcctttcgaaatgggggacgagcgcgttgaacgggagcaagaggcgctccggttcaggccagaagactggggcatggagactaaggacgaggacaatgaatacatgtttctcaacctaggccccaatcatcctagtgttcatggcgtcttccgtatcgcgcttcagctggatggagaggtgataaaggactcggttccagacatagggtaccaccatcgcggtgctgaaaagatgggcgaacgacagacgtggcatacgtacatcccatacacagaccgaattgattacttagcaggggtcatgaataatctggcctacgttcaggctgtagaattactcgcgggcattaaggttcctgatcgagctaaagtgatccgaatcatgctggcggagctcttccgaatctcgagccatctcgtgttctatggtacttttgttcaagatgttggacagatgtcacccgtattttatatgttcgctgatagggaaaggctttttggtattgtagaggccattacaggtggaaggatgcatccggcatggttccgaatcggcggggtgactgcagacctttccaatggatgggaaaagctaattcgcgactttatagattcgatgcccgctcggctagaccactatgacaaga

SEQ ID NO: 222009 - DNA, 1864 bp, Unknown
  Bacterial polypeptide expressing nucleotide sequence isolated from the Sargasso Sea
aatgcctaaattaaaagtaaatgatactgaggtagaagttgaagatggtctaacagttttacaagcatgtgaaaaagctggagtggaaattccaagattttgttaccatgaaaaattgtcaatagcaggtaattgtagaatgtgtctggttgaaatggaaaaatctcctaaaccgattgcttcttgtgcaatgcctgcagctgaagggatgaacattaaaacaaatactccttttgttgaaaaagctagaaaaggagtaatggaatttcttttagcgaaccatcctttagattgtccagtgtgcgatcaaggtggtgagtgtgatcttcaggatcaatcgatgttttacggtatagataaatcaagatataaagagaataaaagatctgttccagaaaaatatatgggaccacttattaaaactcaaatgacaagatgcatacattgcacaagatgtgtaagatttgccaccgaagttgctggagtatctgagttaggtgcaattggtagaggtgaagatatgcaaattacaacatatttggaacaatcaatgcagtcagagttatcagcaaatgttattgatctttgtcctgttggtgccttaacttcaaaaccttatgtgtttgaggcaagaccatgggaacttaaaaagacagaaacaattgatgtaatggatgctgttgggtctaatgtcagagttgatacgtacgattgggaagttaaaagagttttacctttaattaatgaggatattaatgaggaatggatatcagacaagacaagatatgcgtgcgatggtttattaaatcaaagattagacattcctctaattaaatacaatggaaagtttgaaaatgcatcttgggacgaagtatttaaaattattaaatccaaatttgaaaactcatcaaaagaaaaaatttgcggttttgttggggatttgatcaacatggaaacaggttttatttttaaggagttttttgatcgaactttaagtaatcataactatgactcaagatctgataacaggtatatagattttaaagatagagagaattatatatttaattcctctataaatggaattgaagaagcggatttgatatttctgattggagcaaatccaagatatgaagccacaattttaaacgcaagaattagaaaagcttttgtaaataataacacaaaaataatctcacttaatgacgttggagatttaacttatccttatgagagtttagatggtcaaactcaatcaataaaaaatatttttgagggatcagatgaaatatctaaaaaaatcatcaatgcaaaaaatccaatgattataattggtgagtcattactcagattaaatttagcagagaacttatttaatttaataaaagattttttaaataaaaataataaatttactgataactggaacccattaaatattttatcttgtgacgcctcaacagttggtaattttgatttaggaataattaataatgatattaatttaattaaagatttaaaatctaataaatttgaaatagtttatttagttggacaagataatttagaatttaataaaaaagatgaatttataatttatcaagggagtcatggtgacaaaggtgcagagattgcagatatcattttaccaggatcagcttatacagaacaagatggtcattttacaaatttagaaggaaaaatacaaaaagcatataaagcatcttatcctcctggaaatgccaaagaagattggcaaatcatcaatgaacttgcagaaattatgaacaatagaaaattgtttaatgataaagatgaattagagagcagtatgtttaattttattaaacttcaaaaagaaaaa

SEQ ID NO: 222010 - DNA, 2335 bp, Unknown
  Bacterial polypeptide expressing nucleotide sequence isolated from the Sargasso Sea
catggttgaacttgaaatagacggcaagaaagtagaggtgcctgaaggcagcatggtgatccaagctgcgcataaggtcgacacgtacattcctcacttctgctatcacaagaagctgtcgattgcggccaactgccggatgtgtctggtcgatgtcgaaaagatgccgaaggccgtgcccgcatgcgccacgccggtgtccgccggcatgatcgtgcgcaccaagtccgagaaggcggtgaagggccagcaagccgtgatggaattcctgctgatcaaccacccgctggattgcccgatctgcgatcagggcggcgagtgtcagttgcaggatctggccgtgggctacggcaagtcgtcgtcgcgttatagcgaagaaaagcgcgtggtgttccacaagaacgtcggcccgctgatctcgatggaagaaatgtcgcgctgcattcactgcacgcgttgcgtccgcttcggccaggaagtcgccggcgtgatggaactcggcatgctgggccgcggcgagcattcggaaatcacgtcgttcgtcggcaagacggtcgactccgaactgtcgggcaatatgatcgatctgtgcccggttggcgcgctgaccagcaagccgttccgctacagcgcccgcacgtgggaactgtcgcgccgcaagtcggtgagcccgcacgattccgtcggtgccaaccttgtggtgcaagtcaagaacaaccgcgtgatgcgtgttctgccgttcgaaaacgaatccatcaacgagtgctggatttcggacaaggaccgcttctcgtacgaagcgctgaatagcccggaacgtctcacgcagccaatgctcaagcaaggcgccaagtgggtcgagaccgattggcaaacggcgcttgaatatgtggtcaaggggctgaagggcatcaagggtgaccatggcgcgagcgcgctggccgcgctcggcagcgctcacagcaccgtcgaagaactgttcctgttgaagcagctggcgcaggcggtcggtacgcctaacgtcgacttccgtctgcgtcagtcggatttctcagcacccgtcaacggtgcaccgtggcttggcacggcgatcgccgatctgtcgaacctggattcggcgctcgtgatcggttcggacctgcgccgcgatcatccgctgttcgccgcgcgtctgcgtcaggctgccaagagcgggacgaagctcacgctcgtgcaagccaccaatgacgacgcgctgattccgcaagcgcaacgcgtggttgccgcaccgtccgcatggctcgatgcactggccggtatcgccggcgcggtgtcggaagcgaatggcgctgcactgccggaagcgttcgctggcacgcaacctacggacaccgacaagcaggtcgcgaagtcgctcgctaccggcgaacatcgcgtggtgttgctcggcaacgccgcggttcgtcatccggacttcgccgcgattcacgccgcagcgcaatggattgcagacgcgaccggcgccacgctgggtttcctcacggaagccgctaacacggtcggcgcgcatctcgtgaacgcattgccgggtgagggtggcctgaacgcccgcgaagtgttcgagcaaccgcgcaagggttatgtgctgttgaacgtcgaacccgagttcgacacggccaatccggtgcaggctttggccgcgctgaagcaggctgaaatggtcgtcgtgatgtcgccgttccagattggcgccgagtacgctgacgtgctgttgccgatcgcgccgttcacggaaacggccggcacgttcgtcaacgccgaaggtaccgtgcagacgttcaacggcgtcgtgcgtccgcttggcgatacgcgtccggcgtggaaggttttgcgcgtgttaggcagcctgctgggtgtgccgggtttcgaattcgatacctcggaagaagtgcgcacggcagccctcggcgacggcgagatcaagtcgcgtctgtcgaataagacgggcgtcacggtagcacgcggcaacgcagcgaaagcaacggaaggcaagttcgagcgtatcgccgatgtgccgatctaccacgccgacgcgattgtgcgtcgcgccgagtcgttgcatctgacggcggcggcgcgcgctgcaaactcggtcggcctgccggctgcgctgttcgacaaactgggtttgaaggaaggcgacgcagtgcgcgtgcgccagggcgagcaatcggtgcagttgccggccgtgcgcgacgcaaatcttgcggagacggtcgtccgcgtatcggcggctacgcctgccggtgcagcgctgggcagcctgttcggtgaactggtggtggagaaggcgtaa

SEQ ID NO: 222011 - DNA, 724 bp, Unknown
  Bacterial polypeptide expressing nucleotide sequence isolated from the Sargasso Sea
atgacagagattcagcaagattcagggctaattaccgtcactatcgatgggcaagaggtcaaagtaaaatcaggagaggttcttattgatgcttgcgaggaagtaggggttgatattccaagattctgctatcacaagcggatgagtcaagttggcatgtgccggatgtgtattgtggaagtcgatactgggcgcggcccctcgcttcaaccaagttgcatgatggatgtcagcgaagggatgatcattgacactcaatcagaagaaatcaagaaggttcaggatggtgtgcttgaattccttctgctgaaccatccactggattgtccagtatgtgataagggcggagaatgtccccttcaagaccaaactatggcgtatgggcctggtgaaacccgctttgttgaagaaaaaagacattttgagaaaccaataccgattagtgacaatgtttatctagatcgtgaaagatgcattctttgtgaccgctgcactcgtttcgcggatgaagttgttggtgatccattaatccaattcattgatcgaggaaactctacgcaggtcaatacatttccagaagatccattcgcttcttatttcagtggaaatattgttcagttatgtcctgtaggtgccttaacggctaagccataccgatttaaagctcgtccgtgggacttggaagagattgaatcaacctacccgaacccactcggcgaccgga

SEQ ID NO: 222012 - DNA, 827 bp, Unknown
  Bacterial polypeptide expressing nucleotide sequence isolated from the Sargasso Sea
tctgcatgcttgtgaagaagctggtattgaaattccacgcttttgctatcacgatcgtttgtcgattgctggcaactgtcgcatgtgccttgtcgatatggaacgcgcgccaaaacccattgcatcatgtgcaatgccggctggtgacggtatgattattcgcacagatacggatcgcgtgaaaagggcccgggaaggggttatggaatttttgctgattaaccacccgcttgattgtccgatttgcgaccagggcggtgagtgtgatttgcaggatcaggccatgggttatggtcttgatggatcaagattttctgagaacaagcgggctgttgataacaagcatatgggaccattaatcagcacggttatgacgcgttgtatccattgcacgcgctgtgtgcgctttgcaaccgagatcgctggggtgcctgagttgggtgcaattgggcgtggtgagacgatggaaatcaccacttatctggaaaaaacgttggcatcggaattatctgccaatgtgattgatttatgcccagttggggcccttacctcaaggccttatgctttcaacgcgcggccctgggaattgaataaggtggagagtgttgatgtgatggatgcgcttggcagcaatatccgcgttgacacgagaggcgcgcaggtgatgcgcgtactgccacgtcttaatgaggatatcaatgaagagtggatttcagacaaaacccgttatgcgattgacggccttcgccgccaacggttagatacgccttttgagcgggggcgtgataggcgtttgcatccggtgacctgggacgaggcactgaaaa

SEQ ID NO: 222013 - DNA, 1177 bp, Unknown
  Bacterial polypeptide expressing nucleotide sequence isolated from the Sargasso Sea
aatggcaaaagaaaaaaaaacattaaatttaaattttggaccacaacaccctgctgcacatggagttttaagattaatactccaattagatggagaagttgttgaaaaagctgaccctcatataggattgttgcatagaggtactgagaagttaatagaaaacaaaacctatatccaagcagttccatattttgatcgtttggattatgtagcaccaatgaatcaagaacatgcatttgctctagctatagaaaaaattcttaaaatagaagttcctgttagagcaaaatatataagagtaatattctgtgaaataggtcgaatattaagtcacatattgaatgtaactactcaagcaatggatgttggggcgttaacaccaactttatggggatttgaggaacgagaaaaattaatgggattttatgagagggtatctggatcaaggttgcacgctaattattttagagctggtggagtacacaaagatctgcctgtcggactagaaagtgatattgatgaattttgtgaaagattcccaaaaataattgatgatttagaaactttactcaccgataacagaatatttaaacaaagaaatgtagatattggaatagtatcaaaacaagatgcactagattattctttttcaggagttatgttaagaggctccggtgtagcttgggatttaagaagaagtcaaccctatgattgttataacgatttagaatttaaaattcctgttggaaaaaatggggattgttatgataggtatctttgcagaattgaagaaatgagagaaagtttaaaaattattaaacagtgtttaaaaaatattccaaaaggaccaattaaaacagaagatggaaagatttcccctcctccaaaaaaggaacttaaacagtctatggaagctttaatccatcattttaagttatttacagagggatatagggttgaaaaagatgagatatatacagcagttgaggcaccaaaaggagaatttggtgtctatttaatttcagatggctcaagcaaaccttacaaatgcaagataagagctcctggatttacccaccttcaagctatggattatctaataaaaggacatatgcttgctgatgtacctgcagttttaggttcaatggatattgtttttggtgaggtcgacagatga

SEQ ID NO: 222014 - DNA, 763 bp, Unknown
  Bacterial polypeptide expressing nucleotide sequence isolated from the Sargasso Sea
atcgagggtgtgttccgcaagccgacggttgtaaataacattgagacaatggcatgcgtggcacaaatcgctcggcgaggtgttgattggttccgctctattggaattcctgctgatccaaataaccctagagatccaggaagctatggaccaaaactctactgcctgtctggtcacgtagagaaacctggctgctatgaagcacctcttggtattacagcacgagaattaattgatcgtttcggtggtggtgtctggaaagggcgtcgagcaaaagctgtcattccaggaggtatctccatggggctgatgacagaagatgagctggacaccccgctcgatttttcgggaccgggaagagttgggtgcctcggtcttggaacggctgctgttgttgtcatcgacgagaccgtcagcatcgttgattttctgcataattcatgccgtttttttgcacacgagtcctgcggtcagtgcacgccatgccgggagggtacaagctggtcactccgaatgctcgagcgcattcgagccggaaagggtagattgcgagatctcgagctcctcgcagaaattggtgacacgatgggcatgatgcccgggtcaacaatttgcggccttgctgacggagctgcttggccaatcaagaactccatagcgaaatttcgtgatgaatttgaagattacattaaacagacgaatccaaccggctacatggaaactgatcctgttcctgccttgccaattgttactactcactaac

SEQ ID NO: 222015 - DNA, 1177 bp, Unknown
  Bacterial polypeptide expressing nucleotide sequence isolated from the Sargasso Sea
atggcaaaagaaaaaaaaacactaaatttaaattttggaccacaacatcctgcagcacatggagttttaagattaatacttcaattggacggtgaagttgttgaaaaagccgaccctcatataggattattgcaccgaggtactgagaagttaatagaaaataaaacttatatccaagcagttccttattttgatcgacttgattatgtagcaccaatgaatcaggaacatgcatttgctttagctattgaaaaaattcttaaaatcgaagttccttctagagcaaaatatataagagtaattttctgtgaaataggacgtatattaagccacatattaaatgtaactactcaagcaatggatgtcggggcgctaacaccaactttatggggatttgaggaacgagaaaaattgatgggattttatgaaagggtgtctggatcaaggttgcatgctaattattttagagcaggtggagtacataaagatctccctactggacttgatagtgatataagtgatttttgcaaaaaattcccaaaaattattgatgatttagaaactttgcttaccgataacagaatatttaaacagagaaatgtagatataggaattgtatccaaacaagatgcactagattattctttttcaggagtaatgttaagaggttctggcgtagcttgggatttaagaagaagtcaaccatatgattgttatgacgatttagaatttaaaattcccgttggaaaaaatggagattgttatgatagatatctttgcagaattgaagaaatgagagaaagcgtaaaaattattaaacagtgtttaaaaaatattccaaaaggaccaattaaaacagaagatggaaaaatttctcctccaccaaaaaaggaacttaaacagtctatggaggctttaatccatcattttaagttatttacagaaggatatagagttgaaaaagatgagatatatacagcagttgaggcaccaaaaggagaatttggtgtctatctaatttcagatggctcaagcaaaccatacaaatgcaaaatcagagctccaggttttacccatcttcaagctatggattatttaataaaaggacatatgctcgctgatgtacctgctgtattgggttcaatggatattgtttttggagaggtagatagatgag

SEQ ID NO: 222016 - DNA, 538 bp, Unknown
  Bacterial polypeptide expressing nucleotide sequence isolated from the Sargasso Sea
catgcagaaggtgttattgggggatgggaaaatttgaaagctgtaattccaggaggttcatcaatgcctttattgccaaaaaaaatttgtgatacaattactatggactttgattctttaataaaagaaaaaagtggattaggaactgctggtattgttgtaataaataaagatcaagacattattaaatgtatggctcgaatagcaagattttacaaacatgagagttgcggccaatgtactccttgcagagaaggttctggatggatgtggagaatgttagaaagaatggccaaaggagaggcatctaaagatgaagttaatatgctaatggatgttacaaaacaaattgaaggtcatacaatttgtgcatttggtgaaggatcagcgtggccagtacaagggctgctaagacattttaaaaaagaggtagaaaaaagaaataattttaatccacttgtaaacaaatcaagggaaattccatatttagtcgatcaacatttactagagaaagaagatgctcaaattaaaaattaat

SEQ ID NO: 222017 - DNA, 913 bp, Unknown
  Bacterial polypeptide expressing nucleotide sequence isolated from the Sargasso Sea
aatgcaagcctgtgagatagctggtgctgaaattccaagattttgttatcatgaaaaattatctatcgcaggaaattgcaggatgtgtcttgtagaaatggagaaaggcccaccaaaaccaattgcttcttgtgctatgcctgctggagatggaatggtcattaagacagatactgagatggttaaaaaagcaagaaaaggtgtgatggaatttttattgatcaaccatcctttggattgtccaatttgtgaccaaggaggtgagtgtgaccttcaggatcaagctttgcattatggttttgataaatcaagatatgaagaaaataagagggctgtaaaaaataaaaacatggggccattagtaagcaccattatgacaagatgtattcattgcacaagatgtgtaagattctctactgaggtagctggtgttgatgatttgggacttttaggaagaggagagaacgctgaaattacaacttatcttgaaaaaactatcgactctgaattatctggaaatgttattgatttatgcccagtaggagctttaacaagtaaaccttacgcatttaaatctagaccttgggaattaagtaaaactgaaacttatgatgttttagatggaattggatccagtataagagttgatacaagaggtaaacaagttttaagagtattacctcgcataaatgaagatacaaatgaagaatggattaatgataaaacaagatttgctatagatggactatcaagacaaagattagataaggtttatatcagagcagataacaaactaaatgtctctgactgggattacgcattaaataaaattaaaaatgaaataaacaaaagaagaaaagataaaactataactttatctggaaaatttacagatgctgaaactataatagcc

SEQ ID NO: 222018 - DNA, 1042 bp, Unknown
  Bacterial polypeptide expressing nucleotide sequence isolated from the Sargasso Sea
aatggatgaattgagaaatattaatattacaatcgatggtattgaaatttcagtacctcaaggatctacagtcttacaagcatgtgaagcagcaggtgctgaaattccaagattttgttatcatgaaaaactatcagtggcaggaaattgtagaatgtgtttggtagaaatggaaagatctccaaaacctatagcctcttgtgcaatgcctgcttctgatggaatgattattaaaacatcttctgagatggttgaaaaggcaaggaaaggtgttatggaatttctattaataaatcatcccttagactgtccaatttgtgatcaaggtggtgagtgtgatcttcaagatcaagcactttattttggtaaaggtgaaactcgttttgaaaattctaaaagagcagtttctgataaaaatatgggtcctttaatcaaaacgacgatgacaaggtgtattcattgtacaagatgtgtaagatttgcaaatgaagtggcaggggtagaagatcttggagcaactggaagaggagaaaatgttgaaatttcaacataccttgaaaaagctgtgtcttcagaactatcaggaaacttggttgatttatgccctgttggtgctttaacttctaaaccttatcaatttgtcgctcgaccttgggagctaacaaaaacagaatctgttgatgtaatggatgctataggctcaaatataagaattgatagtcgtgatggaaaagttttaagaatattgcctaagaataacgaaagtattaacgaggaatggatatctgataaatcaagatatgcaattgatggtttgtcaaaacaacgtttagatactccttttattaaaataaataataaattgcaaagagtttcatgggatgaagcttttgaatttataacttctaaaattagcagtgtttcaaatgaaaactgtgtaggtgttgttggtaatcaagttgagaatgaatcaatatttgcttttagagaattatttaaaaaacttaatttagcaaaattttaccatttcaaaaaaaattaa

SEQ ID NO: 222019 - DNA, 1195 bp, Unknown
  Bacterial polypeptide expressing nucleotide sequence isolated from the Sargasso Sea
aatgcttaaattaaaagttaatgaacttgatattgagatagaagaaggtttaacagttctccaagcatgtgaacaagcaggatttgaaattccaagattttgttatcacgaaaaactctctatagctggaaattgtagaatgtgccttgtagaaattggaaaatcaacaaaacctattgcttcgtgtgcgatgccagctactgaaggaatgaacattaagactaatacttctatggttaaaaaagcaagaagaggtgtgatggagtttttattagccaaccatcccttagattgtccagtttgtgatcaaggtggagaatgtgacttacaagatcaatcaatgttttatggaatagataagtctaggtataaagaaaacaaaaggcatgttcctgaaaaatacatgggtccacttattaaaactcaaatgactcgatgcatacattgtacaagatgtataagattcgccacagaagttgctggcgttcctgaactgggagcgataggcagaggggaagatatgcaaataaccacttatttagaaaaatccatggagtcagaattgtctgctaatgtaattgatttatgtcctgtgggtgctttaacatcaaaaccatacgtttttgaagctagaccatgggagcttaaaaaaacagaaagtatagatgtaatggatgcagtagggtcaaatattagagttgatacctatggatgggaagtaaaaagaattttacctagaattaatgaagacattaatgaagaatggatttctgataaatcacgttatgcatgtgatggactgcaaaatcaaagattagatataccgtatattaaaaaagacggaatttttaaaaaaagttcatgggaagaagcttatgaaattatttctgaaaaaattttttctacttcatctgatgaaatagcaggattaactggagatttaactaatatggaaactctttttataacaaaagattttttttctaaaacaataaagtcttcaaatctagattctagatctgaacatatctttataaacaatgatgaaagatcaaattatttgttcaactcaaaaattaacggtattgaggaaagtgattttattttattaataggctctaatccaaggtatgaagcaacaatattgaacgcaagaataagaaaatcttatttaaagaataatacagaaattttt

SEQ ID NO: 222020 - DNA, 905 bp, Unknown
  Bacterial polypeptide expressing nucleotide sequence isolated from the Sargasso Sea
tggatacatttatgttcgcggagagtatttcccttcaatcaaaagtttgaatgaagccatagatgaactttatgcggcgggtcttttgggtgaaaatgctcttggtaaggggaaacgcctcgatctcacggttcataccggtgcaggggcttacatctgtggtgaagaatctgcactgctcgattcattggagggcaaacgcggtcatcccagggtgaaacctccctttcctgcagtttcaggtttcaatgcatgtccgacaaccgtcaataatgtcgagacccttacctgcctgcctttcatagtcaatgaaggggcagaggctttcaaggatttcggtcctgagaataatgcagggacccatcttgtcagcctcagcggacatgtggaaaaacccggggtttacgaagtaaggatggatgtcactctaaaacagatcatctacgaccttggcggaggaatccggggcggaaaagctctcaagggagttatcccaggaggtgcgtcatcgccggttttgaccgcaaaagagattgatgtcgaatacagtttcgatgctcttggaaaagcggggacgatgatgggttctgctgctgtgatggtctttgacgaagataccgacgtggtcaaactgctacaccgaatcacccgtttcttcaatcatgaatcctgtgggcaatgtacaccctgccgtgaaggaacccattgggcacgcttgattgtccaggattttctgaaaggaaacggaaacgaaagaaaaatgaaacgactccatcgggtcggaggaaacatgatgggaacaactgtctgtgcattgggtgatgcggcagcaatgccgatcaccagctttgtgacaaagtttcctgaagaatttgaaaaatattacccaaaggcggctgcctgaa

SEQ ID NO: 222021 - DNA, 1411 bp, Unknown
  Bacterial polypeptide expressing nucleotide sequence isolated from the Sargasso Sea
atgcctaaaattacaattaacggtaaagaaattgaatttgaaaatggtatgacagtccttcaagcatgtgaattggctgacgtcgaaataccaagattttgttatcacgaaaaactttctatagctggaaattgtaggatgtgtttagtagaactagataaatctgcaaaaccaatagcttcatgtgctatgccagcggctgaaggtatgaatattaggaccaacacagaaatggttgaaaaggctagaaaaggaataatggagtttcttttagcaaatcatccgttggattgtccagtttgtgaccaaggtggagaatgtgatttgcaagatcaatcactttattacggcgtagacaagtcaagattttcagaaaacaaaagggttgtaaaagataagtatatgggccctttaataaaaacccaaatgacaagatgtatacattgtactaggtgtgtgaggtttgcaactgaggttgctggagttcccgagattggagcgattggaagaggggaaaatatggaaatcacaacttacttagaaaaatctatgacatcagaactatcagcaaatgtgatagatctttgtccagttggcgcactgacatcaaaaccttatgcttttgaagcgcgaccttgggagttaaaaaaaaccgagagcatcgatgtaatggatgctgtaggatcaaacattcgtgttgatacttatggatgggaagtaaaaagagttttacctagaataaacgaagatatcaatgaagaatggttatcagacaaatcaagatattcctgtgacgggctttcaaaacaaaggttggatgtcccatatataaaaaaacaaaacaagttagttaagtcatcttgggatgaggcaatagacattatagtaaaaaaaataattgatactccaaaagatcaaatagctggccatgtaggcgacatggcaagcctcgagactatgttcgcttttaaaaaacttttgaactcaaataatattccaaattttgattttagagaaaaaaaaatcaaaataataaatgaacaaagaatgaattacatatttaactcaagtataaaaggcatagaagagtctgacttaatctttttaataggttgtaatcccaggcatgaggcaacaatgttaaatgcaagaattagaaaagcttatgttcaaaataaagttgaaattttttccataggtgatgccaatgacttaacttacccttataaaattgttggtgaaaatacagaagaattaaaaaaaattttcgatggaaaacatgaaatttcttcaaaagtaaaatcagccaaaaaaccattatttataattggtgagtcaatattagaactaaaaagttctggatatattttagaaaacttaaataacttttgtatagacaataattttataa

SEQ ID NO: 222022 - DNA, 493 bp, Unknown
  Bacterial polypeptide expressing nucleotide sequence isolated from the Sargasso Sea
tttaaaagcagtaattccaggaggctcttctatgccaatgttacctaaacaagtgtgtgatcatataaaaatggattttgatgcatgtgtagaaaataaaacaggattaggtacagctggaattgttgttattaataatgatcaagatatcattaaatgtatggctagaatagctagattttataaacacgaaagttgtggccaatgtacaccatgcagagaaggctcaggttggatgtggagaatgcttgaaaggatggcagcaggagaggcaacaccagaggaagttgatatgcttatggatgttaccaaacaaatagaaggtcacacaatatgtgcttttggagaaggttcttcttggcctgttcagggattaattagacattttaaagatgaaataattgagagaaataaatttgatcctataattaaaaaagaaaaaaatattccttatcttgttgatcaacatttattagaaaaagaaaatgcttaa

SEQ ID NO: 222023 - DNA, 1133 bp, Unknown
  Bacterial polypeptide expressing nucleotide sequence isolated from the Sargasso Sea
aatgcttaaattaaaagtaaacgatatagatatagaagttgatgatgggttaactgttctccaggcttgtgaacaagcaggagtagaaattcccagattctgttatcatgaaaaactctcaatagcaggcaattgtagaatgtgcttagttgaaatggaaaaatcacctaaaccaattgcatcatgcgcaatgccagcgtctgacggcatgataattaaaacgaataccgagaaagttgaaaaggctagaaaaggagtaatggaatttctactcgcaaatcaccctctagattgtcctgtatgtgatcaaggtggagaatgtgatttacaagatcaatctatgttttatggaattgataaatcaagatttaaagaaaataaaagatatgttcctgaaaaatatatgggtcctttaatcaagacacaaatgacaagatgtattcattgtactagatgtataagatttgccactgaagttgctggagtaactgaactaggagctataggcagaggagaagatatgcaaattaccacttatctagaaaaatctatggattccgagctttcagcaaacgtaatagacttatgtcctgttggagctctaacatcgaaaccttatgtatttgaagctagaccctgggagcttaaaaaaactgaaactatagatgtaatggactcagtcggatccaatattagagttgatacatacggttgggaggtgaaaagggtactacctagaataaatgaagatataaatgaagaatggatatcagataaaacaagatatgcatgcgatggactaaaaaatcaaagacttgactccccatttgaaaaagttggaaaaatttttaaaaagatatcctggaacgatgcttttaaaaagattcaaaaaaaaataaatgaaactaaagcagaaaaaattgcaggcctaacgggtgatttaaataatatggaaactctttttgcttcaaaagaattttttcaaaaaattttaaaatcaaaacacctagattccagatctgacaaagcctatatagattgtaaagagagaagtaattatatatttaattcgtcaatcaatggtattgaggaaagtgatttaatattattaattggaacaaatccaagattag

SEQ ID NO: 222024 - DNA, 757 bp, Unknown
  Bacterial polypeptide expressing nucleotide sequence isolated from the Sargasso Sea
aatggcaaaagaaaaaaaaacactaaatttaaattttggaccacagcatcctgctgcacatggagtgttaagattaatacttcaactagatggagaggttgttgagaaagcagatcctcacatagggctactgcaccgaggtactgaaaagttaatagaaaacaaaacttatatccaagcagttccttattttgatcgtcttgattatgtagcaccaatgaatcaggaacatgcatttgctttagctatagaaaaaattcttaaaatcgaagttccttctagagcaaaatatattcgagtaattttctgtgaaataggacgcatattaagccacatattaaacgttactacccaagcaatggatgtcggggcgctgacaccaactttatggggatttgaggaacgagaaaaattaatgggattttatgagagagtgtctggatcaaggttgcatgctaattattttagagcaggtggagtacataaagatctccctactggacttgatagtgatataagtgaattttgcgaaaaattcccaaaaattattgatgatttagaaactttacttaccgataacagaatatttaaacagagaaatgtagatataggaattgtaactaaacaagatgtattggattattctttttcaggagttatgttaagaggttctggtgtagcttgggatttaagaagaagtcaaccttataattgttatgacgatttagaatttaaaattcctattgaaaaaatggag

SEQ ID NO: 222025 - DNA, 319 bp, Unknown
  Bacterial polypeptide expressing nucleotide sequence isolated from the Sargasso Sea
atggaactttcctcaaaaggttttttagttgcaagttacgataaaattcttacttgggctagaacaggatctttgtggccgatgacgttcggtttggcatgttgtggagtagaaatgattcattcttatatggcaagatacgatctagatcgttatggagtaataccaagaggtagccctagacaatccgatgtgatgattgttgctggcacactaacaaataaaatggctccagctttacggaaagtgtatgatcaaatgcctgagccacgatgggttatatcaatggggtcatgcgcaaatggaggaggatattatc

SEQ ID NO: 222026 - DNA, 2335 bp, Unknown
  Bacterial polypeptide expressing nucleotide sequence isolated from the Sargasso Sea
atgagtgaaaatataaaatttacagtaaatggtaatgagcttgaagctaaatcaggagagttactgattgaagcttgtgaaaactctggaattcatataccaagattttgttggcataaaagattagaaccagttggtatgtgtaggatgtgtcttgttgaagttgaaacaccaagaggcaaagccttagtaccttcatgtacaacagaaataacagaagatcttgtagttgaaacagaatcagaggtagttactaaagctcaagaaggtattttagaatttttattaattaaccaccctcttgattgtcctgtttgtgacaaagcaggagaatgtcctcttcaggaccaaacaatggcctatggcccaggagagtcacgatttgttgaagaaaagagacactttgagaagccaatctcaatttcagaaataatacttcttgatagggaaagatgtattctctgtgcaagatgcacaaggttctcagatgaaatttcaggagatcctttaattgaatttatacaacgcggtaataaaacagaagttaatacatttcctgatgagccttttagatcatatttctccggtaacactgtccaaatttgtcccgtaggagcattaacatcaacatcttatagatttaaagctagaccatgggatttgaaaaaagtttcttcaacatgtaattgttgttctgtaggttgttctattgagttaaacacttcacaaaataaaatgttaagaatattaggtgaagataatgaatttaccaaccaaggatggctttcagataaaggtaggtacaattttgattatcttcattctgaaaatagggtattaaatattctgaataagagcgaagattcctttaatgaaatatctatttctgaagctatggcaaagattaaaaacaaaattgatgagttggataatccgaacgttaaattcttattaggttctagtagtaccaatgaagagtattttgttattaatgaaatagggaattatttaaataaggataaatttttaagcagggatagttccaatatttactttggagatgatcttttatttgagggttattttggagaccagtattctcaagcaaagctcgaagacttagataactcagaaacaatagttgtttgggctgaagatattaaagacaatctaccgattctttatttaagaattaaaaaagcagtcaagaatggctctaagttaattgtatttggacacacaaatacttcaatagcaggtctggctgatttttattttggtgcagacatagtttctaataaatttgaattaattcggaatccaaatgaaattgaagatttgaaaaataatattgaagggaaaaaagtaactgttattgcaggtaaatctacagtttttcaaaaaaaagaatcattagataagttaattaactttttaaacgaaaaatctgagttgcaagtatttaatgcgtttagcaagggcaatacttttggtgctttacaaaatatagatgaagtgaaaggtttaaatgaattttgcaacgaatttgatactaatgctaaaaatattgtttttacaattggagttaatccagtaaattcatcattttttggtcaaaaaattaaggaaaaattaattgcttcagattttgtaatttcactcgatttatttgtgaatgaaacaacagagttagctgacttgatactacctacaacttctttaggagagaaagaaggaactgtaacaaatatggaaatgagagtaatgaaacagaataaaatacttcctgcccctggttcaacattatctgaatgggaatacctaacaagcatattaaatgtacttggtgaagatgttaattataaaaatgaaaatgaaattaacaattatttaagtgaaaaatatataaatcaagaaaaactaccaacttttgacaatttaaacaagccaagcaatttatttggggttataaacaagaaagatataaatattaatattaaagatcttgaagaagataatttctctctattaatggtcagaagactttatggagattcaagtacacaaataaattctccttctatttcaatgttgggggcacataaatttattgaattaaattcaataaccgcaaaaaaatacggaattaattcaaaagttggcaacttaattcaaggtcctaattcaatattgataaatatagatataaatgagtatttaccagacgatttagtaatagcaccaattaatagaagaggttttgaaaatatagatccatgtttagattttgatataactgaagcaaaaaacagagaggaattaaatgtcaattgat

SEQ ID NO: 222027 - DNA, 1057 bp, Unknown
  Bacterial polypeptide expressing nucleotide sequence isolated from the Sargasso Sea
cttgactgttctacaagcttgcgagaaagctggagtcgaaattccaagattttgctaccatgaaaaattatcaattgctggaaattgcagaatgtgtcttgttgagatggaaaaatctccaaaacccatagcttcttgtgcaatgcctgctgctgagggcatggttataaaaacaaatactcccaaaatagaaaaatctagaaaaggtgtaatggaatttttattagccaatcatcctttagattgtcctgtttgtgaccaaggtggtgaatgtgaccttcaagatcagtcaatgttctatggtattgataaatctagatttaaagaaaataaaagagcagttcctgataaaaacatgggtccgctgattaagacccaaatgactagatgtattcattgcactagatgcattagatttgcaacagaaattgctggtgtgcctgaactaggtgcaataggcagaggtgaagatatgcaaataacaacatacttagaaaaatcaatacagtcagaattatcaggtaatgtaatagatctttgtcctgtaggagcccttacgtctaagccatatgtgtttgaagcaagaccttgggagctaaaaaaaacagagaccattgatgtaatggatgctgttggatcaaatattagagttgacacatatgactgggaggtaaaaagagtactaccaataatcaatgaagatataaatgaagaatggatatctgataaaacaagatatgcttgtgatggtttattaagtcaaagactagatacaccgtatattaaatataataataaatttgaaaaagcttcatgggatgaagtttttaaaattataaaatcaaaaatacaaaatactgataaacaaaaaatagccggatttgtaggcgacctgattaatatggaggctagctacatatttaaagaatttttagaaagagttatagatacaaaaaaatatgagtctaggtcatctgagatgtttatggataattctaaaagagaaaactatttattcaattcaaccattaatggtgttgaagagtcggatttaatt

SEQ ID NO: 222028 - DNA, 1504 bp, Unknown
  Bacterial polypeptide expressing nucleotide sequence isolated from the Sargasso Sea
atggttaaagttattattgatgataaagattatgaagttgaagagggtttagctatcatacaagcatgtgaaattgctggagtcgaagttccaagattttgttatcatgaaaaactatctattgctggtaattgtagaatgtgccttgttgatgttgaggattcaagggggttaagccctaaaccagtagcatcttgtgcgatgcaagtttcagaaggtttaaaaatttatactaaatctgaaagagtaaaaaatgctcaggaaggtgctttagagtttttattaatgaatcatccacttgattgtccgatttgtgatcaaggtggtgaatgtgatttacaagatcaatcaatggcttttggatacggttctagtaggtttgatggagataaaagagctgtagagtcaaaagatatgggtccatttattaaaacagaaatgactagatgtattcattgtacaaggtgcgtaagattttcttcagaaatatctggaaatgatgaaataggatcaattggtagaggtcacgatatggagataacaacttaccttaatcaagcagtagaatcagaactttctggaaatgttattgatttatgtcctgtaggcgctttgacttctaaaccttatgctttttcagctaggccatgggaactaaataaaactgaaaccattgatgtaatggatgctatgggttcaaacattagaattgactctaaaggcttaagagtcatgcgtgttcttccaaggttaaatgaagatatcaatgaagagtggataacagataagacaaggtttttttgggatggtttaagcgttcaaaggattgacaaaccttataaaagagttgatggatctttaaaagctacatcttggaaagatgctctcgaattggcgaaggataaaatttctaaaagtcaaccaaacaaaatatctgcacttacaggagatcttgtagatattgagacagtttatgctttaaagaaattaatgaacaatattggcagtgataactttgattgtaggcaagaaaactcaagaatttcaggaccacctgagagatggctttttaactcaacttttaatggcatagaaaattctgatgggtgtctaattataggttcagatcttagaaaagaggctcctcttttaaattcaagacttttacgaaaatctagagatgatgattataaggttggagtaattggatttgataatgacttaacatttgactttaatttcctcggagaaaatccatcgatagttgaagatattttaaatgaggataatgatttttgtgaagatttaaattcaatgaaaaagccgataatgattattggacaaggagcattaataggtaatgatgccaataattttcttaatatttgtattgagcttgcccataaatttaattttataactagtgactggaatggttttaatgtacttcattcagccgcttcaagacctggagcaatgagcattggttttttcccatcagagg

SEQ ID NO: 222029 - DNA, 1231 bp, Unknown
  Bacterial polypeptide expressing nucleotide sequence isolated from the Sargasso Sea
tgtgccacgcttctgttatcacgaaaaactatcgattgctgccaattgcagaatgtgtcttgttgaagttgagaattcaaaaaatgcacttcccgcatgtgcaactccagtttctgatgggatgattgtaaaaaccaaatcaaaatctgcaaaaacagctcaggaatccacaatggaattcttactcatcaatcatccgcttgattgtccaatttgtgatcaaggtggtgaatgtgagctccaagaccttgcttatacttatgggaaaaatgagtccaggtttgatattcaaaaacagacaaaaaagaatgatgatctaggcccacttgtatctacagatatgacaaggtgcatcatgtgtacaagatgtgttcgttttggtactgaaattgcaggcatccaagagctgggaactattggtagaggagaggattccaatatcagtacatatgttgctcaaactgtggaccatgaattatcagggaacatcattgatctgtgtcctgttggtgcgctcaataataaaccgtatcgatacactgatagaacatgggaattggatcaaattgagagtatttcaccgcatgactgtattggtacaaacatcatggtgcataagaaaaatgacatcattcgcagaatcgttcctaaaaataatccagagatcaatgaaacatggatagctgacagagaccgctttggttttgatggcatttattctgaagacagaacatcagatactttaataaggacagatcaagatttaaatcagtcaaaattatcaaacgcagttgataaaactgtcgaactcattaattcggcaaaaaataatgatcaatctattggcgtattattctctccaagtatatcgacagaagagcaatatcttttgtcagacctttgtcatcaaattggaatcgagtcaattgattctagattgaggcaaggagaattttcaaatgatatagataaacgttttatacctcatatgaatatcaggctttcagatgtagatagcatgaaaaatatacttattgttggctcagaacttagaaaagaaaccccaatactggctcatcgtgtaaagaaatcagctgagagtggagcatcgattcatactattaatagcaaggaatctaaatatcactttaatgtacaccaagatctttcatgtgatgattggataaatgaattaggattggtgctcaaggctgcaatcaaccttcacaca

SEQ ID NO: 222030 - DNA, 1141 bp, Unknown
  Bacterial polypeptide expressing nucleotide sequence isolated from the Sargasso Sea
atgacaaaagaaacaaaaaaactaaatctaaattttggtcctcaacatcctgcggcacatggtgttttaagattaattttacaattagatggagaaattgttgagaaagcagatccgcatattggattactgcatcgaggtacagaaaaactaattgaaaataaaacttatacacaggctgtaccttatttcgacagattagattatgttgctccaatgaatcaagagcatgctttcgcattagcaattgagaaaattttaaaaatcaatgttccagtaagagctcaatatctaagagtgatattttgtgaaataggcagaattctcagccatattttaaatgttactactcaagcaatggatgttggtgcattgacaccaactttgtggggttttgaagaaagagaaatattgatgggtttttacgaaaaagtttctggatcacgacttcatgcaaattattttagagcaggtggagttcaccaagatttgccaaaaggactagacagcgaaattgcagaattttgtgaaagatttccaaagataattgacgacttagaaacattactaactgataatagaatatttaaacagagaaatgttgatattggtgttgtcaccaaacaagatgcacttgattactctttttcaggagtgatgctaaggggatctggggttccttgggaccttagaaaatctcaaccttatgattgttatgatcaattaaaatttaaaatcccaattggaaataatggtgattgttacgacagatacttatgtagaattgaagaaatgagagagagtgtaaaaattataaaccaatgtcttgcaaatttaccgacaggcccaataaaaacaaatgacggaaaaatttctcctccaccaaaaaaagaaattaaacaatcaatggaagcattaatacatcattttaaactttttacagaaggatatagagtagataaagatgaaatttatactgcagtcgaagcaccaaaaggagagtttggtgtttatttaatatccgatggatcaagtaaaccttacaaatgcaaaataagagccccaggtttttcccacttacaagcaatggactatttaattaaaggtcatatgcttgctgatgtaccagcggtactaggtc

SEQ ID NO: 222031 - DNA, 1471 bp, Unknown
  Bacterial polypeptide expressing nucleotide sequence isolated from the Sargasso Sea
gatgcctaaaatttttataaataataatgaaatagaatttaaagaaggcatgacagttctacaagcttgtgaactagcaggtgttgagattccaagattttgttaccacgagagattatcgatcgccggaaattgtagaatgtgtttagttgaaatggaaaaatcggctaaaccgattgcttcatgtgcaatgcctgcagcagagggaatgaaaattaaaaccaataccaaaatggttgagaaagctcgaaaaggagtaatggaatttttactcgttaatcatcctttagattgtcctgtgtgtgaccaaggaggtgaatgtgatctacaagatcaatctttgtactatggttttgatggatctagatttaaagaaaacaaaagactagttaaagacaaatacatgggacctttaatcaagacacaaatgactagatgtattcattgcacaagatgtattagatttgcaactgaggttgctggagtgtccgaacttggtgcggttggaagaggagaagatatggaaataactacatatctagaaaaatcaatgacttcagaattatcaggtaacgtaatagatttatgtcccgtgggtgctttaacatcaaaaccatatgcttttgaagcaagaccgtgggaactaaaaaaaactgaaagcatagacgtgatggatgctgttggttccaatataagagtggatagttacggttgggaggttaaaagaattttaccaagacttaataattctattaatgaagaatggatatcggataaaactagatatgcatgtgatggattattaaaacaaagattagacaaagtttacattcgaaaagaaaaccaattagtagaagcaaattgggaggaagcaattaatttaatttcttccaaaataaactcaacaaacccagataaaattgcagctcatgttggtggcttaagtagttttgaaacaatcaattcatttaagaaacttttggatgaaattaatgttagaaattatgaatttagagaaaaggatttttatgtaaatcctgatcaaaaaatgaattatatttttaattcatcaattcagggtattgaaaaatcagatttcattttattagtcggtgctaacccaagacacgaggcaacaattttaaatgctagaattagaaaaacttatttaaaaaacaaattaccgatattttctataggaaaccctggtgatctaacctatccatacaaaatagtcggaaataaaacagatgacattcaacaaatcttaaatggaaaaagtgagattaacagtttgttaaaaaaatcaaaaaacccattaataataataggcgagtcagctttagagttaaaatctggtaaatttattttagaaggttttaaagagtttctgtataaaaataatttcataaatgaaaattggaattctttcaatgtattgactcaaaatgcttctacagtggagcgttag

SEQ ID NO: 222032 - DNA, 466 bp, Unknown
  Bacterial polypeptide expressing nucleotide sequence isolated from the Sargasso Sea
gctgacaaagctacttaacatgagtagaaggtattcaatgtgggtataccaatggggtttagcctgttgtgctatcgagatgggcgcagcctttgcttcgcctcgttatgacgtgatgcgattaggcgtcatccctcttcctgctagccctcgacaagccgattttttagtagtttccgggacagttactgacaaaatggctccagcagtccgtcgtctttgggaacaaatgcctgaccctaaatatgttatttctatgggttcatgtgcgaattgtggaggcccatattgggattcttactcagttaccaaaggagtagatcagatcattcccgtagatgtttacgttcctggctgtccgccacgccccgaagcgcttcttgaaggaattgttcttcttcaggaacgcattatgaacgaagatatggctgaaagatggaaaggggatcccattgttgttgagtaa

SEQ ID NO: 222033 - DNA, 1351 bp, Unknown
  Bacterial polypeptide expressing nucleotide sequence isolated from the Sargasso Sea
aatgcctaagattaccattaacggaaaagagattgaatttgaaaaagggatgacagttttacaagcttgtgaaattgctaatgtagaaataccaaggttttgttatcacgaaaaattatctatagcaggaaattgcagaatgtgtttggttgaaatggaaaaatcagcaaaaccaattgcttcctgcgctatgccagctgctgaaggtatgaatattaaaaccaatactccttttgttgaaaaagctagaaaaggtgtaatggaatttttattagctaatcatcctttagattgccctgtttgtgatcaaggtggagagtgtgatctacaagatcaatcaatgttttacggaatagataaatctagatttgttgaaaataaaagacaagttaaagaaaaatatatgggtcctttaataaaaacccagatgactagatgtattcattgtacaagatgtataagatttgccactgaagttgcaggagttccagaaataggagccataggtagaggcgagaatatggagatcactacctatttggaaaaagctatggagtctgaactttcagctaatgtaatagatttatgtcctgtgggagctttaacatcaaaaccatatgcctttgaagctagaccttgggaattaaaaaagactgaaagcatcgatgtaatggattcagttggttcaaacataagagtggatacttataattgggaagtaaaaagaatacttccaagacttaacaatgaaattaatgaagaatggatttctgacaaaacaagatattcttgtgacggtcttctaaagcaaagactcgatgctccatatattaaaaaagataatagattacaaaaatctagctgggatgaagcagttgatcttatattaaataagattaatgcaataaatcctaacgaaataggcgggcacattggcgatatggttaatttagaaaatgctttagcatttaaaaaattatttaaggttttaaatagtaacaatatagaatttagagaaaaaaaattttatgtaaattcctcggagaaaattaattatttatttaattcttctattaaaggtatagagaactctgatttaatcttattgatcggaactaacccaagacatgaagctacaatggtaaacgctagaataagaaaagtttttgcacaaaaaaaaatccccatattctctataggtaatccaggagatcttacttatgattatactattttaggaaataaatcagacgatattaaaaagatactgaacaaagaaggtgaattttctaataaattattgtcctcaaaaaaaccaatcataatcattggtgaatctgcgtgggcctaa

SEQ ID NO: 222034 - DNA, 1017 bp, Unknown
  Bacterial polypeptide expressing nucleotide sequence isolated from the Sargasso Sea
aatgaaagtttttattgatgatatagaatataatgccgaacctgaagaaacaataattcaattatctgatagagctggaattcatatccctcgattttgttatcataaacatttgtcaatagtagcaagttgtagaatgtgcctcgtggatattgagggtgttaaaaatgcacaaccagcatgctcaaccccagttagagaaggaatgaaaatttatacatcatcacaaaaaaccaaagatgctcaaaaaagctctatggaatttttattaataaaccatcctctagactgtcctatttgtgatcaaggaggtgaatgtgaattgcaagatgtatctttagagcatggagatgatcattcacaatatatgcaattaaaaagagttgttatagataaggatgtaagccctttggtgtcaacagatatgacaagatgtatacattgttctagatgtgtaagatttggtgaagaaattagtaatgtcaaggaactgggattattaaatagaggagatgatatgaaaatcgatgtatttatcgaagataaaatatcctctgagctttctggaaatatgattgatctttgtcctgttggcgcactaaataataaaccttacagatataaagccaggacatgggatctcagagagaatactggtatttctgctcacgattgtttaggttcaaatattttttatcatatatataaaaataaaattttaagagcagtacccaaagaaaaccctggtataaatcaaacttggttgtcagatcgtgataggtttggctatgagggtatttattctaaagatcgaattttcaagtcatatataagagaaaataaaaaacttgttgagctagataagcaactcgttgtgaatgaagttaacaagttactcaaaaagtcaatagaaaattattcaaataataatataggatgtatgatttcttcgcgttccactaatgaagaattatatttatatcagaaactctttagaagcttaggtttgaataatat

SEQ ID NO: 222035 - DNA, 1060 bp, Unknown
  Bacterial polypeptide expressing nucleotide sequence isolated from the Sargasso Sea
atgataaagttaaaagtaaacaatatagatgtagaagttgatgatggacttaccgttttacaagcttgcgaaaaagccgggtttgaaataccaagattttgttatcacgaaaaattatcaatagctggaaattgcagaatgtgtttagttgagatggaaaaatctcctaaaccaattgcatcgtgtgcaatgccagctacagaaggaatggtaataaaaactaacactgaatttgtggaaaaatcaagaaaaggtgttatggaatttcttttagccaatcatccattagattgtcctgtctgtgatcaaggcggcgaatgtgatttacaagatcaatcaatgttttatggaattgataaatctagatttaaagaaaacaaaagaagtgtacctgaaaagtatatgggaccattaattaaaacacaaatgacaagatgtattcattgtactcgatgtattagatttgcaactgaagtggctggtgttccagaattaggagccataggtagaggagaagatatgcaaatcaccacttatttggaaaaatcaatggagtcagaaatgtcagcaaatgtaattgatttatgtccagttggtgcgcttacctctaaaccctatgtttttgaggcaagaccttgggaattaaaaaaaactgaatctatagatgtaatggatgccgttggatcaaatataagggtagatacttatgggtgggaagttaaaagaattttaccaataattaatgaagatataaatgaagaatggatatcagacaaaaccagatacgcttgcgacggcttaaaatttcaaagattagatacaccatatttaaaagagaaaaatgaatttaaaaaaatatcatggaacatggcttattcaaaattagttgaaaaaattaaaataatacctggagaaaaaatagcaggaatgactggtgatcttacaaatatggaaacaatgtttataataaaagagttttttaataaaactataaagtccaaaaatttagagtcaagaaatgataactattatataaacaattctacaaaagataattata

SEQ ID NO: 222036 - DNA, 762 bp, Unknown
  Bacterial polypeptide expressing nucleotide sequence isolated from the Sargasso Sea
tctggcatcctatcgagagcggggaggttaccaggcttgggaagaagttctcaaaaatcagacgccgcgtgaagagattatcgagacgctgaaaacctcagggttacgggggcgcggcggagcgggatttccgacaggactaaaactgagcttcatgccgcgggacgcacaagggcagaagtacatcgtttgtaattcggacgaaagcgagcccggaacgttcaaggatcgggatattcttcggtttaatccgcatcaggtgatcgaaggcatggcgcttgccggatatgccatcggcgccaccgtgggtttcaattacatacgcggtgaatattacgaaccctggcagcgctttgaagccgctctggccgaggcaaggcaagctggtctgctgggcgagaatctaaagggatctgacatcgcgtttgaactgcacagtcagcgcggtgcgggggcatatatctgcggcgaggagacggcattgctggagtcgctcgagggaaaaaaaggccagccgcgtttcaagcccccgtttcctgcccaggtaggcgcttttggcaaacccaccacgattaacaatactgagactctcgcttcaattcctccgattattcgaaacggggctgaatggttttccagcatcggtgtcgagaacagcgggggtaccaaaatttactctgtctcgggacatgttaaccgcccaggaaactatgaggttcccatggggatgcctttccgtgatctgttggagatggcgggggg

SEQ ID NO: 222037 - DNA, 2332 bp, Unknown
  Bacterial polypeptide expressing nucleotide sequence isolated from the Sargasso Sea
catggttgaacttgaaatagacggcaagaaggtcgaggtgcccgaaggcagcatggtgatccaggctgcgcacaaggcggacaagtacattcctcacttctgctatcacaagaagctgtcggttgcggccaactgccggatgtgtctcgtcgaagtcgagaagatgccgaaggccgtgcctgcctgcgcgacccccgtgtcggccggcatgatcgtccatacgcaatccgacaaggccgtgaaggcgcagcagtcggtgatggaattcctcctcatcaaccacccgctcgactgcccgatctgcgatcagggcggcgaatgccagctgcaggatctggcggtcggctacggcaagtcgtcgtcgcgctactcggaagagaagcgcgtggtgttccacaagaacgtgggcccgctgatctcgatggaagaaatgtcgcgttgcatccactgcacgcgctgcgtccgcttcggccaggaaattgccggcgtgatggagttcggcatgctgggccgcggcgagcactcggaaatcacgacgttcgtcggcaagacggtcgattccgaaatgtcgggcaacatgatcgacctgtgcccggtcggcgcgctgaccagcaagccgttccgctacagcgcccgtacgtgggaactgtcgcgccgcaagtcggtgagcccgcacgattccgtcggcgcgaacctcgtcgttcaggtgaagaacaaccgcgtgatgcgcgtgctgccgttcgagaacgaagccatcaacgaatgctggatctcggacaaggatcgcttctcgtatgaaggcctcaacagcgaagagcgcctgacgaagccgatgctgaagcagggcggccagtggatcgaaaccgactggcagaccgcactcgaatacgtcgcgaagggcctgaagggcatcgccgcggatcacggcgcgaacgcgctggcgatgctcgcgagcgcgcacagcacggccgaagagctgttcctcgtgaagcagctcgccaacgaactgaagacgccgaacgtcgacttccgtctgcgtcagcaggatttctcggcgccggtccagggcgcaccgtggctcggcatgccgatcgccgacctgtcgaacgtggacgccgcgttcgtcgtcggttcgttcctgcgccgcgaccacccgctgttcgcatcgcgcctgcgtcaggccgcgaagaacggtgcgaagctgcacttcctgcacgcgaccggtgacgacgcactgatcccgactgcgcagcgcatcgttgctgctccgtcggcatggctcgaccagctggccggtatcgcggcggccgtcgcgcaactgcgcggtgtcgcactgcccgacacgctcgcaggcgtcacggcatcgccggccgcgcaggctgtcgcccagtcgctcgcgaacggcgaacgccgcgcggtgctgctcggcaacgtcgcggtccgccatccggaattcgccaagctgcacgccgtcgccaagtggatcgccgacaacaccggcgccacgttcggcttcctgacggaagcggcgaacacggtcggcgcgcacgtcgtcggcgcactgccgggcgaaggcgggctgaacgcgcgcgaagcattcgcgcagccgcgcaagggctacgtgctgctgaacgtcgaaccggaattcgataccgccgatccggcgcaggcgcttgccgcgctgaaccaggccgagatggtcgtcgtgatgtcgccgttcaagcacggcctcgactacgccgacgtgctgctgccggttgcgccgttcacggaaacggccggcacgtacgtgaatgcggaaggcaccgtgcagagcttcaacggcgtcgtgcgcccgctcggcgacacgcgtccgggctggaaggtgctgcgcgtgctcggcagcctgctcggcctgccgaacttcgaatacgagaccgcggaagaagtgcgtctcgccgcgctcggcgacgccggcgtcgcgggccgtctgtcgaaccacacgtcggtcgcaccggttcgcgtcgcggcgaatgccgcgaacggcggtttcgagcgcctggccgatgtgccgatctatcacgccgacgcactcgtgcgccgcgcaggtgcgctgcacctgacggccgctgcgaaggcggcgaatgccgcggcactgccggctgcgctgttcgacaagctgggcttgaaggaaggcgacgccgtgcgcgtgcgccagggcgagcgtgcggtgcagttgccggccgtgcgcgacgcgaatcttgcggagaccgtcgttcgcgtatcggcggcgacgcctgccggcgcagcgctcggtggcctgtccggtgaactggtggtggagaaggcgtaa

SEQ ID NO: 222038 - DNA, 493 bp, Unknown
  Bacterial polypeptide expressing nucleotide sequence isolated from the Sargasso Sea
atgggtgttttagaaaataaatttcaagataatgtcattgtagcctcattagataaaattttaggatgggctagatctacctctccatggtatttccaatttggtttggcctgctgcgctattgaaatgatggcttctgcagcaagtagacatgatttagagaggattggaatgatgcccagatcttctcctaggcaggcagatgtaatgattgtcgcaggaacagttacaatgaaaatggcccttcgagttaaaaaactttatgagcaaatggcagatcctaaatatgtgatttcaatgggaagctgtgcaactagtggtggtccatattggcagcatgggtatcatgttttaaagggagtggatttggtagttccggttgatgtatatgtacctggttgcccacctcgcccagaagcattaatcgaaggacttttaaagttacaggaaaaaattcaaaccgaacgtcctcttactagaaaatctgcatgac

SEQ ID NO: 222039 - DNA, 616 bp, Unknown
  Bacterial polypeptide expressing nucleotide sequence isolated from the Sargasso Sea
atgcgtgaatttcctgaagatagccatcagattgaaatttatgaaaaaaataatggttacagtgcactcaaaaaagttttaaaagaagacaatcctgagaatgttattaatgagattaaagattcaaacataagaggtcgtggaggagcaggctttccaacaggagtaaaatggggttttttagcagaaaatgaggataggtatcttgtaattaatggtgatgaatccgaacccggtacattcaaagatagaattttacttgagagagatccacaccaactaattgaaggtgtaataattacatgctttgcttcaaacatcaaaaaagcatttatctacataagaggtgagtatgcgaagccagcaagaagagtacaggatgcagttaagcaagcatatgaaaaaggatatttgggaaataatatattaggaacaaatttttccctggatgttgtagtacatcttggagcaggagcgtacatttgtggtgaagaaacagctcttttaaattcacttgaaggaaaaaggggagagccaagacttaaaccaccttattttcctgcagtaatgggactatacaacaaaccaacattagtaaataatgtagaaacaatat

SEQ ID NO: 222040 - DNA, 496 bp, Unknown
  Bacterial polypeptide expressing nucleotide sequence isolated from the Sargasso Sea
gatgggactattaacaaataaatttcaagaagataatgtaattgttgaaaaacttgaaaagttacttaattggagcagaagtactagcccatggttctttcagttcggtaccgcctgttgtgcgattgaaatgatggctgctgcagcaccaagacacgatattaaaagaattggttttatcccaagatcatcccctaggcaagcagatgtgatgatcgttgccggtactgtcacaatgaaaatggctatacgcgtaaaaaaactttatgagcaaatggcagaccctaaatatgttgttgcaatgggttcatgcgccactagtggtggaccatattggcagcacggctaccatgtattgaagggtgtagatattgtaattcctgttgacgtttatgttcctggttgcccacccaggcctgagtcgctaatagagggcctcttaaagcttgaagagcaaatacttgaagaccgtccactaacacgtaaaatgacatga

SEQ ID NO: 222041 - DNA, 544 bp, Unknown
  Bacterial polypeptide expressing nucleotide sequence isolated from the Sargasso Sea
atgagccagcaatgtcagtgccaacacaatcagtccccgcagggacagagttcatgccagggcaaggggaaggatttcgtcctcagccaggcagaacgcgatgccatcgagcatgagaaacaccactacgaagatccccgtgccgccagcattgaagcgctcaagatagtgcagcaggcccgcggttgggtacctgacggtgccatccacgccatcgccgccgagctcggcatccccgccagcgacgtggagggggtcgccaccttctacagccagatcttccgccagccggtcggtcgccacatcatccgcgtctgcgacagcatggtgtgctacatcaacggccacgaacaactgctggccggcctgaaagaggtgatggacctggcccccggccagacctccgccgacggccgcttcaccctgctgccggtctgctgcctcggcaactgcgacaaggggccagcgctgatgatcgacgatgacacctacggtgggctcgacgccgtcagcctgctcaagaccctggaggcttacccatgag

SEQ ID NO: 222042 - DNA, 588 bp, Unknown
  Bacterial polypeptide expressing nucleotide sequence isolated from the Sargasso Sea
gtggccgcaccatcggcgtcgccgcctacagcacagagcaggcgctggcctggggcactacaggcggcggtctgcgcgccaccggcctcaacttcgacgtgcgcaagtggcgcccctactccggctacgatcagttcgaattcgaagtgccggtcggcgccaacggcgatgcctacgatcgcgccctggtgcgtatcgaggaggtgcgtcagagcatgcgcatcatcgagcagtgcatgaagaacatgcccgaagggccgttcaaggcggatcacccgctcaccacgccgccgcccaaagagcgcaccctgcaggacatcgagaccctgatcacccacttcctgcaagtgtcgtggggcccggtcatgccggccgccgagtccttccagatgatcgaggcgaccaaggggatcaacagttattacctgaccagcgatggctccaccatgagctaccggacccggatccgcaccccgagctttgctcacctgcaacagatcccctcggtgatccgtggtcagatggtgtcggacctcatcgtctatctgggcagtatcgatttcgttatgtcggatgtggaccgttgag

SEQ ID NO: 222043 - DNA, 553 bp, Unknown
  Bacterial polypeptide expressing nucleotide sequence isolated from the Sargasso Sea
attccattaaaagaattaattgaaaagcatgcaggtggagtaataggtggatgggataatctaaaagcagttatacctggtggttcttcaatgccattacttccaaaagaaacatgtgaaacaattaaaatggactttgatgcatgtgtcgagaataaaactggtttaggaacagctggtattgtggttataaataaagatcaagacattattaagtgtatggctagaatagcaagattttataaacacgagagttgtggtcaatgcacaccatgcagagaaggttctggttggatgtggagaatgttagagaggatggccaaaggcgaagcaacaagagatgaagtagatatgttattagatgtgacaaaacaaattgaaggtcatacaatttgtgcttttggagaaggatcttcatggcctgtccaaggattgatcagaaattttaaagatgaaataattgaaagaaacaagtttgatccaattgtgaaaaagcaaaaagatataccgtatttagttgaccaacatttattagaaaaagaaaatgcttaaa

SEQ ID NO: 222044 - DNA, 2032 bp, Unknown
  Bacterial polypeptide expressing nucleotide sequence isolated from the Sargasso Sea
aatgcttaaacttaaagtaaatgacattgaagtagaggtagaagaaggcacaactgttctacaagcatgcgaacaagctggagcagagataccaaggttctgttatcacgaaaaattatccatagctggaaattgtagaatgtgtttagttgaaatggaaaaatctcctaagccaatagcatcttgcgctatgcctgctgcagaggggatggtacttaaaactaatactgaaaaagtgaaaaaagcaagaaaaggtgtaatggaatttttactagcaaaccatccactagattgtccagtatgtgatcaaggtggggaatgtgatttacaagatcaatctatgtattacggaattgataaatcaagatttaaagaaaataaaagatatgtacccgaaaaatatatgggtccattaattaaaactcaaatgacaagatgcattcattgtacaagatgtattagatttgcaacagaagttgctggagttcctgagcttggagcaattggtagaggtgagaatatgcaaattactacttatttagaaaaggcaatggagtctgaactctcagctaatgttattgatttatgtcctgtcggtgcacttacatcaaaaccttatgtcttcgaagctagaccatgggaacttaaaaaaacggaaacaattgatgtgatggacgctgtaggatcaaatataagagttgatacatatggatgggaagtcaagagagttctaccaagaattaatgaagaaataaatgaagaatggatatcagataaaaccagatatgcatgtgatggattaaaaaatcaaagattagatactccttatgtaaagattaataataaattaaagccttcaagttgggacgaagcttttaaagctgtatctgaaagaatttcaaaaacaaagtctgagaaaattgctggatttataggtgatatgacaaatatggagactacttatgctgcaaaagatttttttgaaaaaaccattaagtctgaaaatttggaatctagatatgaaaaattatatattaatacaaatgtaagaagcaattatctgtttaacagctccattgaaggtatagaaaaaagcgatttaataattctaataggtacaaatccaagatttgaagcaacaatattaaactcacgaattagaaaaaattatttaaaaaataagaccgaaattatatctttgggtgatgttggggatttaacttatccttaccaagttataacgaataacaccgacactataaaagatattattgataacaagcatgaaatttcagaaaaaattaaaaaatctaaatatccaagtataatttttggacaatcagctcttaaacttaaatcgtcaccttatatttttgaagaattcaaaaattatttattagaaaacgataaaatttctgatgattggaatgcattaaatgttttatcaaaaaattcatccacagtaggctcatatgatttaaatgtattatcaaaaaactctagcttcgaaatattggacaaattagataataatgactttgaaattttaattttatttggccaagataatttaaattttgagaaaaaaaatgaatttataatatatataggcagtcacggtgataaaggtgcaagtattgctgatgtaattttgcctggtgctgcttacacagaacaagatggttattttacaaacttagaaggaaaattacaaaaagcctacaaggcatcatatccaccaggtgaagctaaagaggattggcaaataataaatgaattgtcttcattcattaagagaaaaaatttatataaagataaaaatcaacttatcgattcattaataaattatttaaatcttaataataaaaatgaagctgattttgaggtgcctgaatataattttaaatcagaaaaaattattactgaagagattgattattatcactccaatgtaatagcaagagcatcaaaaacaatgtcagagtgtaaaaatattagaatgagtttaccaaaaactggaaccgataattaa

SEQ ID NO: 222045 - DNA, 2029 bp, Unknown
  Bacterial polypeptide expressing nucleotide sequence isolated from the Sargasso Sea
aatgcttaaattaaaagttaatgaaaaagaaattgaagtagaagaaggtcttacagttcttcaagcttgtgaacaagctggatatgaaatcccaagattttgctatcatgaaaaattatctattgctggaaactgtagaatgtgtttagttgaagtagaaaaatctccaaaaccagtagcttcttgtgcaatgcctgtgactgaaggtatgaacattaaaacaaatactagcatggtagaaaaagctagaaaaggtgtaatggaatttttattggtaaatcatccattagattgtcctgtttgtgatcagggtggcgaatgtgacttacaagatcagtcaatgttttatggtgttgataaatctagatttaaagaaaacaaaagacaagtgcctgaaaaatatatgggccctttaattaaaactcagatgaccagatgtattcactgcacaagatgtataagatttgcaactgaagttgcgggtgtgcccgaattaggagcaattggaagaggtgaaaatatggaaattacaacataccttgaaaaagctatggactctgaattatcagctaacgtaattgatctttgccctgtaggagctttaacatcaaaaccttatgtctttgaagcacgaccctgggaattaaaaaaaacagagtccattgatgtgatggatgcggttggatcaaatattagagtagatacttacggatgggaagttaaaagaatccttccaagaataaacgaagatattaatgaagaatggatttcagataaaacaagatattcatgtgatgggctaaaaaatcaaagactagatacaccttacttgagagaaggagacaaatttaataaaatttcatggaatgaagcatacaaagttttgaaattaaaattagaaaacacaaattctgataaagttggatgcttcactggtgatttaaccaatatggaaacaacatttgcagttaaagagttgtttaataaagttcttaaatctagtttaatagattcaagaccagaaaactattatgtaaatttttctcaaagacaaaattacagatttaatagtaatattctagggattgaggagtcagatttaattttaatgattggatgcaatccaagatatgaagcaaccatcttaaatagtagaataagaaaatcatatttaaaatctaaattaccaatatactcaactaatgatattggtaatcaaacttatccttataaaataataaacaattcatctaatttagttaaagatataattgatgaaaataatgatttagcagaaaaaataattaatgcaaaaaaacctattattattattggtcaatctgttttaaaacttaaatcaggaaaatttatatttgaagaattaaaaaattttctaattaaaaataataaaataaatactgagtggaattctcttaatgttctttcgaaagatgcttcaacagttggatcttatgatttaactttatttagttcaaataatggtagaaatcttttgcttgaaaaattaaattccaattccatagatttaattttcttattaggacaagataaactgaaaattagtagagatggaatatttgttgtttatataggctctcacggtgatgaaggtgcaaggaactcggacttaatattacctgcgtgcgctttcaccgaacaagatggatattatacaaatttagagggaaaaatacaaaaagcctacaaggcttcgtatccaactgagcttgcaaaagaagattggcaaataataaatgaaatatcaaatttagtgagagaaaaaagtttatataaaggtaaagatgaacttactgataatatgtttaattatttaaatcaaaatagaaaagaagaatttgttaaaacagaatatatttttgaaaatgaaaaaataactattgaagatattgattattatttttcaaatgtaattgcaaaaaattctaaaacaatgtctgagtgtagatctttgcgatcaaatttacaaaatacgggaacagacggctag

SEQ ID NO: 222046 - DNA, 2335 bp, Unknown
  Bacterial polypeptide expressing nucleotide sequence isolated from the Sargasso Sea
aatgagtgaaaatataaaaattactgtaaatggaaatgagcttgaagcaaaatcaggggagttgctgatagaagcttgtgaaaagtctggaatacatataccaagattttgttggcacaaaagactagatccagttggtatgtgtaggatgtgtcttgttgaagtagagacaccaagaggtaaagccttagttccttcatgtacaactgaaataacagaagaccttgtagttgaaacagaatctgaagtagtcactaaagcacaagaaggtattttagaatttttattgattaaccaccctcttgattgccctgtttgtgataaagcaggcgaatgccctctccaggatcaaacaatggcatatggtccaggagaatcaagatttgtagaagagaagagacattttgaaaagccaatcccaatttctgagataattcttcttgacagagagagatgtattctctgtgcaagatgcacaaggttctcagatgaaatttcaggagatccactaattgaatttatacaacgaggtaataaaactgaagttaatacctttccagacgaaccctttaggtcatatttctcaggtaacactgtccaaatttgtcccgtaggagctttgacctcaacttcttatagatttaaagctagaccatgggatttgaaaaaagtttcctcaacatgtaactgttgttctgtaggatgttctattgaattaaatacttctcagaataaaatgttaagaatattaggtgaagataatgaatttacgaatcaaggatggctatcagataaaggtagatataactttgattatcttcattctgaaaataggttattaaatattcttagtaagagtgaagattctttcaatgaaatatccatatctgaagccacaaagaagattaaaaacaagatagatgagttagataatccaaacgttaaatttttagttggttctagtagcaccaatgaagaatattttataattaatgaaatagctaattatctaaataaggataaatttttaagcaaagatagttctaatatttatttcggagatgaccttttatttaagggttattttgaagatgaatattctcaagcaaaacttgaagacctagatagttcggaaacgatagtgatttgggccgaagatattaaagataatttaccaattctctatttaagagttaaaaaagcagttaagaatggatctaagttaattgtatttgggcacaccaatacagcaatagcaggcctagctgatttttattttggcaaggacatagtttctaataaatttgaattaattcagaatccaaatgaaattgaagatttgaaaaataatattgaagggaaaaaagtaactattattgctggcaaatctacagttttccaaaaaaaggaatcgttagataagttaattaactatttaaatgagaattctgagttgaaagtcttaaattcttttagcaaaggtaatacttttggtgccctacaaaacctagatgaagttaaaggtttaaatgagttttgcaatgaatttgataataatgctaaaaatattgtttttacaattggagttaatccagtaaattcatcatattttggtaagaaaattaaggaaaatttaattgcttcagattttgtaatcgctttggatttatttgtcaacgaaacgacagaactagcagacatgatactaccaactacttctttaggggaaaaagagggaacagtaacaaatatggaaatgagagtaatgaaacaaaacaaaatactccccgcacctggttcaacattatctgaatgggaatacctcacaagtttattaaatgtccttggagtagatgttaattacaaaaacgaaaatgaaattaataactctttaagcaaagaatataaagaccaagaacaaataccaacttttgataatttaaacaagccaagcaatctatttgggatgataaataaaaaagatataaatattaatattgaagaccttgaagaagatgatttttctttattaatggttagaagactttatggggattccagcactcagttaaatacaccttctatttcaatgttgggttcacaccgatttattgagctaaattcatcaactgcaaaaaaatatggaattaattcggaagttgggaattttatccaaggctctaattcaattttgataaatattgatataaatgagtacctacctgatgatttagtagtagcagcaattaatagacgaggttttgaaaacatagatccgtgtttaggttttgatataagtgaagcaaaaaacagagaggaattaaatgtcaattga

SEQ ID NO: 222047 - DNA, 1009 bp, Unknown
  Bacterial polypeptide expressing nucleotide sequence isolated from the Sargasso Sea
aatgccaaaaattataattaataataaagaattagagtttgaaaatggaatgactataatgcaagcttgtgaactcgctggaattgaaattcctagattttgttatcatgataaattatcaattgcaggaaattgtagaatgtgcttggtagaaatggaaaaatcaccaaagcctatcgcctcatgtgcaatgccagctgcagagggtatgaaaatatttacaaatactgaaagtgttaaaaatgctcgcaaaggcgttatggaatttcttttaattaatcatcctcttgattgtcctatttgcgatcaaggtggggaatgcgatcttcaagatcaagcattacattatggttttgataaatctcgttatgaggagaataaaagagctgtaaataataagtatatgggaccattagttagtactataatgacaagatgcattcattgtacaagatgtgttcgtttttcaactgagattgctggagttgatgatctaggtctgttaggtagaggtgagaatgcagaaattactacttatctagaaaaaactatccaatcagaattatcaggaaatgttattgatctttgtcctgtcggcgctctcaccagtaagccttatgcttttcaagcacgtccatgggaattaaagaagacagaatcaattgatgtatttgatgctatgggatcaagtattcggatagacactattggaaagaaaccgttgcgtgttttgccaagattaaatgaagatattaatgaagagtggataaatgataaatcaagatttgcaattgatggattatctagtcaaagaattgatagaccatatttaaaaattgatgacaaactttctataagtgattggaacactgttctagaaaaaataattaaagaaatatcaattcgagatcaatctaaaacacttgcattgagcggtaagtttactgatattgaaactttttattcttctaaagtttttttagaatcattaggttcaaataattatgat

SEQ ID NO: 222048 - DNA, 414 bp, Unknown
  Bacterial polypeptide expressing nucleotide sequence isolated from the Sargasso Sea
tatgcacgagaatcaacaaccacaaaccgaggcttttgagctgagtgcggctgagcgtgaagcgattgagcacgagaagcaccactacgaagacccgcgtgcggcgtccattgaagcgctgaaaatcgttcagaaacagcgtggctgggtgccggatggggcgatctatgcgatcgctgatgtgctgggtattccgccaagcgacgtagaaggtgttgctacgttttatagccagatcttccgccagccggtaggtcgccacgtgatccgctattgcgacagcgtggtgtgccatatcaacggctaccaggggatccaggccgcgcttgagaaaaaactcaacatcaagccggggcagacgacttttgatggtcgctttacgctgctgccgacctgttgcctggggaactgcga

SEQ ID NO: 222049 - DNA, 1357 bp, Unknown
  Bacterial polypeptide expressing nucleotide sequence isolated from the Sargasso Sea
gcatgtgagcttgctggagctgagatacctagattttgttatcatgaaaaactttctatagctggaaattgcaggatgtgtcttgttgaaatggaaaaagctccaaagcctatagcatcctgtgcaatgccagcaggtgacggtatggtaattaaaacaaacactgacacagttcaaaaagcaagaaaaggagtgatggaatttcttttaataaaccatcccctggattgtccaatttgtgatcagggtggagagtgtgatctgcaagatcaggctttgcattatggttttgataaatcaagatatcaagaaaataagcgtgcagtaaaaaataaacatatgggtccattagttagtactataatgactagatgtattcattgtacaagatgtgtaagattttcaactgaagttgctggtgtagatgatttgggattacttggtagaggtgagaatgctgaaataactacctatttagagaaaacaattgactcagaattgtcaggtaatgttattgatttgtgcccagttggagcactaacaagtaagccttatgcttttaagtcaagaccatgggagttaactaaaactgaaacacatgatgtgctagatggagtaggctcaagtataagagttgatacacgtggaaagcaagttttaagagttttgcctcgcattaatgaagatacaaatgaagaatggatcaatgataaaacaagattcgcgatagatggtttatcaagacaaagattagataaagtatacataaaaaatgacaataaactaaatgttgctgattgggacacagctttaaacaaaataaaagatgaattaaataaaagaggaaaagaaaaaacaattgcattatcaggtaaatttactgatgctgaaacaatcatcgcatcaaaactttttttagaaggtttaggttcgaacttatatgattgtagatttgacaatgcccagattattcataatgaaagtgaaagttataaatttaattcttcaattcaagaaatcgaaaatgctgacgcaattttactagttggctcaaatcctagatgggaagcaagtgtacttaatgcaagaattagaaaagcatacataaataataattgtaaagtgggagttattggcccagatcttgatcttagctatacttacacaaaaatttctacttgtttaagtggactaaatgatattaaggaaaaaaaatcagaattctcaaaaagttttcataattcaaataatccattaattatcatcggaacatcagctatcaataacagcgagggagaatctgttttaaagttatgtgctgacattgcaaaaaaattaccgaattattccaatacat

SEQ ID NO: 222050 - DNA, 1619 bp, Unknown
  Bacterial polypeptide expressing nucleotide sequence isolated from the Sargasso Sea
aatgagtgaaaatataaaaataacagtaaatggcaatgagcttgaagctaaatcaggggagctgcttatagaagcttgtgaaaagtctggaatacatataccaagattttgttggcacaaaagactagatccagttggtatgtgtcgtatgtgtcttgttgaggttgaaacaccaagaggtaaagccttagttccatcatgtacaactgagataacagaagaccttgtagttgaaacagagtctgacgtagtcaccaaagcacaagaaggtatattagaatttttactaatcaaccaccctcttgattgtcctgtttgtgataaagcaggcgagtgtcctcttcaggatcaaacaatggcatacggtccaggagaatcaagatttgtagaagagaagagacactttgaaaagccaatcccaatttctgagataattcttcttgatagagagagatgcattctatgcgcaagatgcacaagattctcagatgaaatttcaggagatccactaattgaattcatacaacgaggtaataaaactgaagttaatacatttccagacgaaccctttagatcatacttctcaggcaacactgtacaaatttgtccggtaggagccttaacttcaacttcttatagatttaaagctagaccgtgggatttaaaaaaagtttcttcaacatgtaattgttgttctgtaggttgttctattgaattaaacacttctcagaataaaatgttgagaatattgggtgaagataatgaatttacgaaccaaggatggttatcagataaaggtagatataactttgattatcttcattctgaaaataggttattaaatattcttagcaagagtgaagattcattcaatgaaatatctatatctgaagctacaacaaagattaaaaataagatagatgagttagataatccaaacattaaatttttagtaggttctagtagcaccaatgaagaatattttataattaatgaaatagctaattatctaaataaggataaatttttaagcaaagatagttcgaatatttatttcggtgacgatcttttatttaagggttattttggagatgaatattctcaagcaaaacttgaagacctagatagttcagaaacaatagtgatttgggctgaagatattaaagataatctaccaattctttatttaagagtaaaaaaagcagtcaagaatggctctaagttgattgtatttggccacacaaatacagcaatcgcaggactagctgatttttattttggcaaggacatagtttctaataaatttgaattaattcaaaatccaaatgaaattgaagatttgaaaaataatattgaaggaaaaaaagtaactgttattgctggtaaatctacagtttttcaaagaaaggagtcattagataagttaattaactatttaaatgagaaatctgagttaaaagtcttaaattcctttagcaaggggaatacttttggtgccttacaaaacatagatgaagtcaaaggtttaaatgagttttgtaatgaatttgataataatgctaaaaatattgtttttacaattggagttaatccagtaaattcatcatattttggtaaga

SEQ ID NO: 222051 - DNA, 347 bp, Unknown
  Bacterial polypeptide expressing nucleotide sequence isolated from the Sargasso Sea
cattattaggtgtatggcaaggatagctagattttataaacatgaaagttgtggtcaatgcactccctgtagagagggttgtggttggatgtggaggatgcttgaaagaatggccgatggcgatgccacttatagagaaatagatattttagaagatgtaaccaaacaaattgaaggacatacaatttgtgcatttggagaaggttcatcatggcctgtccaaggtttaatcagacattttaaaaaagatattgaaaaaagatgtcatgacgatccaataataaaaaaaaagagcgatattccttatttaatagaccaacatctcttggagaaagatagtgcctaaa

SEQ ID NO: 222052 - DNA, 1267 bp, Unknown
  Bacterial polypeptide expressing nucleotide sequence isolated from the Sargasso Sea
atgactaaactttgtacagaaacatttggacttagtaatccagcctctatcgagacatatataaagtgtggaggctataaagcatggagaaatattgtttctaaccatacatcaaaatctgaaatcattaataaaatcaagaactctggattacgaggtaaagggggagctggctttttaactggtcttaagtggtcctttatacccttgcaatcaggccaaaagtatttagtttgtaattcagatgagagcgagccaggtacatgtaaagatagagatattttaagatataatcctcatgctgtgattgagggtatgttgattgcatcatatgccataggagcatcggtagcatataattatctaagaggcgaatttatagaagaacaaagaaaagtatttcttggcgctttagacgaggcattaaaacataatcttattggtaaaaatatactctcatcaaaaatatcaattgatgtacattgcttacttggcgcaggagcttatattgttggtgaagaaactgcaatgttagaatctattgagggtaaaagaggaatgccaaggactaaacctccatttccagctatcaaaggtttgtatggcaaacctacaatcatcaataataccgagacactcgcatctatacctaaaataatgctaaataaagatgattggtataaagatataggtctagatagttcggaaggaatgaaaattttttgtatgagtggtcatgtaaataagcctggtaattatgaaattcccttaggtacaaaattttctacattgctagatatggcgggaggtgtcagagatggaggaaagcttaaagctgttatacctggcggatcatcggtacctgttattaaaggcagcgttatgctcgatttaaaaatggattacgattcaattagtaaagctggctccatgttaggctcaggaggagttatagtaatggatgatagtacttgcatggtgagtgttttgcatcgtatatctagattctactatgaagaatcttgtggacaatgtaccccatgtagagagggaacagggtggcttcatagaatacttacgaacgttctttctggtcatggatctgttgatgaccttaatcagcttgatcgaatcgcaaatcaaattgaaggccattgcatttgtgctctaggtgatgctgctgctatgccagtaagaagttttttaaaaaacttttgggatgaatttgaattttatgttgataaaaaaaaatcattggtgtcgtaaa

SEQ ID NO: 222053 - DNA, 2254 bp, Unknown
  Bacterial polypeptide expressing nucleotide sequence isolated from the Sargasso Sea
atgaaagtatatattgatgacaatgaatattcagcaagcgagggagagactattattcaagttgctgatcgtaacaatattcatatcccaagattctgttaccataaacacttgtcggttgtagcaagctgtaggatgtgtcttgttgaaattgataaagcgaaacaggctcaacccgcatgttccacacttgtctatgaggatatgcacgttaatactaaatctcaaaaaactaaagatgcacaaaaatctacaatggaatttttattgattaatcaccctttagattgccctatatgcgatcaagcaggagaatgtgaattacaagatgtttcacttcagcatggagaatcaaaatctaattatttacaatttaaaagagttgttgtagatgaagaaataagtcctctcatatccactgaaatgacaagatgtattcattgctcaagatgtgtaagatttggagaggaagtagcacatgaaaaggaattaggacttttgcatagaggtgaaaatatggaaattagatctgcaattataaatggcgtgaattcggagctatctggtaatatgattgatttatgtccggttggcgcattaaataataaaccctatagttacaaagcaagaacatgggatttaaaacagcacatcggaatatctccacatgattgtataggatcaaatattttttatcacacatataataataaaattgtcagagcaattccaagagataatcctgatataaatcagacatggattgctgaccgtgacagatttggatttgaaggaatttactcagatgaccgctgcaagaggattatgaaaagagtaaacggaattcttgaagattttgatgaagatatgttgattgatgaaattaataactctattagagatcatattaagaataattctaatcaagatatcggttgtttcatatctggccaaacttctagtgaagaaatgtttctaataaaaaagcttttcaaaaattatgaaatagaaaatcttgatcacagaactaatgagatcgaatttgagtatgatcataattttccaataatgccttaccttgggtgcaatcttaatgaattatcagattatgacaacatctttttatttggagtaaatatcaaatctgaatatcctgttttatcaattagatttaacgaggccgttaaatcgggaactaaaatttattcatttcatttttctccttatcaagaagtatttccattagaaaaatcttactgtatttcgcctaaagaaattattaataaattaaaaaccggaataaatggagttgatcgtacacaaaaaaatcttctaatagtaggcccgagtatcacttatttgccatatcaaacgctatttcactctgcaattggagaatttagcaaggaaattaaaggtaatgttgggtatttaacagattattgtaactcaacgtctggctggttgcttggtaatgtaccaaatcgtgagattggcggaatgaactctaataaaaaaggtctcaatgtaactcaaatgctgaaaaataaacttggtatgttaatcttttataacctcgaacctgaacatgattttgctaattcttcggaagtaataaaagcattacaaacctcaaactgtaatatattttttacatcctatttaacaccaataattgaaaaatatgccgattatattattccaattacaacttttgctgaaacaagtgggagctatattaacatagagggcaagcttcaaagctttaatgaaatcgttaaacctgataaggggatacaagaaggctggagagttctcagtgaattatgtaaattaaataattatgacataaataatattacagaggttagaaataaaattagagaaatattgacaaatacaaaatttgattcctctgccatgacaactggtgatacaaaacccattactgaggatttcagttttagtaaatatacgctaagacatatatactctaccgatcaaattgttaggagatcgcaacctttaaatcttaccaaacagtcaaaaaataaaaaaatattgatatcaacagatttaatggattatacagataattcaaaaagtctgctaattaatgagaatggaaagagatataaaataaatgacttcgaggttaataaaagtttgccacctaaatccgttatatatagttcatgttttaataataaatttgttgaaggaaaatcatcagatataaagatagataaatgat

SEQ ID NO: 222054 - DNA, 258 bp, Unknown
  Bacterial polypeptide expressing nucleotide sequence isolated from the Sargasso Sea
aagcttatgaaaataatgtaattggaaaaaatgctagtgaaacaggttgggattttgatatttatatacattatggagctggtgcttatatttgtggagaagagactgctcttttagaaagtttagaaggtaaaaaaggattaccaagattaaaaccaccttttccagctttaattggattatacggatgtccaacaataattaataatgttgaaacaatagcagtagtaccaacaatacttaaaagagagaggtaaa

SEQ ID NO: 222055 - DNA, 949 bp, Unknown
  Bacterial polypeptide expressing nucleotide sequence isolated from the Sargasso Sea
aatgcttaaattaaaagttaatgatattgaagtagaagttgaagaaggactaacagtccttcaagcctgtgaaaaagcaggtgtagaaataccaagattttgttatcatgaaaaattatcaatagctggaaattgtagaatgtgtttagtggaattggaaaaatctcctaaaccaatagcttcatgcgctatgccagctgcagatggtatggtaattaaaacaaatacaccaaatatagaaaaatcaagaaaaggtgtgatggaatttttattggcgaaccatcctttggattgtcctgtttgtgatcaaggtggagaatgtgatttacaagatcaatctatgttctatggaattgataaatcaagatttaaagaaaataaaagagcagttccagataagaatatgggtccattaataaaaactcaaatgacaagatgtattcattgcacaagatgcataagatttgcaactgaaattgcaggtgttcctgaattaggtgcaattggaagaggtgaagatatgcaaattagcacttatttagaaaaatcaatacagtcagagctttctggaaatgttattgatctttgtcctgtaggagcattaacctcaaagccttacgtgtttgaagcaagaccttgggaactaaaaaaaacagaaaccattgacgtaatggatgcagttggatcaaatataagagttgatacttatgattgggaagtaaaaagagttttaccagttattaatgaagaaattaatgaagaatggatttctgataaaacaagatatgcatgtgatggtttacttaatcaaagacttgatactccttatatcaaatataataataaatttgaaaaagcctcttgggatgaagtttacaaaattatcaaatctaaaattaaaaatacaaaaaaagaaaatatatgtggttttgtaggagacctaacaaat

SEQ ID NO: 222056 - DNA, 639 bp, Unknown
  Bacterial polypeptide expressing nucleotide sequence isolated from the Sargasso Sea
cattaggtagagaaaaaaatacaggtacaaagattttttgtatatctggaaatgtaaataacccatgtaatgttgaagaagagatgaatataccattaaaagaattaatagaagtacatgctggaggtgtagttggtggctgggataacttgcaagcagtaattcctggtggatcatcaatgcctttgatcccaaaagaaaaatgtgaaactttaactatggatttcgactccttaatggctgaaaaaagtggattaggaaccgctggagtagtcgtaattaataaagatcaagatattattaagtgcatggctagaattgcaagattttataaacatgaaagctgtggtcaatgtactccttgtagagaaggaactggatggatgtggagaatgcttgagaggatgtctaaaggtgaagcaactagagatgaagttgatatgctaggtgatgttacaaatcaaatagcaggacatacaatttgtgcatttggagaaggttcttcttggccagtgcaaggattattaagacattttaaaaaagaaatcaaagaaagaaataaatttgatccaatagtaaaagaaaacaaaaatattccttacttagttgaccaacatttattggataaaaatgcttaaa

SEQ ID NO: 222057 - DNA, 709 bp, Unknown
  Bacterial polypeptide expressing nucleotide sequence isolated from the Sargasso Sea
atgcctaaattaaaagttaatgataaagaaattgaagtagaagaaggttttacagttctacaagcttgtgaacaagcaggatttgaaattcctagattctgctatcatgagaaattatcaatagcaggaaactgcagaatgtgcttagttgaaattgaaaaatctccaaagccaatagcatcttgtgcaatgccagcaacagaaggaatgaatattaaaacaaatactagtttagttgaaaaagcgagaaaaggtgtaatggaatttttattagtaaatcacccattagattgtcctgtatgtgatcaaggaggagaatgtgatttacaagatcaatctatgttttatggagtggataagtctagatttaaggagaataaaagacatgttccggaaaaatacatggggcctttaattaaaactcaaatgacaagatgtatacattgtacaagatgtgtaagatttgcaacagaagtagcaggtgtgcctgaattaggtgccattggtagaggtgaaaacatgcaaatcaccacatatttagaaaaagctatggagtctgagttgtcagctaacgtaattgacctttgtcctgttggagcacttacctctaaaacgtacgtttttgaagctagaccatgggaattaaagaaaacagagtctatagatgtaatggacgctgtgggatcaaatataagagttgatacctatg

SEQ ID NO: 222058 - DNA, 608 bp, Unknown
  Bacterial polypeptide expressing nucleotide sequence isolated from the Sargasso Sea
ttattgtatatcaggcaatgtgaataatccttgtaatgttgaggaagagatgggcgttcctcttaaagatctaatagaaaaacatgcaggtggagtcattggaggttgggacaatcttaaagcagtaatacctggaggatcttcaatgccgttattgccaaaacatatttgtgataccattaagatggactttgatgcatgtgtagaaaataaaacaggattaggaacagcaggaatagttgtaataaataatgatcaagacattataaaatgtatggcaaggatagccagattttacaaacatgaaagttgtggtcaatgtactccatgcagagaaggatctggatggatgtggagaatgttagaaagaatggcaaaaggagaggcgtcaagagaagaagttgatatgttgatggatgttacaaaacaaattgaaggacatactatttgtgcgtttggtgaaggatctgcttggccagttcaaggtttgcttagacattttaaaaaagaaattgaaaaaagaaataattttaacccattaattaatactggtcaaaaaaacccatatttagtagatcaacatttgttagaaaaagaaaatgcctaaa

SEQ ID NO: 222059 - DNA, 1393 bp, Unknown
  Bacterial polypeptide expressing nucleotide sequence isolated from the Sargasso Sea
atgacggatcaaataaagataaatgttaatggttctgaaataagttcaaaacccgaccagctaataattgaagcttgtgaagactctggtattcacataccaaggttctgctggcataaacgtatggatcctgttggcatgtgtcgtatgtgcttggttgagattgaaactccaagaggtaaagctcttgttccatcatgtacaaccaaagtctcagaggatttagtcgtagacactgaatctgatgttgtaaaaaaagctcaagaaggagttttagagtttttattgattaatcatcctttagactgcccagtttgtgataaggctggagaatgtcctttacaagatcaaacaatggcttatggaccaggagaatcaagatttgtcgaagacaaaagacattttgaaaaacctatcccaatttcagaaataattttacttgatagggagagatgtattttatgtgctcgatgtactcgattttctgatgaaatatctggagatccacttattgaatttatacaaagaggaaataagacacaagtaaatacttttcccgatgagccttttagatcatacttctcaggcaatacagtacaaatttgtccagttggcgctttaacatcatcttcctatagattcaaagcccgtccttgggatttaaagaaagtttcatcaacctctaattgttcttcagttggtgactcagttgaattaaatgtctcacagaacaagatgcttaggattttaggtgaggacaatgaatttacaaatcaaggatggctttctgacaaagggcgatacaactttgaatatttacattcggacaagagaatcgagacaccattactcgttaaaaattcaaacaaggaattaaccattaatgaatccatggagttaattagtaatgaaatacttacaagtaacaatccgaacattagttttattgttggacacaactctactaatgaagagtattttgcattaaataaatttgcagaaaatcttaataaaattgaaaacgataacacagttagcaatataaatttttatctgagtgatgactatttatacaatggttttttcaatgatgattatttacttggagaaattaaagacttagattcggcagacaccataattttgtgggcacaagatattaaagacaatcttccaactctttatctaaggattaaacaggccgtcagaaatggaaaaaaattattaatatttggccacacaaatactgcaatcaaacaactttcggaagaatattatggtgaaaatattgtcacaaataattttgaattcaatgtcgaaatatcagatataccaaatttatcgaagtatattgatggaaaagatgttttagctattgtaggaaaagcctcgc

SEQ ID NO: 222060 - DNA, 1231 bp, Unknown
  Bacterial polypeptide expressing nucleotide sequence isolated from the Sargasso Sea
actgtactccagcatgtgaaccaagctggagctgaaataccaagattttgttatcatgaaaaactttccatagctggaaactgccgtatgtgtttggttgaaatggaaaaatcacctaaacctatagcttcatgcgcaatgcctgcaactgaaggaatggttatcaaaacaaatacagaaaaagttgaaaaagcaagaaaaggtgtaatggagtttttactggctaaccacccactagattgtcctgtttgcgatcaaggaggggagtgtgatttacaagatcaatctatgttttatggaattgataaatcaagatttaaagagaacaaaagatatgtgcctgaaaaatacatgggtcctttaataaaaacgcaaatgaccagatgtattcattgcacaagatgtattagatttgctactgaagtagcaggagtaccagagttaggtgcgattggacgtggagaaaatatggaaattactacatatttagagaaatccatggagtctgaaatgtcagctaatgtaattgatttatgtccagttggtgcattaacttctaaaccttatgtgttcgaggcaagaccttgggagcttaaaaagactgaaacaattgatgttatggatgctgttgggtccaatattagagtagatacttacgattgggaagtaaaaagggttttaccaagaattaatgatgaaattaatgaagagtggatttcagataaaacaagatatgcatgtgatggtttaaaaaatcaaagattagacaaaccatttataaaaaacaatggaaactttgaagaaataagttggcaagatgcatacaaaaaaattaaagaaaaaatttcaataacatcgccagacaaaatagttggtttaactggtgacatgacaaacatggaaactatgtttgctgttaaaaacttatttcaaaaaacattgaattcaagttatttggactctagagctaaagatacttacataaattttgaaaacagaagtaattatttgtttaactctggcatagaagggattgaagaaagtgatctcatattactaatgggcacaaacccaagatttgaggcaactatattaaactcaagaataagaaaaacttatttaaaaaataaaactgaaatattttctttagaggatgtcggtgatttaacttatccttataaagttttagaaaataattcaaaagtaattgataaaataatcaaaaatgaac

SEQ ID NO: 222061 - DNA, 661 bp, Unknown
  Bacterial polypeptide expressing nucleotide sequence isolated from the Sargasso Sea
tttgagaaaaggaggaaagtggtttgcttcattaggtaagccaaaaaacactggtacaaaaatattttgtatatcaggaaacgtaaataaaccatgtaatgttgaagaagagatgggagtacctcttaaggaattaatagaaaaacatgcaggcggtgtaattggaggatgggataatttaaaagcagtaatacctggtggatcatcaatgccgttgttacctaaagatatatgtgaaacagttacaatggattttgattctttaataaacaataaaagtggattgggtacagcaggagttgtagttataaacaaagaccaagatattattaaatgtatggcccgtattgccagattctacaaacatgaaagttgtggacaatgtacaccttgtagagaaggatctggatggatgtggagaatgttggaaaggatggcaaaaggcgaagcatcaaaagaggaagtagaaatgttaatggatgtgacaaagcaaatagaagggcatacaatttgcgcatttggtgagggatcatcttggcccgtacagggtttaattaggcattttaagaaagaaattatggagcgaaataattttaaacctataattaataaagatagaaaaattccatatttagtagatcaacacttattagataaataa

SEQ ID NO: 222062 - DNA, 1472 bp, Unknown
  Bacterial polypeptide expressing nucleotide sequence isolated from the Sargasso Sea
aatgaaaataaaaataaataataaggaatgtagttttaataaaggtgaaactataattcaaattgcagatagaaatggcatccatattccaaggttttgttaccatgataaattatcaattgctgcaaactgtagaatgtgtttagttgaacaggttggaattaacaaacctcaaccagcatgttcaactccagctatggaggatcaagaatattttactaaatctgaattagcctctaattctcaaaaaaatacaatggaatttttgctgataaatcaccctcttgattgtcctgtatgtgaccaaggcggaatgtgtgaactacaagatcaagctttaatgcatggaagagttaaatcaaggtatgagcaagagaaaagaattgtaatggactataaaataggaccgttgataactaccaatatgacaagatgtattcactgcacaagatgtgtaagattcggagaggaaatagcaggtatcaaagaatttggcgcttttggaagaggtgaaggtatggagattagaacatacttaaaatcagcaattgattccccaatgtcaggcaatatgatagatatttgcccagtaggagctttgaatgcagcaccttcacatatgaaaggaagaacttgggaattagaagaggttaaacatatatcttctcatgattgcgttggctccaatatggatttacatgttttagataatagtatttttcgagtagttcctcatgagaataaaaaaattaatgaagtttggatttcggatagagacagattttcttacgaagctatggagcatactgatagagtaaaaaaaccaatcgctaaaataaatggtcgtcatgttgaggttgaatgggagcaggcgtttgagattatttatgaaaaaataaataaagtgaaatttaataaatctgcaggatttgtaagcgcaaattcaacagtagaagaacaatatctatttcagaaatggcttagagaaattaatataaataatatagaccatagagtttctcaaaataaatttgaatatgaggatgaattgatttttccaaagatagatataaatattgaggaaattgaaaatatagaatctgtattacttattgatagtaatattacatatgaacaaccaatactatctcataaaataagaaaagcgtatttaaaaaatgcaaaaatcaattctatacattcatacagttataattataattttgatattaataactcatttttagtaaatccaaatcaactagctgaaactcttattgatatagttgagtatttaacaattattactataaatgataaatctttgaaaaaatttactattcctgatggtataaagaaaaaatttaagggactttccaacaaaaaaattattgaaattagtaatgatattttaactaagaattctctaataatccttggctctaacttaaagaatcatcctgattatgctt

SEQ ID NO: 222063 - DNA, 842 bp, Unknown
  Bacterial polypeptide expressing nucleotide sequence isolated from the Sargasso Sea
aatgcctaaattaaaagtaaacgacattgaagttgaggtagaagacggtttaacagttctacaggcgtgtgaaaaagctggagcagaaattcctaggttttgttatcacgaaaaattatcaatagcaggtaactgtcgaatgtgtttagttgaaatggaaaaatctcctaaaccaattgcttcttgtgcaatgccagctgcagagggaatgaatattaaaaccaacactccttttgttgaaaaggctagaaaaggagttatggaatttctattagctaaccatcctttagattgcccagtttgtgatcaaggtggtgagtgtgaccttcaagaccaatctatgttttatggagtggataaatcaagatttaaagaaaacaaaagagctgtaccagaaaaacatatgggaccattaattaagacacaaatgacaagatgtatacattgtacgcgatgtgtaagatttgcgacagaagttgctggagtgtctgagttaggagcaattggtagaggagaggatatgcaaattacaacttatttggagcagtcaatgcaatcagagttgtcagcaaatgtaatagatctttgtccagttggtgctttaacctcaaaaccttatgtttttgaggcaagaccttgggaacttaaaaaaactgagactgttgatgtgatggatgctgttggatcaaatgtaagagtagatacatatgattgggaagttaaaagagttttgccgataattaatgaggatattaatgaagagtggatttcagataagacaagatatgcttgcgatggtttattaaatcacagactagatacaccttttattaaatataatg

SEQ ID NO: 222064 - DNA, 940 bp, Unknown
  Bacterial polypeptide expressing nucleotide sequence isolated from the Sargasso Sea
aatgcatatatacattaatgacacaaaattagatgtaaatgagaatgagactatcattcaggtagcagatcgtaatgatattcatattccgagattttgctatcacaaaaggttaagtatagtagcaagttgtagaatgtgtcttgttgacattgaaaatgtgaaatatcctcagccagcatgttccacgattgttaaggaaggaatgagaataaatactaataacagaaccgcggaagcagctcaaaaaaacacaatggagtttctattaattaatcacccacttgactgtcctgtatgtgatcaagccggagagtgtgagcttcaagatgtttctcttgagcatggtgattacaaatctacatacaaagaattaaagcgaacagtcattgataaaaatattggcgaactagtccatacagaaatgactaggtgcatacattgcagcagatgtgttagatttggcgaagaagttgctggtataaaagaactgggaatgaccgggaggggtgaagaaacaaaaattgagacttttataaatgaaggtctatcatctcaactttctggtaatgttattgacctatgtcctgttggcgcgctaaataatagtttatataaatatagtgctcgcacatgggatttgaaacaaatgtcttcaatttcctcgaacgactgtcttggctctaatattttttatcatacatataaggatgatataaagcgctgtgtcccaaaagaagatgaagaaataaatttatcttggttgtctgataatgatcgatttggttacgaggggatcaaatctgaagatagaatattacatcctttgattaggcgtaatgaaaatctagagaaaactgactttaattctttaacagaaaaattcagtgaatacttagagaaatactcatctggatcatgtgctataatgtcagcgcaa

SEQ ID NO: 222065 - DNA, 997 bp, Unknown
  Bacterial polypeptide expressing nucleotide sequence isolated from the Sargasso Sea
aatgcctaagataacaataaatggaaaagaaattgaatttgagagaggaatgacagtccttcaagcatgcgagttagcggacgtagaaattccaagattttgttatcacgaaaaactttcaatagcaggaaattgtagaatgtgtttagttgaaatggagaaatcacctaaaccaatcgcatcatgcgcaatgccagccgcagagggaatgaatataaaaacaaatactactttagtcgaaaaagctagaaaaggtgtaatggaatttttattagctaatcatccgctagattgtcctgtgtgcgaccaaggtggcgagtgtgatttacaggaccaatctctctattacggagtagataaatcaagatttgtcgaaaacaaaagagatgtaaaagaaaaatatatgggaccattgattaagacccaaatgacgagatgcattcattgtacaaggtgtgtgagatttgcaacggaagttgccggagttccagaaataggagctattggaagaggtgaaaatatggaaataactacttacttagaaaaatccatggagtcagagttgtctgctaatgttatcgatttgtgccctgttggagcacttacatctaaaccttatgcttttgaagcaagaccatgggagctaaaaaaaacagaaagtgtagatgtgatggatgcagtaggttcaaacataagagttgatacttacaattgggaagtaaaaagaattttacctagattaaataatgaaattaatgaggaatggatatctgacaaaacaaggtactcttgcgatggtttattaaagcaaagactcgatgttccttatattaaaaaaaataataaattacaaaaatcttcctgggacgaagctataaaccttttaattgataaaataaattcagttcaaccaaatgagatagctggccatattggtgatatgatcaacatggaaaatgctttgagttttaagaagttctttaaatcacttaaaagt

SEQ ID NO: 222066 - DNA, 896 bp, Unknown
  Bacterial polypeptide expressing nucleotide sequence isolated from the Sargasso Sea
ctatgttcgaggagagtattttccttcaatcaaaagtttgaatgaagccatcgatgaactttatgcggcgggtcttttgggtgaaaatgctcttggtaaggggaaacgcctagacctcacagttcataccggcgcaggggcgtacatctgtggtgaagaatctgcactgctcgattcattggagggcaagcgcggtcatcctagggtgaaacctcccttccctgcagtttcaggtttcaatgcatgtccgacaaccgtcaataatgttgagacccttacctgcctgcctttcatcgtcaatgaaggagcagaggccttcaaggacttcggtcctgagaataatgcagggacccatcttgtcagcctcagcggacatgtggaaaaacccggggtttacgaagtaaggatggatgtcactctgaaacagatcatcttcgacctcggcggaggaatccggggtgggaaagccctcaagggagttattccggggggtgcgtcatctccggttttgactgcaaaagagattgatgtcgaatacagttttgatgctcttggaaaagcggggacgatgatgggttcggctgcagtgatggtctttgacgaagacaccgacgttgtcaaactgcttcaccgcatcacccgtttcttcaatcatgagtcctgtgggcaatgtacaccctgccgtgaaggaacccattgggcacgattgattgtccaggattttttgaaaggaaacggaaacgaaagaaaaatgaaacgactccatcgagtcggaggaaacatgatgggaaccaccgtctgcgcattgggtgatgccgcagcaatgccgatcaccagttttgtgacgaagtttcctgaagaatttgaaaaatattacacacaggcggctgcctgaa

SEQ ID NO: 222067 - DNA, 1151 bp, Unknown
  Bacterial polypeptide expressing nucleotide sequence isolated from the Sargasso Sea
aatgcctaaattaaaagtaaacgatattgatattgaagttgaagatggtctgactgtacttcaagcttgcgaacaagctggagctgaaataccaagattttgttaccatgaaaaactttccatagctggaaattgccgtatgtgtttagtcgaaatggaaaagtcaccaaaaccaatagcctcatgcgcaatgcctgcagccgaaggaatggttattaaaacaaatacagaaaaagttgaaaaagcaagaaaaggagtgatggagtttttattggctaaccatcctttggattgtcctgtttgtgatcaaggtggtgagtgtgatttacaggatcaatctatgttttatggaattgataaatcaagatttaaagagaataaaagatatgtacctgaaaaatacatgggtccattaataaaaactcaaatgactagatgtattcattgtactagatgtattagatttgctactgaagtagcaggagtgccagaattaggagcgatcggacgtggagaaaatatggaaattactacatatttagagaaatccatggagtctgaaatgtcagccaatgtaattgatttatgtccagttggtgcattaacttctaaaccttatgtgttcgaggcaagaccttgggaacttaaaaagactgaaacaattgatgttatggatgctgttgggtcaaatattagagtggatacttacgattgggaagtaaaaagggttttaccaagaattaatgaggaaattaacgaggagtggatttctgataaaactagatttgcatgcgatggtctaaaaaatcaaagattagacacaccatttataaaaaataatggaaactttgaagaagttagttggcaagatgcatacaaaaaaattaaagaaaaaatttcaacaacatcaccagacaaaatagttggtttaactggtgacatgacaaacatggaaactatgtttgctgttaaaaacctatttcaaaaaacattaaattctagttatttagattctagagctaaacatacttacataaattttcaaaacagaggtaattatttgtttaactctagcatagaagggattgaagaaagtgatcttatattactaataggtacaaacccaagatttgaggcaactatattaaact

SEQ ID NO: 222068 - DNA, 382 bp, Unknown
  Bacterial polypeptide expressing nucleotide sequence isolated from the Sargasso Sea
aatgactgctgatgaaattgatgtactgtacaattttgatgaactcgcaaatattgatacaatgcttggttcagcagcaatgatggtattcgatgaagatactgatgtagttcagttacttcaccggattactcgattttacgcccatgaatcatgtggccagtgtacgccatgtcgtgaagggactcattggtcgcgaaatattttacgtgatttcctcaacatgaacggcagtgaagaaaaactaaggcgacttgacagggttggaggtaatatgctgggtactacactttgtgctttaggagatgcagccgctctacctattcaaagttttgtaaaaaaatttccggatgacttccgtaaatattatgccaacaaataa

SEQ ID NO: 222069 - DNA, 520 bp, Unknown
  Bacterial polypeptide expressing nucleotide sequence isolated from the Sargasso Sea
cgtggaaaaaccgggggtttacgaagtaaggatggatgtcactctgaaacagatcatctacgacctgggcggaggaatccggggcggcaaagccctcaaaggagttattccgggaggtgcgtcatcgccggttttgaccgcaaaagagattgatgtcgaatacagttttgatgctctcggaaaagcagggacgatgatgggttctgctgcagtaatggtctttgacgaagacaccgacgttgtcaaactgcttcaccgcatcacccgtttcttcaaccatgagtcctgtgggcaatgtactccctgccgtgaaggaacccattgggcacgattgattgtccaggattttctgaaaggaaacggaaacgaaagaaaaatgaaacgactccatcgagtcggaggaaacatgatgggaactaccgtctgcgcattgggtgatgccgcagcaatgccgatcaccagttttgtggcaaagtttcctgaagaatttgaaaaatattacacacaggctgctgcctga

SEQ ID NO: 222070 - DNA, 475 bp, Unknown
  Bacterial polypeptide expressing nucleotide sequence isolated from the Sargasso Sea
tttgccaaaaccaatctctgcagtttttaactgggcaagatcttactcgttatggtattttcaatttgggttagcgtgttgtgcaattgaagttatggcagtaagtggacctagacatgattttatgagattgggtgtcattcctttgccagcatctccaagacaagctgacttaatgatagtagctggaacagttacagataaaatggctccagcagtaaaaaggctctatgaccaaatgcctgaacctaaatatgtaatttctatgggatcatgttcaaatagtggaggtccgtattgggattcctattctgttacaaaaggtgttgatcaattaattccggttgatgtctatgttccaggttgtcctccaagaccggaagctttacaagaaggaataattttactccaacaaaaaattaagggtgaagacataaaggctaaatggaacgaggagcaaattgaaccagtctga

SEQ ID NO: 222071 - DNA, 2029 bp, Unknown
  Bacterial polypeptide expressing nucleotide sequence isolated from the Sargasso Sea
atgcttaaattaaaagtaaatgaaatagaagtagaagttgaagaaggtttaactgtacttcaggcttgcgaagaagctggtgttgaaataccaagattttgttaccatgaaaaattatctatagcaggtaattgcagaatgtgtttagttgaaatggaaaaatctcctaaaccaattgcttcatgtgctatgccagctgctgagggtatgaatattaaaacaaatactgctttagtagaaaaagctcgtaaaggagtgatggaatttttattagctaaccatcccttagactgtccagtatgtgatcaaggtggtgaatgtgatcttcaagatcaatcaatgtactacggagtagacaaatcaagatttaaagaaaacaaaagagcagttcctgaaaaaaatatgggaccattgattaaaactcaaatgaccagatgtattcactgtactagatgtgtgagatttgcaacagaagttgctggagttccagagcttggtgctattggaagaggtgaagatatgcaaattacaacttatctagagcaatcaatgcaatctgaattgtctgctaatgttgtagatttatgtccagtaggagccctaacatcaaaaccttatgtatttgaagctagaccatgggaactaaagaaaactgaaacaattgatgtaatggatgcaataggttcaaatgtaagagtagatacatatgattgggaagtaaaaagagtacttccaattataaatgaagatattaatgaggaatggatctcagacaaaacaagatatgcttgtgatggtcttctacatcaaagattagatactccatttatcaaatacaacggcaagtttgaaaaggcctcatgggatgaagtgtataaaataattaaatctaaatttgaaaacacaccaaaagaaaaaatatgtggttttgttggcgatttaaccaatatggagactagttatatttttaaagaattttttgatcgaacaattgataataaaaattatgagtcaagatctgataacagatttataaatacttcaaaaagagaaaactatttattcaattcttctataaatggcattgaagaagcagatttaattttgatagcaggttcaaacccaagatatgaagcaactattttaaatgctagaattagaaaagcttacttgaaaaacaatacaaaaataatttcacttaatgatgttggtgatttaacttatccttatcaaagtttaaatggtcaaacccaaactttaaataatattcttgaaggaaatcatgacgtatctaaagaaattattaaatcaaaaaaaccgataattattatcggtgaatctctattaagattaaagtcttctgaatttttattcaacaaaacaaaagagtttttatcgaaaaataataaaatttctgatgaatggaactctttaaatattttatcaagcgatgcagcaacagtaggaaatattgatcttggaataattaataatgaaaataatttaataagcgacttaaaagaacataaatttgatattgtttatcttatgggtcaagacaatttagaatttgataaaaaaaatgaattcataatttatcaaggtagccatggtgacaaaggtgctgagtccgctgatataattttaccaggcgctgcttatactgaacaagatggatactttaccaatctagagggaaaaattcaaaaagcctacaaagcatcatatccaccaggcgaagcaaaagaagattggcaaataattaacgaaattgctgaatttatgaataatagaaaattatttaacgataaagatgaattagaaagcagtatgtttaattatttaaatttacaaaaagaaaaacaagtaaatgacattaataattctacttatgagtttcaaaatgaaactttaacaatcaaagtaaaagattattatttttcaaatgttattgctagatcatcaaaaactatggttgaatgtaataactctaaattaaatttaaaatcaacaggtacagaaggttaat

SEQ ID NO: 222072 - DNA, 1510 bp, Unknown
  Bacterial polypeptide expressing nucleotide sequence isolated from the Sargasso Sea
aatgcttaaattaaaagtaaatgacattgatgtagaagttgaagaaggactaacagttcttcaagcttgtgaaaaagcaggagttgagatacctagattttgttatcatgaaaaattatctatagctggaaattgtagaatgtgtttggtggaaatggagaaatcaccgaaaccaattgcttcatgcgcaatgcctgctgctgagggaatgaacattaaaacaaatacgagtttagttgaaaaggctagaaaaggtgtaatggaatttttactagcaaatcaccctttagattgccctgtatgtgaccaaggtggtgagtgtgatcttcaagatcaatcaatgttttatggggtagacaaatcaagatttaaagaaaataaaagagcagttcccgaaaaaaatatgggaccattaatcaaaactcaaatgacaagatgcatacattgtacaagatgtgtgcgatttgctactgaagttgcaggcgttccggaacttggtgctataggtagaggtgaggatatgcaaattacaacatatcttgagcaatcaatgcagtcagaattatctgctaatgtagttgatttatgtcctgttggagctttgacatcaaaaccttatgtttttgaagcaagaccatgggaattaaaaaagactgaaacaattgatgttatggatgcaataggctcaaacattagagtcgatacatacgattgggaagtaaaaagagttcttccaataattaatgaagatattaatgaagaatggatttcagataaaactagatatgcgtgcgatggcttacttcatcaaagattagatactccatatattaaatacaatggtaaatttgagaaagcttcgtggcaagaagtttataaaataataaaatctaaattagaaaacacatctaaagaaaaagtatctggttttgttggagatttaacaaacatggaaactgcatacatttttaaagagttttttgaccgaacagttgaaactgataattatgaatcaagatcagataataggtatatcaatactacaaaaagagaaaattatttgtttaattcttcaattaatggaattgaagatgcagatttaattttattgttaggtgccaatcctagatacgaggccacaattttaaatgcaagaattagaaaatcttatcttaacaataatacaaaaattgtgtcattaaacgattgtggagatctaacttatccttatgaaagtttagatggacaaactaaaacaataaaagaaattatagatgatgcacatatactttcaaaagaaatagaaagtgcaaaaaaaccgatgataataattggtgagtctttattaagattagaaaatgcaaaatatttgtttgataatttaaaagattttttgaataaaaaaaataagttctcagaagattggaatcctttaaatattttatcatgcgatgctgcaactgtagggaattttgatttaggagttttaaataataaaacaaataaatag

SEQ ID NO: 222073 - DNA, 1081 bp, Unknown
  Bacterial polypeptide expressing nucleotide sequence isolated from the Sargasso Sea
aatggcaaaagaaaaaaaaacactaaatttaaattttggaccacaacatcctgcagcacatggagttttaagattaatacttcaattagatggagaagttgttgaaaaagctgatcctcatatagggttattgcaccgtggtactgaaaagttaatagaaaacaaaacctatatccaagcagttccttattttgatcgtttggattatgtagcaccaatgaaccaggaacatgcatttgctttagctatagaaaaaattctaaaaattgaagttcctactagagcaaaatatattagagtaattttctgtgaaataggtcgaatattaagtcacatattgaatgtaactacccaagcaatggatgttggggcgttaacaccaactttatggggatttgaggaacgagaaaaattaatgggattttatgagagggtgtccggatcaaggttgcacgctaattattttagagctggtggagtacataaagatcttccttctggacttgaaagtgatattgatgaattttgtgaaaaatttccaaagattattgatgatttagaaactttacttaccgacaacagaatatttaaacagagaaatgtagatataggaattgtatccaaacaagatgcgctagattattctttttcaggagtaatgttaagaggttctggtgtagcttgggatttaagaagaagtcaaccttatgattgttatgacgatttagaatttaaaattcctgttggaaaaaatggagattgttatgacagatatctttgcagaatcgaagaaatgagagaaagtgtaaaaattattaaacagtgtttaacaaatattccaaaaggaccaattaaaaccgaggatggaaagatttctcctcctccaaaaaaggaacttaaacagtctatggaggctttaattcatcattttaagttatttacagaaggatatagggtagaaaaagatgagatatatacagcagttgaggcaccaaaaggagaatttggtgtttatctgatttcagatggctcaagcaaaccatacaaatgcaaaatcagagctcctggatttacccatctt

SEQ ID NO: 222074 - DNA, 2035 bp, Unknown
  Bacterial polypeptide expressing nucleotide sequence isolated from the Sargasso Sea
catgagtgacgatctaataaatattaaagttaatcaaaaagaaattcaggtagataaaaatctgactgtgatgcaagcctgtgaaatcgctggtgaagaaattccaagattttgctatcacgacaaactctctatagctggtaactgtagaatgtgtttagtagaaatagaaaaagctccaaaattagtatcttcctgcactatgcctctaatggagggcatgtcgataatcaccaattctgaaaaagtaaatgcaggtagaaaaggtgtaatggagtttttattaattaatcaccccttagattgcccaatatgtgatcaaggtggagaatgcgatttacaggatcaggccatgtactacggtttcgacaaatctagatataaagagaataaaagggctgtagataataaaaatatgggacctctggtaaacactataatgactagatgcatccattgcactaggtgtgtaagatttgccactgaagtagccggagtcccagaattaggtatgttaggtaggggcgagaatgcagaaattaccacttaccttgaaaaatcaatcacttcagagctttcaggtaatgtaattgatttatgccctgtaggagcacttacgagtaagccatatcaatttaaagcacgtccttgggagctaaaacgaacagactcaatcgatatcttcgatagtgttggctctaatatcagagttgatagtagagcggaggagattttaagagttacaccaagaacaaatgaatacataaatgaagagtggatatctgataaagttcgatttaactatgatggttactaccaacaaagaatagacacaccctacattaaagaaaaccaaaaattatcaatatcaaattgggaagagtcattaaaagttttaaaagataaattaaaaactctaaaaccattagctttgattggtgagcacgtagatttagaaaccggatatgcaatcaaaaaatttatgtcaaattatggtaaagacaatgtggagtgccgaactgataatcatactatcctagaaagcttagatagttatcgttttaacacacctttgaacgatatagaaaattcagatttaattatacttttaggaacaaacccaaaaatagaaacaccaattataaatcataagatatttaaagcttacaataatgacgcaaaagtatttaacattggtgaaaatatatctttgaactataaaacagagtatctaggagagagtttatcaagtttaaataatgaaaatctaatcaaagcattaaaaaaatctagtaaccctcttatgattattggctctgcttttttaaataaaattaaaaatattaaaactttaaaatctattttttcatatgctgataaatacaaagttattacaaaagaaaaaaataatctaaattttttaaatccatatgcctcacgtgtcggccaattgattataggcaatactactaataacctttgtgagccgttttctaatttaaaaaaagataattttgaattggttctttcttttggttcagaacatattgccaacgagcaattcaataactgttttaaagtttattttggccatcatggtgatgatggagcgatggggtctgatattgttttgccaacccctctttatacagagaaaaatggtacttttgtaaatattgaaggtagacctcaagaggcaaaaaaatgccataatccaattgggtccgccaaagaagagtggtcgatactaaaaaaattatctgatgaattatcttttgattttacaccaaatacatttgatcaattaagatcagatttatttgataaatacccaattctttctgattatcatgaaattattgctgttgaaaattcaatttcaattacaccagatattgaatttgaagattgtaaggcagaatatcctgtaagtaatttttatatgtcagatgtgatttcaaaaaattctgtcactatggccaaatgtgttgaggaaataatctcaaccccatctcttttggagaaatcagcataa

SEQ ID NO: 222075 - DNA, 1234 bp, Unknown
  Bacterial polypeptide expressing nucleotide sequence isolated from the Sargasso Sea
aatgataaaattaaaagtaaacgataaagaaatagatgtagaagagggtttaactgtcttgcaagcatgtgaacaggctggatttgagataccaagattttgttatcacgaaaaattatcaatagctggtaattgtagaatgtgtctggttgaaatggagaaatctccaaaaccaatagcatcttgtgctatgccagcggcagaaggaatgaatattaaaacaaatacacccaaagttgaaaaatctagaaaaggtgttatggaatttttattagcaaaccatccacttgattgtcctgtatgtgatcaaggaggtgagtgtgatttacaagatcaatcaatgttttatggaatcgataaatctaggttcaaagaaaacaaaagacatgttcccgaaaaatatatgggcccgctaataaagacccaaatgaccagatgcattcattgtactagatgtattagatttgcaacagaggttgctggagtgccagagcttggagcaatagggagaggagaagatatgcagattactacatatctagaaaaagcaatggagtctgaattatctgcaaatgtaatagatttgtgcccagtaggagcattaacatcgaaaccttacgtatttgaagcaagaccatgggaactaaaaaaaacagaaactatagatgttatggatgcagttggatctaatattagagtagatacatatggttgggaagttaaaagagttttaccaaaagtaaacgatgatattaacgaggaatggatatctgacaaaacaagatatgcatgtgatggtttaaaaaatcaaagactagatagcccctttataaaaagaaacggtcaatttcaaaaaacctcttgggaagatgcatatagcttaataaaacttaagataaatcaaacaacgccagataaaatttcaggatttacaggtgatcttacaaatatggagacacaatttgcagcaagagagttttttgataaaatcttaaattctaattatttagaatcacgttctgaaaatatttttgtagatacaagtaaaagagaaaattatatatttaattcatccattaacagcattgaagagagtgactttatcttattagttggaacaaatccaagatatgaagctacaattttaaattctagaattagaaagtcttatttaaataatcgagcagaaatttactcattttggagatcaaggcgatttaacatatccttataa

SEQ ID NO: 222076 - DNA, 715 bp, Unknown
  Bacterial polypeptide expressing nucleotide sequence isolated from the Sargasso Sea
tggctgtcctacattataaataatgttgagacaattgcagtagttccaactattctaagaaaaggtggaaattggttttcatctttaggaaaggaaaaaaatactggtacaaaaattttttgtatttcgggaaatgtaaataatccttgtaacgtagaggaggaaatgagcatacctcttaaagaattaatagaagttcatgcaggcggtgtagttggtggttgggaaaatctacaagcagtaatcccaggcggttcatctatgccattaattccaaaagaaaaatgtgagacattgaccatggattttgactcgttagttaaagaaaaaagcggcttaggtactgctggtgtagttgttattaataaagatcaagacatcataaaatgtatggctcgaatagcaagattttataaacatgaaagttgcggacaatgtacaccttgtagagaaggttcgggttggatgtggagaatgttagaaagaatggccaaaggcgaagcttcaaaaaatgaagttgatatgttgatggatgtaacaaaacaaatagagggtcataccatttgtgcttttggcgaaggttcctcttggcctgttcaaggattaatacgacattttaaaaaagaaattgaaaaaagaaataattttgatccattgattaataaggatagaaaaataccttatttagtagatcaacacttattagataaataga

SEQ ID NO: 222077 - DNA, 872 bp, Unknown
  Bacterial polypeptide expressing nucleotide sequence isolated from the Sargasso Sea
aatggttaaggtcaaaataaatggtatagaaaatgatgttcaagagggagtaacaatccttcaggcctgtgaggaagccggccttgaaatacctagattttgttatcatgatcgattgtctatagctggtaattgtcggatgtgccttgtagacgttgaaggtgctccaaaaccggttgcatcctgtgcaatgccaataaatgaaggcatgtctatccatacaaatacccaaacagttaaaaaagctcgagaaggagttatggagtttcttctcataaaccacccacttgactgcccggtttgtgatcagggaggtgaatgtgacttacaagatcagacagttgcatttggacctgaaaactcaagatttaatgaaaataaaagatcagtagatgaaaagcacatgggtcctcttattaaaacatacatgacccgttgtatacattgtacgagatgtattcgatttggcgatgaggttgccggtgttaatcaattgggcgcgcttaataggggcgagaatatggagataacgacttacctcgaacaaacactcgattctgaattatctgcaaacattgtggacctctgtcccgtaggagcgttaacttctaaaccttatcaatttgaagcaagaccatgggagctaaagaaaacagagtccattgatgtgatggatgctgtaggttcaaatataagagttgatacttatgggtggaaagttaaaaggatcctaccagtattaaatgaagacattaatgaagaatggatctctgataagactcgctatgcttgcgatggactattaacacaacgcattgacacacctttaattaaaaataatggaaagtttgtagaaagtgattggaatgagt

SEQ ID NO: 222078 - DNA, 790 bp, Unknown
  Bacterial polypeptide expressing nucleotide sequence isolated from the Sargasso Sea
catgatcaagatgttctttaaagaagactggatcccgaaattctcggatcgcgtcatctttaccctggcaccgatgatcgccttcacctcgctgctgctggctttcgccatcgtgccagtgagtccgaactgggtggttgctgacctgaacatcgggatcctgttcttcctgatgatggcgggcctcgcggtatacgcagtgctgttcgccggctggtccagtaacaacaaatactccctgctcggtgcgatgcgtgcgtctgcgcagaccctaagctacgaagtgttcctcggactttccctgatgggcgtggtggcgcaggccggttcatttaacatgaccgacatcgtcaacaaccaggctgatatctggaacgttattccgcagttctttggttttgtcacctttgccatcgcgggcgtggcggtgtgtcaccgtcacccgtttgaccagccagaagccgagcaggaactggccgacggttaccacattgaatattccggtatgaaattcggtctgttcttcgtgggtgaatacatcggtatcgtcaccatttctgcactgatggttaccctgttcttcggtggctggcatggcccgttcttaccgccattcgtctggttcgcgctgaaaaccgcgttcttcatgatgatgttcattttgattcgtgcgtcgttaccgcgtcctcgttatgaccaggtaatgtccttcggctggaaagtctgtctgccgctgacgctcgtcaacttgctggtaacggcggctgtcattctctggcaggcgcaataa

SEQ ID NO: 222079 - DNA, 2032 bp, Unknown
  Bacterial polypeptide expressing nucleotide sequence isolated from the Sargasso Sea
aatgcttaaattaaaagtaaatgaacttgatattgaggtagaagaaggattaacagtattgcaagcatgtgaacaagctggtgtagagattcctagattttgctatcatgaaaaactttctatagcaggaaactgtagaatgtgccttgttgagatggaaaaatcacccaaaccaatagcatcatgtgcaatgccagctgctgaaggaatggttattaaaacaaatactgaaaaagttgaaaaatctagaaaaggtgtgatggaatttctcttagccaatcatccacttgattgtccagtttgtgatcaaggtggagaatgtgatcttcaagatcaatctatgttttatggaattgataaaagtagatttaaagaaaacaaaagatatgtacctgaaaaatatatgggtccattaattaagactcaaatgacaagatgtattcactgtaccagatgtataagatttgcaactgaagtagcaggtgtacctgaattaggagcaataggaagaggagaagatatgcaaattacaacatatcttgaaaaggcaatggaatcagaaatgtcagctaatgtaattgatttgtgccccgttggagctcttacatcaaaaccttatgtttatgaggcaagaccatgggagcttaaaaaaacagaaacaattgatgttatggatgctgttggatcaaatattagagttgatacttatggctgggaagtaaaaagaatattgccaagaataaatgaggacatcaatgaagagtggatatcagataaaacaagatatgcttgcgatggattaaaaaaccaaagattagacacaccttatcttaaaaataaaaataaatttgaaaaaataacctgggaaaaagcttatgctaaaatttttgaaaaaatttcagtaactccgtctgataaaatagccggaatttctggtgatatgaccaacatggaaacactttatataatcaaagaatttttcgaaaaaacaattaaatcaaaaaatttagactcaagaacagaaaattattatgtaaatttaagtagtagaaataattacatatttaattcaaaaattacaggaatagaagaaagtgatttaattattttaattggaacaaatccaagatatgaagctacaattttaaattcaagaattagaaaagcttataaaaaaaataataccaaaatttattcattaggtaatgttggtgatattacttacccatatattgaattagaaaactctacaaatataattgatgaaattataaacaacaataatacattatctaagataattaatgattctaaaaaacctattattataattggtcaatcggcattaaaattaaattcttcagtatatatatttgaggggttaaaaaaatatttaacaaaaattaataaaataaataaagactggaattctttaaatgttttatcaaataatgcttctacagtaggttcttacgaccttaatattctatcttcaaataatgaaaaaaatatcactttagaaaaaatcaaaaaaaatgactttgatgtagtatttttatttggtcaggaaaatttaaagtttaaaaaaaaaaatgaatttataatatatattggtagtcacggagaccgtggcgctgaaatggctgatataattttaccaggagcgtcttataccgaacaagatggttattttactaatttagaaggaaaaattcaaaaagcatatcaagcttcgtatccacctggagatgctaaagaagattggaaaattattaacgaattgtcagctactttaaaaagaaaaaatttatattccaataaagatgaattaataaaatcaatgatgaattatcttaatttatataaagataaaaaagattttgatattccagaatacaagttcattgaagagaaaattcatgttgatgatatagactattaccattcaaactctatagctagatcttctaaaacaatggctgagtgtaaaaatttattaaaaaatattaaaaaaactggaacatatggataa

SEQ ID NO: 222080 - DNA, 1336 bp, Unknown
  Bacterial polypeptide expressing nucleotide sequence isolated from the Sargasso Sea
aatgcctaaaattattattaatgataaagaaatagaatttgaagacggtatgacagttttgcaagcttgcgaattagccggagcagaaataccaagattttgttatcacgaaagactttcaatagctggtaattgtagaatgtgtttggttgaaatggaaaaatcgccaaaaccaattgcatcttgcgctatgcctgctgcagatggaatgaaaattaaaactaacacaaattttgttgataaggctaggaaaggtgtgatggaatttttattggcaaaccatccactggattgtcctgtatgtgatcagggcggagaatgcgatttgcaagatcaatcccttttttatggttttgacagttccagatattctgaaaataaaagacaggtcagcgaaaaatatatgggtccacttataaaaacccaaatgacaagatgtattcattgcactagatgcataagatttgcaactgaagttgcaggcatacctgaactaggggctataggaagaggggaagatatggaaataacaacatatcttgaaaaatcaatggaatctgaactttcggcaaatgtaattgatttatgtccagttggagctctcacatcaaaaccttatgcttttgaagcaagaccttgggagttaaaaaaaactgaaacaatagatgttatggacgcagttggctcaaatattagggttgatacttatggctgggaagtaaaaagaattttaccaataatcaacgaagatataaatgaagaatggatatcagacaaaacaagatatgcatgtgacggattatcaaaacaaagaattgatgtaccttatataagagaaaatggaaatttaagaaaatcttcatgggtagaagctttaaatttaatcatcgataaaataaaaaaattaaacccaaatgaaatagccggggtagttggtgatcttgctgatttagaaatgatttacagttttaaatcattttttgaaaaatgcattggctctttaaatttagaatgcagacaagacaaaacttatctaaatccaaattctagaatgaactatatttttaattcaaagattaatggaatagaagattctgatttaattttattagtaggaacaaacccgagattggaagcaacaattcttaatgcaagaataagaaaaacatatgtaaaaaataaaataaaaatatattcagttggagatcctggagatcttacttatccttatgaaataattggttcaaatacttctgatattaaagatataatatcagataaaaatctaatctcatcaatgattaaaaaatcaaaaaaaccattaatcattatggag

SEQ ID NO: 222081 - DNA, 724 bp, Unknown
  Bacterial polypeptide expressing nucleotide sequence isolated from the Sargasso Sea
atgcttaaattaaaagttaatgacattgatgttgaagttgaagaaggtttgacagttcttcaagcttgtgaacaggcaggagtagaaattcctagattttgttatcacgaaaaattgtctattgctggaaattgtagaatgtgtctagtagaaatggaaaaatctccaaaacctgtagcttcatgtgcaatgcctgcagctgatggaatggtaataagaacaaatactgaaaaagttgagaaatcaagaaaaggtgttatggaatttttattagcaaatcaccctttagattgtcctgtttgtgatcaaggtggggaatgtgacttgcaagaccagtctatgttctatggaattgataaaagtagatttaaagaaaacaaaaggtacgtgcctgaaaaatatatgggtcctttgataaaaacccagatgacaagatgtatacattgtactagatgtgtaagatttgcaactgaagttgcaggtgttcccgagctaggcgcgataggaagaggtgaagatatgcaaatcaccacttacttagaaaaagctatggagtcagagctatcagctaatgtaattgatttatgtcctgttggagcacttacatcgaaaccttatgtttttgaggcaagaccatgggaattaaaaaaaactgaaaccatagatgttatggatgctgttggctcaaatataagagttgatacttatggctgggaagtaaaaa

SEQ ID NO: 222082 - DNA, 374 bp, Unknown
  Bacterial polypeptide expressing nucleotide sequence isolated from the Sargasso Sea
tattgttgttattaataaagatcaagacataattaaatgtatggcaaggattgcaagattttataaacacgaaagctgtggacaatgcactccatgcagagaaggatctggctggatgtggagaatgttagagagaatggcaaaaggtgaggcaactagagacgaggttgatatgttgatggatgtcacaaaacaaattgagggacatacaatttgtgcatttggtgaaggttcatcatggccagtacaaggtttaataagaaattttaaagatgaaattttagagagaaataaatatgatccattaattcaaagaaaaaaagaagttccatatttagtagatcaacatcttttggaaaaagaaaatgcttaaa

SEQ ID NO: 222083 - DNA, 400 bp, Unknown
  Bacterial polypeptide expressing nucleotide sequence isolated from the Sargasso Sea
aatgggagtagaaattaatgaagataattttggcgatcaactaaattctaagggatttttagtttcaaattttgataaactcttaacctgggcaagaactggctctttgtggccaatgacatttggcttagcttgttgtggagttgaaatgatccatacatatatggcgagatatgatcttgatagatacggtgtaattccaagaggaagtcctcgtcaatctgatgtaatgattgttgcaggaactctaactaacaagatggcgccagcactaagaaaagtttatgatcaaatgcctgaacctagatgggtcatatctatggttcttgcgcaaatggtggtggatattatcattactcgtattctgttgtacggggttgcgatagaattgtgccagtag

SEQ ID NO: 222084 - DNA, 244 bp, Unknown
  Bacterial polypeptide expressing nucleotide sequence isolated from the Sargasso Sea
aatggcacctgctttaagaaaagtttacgaccaaatgccagaaccaagatacgtcatctcaatgggaagttgtgcaaatggtggtgggtattatcattattcttattctgtagtgagaggttgcgatagaatagttccagttgacgtttatgtgcccggatgtcctccatcagcagaggcattgctttatggaatattgcaacttcaaaaaaaaattagaaacaagggttctataacaagatag

SEQ ID NO: 222085 - DNA, 1497 bp, Unknown
  Bacterial polypeptide expressing nucleotide sequence isolated from the Sargasso Sea
aatgcttaaattaaaagtaaatgatattgatgtagaagtagaagaaggtctaactgtattacaagcttgtgaacaggcgggtgtagagattcctagattttgttatcatgaaaaactttcaattgctggtaattgcagaatgtgtcttgttgaaatggaaaaatcgcctaaaccaatagcttcatgcgcaatgcctgctgctgaaggaatggttataaaaactaatacagaaaaagttgaaaaatccagaaaaggtgtgatggagtttcttcttgctaaccatccacttgattgtccagtttgtgatcagggaggcgaatgtgatcttcaagatcaatctatgttttatggaatcgataaaagtagatttaaagaaaataaaagatatgtgcctgaaaaatatatgggcccattgatcaagactcaaatgacaagatgtattcattgtacacgatgtataagatttgctactgaagttgcaggcgttcctgaattgggcgcgatcggaagaggtgaagatatgcaaattacaacttatctagaaaaatcaatggagtcagaaatgtcagcaaatgttattgatttatgtccagtaggagctcttacttcaaaaccttatgtatttgaggcaagaccgtgggaactaaaaaagacagaaaccattgatgttatggatgcagtaggatcaaatataagagttgatacttacggttgggaagtcaaaagagttttaccaagaataaacgaggaaattaatgaagaatggatatcagataaaactagatatgcttgtgatggtttaaaacaccaaagattagacactccatacataaaatctaaaaacaaatttgagaaaatatcttggaatgaggcatattctaaaatttttgataaaatttctataacagcatctgacaaaatagcaggaattactggtgatatgaccaatatggaaactctttacataataaaagatttttttgataagacaattaaatcaaacaatttagattctaggaatgaaaattattatgtaaattcaagtagtagaaataattatatatttaactcaaaaatatcaggcatagaagatgcagatttaatttttttaattggaacaaatcctagatatgaagccactattttaaattcaagaattagaaaaacatacatgaataaaaatattaacatttattcattgggtccggttggagatataacttatccatatataacattagaaaactcgaccaaaacaattaaagatattattaacaacaatcacgaattatctaaaattattgatactacaaaaaaaccaatgtttataattggtcaatcagtattaaaacaaagttcttctatatatttactagaagaattaaaaaaatatttaacaaaaaataataaaattaacgatgattggaattcattaaatattctatcaaacaatgcttctacagtaggttcttacgatctaaatatattaagttcaaa

SEQ ID NO: 222086 - DNA, 634 bp, Unknown
  Bacterial polypeptide expressing nucleotide sequence isolated from the Sargasso Sea
atgattaaattaaaagtgaatgatgtagatattgaggttgaagaaggactaactgtacttcaagcatgcgaaaaagcaggagtagaaattcctaggttttgttaccacgaaaaactttctatagctggtaattgtagaatgtgtttagtagaaattgaaaaatcgcctaaaccagtagcttcatgcgcaatgccaatatcggaaggaattaatatcaaaactaatactgaaaaagttgagaaagcaagaaaaggagtaatggagtttttattggcaaatcacccgctagattgtcctgtttgcgaccaaggtggtgaatgtgatttgcaagatcaatcaatgttttatggaatagataaatctagatacaaagaaaataaaagagaagttccagataaatatatgggtcctttagtcaaaacccaaatgaccagatgtattcactgcacaagatgtattagatttgctacagaggtagcaggagttccagaacttggtgcgattggacgaggtgaagatatgcaaattacaacatacttagaaaaatcaatggagtcagaactttcagcaaatgttattgatttatgtcctgtaggagcattgacatcaaaaccttatgtctttgaagcaaggc

SEQ ID NO: 222087 - DNA, 1099 bp, Unknown
  Bacterial polypeptide expressing nucleotide sequence isolated from the Sargasso Sea
atgcttaaattaaaagtaaatgagattgatgttgaagtagaagaggggttaacagtacttcaagcatgtgaaaaagcaggggtagaaattccaagattttgttatcatgaaaaattatctatcgcagggaattgtagaatgtgcttggttgagatggagaaatctcctaaacctattgcatcatgcgctatgccagcagcagagggaatgaatataaaaacaaatacagaatttgttgaaaaagcgcgaaaaggtgtcatggaatttttgttagctaaccaccctttagattgtccagtatgtgatcaaggtggtgaatgtgacctgcaagatcaatctatgtattatggtgttgataaatcaagatttaaagaaaacaaaagactggttcctgaaaaaaatatgggaccattgattaaaacccagatgactagatgcatacattgcacaagatgtgtgagatttgcaactgaagttgcaggtgtaccagagctaggagctattggtagaggcgaggatatgcaaattactacatatctagagcaatctatgcaatcagaactatcagctaatgtagtagatctttgtccagtaggagctttaacctctaaaccttatgtatttgaggcaagaccttgggaactaaaaaaaacagagacaattgatgtaatggatgcagttggatctaatataagagttgatacttatgattgggaagtaaaaagagttttaccaattattaatgaagatataaacgaagaatggatttccgataaaactagatatgcatgtgatggacttctgtatcaacgattagatactccatatattaaatataataaaaaatttgagaaagcttcttgggcagaagtatataaaataataaaatccaaatttgaaaacacaacaaaggataaaatttgtggatttgttggagatttaaccaacatggaaactagctatatatttaaagaattttttgacagaacacttaataataatttttacgagtctagggtggataatagatttataaatacttccaaaagagaaaattatatttttaatacatctaataacggaattgaagaagctgatt

SEQ ID NO: 222088 - DNA, 1204 bp, Unknown
  Bacterial polypeptide expressing nucleotide sequence isolated from the Sargasso Sea
aatgcctaaattaaaagtaaatgacattgaggtagaagtagaagacggtctaacagtcttacaagcgtgtgaaaaagctggagcagaaattcctagattttgttatcacgaaaaattatctatcgcaggtaattgtagaatgtgtttagttgaaatggaaaaatctcctaaaccaattgcttcctgtgcaatgcctgcagcagaaggaatgaatattaaaactaatactgcttttgttgaaaaagctagaaaaggagttatggaatttcttctagctaaccatcctttagattgtccagtgtgtgatcaaggaggtgagtgtgatcttcaggatcaatctatgttttatggtgtagacaaatcaagatttaaagaaaataaaagatctgttccagaaaaatatatgggaccacttataaaaactcaaatgacgagatgtatacattgcacacgatgtgtgagatttgccactgaagttgctggagtatctgaattaggtgcaatcgggagaggtgaggatatgcaaattacgacatatttggaacaatcaatgcaatccgaactgtcagcaaacgtaatcgatctttgtcctgttggtgctttaacttcaaaaccttacgtattcgaggcaagaccttgggaacttaaaaaaacagagactgtagatgtaatggatgctgttgggtcaaatgtcagagtggatacctacgattgggaagtcaaaagagttttacctttaatcaatgaggacattaatgaggaatggatttcagacaagacaagatatgcatgtgatggtttattaaatcaaagattagatacaccttttatcaaatacaatggcaaatttgaaaaagcttcatgggatgaagtttttaaaattattaaatcaaaatttgaaaactcatcaaaagaaaagatttgtggatttgttggagatttaactaatatggaaacaggttatatttttaaagagttttttgatcgaactttaagtaatcataactacgactctagatctgataacagatatgtagatgtcaaagagagggaaaattatatattcaactcctctataaatggaattgaagatgcagatttgatatttttaattggagcaaatccaagatatgaagcaacaattttaaacgcacgaataaggaaagcttttgtaaataataataccaaaaataatctcacttaa

SEQ ID NO: 222089 - DNA, 121 bp, Unknown
  Bacterial polypeptide expressing nucleotide sequence isolated from the Sargasso Sea
tatggcaagaatagccagattttacaaacatgaaagttgtggtcaatgcactccatgtagagaaggttctggttggatgtggagaatgttagaaagaatggcaaaaaggagacgctactaa

SEQ ID NO: 222090 - DNA, 1315 bp, Unknown
  Bacterial polypeptide expressing nucleotide sequence isolated from the Sargasso Sea
atgactacaggcagtgctctgtacatcccgccttacaaggcagacgaccaggatgtggttgtcgaactcaataaccgttttggccctgacgccttcaccgcccaggccacacgcaccggtatgccggtgctgtgggtggcgcgtgccaggctcgtcgaagtcctgaccttcctgcgcaacctgcccaagccgtacgtcatgctctatgacctgcatggcgtggacgagcgtctgcgcaccaagcgccagggcctgccgagcggcgccgatttcaccgtgttctaccacctgatgtcgctggaacgtaacagcgacgtgatgatcaaggtcgcgctgagcgagagcgacctgagcatcccgaccgtcaccggtatctggccgaacgccagctggtacgagcgtgaagtctgggacatgttcggtatcgacttcccgggccacccgcacctgacgcgcatcatgatgccgccgacctgggaaggtcacccgctgcgcaaggacttccctgcccgcgccaccgaattcgacccgttcagcctcaacctggccaagcagcagctagaagaagaggcggcgcgcttccgccccgaagactggggcatgaagcgttccggcaccaacgaggactacatgttcctcaacctgggcccgaaccacccttcggctcacggtgccttccgtatcatcctgcaactggacggcgaagagatcgtcgactgcgtcccggacatcggttaccaccaccgtggcgccgagaagatggccgagcgccagtcctggcacagcttcatcccgtacaccgaccgtatcgactacctcggcggcgtgatgaacaacctgccgtacgtgctctcggtcgagaagctggccggcatcaaggtgccggaccgcgtcgacaccatccgcatcatgatggccgagttcttccgcatcaccagccacctgctgttcctgggtacctatatccaggacgtcggcgccatgaccccggtgttcttcaccttcaccgaccgtcagcgcgcctacaaggtcatcgaagccatcaccggtttccgcctgcacccggcctggtaccgcatcggcggcgtggcccacgacctgccgaacggctgggaacgcctggtcaaggaattcatcgactggatgcccaagcgcctggacgagtaccagaaagccgccctcgacaacagcatcctcaaaggccgcaccatcggcgtcgcgcagtacaacaccaaagaggccctggaatggggcgtcaccggtgctggcctgcgttccaccggttgcgacttcgacctgcgtaaagcgcgcccgt

SEQ ID NO: 222091 - DNA, 1384 bp, Unknown
  Bacterial polypeptide expressing nucleotide sequence isolated from the Sargasso Sea
atgcttaaattgaaagttaatgaaatcgaagttgaagttgaagaaggcttaactgttcttcaggcttgcgaaaaagctggcgttgaaattccaagattttgttatcatgaaaaattatccatagcaggtaattgcagaatgtgtttagttgaaatggaaaaatctcctaaaccagttgcttcgtgtgctatgcctgctgctgagggtatgaatattaaaacaaatactgcccttgttgaaaaagcccgtaagggagtaatggaatttttattagctaaccatcctttagattgtccagtgtgtgatcaaggtggcgaatgtgatctccaagatcaatcaatgtactatggagtagacaaatcaagatttaaagaaaacaaaagagcagttcctgaaaaaaatatgggaccattgattaaaactcaaatgaccagatgtattcattgtacgagatgtgtaagatttgcaacagaagtagcaggagttccagaactaggcgctataggaagaggggaagatatgcaaattactacttatttagaacaatcaatgcaatctgaattgtctgctaacgttgtagatttatgtccagtaggagcccttacatcaaaaccttatgtttttgaagctagaccatgggaactaaagaaaacagaaacaattgatgtaatggatgcaattgggtctaatgtaagagtagacacatacgattgggaagtcaaaagagtacttccaattataaatgaagatattaatgaggagtggatatcagataaaacgagatatgcatgtgatggacttctacatcaaagattagacaccccatttataaaatacaatggtaagtttgagaaagcctcatgggatgaagtttacaaaataattaaatctaaatttgaaaacacatcaaaagaaaaaatatgtggttttgttggtgatttaacaaatatggagactggttatatttttaaagaattttttgatcgaacagttgatgttaaaaattatgactcaagatctgataacagatttataaatacttcaaaaagagaaaattatttatttaattcttacttaaacggaattgaggaagcagatttaattttgttagtaggtacaaacccaaggtacgaagcaactattttaaatgctagaattagaaaagcttatttaaacaataatacaaaaataatttcacttaatgatgttggtgatttaacttatccttatcaaagtttagatggtcaaactcaaactctaaataatattcttgaaggaactcatgaaatttccaaagaaattattaattcaaaaaagccaatgatcattattggtgagtctctacttagattgaagttttcagaatttttatttaataaaacaa

SEQ ID NO: 222092 - DNA, 463 bp, Unknown
  Bacterial polypeptide expressing nucleotide sequence isolated from the Sargasso Sea
atgcccctaattccaaaagagaaatgtgaaacattaactatggattttgactcacttattgctgagaaaagtggtttaggaactgcaggcatagtggtcattaataaagatcaggacataattaaatgtatggcaagaatagcaagattttataaacatgaaagttgtggacaatgtacaccatgtagagaaggttctggttggatgtggagaatgcttgagagaatggcaaaaggagatgcaaccaaggatgaggtagacatgctaggagatgttacaaatcaaatagcaggacatactatttgtgcttttggggaaggttcatcctggccagttcaaggattacttagacattttaaaaaagaaattgaaaaaagaaataatttggatcctattgttcaaaagaaaaacaatattccatatttagttgatcaacatttactagaaaaaaaaaatgcttaaa

SEQ ID NO: 222093 - DNA, 1753 bp, Unknown
  Bacterial polypeptide expressing nucleotide sequence isolated from the Sargasso Sea
atgagtgataataaaaaaatcattgttaccatcgatggaattgaacatgaggctcggccgggccaaatgttaatcgaactgaccgatcaaacaggcacatatgtgcctcgattttgttatcacgaaaaactatccattgctgctaattgcagaatgtgtcttgtagaagtagaaaactcaaacaatgctcttccagcgtgtgcaacgccagtaagtgatgggatggttgtaaagacaaaatcaaaatctgcaaagacagctcaagaatctaccatggaattcttactgattaatcatccgctcgattgccctatatgtgaccaaggaggtgagtgtgagctgcaagatttggcatacacatatggaaaaaaccaatcccgatttgatatacaaaaacaaacgaaaaagaatgacgatcttgggccactggtatcaacggatatgacccgttgcatcatgtgcacaaggtgtgttcggtttggtacagaaattgcaggcattcaggagcttggaacaattggtagaggcgaggattccaatatcagcacatacgtttctcaaacagtggaccatgaactctcaggcaatatcatcgatttgtgccctgttggggccctgaataacaaaccctatcgatacactgacagaacatgggaattggaccaagttgaaagcatttcacctcatgactgcattggaacaaacatcatggtgcataagaaagatgacatcattcgcagaatcgtcccaaaaaataatccagaaataaatgaagcatggatagcggacagagatcgttttggattcgatggcatttattctgaagacagagtatccaatgctttgatcaagtctgataaagactttgatgaatcaaaattgtctaatgcaattgatcaagttgttgaacacattcgatcctgcaaaaacgagaatcgttcaattgctgtcttattttccccaagttcatccacagaagaacaataccttctgtcagatttatgtcatcaactaggaatcacagcaatagattcaaggctacgacagggtgaatttataaatgatttggatagacgctttactccacatatgaatatcacattgtcagaagttgataccatgaaaaatactctagttattggctcggatctgagaaaagaaacacccatactggctcatcgtgtaaagaaatcagctgacagtggagcactgattcattctatcaatgctcattcatctgaatatcattttaaaattgatcaggatctttcaaccgataattgggtgaataatattggattagtactcaaggccgcaatcaacctgacaaaaaatcatttgccaaacaatattgccgatcaccttgacctccttgatgaaccgacagcagagcatgaaaaagttgcggcatcaatgtgtcaggataactcactcatcatattgggtttgaatgcttactcaaatcacaaatatcaactcataagatcatacgttcatatattggcatctgtttgcaagactaatctctgcgaactatccgaaggctccaatacaataggcgcatcgattcatcacacaatcaatgacggagctgaaaatatccaaaatacctctgaaattcttcagtcaaagcatgatctattgattatgtatggctttgagccaaatgacacaatttataagaatgaattgattgagtgcatgaaatctgcaaatagtctggttgttttttcgccctacatgaatgagcatt

SEQ ID NO: 222094 - DNA, 1022 bp, Unknown
  Bacterial polypeptide expressing nucleotide sequence isolated from the Sargasso Sea
aagcgaaccagggacttgccacgacagagacattcttaaatacaacccacatgcgttggtcgaaggaatggcaatcgctggctatgcaattggagcaacagttggatacaactacgtcagaggtgaattcatgcttgaatgttaccctcgcattgatgccgctgttaaggatgcatacgatgcaggtttattgggtgtcaatgttttggattcgggtatagattttgacttatataatttcctcggtgccggtgcatatatatgcggtgaagagacaggactgctcgagtcactggagggcaaacaaggaaaacctcgattcaaaccaccatttccagcaaattacggcttgtatggtaaacccacaactgtcaataacactcaaacccttgctaccatcccaaaaatactcgaaaaaggtgcaaaatggtacgcggactttggcactgaaaaatcacctggaacattgatcttttccatatctggccacgtgaataagcccggtaattatgaactacctctagggatttctttcgaagaagtcattgatgtggctggaggcgttctcgatggaaaaaaattaaaagccgtaataccaggcggatcgtccacaaaagtactgcccgctgaaatcatacaaaactgcaccatggattatgagtcccttcaagatgcagactctgctttgggaaccggggcaatggtcgtaatttccgaagggacatgcatggtcgaacttctgaaaagaatatctcgcttttattacgcagaaagttgcgggcaatgcactccatgcagagaaggaactggatggctttatcgaattcttgaacgaatcacaaacggtcaaggcaaagagagtgacttagctttgctcgtggatgtggccggtcgtatagaaggaaatactatttgcgcatttggagatgcatcagcttggcctgttcagagctttattaaacattatcatcatgaatttgagtacatgattcagaacaaaggaaagaccttggcagcataat

SEQ ID NO: 222095 - DNA, 1888 bp, Unknown
  Bacterial polypeptide expressing nucleotide sequence isolated from the Sargasso Sea
tatgccaaaaattacagttaataataaagagattgagtttgaaaatgggatgaccgttttgcaggcatgtgaacttgctggcgctgaaattccaaggttttgctaccacgagcgtttatcaatagcgggaaattgtagaatgtgtttagttgaaatggaaaaatcttcaaaaccaattgcctcttgcgcaatgccagctacagagggaatgaaaattaaaactaacactgagaaagtcgaaaaggctagaaaaggagttatggaatttttattagccaatcatcctttagattgtcctgtgtgtgaccagggtggagaatgtgatttacaagatcagtcactttattatgggttcgataaatcaagatttaaagaaaataaaagaaaagttaaagacaagtatatgggtccattaattaaaacaataatgacaaggtgtattcactgcactagatgcgtaagatttgcaacagaggttgcgggagttacagagataggagcgattggaagaggagagaacatggaaattacaactttcctagaaaaatctatggagtctgaactctcagctaacgttattgatctatgtccagttggtgcactaacttcaaaaccttatgcatttgaagctagaccgtgggagttaaaaaagacagaaactatagatgtaatggatgcagtaggttcaaatataagagtcgatacctatggatgggaagtgaagcgggttttgccgagattaaatgaagaaataaacgaggaatggatttcagacaaaacaagatatgcatgtgatggcttactaaaacaaaggatagataaaccttttaaaagagaaaacggtaaattaatcgaatgttcttgggatgaagccttaaatatagttggttcaaaaataaaagagacagataaaaatcaaataggttttcatgctggcgacatgttaagtatggaaacaattaattctttaaaagagtttgcaaaaaaactaagtattccaaactacgagtttagagagaaacctttttatttaaattctgataataagatgaattatatttttaattcatcaatcaaaggaattgaagagtctgactgcatagtgcttataggcacaaacccgagacatgaggcaacaatgttgaatgctagaattcgaaaagcattcgtagcaaagaaaatacctataatttcttttggcgatccaggcgatcttacttatgattatactaatgcaggaaattcaaccgaggatataaaaaaactattaaacaaagaaaacgaaaccagtaaaatacttcttaattcaaaaaaaccaatcataattattggggaatctgcgctagaacttgagtcagcaaagtttattttacaaggtatcaaaaaatttttgaaagaaaataattttataaatgataactggaacgcatttaatgttcttctacaaaatgcctcttcagtgggtgcgattgatctaggtttttttgaaaaagataatagttttaacttttttaacaaacttaaaaataacgagtttgaactattgtactttgtgggttcagataatctagattttgtaaaatcaaatgaatttattatttatcaaggaagtcatggcgacagaatggctcaaatcgcggatgtgatattgccgagtccggcttacaccgaacagaatggtttattcataaatttagaaggaagacttcaaaaatctaataaatcaacatatccacccggctcatccaaagaggactggaagatattcaatttaattttaaacaatcttgaagaagatgaaaaattcaaaaattttgtagaacttagaactgatactatttcaaaaattaaaaatcaaacagattttgatcttttaccaaaaaaaact

SEQ ID NO: 222096 - DNA, 899 bp, Unknown
  Bacterial polypeptide expressing nucleotide sequence isolated from the Sargasso Sea
aatggcaaaagaaataaaaaaacttaatttaaattttggacctcaacatccagctgcacatggagttttaagattaattttacaattagatggtgaagtagttgaaaaggcagatccacatataggattacttcatagaggtactgaaaaactaattgaaaataaaacttatatacaagccgtaccatattttgatagactcgattatgtagctcctatgaaccaagagcatgcatttgcattagcaatagagaaaattttaaaaattgatgtgccaattagggctcaatatctaagagttatattttgtgaaataggtagaatacttagccatattttaaatgttacaactcaagcaatggatgttggtgctttgacgccaacgttatggggttttgaagaaagagaaatattgatgggtttttatgaaaaagtttcaggatctcgacttcatgcaaattattttagagcaggtggggttcatcaggatttaccaaaaggtttagaaaatgaaattgcagaattttgtcttaaatttccaaatattatcgatgatctagaaacattattaaccgacaatagaatatttaaacagagaaatgttgatattggtgttgtaactaaacaagatgcgcttgattactctttttctggagtgatgctaagaggatcaggtgttccttgggatcttagaaaatctcaaccttacgattgttatgatcaattacaatttaaagtcccaattggtaataatggtgattgttatgatagatatttatgcagaattgaagaaatgagagagagtgtaaaaattattaatcaatgtctggcaaatttaccgagtggcccaataaaaacaaatgatgggaaaatttctcctcctccaaaaaaagaaatta

SEQ ID NO: 222097 - DNA, 1687 bp, Unknown
  Bacterial polypeptide expressing nucleotide sequence isolated from the Sargasso Sea
atgagtgatcaaattaacataaatgttaatggttcagaaatcagaacagattctgatcagctaatcattgaagcttgtgaagattctggcattcatattccaagattttgctggcacaaacgcatggatccagttggcatgtgccgcatgtgcttagttgaaattgaaaccccacgtggaaaagctctagtcccctcatgcactactaaagtttcagaagatttagttgtagatactgaatcagaagtagtaaaaaaagctcaagaaggtgttttagaatttttattaataaaccatcctttggattgtcctgtatgcgataaggctggggagtgtcctttacaagaccaaactatggcttatggacctggtgagtctcgatttgttgaagataaaagacattttgaaaaacctataccaatttcagaaataattctccttgatagagaaagatgtattttgtgtgcacgttgtaccagattttctgatgaaatatctggtgatccgttgattgaatttattcaaagaggtaacaaaactcaagtcaacacatttccagatgaaccctttagatcatacttttctggcaacacggtgcaaatctgccctgttggagcattgacttctacctcatatagatttaaagcaagaccatgggatcttaaaaaagtctcatctacctctaattgttcttcaatgggatgctcagttgaattaaatgtatcccaaaacaaaatgctacgaattttaggtgaagataatgaattcacaaatcagggttggttatcagataaaggcaggtataactttgaatatttacattcagaaaaaagaattttaaaacctgtacttaataacgattcaacaaatgaaataagcataaatgaatcaatgaaattaatcagtaatgaaatatctgttgatgataattcaaatatcagctttatagttggtcacaacagtactaacgaggaatattatgcactaaataattttgtagaaaatttaaataaagttaacaaagatcaaaacatgaatgtctatttaagtgatgattacttatatgaaggattttttcagaacactgatttattggggaaagttcaagacttagattcagtagatacaataattttatgggcacaagatataaaagataacctaccctctctttatttaagaataagacaggcagtcaaaaatggaaaaaaattagtaatattcggtcatacaaatacagctatgaaggaactagcagattcatattttggtcaagaaataatttcaaaaaacttagaattcaacgtagaaatatctaaaataccaaatttcaatcaattaataaatgataaaaatgtattagcaataattggaaagtcgtcgccaattcaaaacacaaatccaatttcaaatttaattaattatttagataaaaactcaaatctaaaaatacttaattgtttttcaaagggtaatacatttggtgctttacagaatatagatttagtgaagggtttaaatgagtttattaatgaatttgatagcagcaaaaacaatattgtatttacgattggatctaatccggtcaacagctcaatttacagtaaccaaataaaagataaattaataaatgcaaattttgtggtttccttagatttgtttaaaaatgaaacaacagaactagcca

SEQ ID NO: 222098 - DNA, 600 bp, Unknown
  Bacterial polypeptide expressing nucleotide sequence isolated from the Sargasso Sea
gagtagagagttcaacaggaacaagaatctttagtctttcaggacacgttagaaccccaggaaattttgaaatagaaatgggaaaaagttttggagagtttgttgatacttttggtaatggaattaaagatgacaaaaaagtaaaagcatatattcctggaggtgcttcagcgccatggtttaccggagatcaactcgatataaaaatgacaatagacgatgttgctaatgctggatctatgctgggttcaggcgcagttgttgtaatggacgaagatactaatttagtctacgcagcgaaaagcatagtaagtttttttgctcatgaatcttgtggtcaatgtactccttgtagagagggaactacatggttagaaatgatactggagcgaatagcaagcggaagaggaaggctgtcagacataagtttgttggtagatgtttgtgataatatttcaccaggtttgtcatggccacctaaaatgacaacaatttgtcctttaggtccatctgctgtatctccgataacatctttgttagataatttttcagatgaattaatgaagatgttgccaacaaaaattcctattgctcaatgag

SEQ ID NO: 222099 - DNA, 2032 bp, Unknown
  Bacterial polypeptide expressing nucleotide sequence isolated from the Sargasso Sea
atgctgaaattaaaagttaacgatattgacattgaagttgaagaaggtttgacggttctacaagcttgtgagcaagctggagccgaaattccaagattttgctatcatgaaaaactttctatagcaggaaattgtaggatgtgtttagttgaaatggaaaaatcacctaaacctattgcctcatgcgctatgccagcagcaaatggaatggtaataaaaactaatacagaaaaagtcgaaaaatctagaaaaggtgttatggagtttttattagccaatcatcctttggattgtcccgtatgtgatcaaggcggagaatgcgatctacaagatcaatcaatgttttatggaattgataaatcaaggtttaaagaaaataaaagatacgttcctgaaaaatatatggggcctctcataaagactcaaatgacgagatgcattcattgtacgagatgtataaggtttgctacagaaattgctggagttcctgaactaggagccattggtagaggagaaaatatggaaattacaacatatttagaaaaatcaatggagtcagaaatgtcagcaaatgtaatcgatttatgtccagttggagcattaacttcaaaaccatatattttcgaagctagaccttgggagttaaaaaaaactgaaacaatcgatgtgatggatgcggtaggctcaaatataagagttgatacatatggatgggaagtaaaaagaatattaccaagaattaatgaagaaataaatgaagaatggatttcagataaaacacgttatgcttgtgacggtcttaaaaatcaaagattagataagccttttattaaaaaaaataataagtttcaaaaaatttcttggaatgaagctcataaaattatttttgataaaatttcttctacgtcatctgaaaaaatagctggagttatcggtgatatgacaaatatggaaactgcgtttattgcaaaagaattttttgaaaaaactcttaaatctaaaaatttagattcaaggtcagaagatttttatgtaaattttagtgatagatctaattatatttttaattcaaaaattcaaggaatagaagagagtgatttaatagtccttataggatcaaatccaagatatgaagctacaatattaaacacgagaataagaaaaaattatgtaaataaaaagacggaaattttttctttgggtgatatcggcgatcttacttatccatacaatattgttgaaaataaaactaatattattaaagaaatagtaaacaacaaacatgaactatcaaacaaaattataaaatctaataaaccactaataattgttggtcaatcagttttaaaaattaaatcaggcaaatacatatttgaagaattaaaaaaatttttacttaataataataaaattaataatgattggaattctttaaatattttatctaataatgcatctactgttggatcttatgatttaggcatattctcatcagaaaatggaaaaaacgtgacactcgataaaattaaaaataacaatcttgaaattatatttttatttggtcaagacaatttaaaatttaataaaaaaaaagaatttattatttatattggaagccatggtgatagaggagcagaaatggcagatataatattacctgggtctgcttatacagagcaagatgggtattttacaaacttagagggagttcttcaaaaatcatataaagcttcatatccacctggcgaagcaaaagaggactggatgattataaatgatttgtctgcaaatataaaaagaaacaaattatattctaataaagaagagttgcttagctcaatgttaaattatttaaagattaataaaaaaaatgatttattcaaagtagatgattttgagttttttgatgaaaaaattaaagttgaagatatagattattaccactcaaattctatagcaagagcctcaaaaaccatgaatgagtgcaagaatataaaattaaattttaaaaaaactgggacagaaggataat

SEQ ID NO: 222100 - DNA, 493 bp, Unknown
  Bacterial polypeptide expressing nucleotide sequence isolated from the Sargasso Sea
ttgggagtatttgaaaataaattccaggataatgtagttgttgcgtccttagataagttgttaggatgggcaagatcaacgtctccttggttctttcaatttggattagcatgctgtgcaattgaaatgatggctactgcagctagtagacatgacttaatgcgtataggaatgcttcctagatcatcaccaagacaagctgatgtaatgattgtcgctggaacagtcactttaaaaatggctttgagagtaaaaaaactttatgaacagatggcaaatcccaagtatgttatttccatggggagttgcgctactagcggaggaccttattggcaacatggttatcatgtcttaaaaggagttgatttggtagtacctgttgatgtatatgtaccaggatgcccgccaagaccagaagcattaattgaaggtttattaaagctgcaggaaaagatccaaagcgatagacctttaactcggaaaattgcatgac

SEQ ID NO: 222101 - DNA, 1068 bp, Unknown
  Bacterial polypeptide expressing nucleotide sequence isolated from the Sargasso Sea
tatggttgaaattgaactggacggtcagaaagtggaagtcgccgaaggctgcatggtgatgcatgcggctgaaaaggcgggcacttacattccgcatttctgctaccacaagaagctttcgatcgccgccaattgccgcatgtgcctggtggacgtggaaaaagcgccgaaacccatgcctgcctgcgccacaccggtcacgcagggcatgatcgtgcgcaccaagagcgacaaggccatcaaggctcagcagtcggtcatggagtttctgctgatcaaccaccccctggactgccctatctgcgaccagggtggcgagtgccagctgcaggatttggcggtgggctacggcggttcttcctcgcgttacgaggaagaaaagcgtgtggtgttccacaaggacgtgggcccgctgatctccatggaagagatgagccgctgcatccactgcacccgctgcgtgcgcttcggccaggaagtggcgggcgtgatggagctcggcatgatccatcgtggcgaacattctgagatcaccacggtcaccggcgacacggtggactcggagttgtcgggcaacatgatcgacatctgccccgtcggagcactgaccagcaaacctttccgctacagcgcccgcacctgggagctgtcgcgccgccgctcggtgagtccacatgactccactggtgccaacctgattgtccaagtcaagaaccacaaggtcatgcgcgtggtcccgtttgaaaacgaggccgtcaacgaatgctggattgccgaccgtgatcgtttctcctacgaagcgctcaacggtgacgaccgcctgacccagcccatgctcaagcagggcggtgtgtggaaggaagtggactggcagactgcgttggaatacgtagccaacggtctcaagaacatcaagaacgatcacggcgccgccagcattggtgcgctggtgagccctcacagcacggtggaagagctgtatctggccagcgccctggtgcgtggccttggcagcgacaacatcgactatcgcctgcgcaatgccgagttcgctgcgcctgaaggtat

SEQ ID NO: 222102 - DNA, 2512 bp, Unknown
  Bacterial polypeptide expressing nucleotide sequence isolated from the Sargasso Sea
aatggcaaaagtaaaaataaatgggtccgagattgaagtatctgatggcatgacgatactgcaggcatgtgaagaggcaggaattgaaataccaagattttgctaccatgatcgtctttcaattgcaggtaattgcagaatgtgtcttgttgatgtggaaggttcacctaaaccagtagcttcgtgcgcgatgccaatcaacgaaggcatgtcaattcatacaaatactcagtctgtaaaaaaagcgagagaaggtgtaatggagtttttgctaattaatcacccactagattgcccagtttgtgatcaaggcggtgagtgcgatctacaagatcaaactattgcttttggtcctgaaaattcaaggttcgaagagaataaaagggcagttgaagaaaagcatatgggcccattgattaaaacttatatgactcgatgtattcactgcacaaggtgtatccgatttgcagatgaagtagcgggagtaaatcaattaggcgcagtaaatcgcggagaaaatatggaaataacaacttatttagaaaagacattagactccgagctatcggctaatatcgttgatttatgtccagtaggtgcacttacatcgaaaccatatcaatttgaagccagaccttgggaattaaagaagacagagaccattgatgttatggatgcggtagggtcgaatattagagttgatacttacgggtggaaagtgaaaagagtactacctgtgcttaatgaagatattaatgaagagtggatatcagataaaacaaggtatgcatgcgatggacttttaaatcaacgtctagacacgccctacataaaaaagaataacaaattagagcaagtttcatgggaagaaactttttctcaattaaaaaaacttgttatggactcagatcctgacgaaattgcgtttttagtaggtgattttattgatttagaaacaagctacttaataaaaaaattatcggaagatctaagcatcaaggcagttgatggaagacaggaaggatgtaaagttccattcaaccatagatctcagttcttatttaattctaaaattaaaggtattgatgaaacagattgcattttaatgattggaacgaacacgcgtgaagaagctgcaattattaattcaagaataaggaaaagagttatttcatcaaatattccagttgcactgattggaaaaaatgtggatcttacatataaatacaatcacttgggtgatgatataaatatccttatagatcttttaaatgaaaaaaactcattttataaaaagttaacaaatgcctcaaagccaatgattattattggccagtccgtgttaaaccgtgatgactcattgcagatttactcactgcttgaaacatttacagataaattcaatctcattcaggaagattggaatggatttaatgtattacagcttgccgctgcaagagcaggtattcttgagatgggtcttatacaaaaaaataaatcagtcgatgatttggttgccgatgcagaaaaaggtaaattcaaattagtgttttcatttggtgcagatgaaatcagttatgaaaatttttctaattgtaaaatagtttatatgggcacacatggagatagaggcgcaaacgccgctgattttatattgccagcagcagcatatactgaaaaagatgcaatttttataaacactgaagggagagttcaatacgcaaataaagcaagttttcctccaggtgaagctagggaagattggaaaattattaatcaattcagtgaagtccttgaactaaagtggtcgtttttagaattgtatgatgtaagagatgagatgtttgccaagtttccccatcttaaagaagactttaatgatcaaaataatggactcgttaaaattattgataataaagctaatgaagaagtagaaatcattaataaggatacaagatcaagccaagaaaaaaagaatgatacaattaatggtaacatcaagagctttgaggaaaattcggcaaaaaaaatatttaatacagcttgggctgatctaaatgatcgccagagagagtatctgagaaaatataattatcctgagacatggtcagagtttacagagcattatggctttaaagttgttaatgatattaagaagaagaataacgtcgtgttgccctatgaggatcaatacgcaaatagtataggaaaagcttggaatgatcttacttataatcaaaagaaatgggcttatactaaaagaaataaaaataatttaattggattagcagatgacgcaaatttttcacctgatggaattgtcgttttaaacgacaatcaagaggcatactatgctcaaccaaaggaaattaactttaaaattaaaaacttaagtttcagtattgaagacttttatataaacgactcaattacaagacattctagtacgatggccgaatgcagccgagctagaagtgaagtaaggtcaacgttaacggagaaggcctcataa

SEQ ID NO: 222103 - DNA, 353 bp, Unknown
  Bacterial polypeptide expressing nucleotide sequence isolated from the Sargasso Sea
gatgcctaaagaaaaaaaaacattaaatttaaattttggtccacaacatccagctgctcacggtgttttaaggttaatacttcaattagatggtgaagttgttgaaaaagctgatcctcatattggactcctacatcgtggtacagaaaaattaatagaaaacaaaacttatattcaagcaattccatattttgaccgccttgattatgttgcaccaatgaatcaagaacatgcatttgctttggcaattgaaaaaattcttaaaattgaagttcccagtcgagctaaatatataagagtaattttctgcgaaataggaagaatattaagtcacatactaaatataactactc

SEQ ID NO: 222104 - DNA, 1213 bp, Unknown
  Bacterial polypeptide expressing nucleotide sequence isolated from the Sargasso Sea
aatgcctaaaattattattaatggtaaagaaatagaatttgaaaaaggtatgaccgtattgcaagtttgcgagctagcagatgtagagataccaagattttgttatcatgaaaaattatcaatcgcaggaaattgtagaatgtgtttggttgaaatggaaaaatcacctaagcctatagcttcatgtgcaatgccagctacagaaggaatgaatataaaaacaaatactaagttagtagaaaaagcgcgaaaaggagtcatggagtttttacttgctaaccatccattagattgtccagtttgtgatcaggggggagaatgtgatttacaagatcaatctctatattacggagtagacaaatcaaggttcgttgaaaacaaaaggcaagtaaaagaaaaatatatgggtccacttataaaaacacaaatgacgagatgcattcactgtactagatgtgtgagatttgccacggaagtagccggcgttcctgaaataggagcaataggaagaggtgaaaacatggaaataactacttatttagaaaaatcaatggagtcagaactttcagctaacgttatagacttatgcccagtaggagctttaacttctaaaccttatgcatttgaagctagaccttgggagcttaaaaaaactgaaagcatcgatgtattggatgcagtcggatctaatataagagttgatacatataactgggaggtaaaaagaattttaccaaggcttaacaatcaaatcaatgaagaatggatttcggataaaacaagatattcctgtgatggtcttttaaaacagagattagatgttccttatttaaaaattaataataaattgcaaaaatcaagctgggatgaagttataaacgtaatcgcaaaaaagattaatgaaactaacccagaagagattgctggccatgttggagatatgattagtttagaaaatgcttttgcttttaaaaaattgtttaaccatttaaatattaaaaatttagaatttagagaaaagaaattttatataaatcctgaagaaaaaatgaattatatttttaattcttctatacaaggaatagaagactccgatttaatacttttaattggaacaaatcccagacttgaagctaccatgttaaatgcaagaataagaaaaacatatgttaataaaaaaattccaattttttcaattggaaaaccctggtga

SEQ ID NO: 222105 - DNA, 1783 bp, Unknown
  Bacterial polypeptide expressing nucleotide sequence isolated from the Sargasso Sea
tatgagcgaaaatataaaaataaatgttaacggaaatcaaattgaatcagcacctaacaaattattaatcgaggcttgtgaagactcaggtattcatataccaagattttgctggcataaaagattagaccctgttggaatgtgcaggatgtgtctagtagaaatagaaactccaagaggaaaaatgttagttccttcatgtacaactgaagtaaccgatgaaatggttgtagatactgagtctgaagtagttaaaaaagctcaagaaggagttttagaattcttgttaattaatcatccacttgattgtcctatatgtgataaagctggtgagtgtcctttacaagatcagactatggcttatgggcctggtgaaagcagatttgtggaagaaaaaagacactttgagaaaccaatttctatttctgaaataattcttttagatagagaaagatgtattctatgtgctcgatgtactaggttttccgatgaaatttctggagatccattaattgaatttattcaaagaggcaataaaacagaagttaatacttttcccaatgaaccttttaaatcttacttttctggcaacacagtacaaatctgtcccgtaggagcattaacgtcaacttcgtacaggtttaaagcaagaccctgggatctaaaatcagttagatcaacatgtaatggctgtccagttggttgttcaacagaattaaactcatctcaaaacaaaatgcttagaattttaggagttgataacgatagtgtaaatcaaggttggctttgtgacaaaggtaggtacaattttgaatacttgaattcagaatttaggttaaaaactccattaaaaaaaatagacaatgaatttaaagaaatatctgttaaagaaatctacacagaattaagtgaattaattagcgatagaaatacaaatataaattttttaataggcactaatagtaccaatgaagattatgttgcttttaatgagtttgctaaaaactttcctacaacaaatcaaaccttctatttaaatgatgactatctatatgctggatattttgaaaaagatatcaacagagcaacaatcgatgatttaaataactctgaagcaattgtaatttggtctgaagatttaaaagaaaatctcccagtgctttatttacgagtgaggcaagctgtaaaaaatggtgcgaaacttatagtttttggccattcaaactcaaccttaaaagacatagctgatttttattattccgaagatactgtctctaaaaattttgaaataataaaagatatatccaaattaaaaggtatcaaagagcacgttaaagataagaatgtgacagcgataataggaaaatctaccccttatcaacttgatgagaatttagataaattagtatcgtatttagtcgaaaattctaactcaaaaataatgaatgcattttctagcggtaatacttttggtgcaattaataatttagataatgtaaaaaatctgagagattttacaaaaaatgtaagttctgaaaatactgatttactatttgttgttggatctgacccaataggcagatctgttttctcaaatgaaattcatagaattattgaagatatagataatgtcgtatgtttagatttatttttacatgaaacgtctgaattaggcaattacattattcctacaagctcaacattaggagagaaagagggaacctttactaatatcgaatttagaacttcaagaattgataagcttgtaccttcacctggccaa

SEQ ID NO: 222106 - DNA, 1177 bp, Unknown
  Bacterial polypeptide expressing nucleotide sequence isolated from the Sargasso Sea
atggtaaaaaaaactaaatcattaagccttaactttggtcctcaacacccagcggctcatggcgttttaagactaatactccaattagatggagaggtagtagaaaaagcagatccgcacattgggttacttcatagaggaacagaaaaattaattgagcaaaaaacttacacacaagctttaccttattttgatagactggattatgtagctcctatgaaccaagagcatgcttttgctttagctgcagaaaaactactcaatgttgaagtgcctattagagctaaatatatcagagttattttttgcgaaattggaagaatactaagtcatattttaaatgttatgactcaagccttagatgttggagccttaactccctcactatggggtttcgaagaaagagaaactttaatgacattttacgaaagagcatctgggtctagattacatgctaattattttagaacgggcggtgttcacaaagatattcctttaaaacttatagaagacattgaaaaattctgtcaatcttttccgaaaataattgatgatctagagagtctgcttacagataatcgaatttttaaacaacgtaatgttgaaataggaattgtttctaaacaggaagctctagatcatagtttttctggtgtaatgttaaggggctctggagtgcattgggacttaagaaagtcacaaccttacgaaatttataaagatttagattttaaaattccaattggaaaaaatggcgattgttacgatagatatctttgtagaatagaagagatgagagaaagtgttaagataattttacaatgtattaataaattacccaaaggccctgttaaatctattgataataaaatttctccacctaacagagatgaaattaaagaatcaatggaagctttaattcatcattttaaattatttacagagggatatagagttccgaaagggaatgtttatacagctgtagaggctccaaaaggtgaatttggagtttacttgatatcagatggcagcagtaagccctacagatgtaagataagagctcctggattttcacatcttcaagctatggattatttaattcgtggtcacatgttagcagatgttcctgctgttctaggttctttagacatagtttttggtgaggtagatcgatgag

SEQ ID NO: 222107 - DNA, 648 bp, Unknown
  Bacterial polypeptide expressing nucleotide sequence isolated from the Sargasso Sea
gatgctcaaattaaaaattaataataaagaaatagaaatagaagagggtttgactgttttacaggcttgcgaaaaagcaggagaggaaataccaaggttttgttaccatgaaaaattatctatagctggaaattgtagaatgtgtttagttgagttagaaaaatctgcaaaacctatagcttcatgcgctatgcctgctacagatggcatgaatattaaaactaatactccattagttgaaaaagctagaaaaggggttatggaatttcttttagcaaatcatccattagattgccctgtatgcgatcaaggaggtgaatgtgatttacaagatcagtcattgttctacggaattgataaatcaagatacaaggaaaataaaaggcacgtacctgaaaaatatatgggaccattaataaagactcaaatgacaaggtgtatacattgcacaaggtgcataaggtttgctactgaagttgcaggagtaacagaacttggagcaattggtagaggagaaaatatggagattacaacttatttagaaaaatcaatgcagtccgaactatctgcaaatgtggtagatttatgcccagttggcgcactaacatccaaaccatatgtttttgaagctagaccatgggagttaaa

SEQ ID NO: 222108 - DNA, 343 bp, Unknown
  Bacterial polypeptide expressing nucleotide sequence isolated from the Sargasso Sea
tcaaagtggattaggaactgcagctgttattgtaatgaataaatcaacagatattgttgaggcaatagccagattatcacatttttataagcatgaaagttgtggtcaatgtacaccttgcagagaaggtactggatggatgtacagaatgatggaaaaaatgattcatggaaatgttgaacatcaagatattgataaaattttagatgtgactaagcaaattgaaggtcatactatttgcgccttaggcgatgctgccgcttggcctattcaaggtttgtttagacactttagacctgaaattgaaaaaagaattcaagaaagaaacagaagagtagcttag

SEQ ID NO: 222109 - DNA, 493 bp, Unknown
  Bacterial polypeptide expressing nucleotide sequence isolated from the Sargasso Sea
aatgggtttattagaaaataaatttcaagataatgtagttgttgcatcgctagataaaattttaggatgggcacgttcaacctcaccatggtatttccaatttggattggcttgttgtgcaattgaaatgatggcatctgcagctagtaggcatgatcttgaaagaattggcatgatgccgcgttcatcacctagacaggcagatgtaatgattgtggctggtacagtaactatgaaaatggctctcagagtgaaaaaactatacgaacaaatggccgatcctaaatacgtgatttcaatgggcagttgtgctacgagtggcggtccttattggcagcatggttatcatgttttaaagggagttgatttagttgtccctgttgacgtttatgttccaggatgccctcctagaccggaagctttgattgaaggattattaaagcttcaagaaaaaatacaaaccgaacgccccttaacaaggaaacttgcatga

SEQ ID NO: 222110 - DNA, 2029 bp, Unknown
  Bacterial polypeptide expressing nucleotide sequence isolated from the Sargasso Sea
atgcctaaattaaaagtaaacgatattgatatcgaagttgaagatggtctaacagtactccaagcttgtgaacaagctggagctgaaataccaagattttgttatcatgaaaaactttccatagctgggaattgtcgtatgtgtttggttgaaatggaaaaatcgccaaaacctatagcttcatgtgcaatgcctgcagctgaaggtatggttattaaaactaatacagaaaaagttgaaaaagcaagaaaaggtgtgatggagtttttgctggctaaccatcctttagattgtcctgtttgtgatcaaggtggtgagtgtgatttacaggatcaatcaatgttttatggaattgataaatcacgatttaaagagaataaaaggtatgtacctgaaaaatacatgggtccattaataaaaactcaaatgactagatgtattcattgtactagatgtattagatttgctactgaagtagcgggagtgccagaattaggtgcgatcggacgtggagaaaacatggaaattactacatatttagagaaatcaatggagtctgaaatgtcagctaatgtaattgatttatgtccggttggtgcattaacttctaaaccttatgtgttcgaggcaagaccttgggaactaaaaaagactgaaacaattgatgttatggatgctgttgggtcaaacattagagtggatacttacgattgggaagtaaagagggttttaccaagaattaatgaggaaattaatgaggagtggatttctgataaaacaagatatgcatgtgatggtttaaaaaatcaaagattagacaccccattaataaaaaataatggaaattttgaagaaataagttggcaagatgcatacaaaaaaattaaagaaaaaattttaaaaacatcatcagacaaaatagttggtttaactggtgacatgacaaacatggaaactatgtttgctgttaaaaacctatttcaaaaaacattaaattctagttatttagattctagagctaatcatacttacataaattttgaaaacagaagtaattatttgtttaactctagcatagaagggattgaagaaagtgatcttatattattaataggtacaaacccaagatttgaggcaactatattaaactcaagaataagaaaaacttatttaaaaaataaaactgaaatattttctttagaggatgtgggtgatttaacttatccttataaagttttagaaaataattcaaaagtaattaataaaataattaaaaatgaacacgatctttcaaagaaaattgccagtgcagaaaaacctataattatcttaggtcaatcaatattaaatagtaacaatggtgcatatatatttgaagagttaaaaaggtatttaacaagtattaataaaattgatgataattggaatgcactaaatattttatcaactgatgcatcagctgttggttcttatgatttaggcattttttcttcaaatgatggaagtaataaaacacttaaaaaaattgaggatggtgaagcagaagttatttttttattaggtcaagacaacctcaaaattaaaaaaagtaatgaatttataatttatattggaagtcatggtgataaaggtgcagatatggcagatcttatattgcctggtgctgcatatactgaacaagatggttatttcactaacttagaaggaaaacttcaaaaagcatataaagcgtcatatcccccaggagaagctaaagaagattggcaaataataaatgaattatcttctactatccatggaaattctttatttaataataaagatgaactactaaaatctatgcaaaaccatttaaataataaaaatattaaaaattttgaagttcctgcatataatttgaatgatgaaaaaatattagttgaagatattgattattactattctaatacgattgcccgtgcatccaaaacaatgtcagagtgtagatatgcaagagctaatttaaaaaaaactggaactgagggttaat

SEQ ID NO: 222111 - DNA, 1177 bp, Unknown
  Bacterial polypeptide expressing nucleotide sequence isolated from the Sargasso Sea
atggcaaaagaaaaaaaaacactaaacttaaattttggaccacaacatcctgcagcgcatggagttttaagattaatacttcaattagatggagaagttgttgaaaaagctgatcctcacatagggttgttgcaccgaggtactgagaagttaattgaaaacaaaacatatatccaagcagttccttattttgatcgtttggattatgtagcaccaatgaatcaggaacatgcatttgctttagctatagaaaaaattctaaaaatcgaagttccttctagggggaaatatataagagtaattttctgtgaaataggtcgaatattaagtcacatattgaatgtaactactcaagcaatggatgttggggcgttaacaccaactttatggggatttgaggaacgagaaaaattaatgggattttatgagagggtgtctggatcaaggttgcacgctaattattttagagctggtggagtgcataaagatctgccttcagcacttgatagcgatattggtgaattttgcgaaaaattcccaaaaattattgatgatttagaaactttacttaccgataacagaatatttaaacagagaaatgtagatataggaattgtatccaaacaagatgcgctagattattctttttcaggagtaatgttaagaggatctggtgtggcttgggatttaagaagaagccaaccttatgattgttatgatgatttagaatttaaaattcctgtcggaaaaaatggagattgttacgatagatatctttgcagaattgaagaaatgagagaaagcgtaaaaattattgaacaatgtataaaaaatattccaaaaggaccaattaaaacagaagatggaaaaatttctcctccatcaaaaaaggaacttaaacagtctatggaggctttaatccatcattttaagttatttacagaaggatatagggttgaaaaagatgaaatatatacagcagttgaggcaccaaaaggagagtttggtgtctatctaatttcagatggctcaagcaaaccatataaatgcaaaatcagagctcctggatttacccatcttcaagctatggattatttaataaaaggacatatgcttgctgatgtacctgctgtattgggttcaatggatattgtttttggagaggttgatagatgag

SEQ ID NO: 222112 - DNA, 1074 bp, Unknown
  Bacterial polypeptide expressing nucleotide sequence isolated from the Sargasso Sea
cgagcgtttatctatagctggaaattgtaggatgtgtttagttgaaatggataagtcagccaaaccaattgcctcttgcgctatgccagctgccgaagggatgaagattaaaacaaatacagatatggtcgaaaaggcaagaaagggagtaatggaatttttattagccaatcatccattagattgcccagtttgtgatcagggaggagagtgtgatttacaagatcaatcgctttattatggatttgataaatcaagatttaaggaaaataaaagaaaagttaaggacaaatatatgggacctctcattaaaactataatgacgagatgcattcattgtacgagatgcgtaagatttgcaactgaagtaggtggagttacagaaataggagctattggccgaggggaaaatatggaaataactacctatctagagaagtcaatggaatctgaactttcagccaatgtaatagacctttgtcctgttggagctttaacttctaaaccttacgctttcgaagcaagaccatgggagcttaaaaaaacagaaactattgacgttatggatgctgttggatctaatattcgagttgatacttatggctgggaagtaaaaaggattcttccaagattaaataacaatatcaatgaagaatggatatcagataaaaccagatatgcttgtgacggattactaaaacaaagattagataagccatacaaaagagataacggtaagttaattgaaagcaattgggatgaagttataaatattgtgtgttcaaaaataaaagagacagacactaaacatatcgctggtcacataggagatttgcagagcattgaaactactaatggatttaaaactttattagactcaataaatataaataattacgattttagagaaaaacctttttatataaactataaaaataaaattaattatacatttaattcttctataagaggtatagaagattcagactgtatagttcttattggagcaaatcctagacatgaagcaacaatggtaaatgccagaattaggaaagtttatatttcaaaaaaaat

SEQ ID NO: 222113 - DNA, 1774 bp, Unknown
  Bacterial polypeptide expressing nucleotide sequence isolated from the Sargasso Sea
atgtctgattcagttcctaacgaagtttcggtcaatattaatggggctgaagttcgggcaaaagctggggagatgctcatagcagcagccgaccgagctggcgtgcacattccgagattctgttaccacgagagaatgtcctcggtaggcatgtgtcgcatgtgtctagtcgatgtcgacactggccgagggccgatgctgcagccctcctgcatggtgccggttgccgaaggaatgtcggtcgatacgcaatccgaagacacaaaaagagcgcaagaaggcattcttgagttcttattagtcaatcatccactcgactgccccgtatgcgacaagggtggtgaatgccctctccaagatcaaactatggcctatggaccgggtgaatcgcggttcgttgaagaaaaacggcactacgaaaagcccatcccaatatctgatctagttcacttggatcgagagcgatgcatcttatgtgatcgttgtacaagattcgctgacgagatagcgggtgaccctcttatccatttcaccgaacgtgggaactcgacccaagttctgacttttccggatgaacctttcagctcgtacttttcgggtaacaccgttcaaatatgtcctgtgggtgctctaacggctgcgccatatcgatttaaagcgcgcccttgggatttagatcaagttgagtcgacgtgcactacttgttcaatgggttgtcgtacggccgtccagtcatcaagaaatgaattagtgcgctatctcggtgttgatatcgagtccgtaaaccatggttggctgtgcgacaaaggtcgctttaatttcgaggctacgaatagcgaagaacgacttactgtacctctaatccgcgatcccaacgatgagcgtcaattgctcggaagtgactggggctcagctttagcaaatgctactgaagcaattttagacgctggttccgatggtataggaatcatcggaggctccaggcttaccaacgaggatgcatacgcatggtcgaaactagcgcgttcgataattagaacggacaacctagatgcccaactaggcgatggtcttccagctgaacttgtgcatagccttccgcctgcaacgatcgcggatgcatgtgaagctgacactgtacttgtggtgggccccgaccttaaagaagagcttgcaattttgcatcttcggcttcgtggagctgcgaccaaaggtcacactaaagtagttgaaattaatgcagcgcccagtggttgcgagccttatgtagaacgcgcgattagatgcggttctggcgaagcggcaaaatatctgggtgagatcttaaatagtgacgatgaccttgctactcggcttcgcgaaggatcagtagtagcagttgtagggcgctcttccatggctgagtccgagcactcttcaatagcggttgccgctcttattcgagatgaattaccccacgccacctttcttaccgctttgcgtcgaggcaatgttcgaggagcacttgacatgggcctggcacctggcgtcctcccaggacgaacagcgatagataatccttctagcgcactcgacgacatctggggatacacgccctcgatgaagggcctggacacaactggaatgctcccagcggcagctgaaggcaagattcgcacgttggttctcttgggcgccgacccgctctccgacttcccggaccgtaatcttgctgctgaagcgatacaacgcgcagaaacagtcatatccctcgataatttttaccggcctcatc

SEQ ID NO: 222114 - DNA, 2056 bp, Unknown
  Bacterial polypeptide expressing nucleotide sequence isolated from the Sargasso Sea
atggttaatattaaaattgatgacaaagattatgaagttgaagatggattagccattattcaagcctgtgagattgctggagttgaagttccaaggttttgctatcatgaaaaattatctattgctggtaattgtagaatgtgtcttgtcgatgtcgaagactcaagagggttaagtcctaagccagtagcttcatgtgctatgcaagtatctgaaggtttaaaaatttatactaaatctgagagagtgaaaaacgctcaagagggcgccttagaatttctattaatgaatcatcctttagattgtccaatttgtgatcaaggtggcgagtgtgatttgcaagatcaatctatggcttttggatacggttctagtagatttgatggtgataaaagagctgttgaatctaaagatatgggcccgtttattaaaacagagatgacgagatgtatacattgtacaagatgtgttagattttcttcggaaatatctggtaatgatgagataggctctattggtaggggtcatgatatggaaattacaacatatcttaatcaagctgtagagtctgagctttctggaaatgttattgatttgtgtcctgtaggcgctttaacttctaagccttatgcgttctctgctaggccatgggagttaaataaaactgaaactatagatatcatggatgctatggggtcaaatattagaattgactcgaagggtttaagggttatgcgagtccttccaagactaaatgaagatataaatgaagaatggataactgataagactagatttttttgggatggcttaaataatcaaagaattgataagccttataaaagagttgacggtattttaaaaccaacatcctggaaaagtgcattagaattggctaaggaaaaaatttctaatagtaaatcagaaaaaatttctgcactctcaggagatctagtagatattgaatcaatttatgctctcaaaaaattaatgaaaaacataggaagtgataattttgattgtaggcaagatggttcaagaatttctggaccaccagagagatggctttttaattcaacttttaacggtattgaagattctgatgggtgtctaattattggttccgatataaggaaagaggcgcctcttttaaattcaagattacttagaaaatcgagagatgatgaatataaaattggtgtaattggattcaataatgatctaacttttgattttaattttttaggagaaaatccatcaattgtagaagatattttaattgaaaataataatttttgtaatgatttattatcaatgaaaaaacctttaatgattttagggcagggcgcattaataggtaaggatgcacaaaatttccaaaatatttgtattgagcttgcctataaattcaattttataaataacgattggaatggttttaatgtccttcattctgcagcttcgagagctggagcaatgagtattggtttttttccgtcaggcaaaggtatgataaccgaggaaataatttcgaattataataataataaactagatcttctctatcttcttggtgcagatgaattaaatttagagaagaatgatgattgttttgtaatttatcaaggccatcatggcgatattggtgctcagattgctgatcttgtttttccagcagcagctttttgtgaacaaaatggattatatatgaatacagagggaagggttcaagagtcaattcgttcaacctttcctttaggagaagcaaaagaaaattgggaaataatttatctattagcaaaagaaatgagcattgacattggtttttcaaatcttaacgaattaagaaatcagttaattgaagaattcccaattattaatccttacagagaatttgaaccattgccttccccaaaaaaagatgaatttaataagcttaatggacatcaatttaaaaggataattgacagttattggcaaacaaattcaattgccagagcatcttcaaatttgtctaaaagaaataattatataaaagaagaaaataataggtaat

SEQ ID NO: 222115 - DNA, 817 bp, Unknown
  Bacterial polypeptide expressing nucleotide sequence isolated from the Sargasso Sea
atgcttaagttaaaagttaacgataaagatattgaagttgaagaaggtttaacagtccttcaagcctgtgaacaggctggcgctgaaataccaaggttttgttaccacgaaaaactttcaatagcgggaaattgtagaatgtgtttagttgaattggagaaatcacccaaaccaatagcatcttgtgcaatgccagcagctgaaggaatgaatataaaaacaaatacttctttagtagaaaaatcaagaaaaggagtgatggaattcttattagcaaatcaccctttagattgtccagtatgtgatcaaggtggtgaatgtgatttgcaagatcaatcaatgttttatggaattgataaatcaagatttaaagaaaataaaagattagttccagaaaaatatatggggccattaataaaaacacaaatgacgagatgtattcattgtacaagatgcgttagatttgcaacagaagttgccggtgtaacagagctaggagcaatcggtcgtggtgaaaacatgcaaatcactacttatttagaaaaagctatggagtctgaactttcagcaaacgttatagacctttgtccagtaggagctttaacttctaaaccttatgtttttgaagcaagaccttgggagttaaaaaagacagagtcaattgatgtaatggatgctatcggttccaatataagaatagacacatatggatgggaagttaaaagaatattaccaaaaattaacgatgatattaatgaagaatggatatcagacaaaactagatatgcttgtgatgggttaaaaaacaaagattaga

SEQ ID NO: 222116 - DNA, 590 bp, Unknown
  Bacterial polypeptide expressing nucleotide sequence isolated from the Sargasso Sea
catgcttaaagaagaaaataagatatttaaaaatttatataataaccttggatgggaaatagataaggctatagaacgtgatgattggaaagatacaaaagaaattatttcaaaaggaaaagagtggattattaatgaagtgaagacttcagaactaagaggtagaggaggcgctggtttttcaactggtatgaaatggtcttttgctcctaaaaaaattggttcgagaccacattatttagttattaatgccgatgagtccgaacctggaacatgtaaggatcgcgatatattaagatttgagcctcaaaaattaatagaaggatgtttgattgcaggttatgcaactggagcacatgtttgttatatttatattagaggcgaatattcttttgaaggtcaaagacttcaagatgcaatagatcaagcttacaaaagaaattttttaggaaacaatgcttgtggatcaggctgggattttgatgtccatattcattatggtgctggagcttatatttgtggagaagaaaccgcgcttttagagagtattgagggaaataaaggtcaaccaaggttaaaacctccatttt

SEQ ID NO: 222117 - DNA, 550 bp, Unknown
  Bacterial polypeptide expressing nucleotide sequence isolated from the Sargasso Sea
atgcttagtgacaaagacagaatatttaaaaacttatataatgatttgggttgggacatagattcagcaataaatagaggtgactggtcagaaactaaaaatcttatagttaaaggaaaagaatggattataaaagagattaaagattctgagctacgtggcagaggaggagctggttttccaaccgggttaaaactatcttttgctcctaaagaaccagggtctagaccacactacttagttattaatgccgatgaatctgaacctggaacatgcaaagatagagatatattaagatttgaacctcaaaagctaattgagggatgtttaattgcaagctatgcaattagtgcacacacttgttatatttacattaggggtgaatattttactgaaggacaaagactacaagaagcaataaatcaagcttatcaaaaaaattttttaggtaaaaatgcttgtggatcagggtggaatttagatatttatattcactatggtgccggcgcatatatttgcggcgaagaaactgcgttgttagaaagtttag

SEQ ID NO: 222118 - DNA, 319 bp, Unknown
  Bacterial polypeptide expressing nucleotide sequence isolated from the Sargasso Sea
aatgggagtagaagaaaattttcaatcaattgaacaagttcagcaagatgtaaagaaaaaaggatttttgcttgcaaaatatgatgatttactaacttgggctcgaacaggctcattatggccgatgacatttggtttagcttgttgtggagttgagatgatgcattcttatatgagtagatatgatttagatagatacggcgtgattccaagaggaagtccaagacaatctgatgttatgatagttgctgggacattaacaaataaaatggcacctgcccttagaaaagtatatgatcaaatgccagaaccacgatgg

SEQ ID NO: 222119 - DNA, 2020 bp, Unknown
  Bacterial polypeptide expressing nucleotide sequence isolated from the Sargasso Sea
tatggctgatgagcgaaaagttgtaattgatgaagtcgaattggaagtagatggttcaatgaccctaatacaggcttgtgaagaagctggcatagaaattccacgattctgctatcatgaacgtctttccattgcaggaaattgtcgaatgtgtctggttgagatcgttggaggtcccccgaagccagctgcatcttgcgccatgcaagttcgagatctacgtcctggtccagatgggcagcctccattagtgaagaccaattcaccgatggtaaaaaaagcccgagagggtgtaatggagtttttactaatcaatcaccctcttgattgtcctatatgtgatcaagggggggaatgtgacttacaagatcaggctatggcttatggagtagatttttcgcgttttagggaagcaaagcgagcttcggatgatttagaccttggccctcttgttgaaactcacatgacccgttgcataagctgtactcggtgtgtgcgctttacaactgaggtggcaggggcatctcaaatggggcaaacggggcgtggtgaagatagcgaaatcacaagttatttaggtgaaacactagaaagcaatttgcaaggaaatatcatcgatttatgcccggttggagctctaacttctaagccatattctttcacagctcgtccttgggagcttagtaaaactgaaactatagacgttatggatgcattaggctcgaatattagggttgatacgaaaggtcgagaagttatgcgcattatgccgcgtaaccacgatggaattaacgaagaatggatttcagacaaaactcgatttgtttgggatggattgaggcgtcaaagactggatacaccttatgtacgtgaaaatgggaagctgcgcgtagcgacttgggcagaagctttagagaaggcaaaatcagcaataactgataagaaaatatttggtcttgttggcgatttagtctcagtcgaagccacatttgctctgaaacagctaattgaggccttgggaggttcagttgaatgccgcttggatcaagctcggcttccaagcgataatcgtagtgcttatgttggaacagcatcgattgcagatatagatacagccaaaactatatatataattggctccaatccacggaatgaggccccaacgttaaatgcccgtattagaaaagcgtggttaaatggagcagaagtaaaacttataggagagccctgtgacttatcctacgaatatcaccactgcggcacaggcagaaaatctttaaaagatttaatcaaaagcgaaacctctttagccggggatcaggaaagcgttgtgatattggggcaaggtgctattcgggatgaagacggactgtctgttttatctaaggtgatggaattagcagaaaaaacagggtcaaagtttttaaatttacatacagtagcatctagagtgggagctttggatattggcgctgttgcagatggcgaactaagtgctgagattgcaaatgcagacgtgatttataatttaggcgctgacgaaattgaactccctgaaagtgtttttgtaatttatcaaggaagccatggtgatcgaggcgcacataatgcagatattattttcccagccgcggcgtatacagaagaaaatggaatatttgtaaatactgaaggtcgtgctcaattaagtagcagagcaaattttgcacctggagaagcaaaagaaaactgggcaatttttagagccttatccgaagagctgagcaataatttgccctttgataatctaagacaattgagagcacttttagttggattatatcctaacttagagcaaatagacgaggttccattaaatgaatggaagccattgaaagctggtaagatgcttgagagagattttttaaatgttatcagtgatttttacctaacaaaccccatcgcgcgcgcttcgagtgtgatggcagaattgtccgctggcgcaaaggctagaaataattcaaaagttgccgcggaatga

SEQ ID NO: 222120 - DNA, 1150 bp, Unknown
  Bacterial polypeptide expressing nucleotide sequence isolated from the Sargasso Sea
atgcctaaaatttttataaataataatgaaatagaatttaaagagggcatgacggttctacaagcctgtgaactagcaggtgttgagattccaagattttgttaccacgagagattatcgatcgccggaaattgcagaatgtgtttagttgaaatggaaaaatcagctaaacctattgcttcatgtgccatgcctgcagctgagggaatgaaaattaaaactaataccaaaatggttgagaaagctcgaaaaggagttatggaatttttactcgttaatcatcctttagattgtcctgtttgtgatcaggggggtgagtgtgatttacaagatcaatccttgtactacggttttgatgggtcaagatttaaagaaaacaaaagattagtgaaagataaatatatgggacctttaattaaaactcaaatgaccagatgtattcattgtacaagatgcataagatttgcaactgaggttgctggtgtttccgaacttggtgcgatagggagaggagaagatatggaaataacaacatatcttgaaaaatcaatgacttcagaattgtcaggtaacgtaatagatttatgtcccgtaggcgccttaacatcgaaaccttatgcttttgaagcaagaccctgggaattaaaaaaaaccgaaagcattgacgtgatggatgctgttggatccaatataagaattgatagttatggttgggaagttaagagaattctgccgagacttaataattcaataaatgaagaatggatatcagataaaacaagatatgcttgtgatggattattaaaacaaagattagacaaggtttatcttagaaaggaaaataaactagttgaagtaagttgggatgaggcaattaatttaatttcctcaaaaataaattcaacaaacccagataaaatagcggctcatgtaggtggtttaagtagcattgaaaccataaattcatttaaaaagctcttagaggaaattaatgttaaaaattttgaatttagagaaaaggatttttacgtaaattctgatcaaaaaatgaattatattttcaattcgtcaatacagggaattgaaaaagcagattttatacttttagtgggtgccaaccccagacatgaggcaacaattttaaacgcaa

SEQ ID NO: 222121 - DNA, 458 bp, Unknown
  Bacterial polypeptide expressing nucleotide sequence isolated from the Sargasso Sea
aatggttccgaaagatatttgcgaaacattaaaaatggattttgactctttagtagaggttaaaagcggattaggcactgctggggtagtagtaattaacaaagacgaagacattgttaaatgcatggctagaattgcaagattttacaaacatgaaagttgtggtcagtgtacaccttgtagagagggcgcaggatggatgtggcgtatcctagagagaacaacaaaaggagaagctacacataaagatataaatttattatctgacgttacaaaacaaatcgaaggtcatactatctgtgcttttggcgaaggttctgcatggccagttcagggacttttaagacattttagaaaagaaattgataaaaggtgtttttcagaaccagtggttaaaaagaaaagaaaaataccttatttaattgatcaacataaattagaaagtaaagatgcctaaa

SEQ ID NO: 222122 - DNA, 778 bp, Unknown
  Bacterial polypeptide expressing nucleotide sequence isolated from the Sargasso Sea
ctcgaatcgctcgaaggcaaaaaaggccagccgcgcttcaagccgccgttcccggcgagcttcggcgtctatggcaagccgaccacgatcaacaacaccgagacgtttgcggcggtgccgttcctgctcgcgattggtccgcagaattacctcgagatcggcaagccgaataacggcggcacgaagattttctcggtcgcaggcgacgtcgagcgtccgggcaattatgaagttccgctcggcacgccgttcgcgacgctgatggaactcgccggcggcatgcgcggcggcaagaagatcaaggccgtgattcctggcggctcgtcggcgccggtgatcccgggcgacatcatgatgcagaccgacatggactacgactcgatcgccaaggctggctctatgctgggttctggcgcggtcatcgtgatggacgagacgcgttgcatggtgcgctcactgctgcgtctgtcgtatttctattatgaagagtcgtgcggtcagtgcacgccgtgccgcgaaggtaccggctggctgtatcgcgtcgtgcatcgcatcgaacacgggcaaggccgtccggaagatctggatctgctgaactcggttgctgaaaacatcatgggccgcacgatttgcgcgctcggcgatgcagcggccatgccggttcgcggcatgctcaagcactactgggacgaattcgaataccacgtcgcccataagcattgcctcgtcggcggtcatgccggcgcggcagcggcgtcagaaacagtggctgcctgag

SEQ ID NO: 222123 - DNA, 496 bp, Unknown
  Bacterial polypeptide expressing nucleotide sequence isolated from the Sargasso Sea
atgaataacaaaatagatcaggttccaacagagtttaaacaacttgctgaagatttcagtaagaatggatttattactacatctcttgataatctgattaactggtctagatctggatctcttcattggatgacttttggtctagcatgttgtgcagtcgagatgatgcaaacctctatgccaagatatgacctcgaaagatttggtgctgcaccaagagcttctccaagacaatcagatgtaatgattgtagctggtactttaaccaataaaatggcaccagcacttagaaaagtttatgatcaaatgccagaacctagatatgtaatttcgatgggaagttgtgcgaatggtggtggttattatcattattcttattcagttgtaagaggatgtgatcgaattgtaccagttgatgtttacgtaccagggtgtcctccctcagctgaagcattactgtatggaatattacaattacaaaaaaaaattagagata

SEQ ID NO: 222124 - DNA, 976 bp, Unknown
  Bacterial polypeptide expressing nucleotide sequence isolated from the Sargasso Sea
aatttatataacgatttgggttcagatttaatttcagctcaaaaaagaggtgattgggtaaatacaaaagaaattactgaaaaaggtagagattggattataaatgagatcaaagactctcaattgagaggaagaggaggggcaggttttcctacaggtctaaaatggtcatttgcacctaaagaagttggatcaagacctcactacctagttatcaatggtgatgagtcagaaccaggcacatgtaaagatagagatatcttaaggtttgaaccacacaaactaattgaaggttgtttaatagcttcatatgcaattcaagcccatgtttgttatatttatataagaggtgaatattttgttgatggacaaaaacttcaagctgcaattgatgaagcctatgaaaaaaaattaattggaaaaaatgcggctggaacgggatgggatttagatatttatatacactatggtgcaggagcttatatttgtggtgaagaaacagcattacttgagagcattgagggtaataaaggtcaaccaagattgaaaccacctttcccagcattaattggtttgtatggatgtccaacaataattaacaatgttgaaaccatagctgtcgttccaacaattctaagaagaggtggtaaatggtttgcatctttggggagagaaaaaaatactggaactaaaatattttgtatttctggaaatgtaaataatccatgtaatgttgaagaggaaatgaacatacctttaaaagaattaatagaagttcatgcaggaggcgtcataggtggttgggataatttacaagccgtcatacctgggggttcctcaatgccacttattcccaaagaaaagtgtgagacactcactatggattttgactctttagttgctgaaaaaagtggtctaggcacagcaggagtggtcgtaataaataaagatcaagacattattaaatgtatggcaa

SEQ ID NO: 222125 - DNA, 858 bp, Unknown
  Bacterial polypeptide expressing nucleotide sequence isolated from the Sargasso Sea
tctttgtatttttttatcatcaattttatcaatcatcattttttataatgggattgttcatgatcagtatggaaactatttaatatttgagtggataagctcgggtgattttacagcaaattggactattaatgttgatcctttaagttcgataatacttgtagttgtttcattaatttcatttttggttcacctttactccatagagtacatgaggcacgatccaaacaaaccaagatttatgtcttatctttcgcttttcactttctctatgatggtactagttgtttcagataattttttacaattattttttggctgggaaggagtgggactttgctcttatcttcttataggtttctggtataaaaaagactccgcaaatcaggcagcaattaaagcctttttagtcaatagagtgggtgatctgggtttggcaattggtgtttttttaatatttctatattttgggacaataaatttttctgaaatttttgtatctgtaccaaatttttcatctaaacaaataaattttttaggtatcgaaataaatttgatcacagctatttgttcattcttgtttcttggtgctatgggaaaatcagctcaactttttttacacacatggttacccgatgctatggaaggaccaactcctgtatctgctttaattcatgctgcaacaatggttacagctggtgtatttttagttgctagatgttcaccaatttttgaatattctcaagttgcattaaattttgttacaataataggaatgttaacagctttgtttgctgcaagcgtcgctttagtccaaaacgatattaaaagaattattgcatattcaacttgtagtca

SEQ ID NO: 222126 - DNA, 919 bp, Unknown
  Bacterial polypeptide expressing nucleotide sequence isolated from the Sargasso Sea
ctcatacgctgttcaagcacatgtttgttatatttatatcagaggtgaatattttatagagggtcaaaaattacaaacagccattgatgaggcttatgaaaagaagttattaggtaaagatgctgctggaactggatgggatttagatatctacattcactatggagcaggtgcttatatttgtggtgaagaaacagctttacttgaaagtatagaaggcaaaaaaggacaaccaagattaaaacctccttttccggcattgattggactttatggttgtccaacaattattaacaatgttgaaactattgctgttgtgccaacaattcttagaagaggtggaaagtggttttcctcattaggaagagaaaaaaatactggtacaaaaattttttgtatatcaggtaatgtaaataacccatgcaatgtagaggaagagatgaacataccattaaaagagttaatagaagttcatgctggtggagtaattggtggatgggacaacttacaagcagtaattccaggtggatcatcaatgcctttaataccaaaagaaaaatgtgaaacgttaacaatggactttgactcgctaatggctgaaaaaagtggattaggcactgcaggaattgttgttattaacaaagatcaagacattattaaatgtatggcaagaatagccagattttacaaacacgaaagttgtggtcaatgcactccatgtagagaaggttctggttggatgtggagaatgttagaaagaatggcaaaaggagacgctactaaagatgaagtagaaatgttaggtgatgtaacaaaccaaattgctggacatacaatttgtgcatttggtgaaggatcttcttggccagtacagggattgttaagacattttaaaaaagaaattgaggaaagaaataat

SEQ ID NO: 222127 - DNA, 598 bp, Unknown
  Bacterial polypeptide expressing nucleotide sequence isolated from the Sargasso Sea
atgcttaaagatcaagatagaatttttaaaaacttatataatgatttgggagcggatgttaactcatctcaaaaaagaggtgattgggtcaacactaaagatataacaaataaaggtagagattggataataaatgaaatcaaagattctcaacttagaggtagagggggagcgggctttcctacgggattaaaatggtcttttgcgcctaaagaagttggctcgagacctcattatttagtaattaacgccgatgagtcagaaccaggtacatgcaaggatagggatatattaaggtttgaaccgcataaattaatcgagggctgtttactagcatcttatgcagttcaagcacatgtttgttacatatatattagaggagaatattttatcgagggacaaaaacttcaaactgctattaatgaagcttatgaaaaaaatttaattggtaagaatgcagctggtactggatgggacttagatatttatattcattatggtgctggagcatatatttgtggtgaagaaactgcattacttgaaagtatagagggaaaaaaaggtcaaccaagactaaaaccaccttttcctgcattga

SEQ ID NO: 222128 - DNA, 606 bp, Unknown
  Bacterial polypeptide expressing nucleotide sequence isolated from the Sargasso Sea
aatgttagatagtaaagatagaatttttgataatttatatggttttgaaccttggaatttagccaacgctaaacttcgtggtgattgggataatacaaaagatattttattaaaaggaagagaaaaaattactgaggaggtcatttcttctggtttgcgaggaagaggtggtgctggattttctacaggagtcaaatggacttttatgccaaaagaaccaactggaaagacacattatttagttgtcaatgctgatgagtctgagccaggtacatgtaaagatcgagaaatattaagaaatgaacctcataaattattagaaggatgcgttatcgcttgcgcagctatgggagcccaagtttgctacatatatattagaggtgaatttattaatgaacgatatattctcgagtcagcattaaaagaagcttacgatgatggtctagtaggcaataatgcatgtggtagcggtttggatattgaaatttttattcatcatggtgctggagcatatatttgtggtgaagaaacagctttattagagagtttagaaggtaaaaaaggtatgccaagattaaagccaccttttccggctgcagcaggttt

SEQ ID NO: 222129 - DNA, 463 bp, Unknown
  Bacterial polypeptide expressing nucleotide sequence isolated from the Sargasso Sea
aatgttttctcctgataatattttcacaacaactattgataaagccgttcgttggtcaagaactcaatctatgtggcccgttacttttggtcttgcatgctgcgctattgaaatgatggctgcagggtctgcaaaatacgacttagcaagatatggaatggaggtatttagagcatcaccgagacaggctgatttgatgatagttgctggtagagtttctcaaaaaatggcaccagtattgagacaagtttatgaccaaatggccgagccaaaatgggtaatagcaatgggtgcttgctcttcaactggggggatgtttaataactacgcccttgtacaaggtgttgaccacatagttcctgttgacatatatgtacctggatgtccacccggaccccaatcattaatgcatggaatattaacacttcatcaaaaaattatggatagagagataaatagataa

SEQ ID NO: 222130 - DNA, 523 bp, Unknown
  Bacterial polypeptide expressing nucleotide sequence isolated from the Sargasso Sea
atgagcctaaaagaaaaagaagatcaaattccaaaagaatttaaacaacttgctaaagactttgcagataaaggttttattacaacttcattagataatttagtaaattgggcaagaacaggttctttacactggatgacatttggacttgcatgttgtgcagttgaaatgatgcaaacatcaatgcctagatatgacctagaaagatttggtgctgcaccaagagcttcaccaagacaatcagatgtaatgattgttgctggaactttaactaacaagatggctccagcacttagaaaagtttacgatcaaatgcctgagccaagatacgtgatatcaatgggaagttgcgcaaatggtggtggctactatcattactcgtattcagttgtaagaggatgtgatagagttgttccagttgacgtttatgtgccaggatgtcctccttcagcagaagctcttttatacggaataatgcaattacaaaaaaaaataagagatcaaggttcaataagtagataat

SEQ ID NO: 222131 - DNA, 993 bp, Unknown
  Bacterial polypeptide expressing nucleotide sequence isolated from the Sargasso Sea
ctcaattatatctttacctctacttggttttcttttttgttttttactaggtaaacagtttaattatagggtttatcaaatatcaacaacttcaatcctttttctttgtactttattttcttggataatattcattcagtttattaataataaggaaactgaaataatctttattcttaactggataacttctggaaactttattgttgattggtcaattagattagacactttaactgctgtgatgttcattgtggttacaactgtttctgcttgtgttcatttatattcaataggctatatggaagaagatccatcaaaaataagatttatgggttatctaagcttatttactttttttatgcttgttcttgtatcaagtaataacttgctgcaaatgttttttggttgggaaggtgttgggctagcctcatatttattaattggtttttggcaccataaagattcagcaaataaagctgctataaaagcatttgttgtaaacagagttggagattttggatacgcaattggaattgctggaattttttatatttttggcacgataagtttcgacagtatattttcacaagtggatcaatttagtgagcatcaaattcaattcctttcattcagttttccaactttagattttttatgttttcttttattcataggtgcaatgggtaaatctgcccaattaggtttacacacctggttgccagatgctatggaggggcctactcctgtatctgcactaatacatgctgcaacaatggtaacagctggtgtatttttagttgcaagaatgagtcctctttatgaatttgctacatttactaatttattcattacttttattggtgcggccacagctatttttgctgcctctatagccttaacgcaaaatgatattaaaagagtcattgcatattcaacatgcagtcaattaggatacatgttttttgcagcaggtgtaggagcttataatgc

SEQ ID NO: 222132 - DNA, 788 bp, Unknown
  Bacterial polypeptide expressing nucleotide sequence isolated from the Sargasso Sea
aatgcttaaagatcaagatagaatttttcaaaatttatataatgatttgggttcaaatttaacttcatcccaaaaaagaggtgattggataaatacaaaagaaattactaataaaggtagggattggattataaatgagattaaagattcacaacttagaggaagaggtggagctggttttcccactggtcttaaatggtcatttgccccaaaaaaagtgggatctagacctcactatttagttattaatggtgatgagtcagagcctggcacttgtaaagatagagatatattaagattcgagcctcacaagttaatagagggatgtttaatagcttcatatgcaattcaagctcatgtttgttatatttatataagaggtgaatattttgttgatggacaaaaacttcaagctgcaattgatgaagcttatgaaaaaaaattaattggaaaaaattcagctggaacgggatgggacttagatatttatatacattatggtgcaggagcatatatttgtggagaagaaacagctttacttgaaagtattgagggaaacaaaggtcaaccaagattaaaacctcctttcccagcattagtgggcttatatggatgtccaacaataattaacaatgttgagactattgctgtcgttccgacaattttaagaagaggtggtaagtggtttgcttctctgggtagagaaaaaaatactggtactaaaatattttgcatatctggaaatgtaaataatccatgcaatgttgaggaagaaatgaatataccac

SEQ ID NO: 222133 - DNA, 727 bp, Unknown
  Bacterial polypeptide expressing nucleotide sequence isolated from the Sargasso Sea
atgcttaaagaggaaaacaaaatatttaaaaatttatataacgaacaaggttgggagttagaaaatgctcttaagagagatgattggttagatactaaaaaaattatagagaagggaagagactggatcataaatgaaattaaagcctctgaacttagaggtagaggaggagctggtttttcaactggattaaaatggtcattcgcacccaaaaaagttggttcaagaccacattacttagttataaatgctgatgagtctgaacctggaacttgtaaagatagagatatacttagatttgagcctcaaaaattaatagaaggatgtttgatcgcttcttatgctgtaaatgcaaaaatttgttatgtttatataagaggagaatacttgaatgaaggtaaaagacttcaggaagctatagacgaggcatattcaaaaaatttaattggtaaaaatgcgtgtaattcaggatgggatttagatatttatattcactatggcgcaggagcatatatttgtggcgaggaaactgcacttcttgagagtttagaaggaaacagaggtcaaccaagattaaaaccacctttccctgctttggtcggactttatggttgtccaacaatcgtaaataatgttgaaacaattgctgtggttccaacaatattaagacgtggagctaaatggtttgcttctatgggtagaccaaaaaatacaggtactaaaatat

SEQ ID NO: 222134 - DNA, 905 bp, Unknown
  Bacterial polypeptide expressing nucleotide sequence isolated from the Sargasso Sea
gatgcttgaatatagtcttattgcactcttatcaccactatttggtggaatcatggctgcattccttggtaaatcatttggtaagaattttgttaaccttgtcaccataataggtgtcagtatctcttttgttttatcttgtatcatcgcccttgagatccttgaaacaaccgctgtcatcaatcaaaatatctatacatggctgaatatcggagatcagtcatttaatataggacttctcattgataatttaacggccagcatgatggtggttgtaacctttgtctcattgatggttcatgtttatacaataggttatatgcatgatgatcctggatatcatcggtttttctcatacatcagtctatttaccttctcaatgttgagcctagtgatgtctaataacttcctgcaattattctttggttgggaagctgttggtgtgatgtcgtatctgctcatcggtttttggtacaccaaagaatctgcaatcaaggcgaatttaaaagcatttattgtgaatagagtaggggatttatctcttatcctgggtattggtattatcttttcgatcactggttcacttgattattatgctgtattttcaaactcacaagagatcgctcaaactgagttactattgacaagcactctgaccgtttctgcactgactgcatcttgcatcctattattcggtggagcaatgggtaaatctgcacaaatgccgcttcatgtatggctgccagattcaatggaaggtccaacaccaatatcggcccttatacatgcagcaaccatggtcactgctggcgttttcttaattgcaagaatgtcaccattatttgaactttccactacggcactctcatttgttctgattattggagcaactacggcattgttta

SEQ ID NO: 222135 - DNA, 956 bp, Unknown
  Bacterial polypeptide expressing nucleotide sequence isolated from the Sargasso Sea
tttgctccaaaagaagttggatcaagaccacattatttagtaattaatgcagatgagtctgaacctggcacatgcaaagatagagatattctaagatttgaacctcataaattaatagaaggctgcttaattgcgtcttacgcagttaatgcacacaagtgctatatttatataagaggagaatattttaatgaaggacaaaagcttcagacagctattgatgaagcttacaaggatggtctcttaggaaaaaattctgcagggaccgattgggaattagatatatatattcattatggtgctggagcttatatctgtggcgaggaaactgctttgcttgagagtattgaaggaaaaaaaggtcaaccaagattgaaacctccatttccagctttaataggtctttatggttgccctacaataataaacaatgttgaaacaatttcagtggtaccaactatacttagaagaggtggaaaatggttttcatcactcggtagaccaaaaaacactggttctaaaatatattgtatttcaggaaatgtaaataatccctgcaacgtagaagaagaaatgggaattccattaaaagaattaattgaaaaacatgcaggtggagtgataggtggatgggaaaatctaaaagcagttatacctggtggttcatcaatgccattacttccaaaagaaacatgtgaaacaattaaaatggactttgatgcatgtgtcgagaataaaactggtttaggaacagctggtatagtggttataaataaagatcaagacattattaagtgtatggctagaattgcaagattttataaacacgagagctgtggtcaatgtacaccatgtagagaaggatctggttggatgtggagaatgttagaaagaatggcgaaaggtgaagcaacaagagatgaagtagatatgttattagatgtacaaaacaaatg

SEQ ID NO: 222136 - DNA, 393 bp, Unknown
  Bacterial polypeptide expressing nucleotide sequence isolated from the Sargasso Sea
aatgggaataaactttgactcattttctaaaaaagaaaaagatatacctgaagaatttaaagatttagcaaaagattttgctgaaaaaggttttataacaacttcgtctgaaaatttaattaattgggctcgaacaggttctttacactggatgacatttggtctcgcttgttgtgcggttgagatgatgcaaacttctatgccaagatatgatcttgaaagatttggtgcagctcctagagcatcaccaagacaatcagatgtgatgattgttgctggaaccttaacaaataaaatggccccagctcttagaaaagtttacgatcagatgccagagcctagatatgttgtgtcgatggggagctgtgccaatggaggaggttattatcacta

SEQ ID NO: 222137 - DNA, 328 bp, Unknown
  Bacterial polypeptide expressing nucleotide sequence isolated from the Sargasso Sea
tgatttggaaagatttggtgctgctccccgcgcttctcctagacagtctgacgttatgattgtagcgggaacattaacaaataaaatggcacaaccattaagaaaagtatatgaccaaatgcctgaacccagatacgttatatcaatgggaagctgtgcaaatggcggaggttattatcattactcttattcagtagtcagaggttgtgatcgaatagttcctgtagacatttatgtaccaggatgcccacctacagctgaggctttgctctatggaattttacaattacaaaaaaagattagaagagaaggtaatctaaaaagataa

SEQ ID NO: 222138 - DNA, 400 bp, Unknown
  Bacterial polypeptide expressing nucleotide sequence isolated from the Sargasso Sea
atgaataacaaattagaaaaaattcctgaggaatttaaaaaactagctgaagattttggtaaaaatggttttataacaacctcactagataacttgattaattggtcaagatctggatctcttcactggatgacttttggtttagcgtgctgtgctgtagaaatgatgcagacagcgatgccaaggtatgatctagaaagatttggagctgcacctcgaggttcccctagacaatcagatgttatgattgtagctggtactttaacaaataaaatggcaccagccttaagaaaagtttatgatcaaatgcctgagccaagatatgtaatatcaatggggaagttgtgcaaatggcggtggatattatcactattcttattctgttgtcaggggttgtgat

SEQ ID NO: 222139 - DNA, 822 bp, Unknown
  Bacterial polypeptide expressing nucleotide sequence isolated from the Sargasso Sea
atatctgcggtgaggaaaccgcactgttagaaagtattgaaggaaataaaggtcaacccagacttaaaccaccattcccagcacttgtcggcttatacggttgtccaacaatagttaataatgtggaaacaatagctgtagttccaactattttaaggcgcggaggtaaatggtttgcatctttaggtagaccaaaaaatactggtacaaaaattttttgtatttcgggaaatgttaactcaccttgtaatgttgaagaggaaatgggtattcccctaaaggaattaattaacacttatgctggaggtgttattggaggatgggataatctacaggcagttataccaggaggatcttctatgcctttgctacccaaaaaaacctgtgagactattaagatggattttgattcactaattgaaaatcaaagtggtttaggaaccgctggaatagtagtgattaataaagatcaagatattgtttcttgtatggcgagaatcgcaaggttttataaacatgaaagttgtggccagtgtaccccttgcagagaaggctcaggttggatgtggagaatattaaatagagcaactaaaggagaaacgacattaagtgatattgatctactagaggatgttacaaaacaaatcgaaggtcacactatttgcgcctttggcgaaggttcagcttggcctgttcaaggtttgttaagacattttagaaaagaaattgacaaaaaatgcagcaacgaccctcttataaaaaagaaaaaagatgttccttatttagttgatcaacatttattagaaaaaaagaatgcctaaa

SEQ ID NO: 222140 - DNA, 823 bp, Unknown
  Bacterial polypeptide expressing nucleotide sequence isolated from the Sargasso Sea
tatatttgtggtgaagagacagcattacttgaaagtatagaaggaaaaaaaggtcaacctagacttaaaccgcctttccccgctcttgttggtttatatggttgtcccacaattgtaaataatgttgaaactatagcagtagttccaactattctacggaggggctctaaatggttttcaagtttaggaagatcaaaaaatacaggtaccaaaattttttgtatttcaggtaatgtaaataacccatgtaacgttgaggaggaaatgggaatttctttaaaagatttaatagagaaacacgcgggtggagttattggtgggtgggaaaatttaaaagctgtgatacctggaggctcatcaatgccaatgctaccaaaagaaacatgtgaaactattaaaatggattttgactcattagtagaggagaagagcggactaggtacagctggtgttgttgttataaataaagatgaggatataatttcatgtatggcaagaattgctcgtttttacaaacatgaaagttgtggtcagtgcacaccatgcagagagggttctggttggatgtggcgaatgttagaaagaatgaaaagaaatgaagcctcaagagaagaaattgaaatgttagaagatgttacaaaacaaattgaaggtcatacaatatgtgcttttggtgagggttcatcttggccagttcaaggtctattaaggcattttaaaaaagaaattattaaaagaaataattttaatccattagtaaaatcaaataaaaatattccatatttagtagatcaacatttgttagataaagaaaatgcttaaa

SEQ ID NO: 222141 - DNA, 513 bp, Unknown
  Bacterial polypeptide expressing nucleotide sequence isolated from the Sargasso Sea
agataaaaaaaatcaaataccctgaagaatttcaaaaacttgcacaagattttagtgaaaatggattcataacaacttctttagacaatctaataaattggtctagatctggatcactacactggatgacttttggtttggcttgttgtgcggttgaaatgatgcaaacctcaatgccaagatatgatcttgaaagatttggagcagcgcctagagcttcacctagacaatcagatgtaatgatagttgcaggaactttaactaataaaatggctccagcacttagaaaagtttatgatcaaatgccagaacctagatatgttatatctatgggaagttgtgcaaatggaggaggttattatcattattcatactcagtagtaaggggatgcgacaggatagtaccggttgatgtttatgttcctggctgtccaccttcagctgaggcacttttgtacggtataatgcaattgcaaaaaaagattagaaacaaaggttctgctatcaggtaag

SEQ ID NO: 222142 - DNA, 538 bp, Unknown
  Bacterial polypeptide expressing nucleotide sequence isolated from the Sargasso Sea
atgggaataaaactaggatcattttcaaataaacaaaaagaaatccctgaggaatttaaagacttagctaaagattttgcagaaaaaggtttcatcacaacttcctcagaaaatttaattaactgggcaagaacaggttcactacactggatgacttttggtttggcgtgctgtgcagttgaaatgatgcaaacctctatgccaagatacgacctagaaagatttggagcagctcctagagcctcaccaagacaatcggacgtaatgatagttgctgggacattaacaaataaaatggctccagccttaagaaaagtttatgatcaaatgcctgaaccaagatatgttgtatcaatgggaagttgtgcaaatggaggcgggtactatcattattcttattctgtagtaagaggttgtgataaaattgttccagttgatatttatattccaggttgcccaccttccgctgaggcactcttatatggaattttacaacttcaaaaaaaaattaggagagaaggaactttacaaagataat

SEQ ID NO: 222143 - DNA, 806 bp, Unknown
  Bacterial polypeptide expressing nucleotide sequence isolated from the Sargasso Sea
aagaggaagagggggagcgggatttccaactggtttaaaatggtcctttgcaccaaaaaaagttggcgccaaacctcattacttagttataaatgctgatgaatctgaacctggcacatgtaaagatagggatattttaagatttgaaccccataaattaattgaaggctgtttaattgcttcatacgcagttaatgctcacaaatgctatatttacttaagaggagaatattataatgaaggtgcaaagctgcaaacagcgattgatgaagcttataaagctaatcttataggtaaaaattcatcaggcactggatgggaacttgatatttatatccactatggagcgggtgcatatatttgtggtgaggaaacagcccttttagaaagtattgagggaaacaaaggacaaccaaggttaaaaccgccttttcctgctctagtgggattatatggatgtcctacaataataaataacgtcgaaaccatagctgttgttccgtcaatattaagaaaagggtcaaattggtttgcatctttgggtaaaccaaaaaacactggtacaaaaatattttgtatttcaggtaatgttaacagcccgtgtaacgttgaagaagaaatggggattaaattaaaagacttaatagaaaaacatgcaggtggggttgttggtggatgggataatttacaagctgttattccggggggctcttcaatgccaatgttaagcaaagaaattagtgaaaatataaccatggactttgactctttagttgaaaataaaagtggcttgggaactgcagggg

SEQ ID NO: 222144 - DNA, 985 bp, Unknown
  Bacterial polypeptide expressing nucleotide sequence isolated from the Sargasso Sea
attaatgaaattaaagagtcccagttaagaggtcgaggtggagcgggtttcccaacaggtttaaaatggtcatttgccccaaaagaaattggatctagaccacattatttggttattaacggtgatgagtctgaaccaggaacttgtaaggacagagatattttaagatttgaacctcataaactgatagagggttgtttgattgcatcatatgcagtgcaagcacatgtttgttatatttatataagaggagaatattttgttgatggtcaaaaacttcaagcagcaataaatgaagcttatgaaaaaaaactattaggtaaaaatgcagctggtacaggttgggatttagatattcatattcattatggtgctggtgcttatatttgtggtgaagagactgcattgcttgaaagtttagaaggtaataagggtcaaccaagattaaaaccaccatttccagctttaataggtttgtacggttgtcctacaataataaataatgttgaaacaattgcagtagttccaactattttaagaagaggagctaaatggtttgcctctttaggaagagaaaaaaatacaggaactaaaattttctgtatatctggaaatgttaataatccttgtaacgttgaagaggaaatgagcatttctctaaaagaattaatagaagttcatgctggcggggtagttggtggatgggaaaatttgcaagctgtaattcctggaggttcttcaatgcccttaatacctaaagaaaggtgtgaaactttaaaaatggattttgatgcatgtgttgaggaaaaaagtggacttggtaccgcaggtattgtggttattaataaagatcaggacataataaaatgtatggcaaggatagcaagattttacaaacatgagagttgtggtcaatgtacaccttgtagagaaggatctgggttggatgttggagaatgctttgagagaatggcgaaagggggat

SEQ ID NO: 222145 - DNA, 901 bp, Unknown
  Bacterial polypeptide expressing nucleotide sequence isolated from the Sargasso Sea
atgcttaaagatactgatagaatatttaaaaatctctataatgataatggctttgacatcgtttcttctcaacgaagagatgactggaaagacactaaagagctctgtaataaaggaagagaatggataataaatgaaattaaaaactctgaacttagaggaagaggtggcgcaggttttcctactggtctaaaatggtcttttgcacccaaggaagtaggatcaagaccacattacttggttattaatgcggatgagtctgaaccaggaacatgtaaagatagagatatattaagatttgaaccacataaattgattgaaggctgtttaatagcatcgtatgcagtcaacgcccatgtttgttatgtgtatattagaggcgaatacttcaatgagggaaaaaatcttcaaatagctatagatgaggcttatgaaaaaaatttgataggtaaaaatgcatcgggaaccggatgggatttagatatttatattcactacggagctggagcatatatttgtggagaggaaacagctttacttgaaagtttagaaggcaaaaaaggattacccaggttaaaaccaccttttcctgcgttaataggtttatatggatgcccaacaataataaataatgttgaaacaatagctgtagtcccaacaattttacgaaaaggtgctaaatggtttacttcactaggaaaaccaaaaaatacagggacaaaaattttttgtatatctggaaatgtaaataaaccatgtaatgtggaggaagaaatgggaattcctttgaaagaattaattgaacatcatgctggcggcgtagttggtggatgggaaaatttaaaggcagttattccaggaggatcatcaatgcctttattaccaaaaaaatatttgtgat

SEQ ID NO: 222146 - DNA, 453 bp, Unknown
  Bacterial polypeptide expressing nucleotide sequence isolated from the Sargasso Sea
attgggattagaaacggataatgatttaattgatcaacaagggcccggttttattattacatccgtagataaactggttaattgggcaagaacaggctcaatgtggccggttacatttggtctagcatgttgtgctattgagatgatgcatgcaggagccgcaagatatgataccgatcgttttggggtattctttagaccgagtccgaggcaatcagacgtcatgatcgtcgcaggaacgcttgtcaataagatggcccctgcacttagaaaagtatacgaccaaatggctgaaccaaaatgggtcatttccatgggatcatgtgccaatgggggtggctattatcaccattcgtattctgtggttagaggttgtgatcagattatccctgttgatatctatgttcccggatgcccgccgacttcagaggcattgatcaatggaatcataga

SEQ ID NO: 222147 - DNA, 523 bp, Unknown
  Bacterial polypeptide expressing nucleotide sequence isolated from the Sargasso Sea
atgaatttagaagatagaaaaaaagatatacctgaagagtttaaacaattagcacaagattttagtgataatggttttataacaacatcattagataaccttgttaattgggcaagaactggttcattgcattggatgacatttggattagcatgttgtgctgttgaaatgatgcaaacatctatgccaaggtacgatcttgaaagatttggtgcagcaccaagagcatcacctcgacaatcagatgtaatgatagttgctgggactttaacaaataaaatggctccagcactaagaaaagtttatgatcagatgcctgaacctagatatgtgatatctatgggaagttgtgctaatggtggaggctattatcattattcatattctgtggttagagggtgtgatcgcgtggtgccagttgatgtatatgttcctgggtgtcccccttcagcagaagcattactctatggaattttgcaattacaaaaaaaaattagaaacaaaggttctttagaaagataaa

SEQ ID NO: 222148 - DNA, 331 bp, Unknown
  Bacterial polypeptide expressing nucleotide sequence isolated from the Sargasso Sea
atatgatttagaaagatttggagctgctccacgtgcatcaccaaggcaatctgatgttatgattgtagctggaacattaacaaacaaaatggcgccagctttgagaaaagtttatgatcaaatgcctgaaccaagatacgttgtatctatgggaagttgtgctaacggcggtggatattatcattactcttattcagttgtgagaggttgtgataaaattgtaccagttgatatttatattccaggttgtcctccctctgcagaggctcttctttacggtattttacaattgcagaaaaaaataagaagagatggaaatttacaaagataa

SEQ ID NO: 222149 - DNA, 353 bp, Unknown
  Bacterial polypeptide expressing nucleotide sequence isolated from the Sargasso Sea
gatgcaaacttcaatgcctagatacgatcttgaaagatttggtgcggctcctagagcttcaccaagacaatcagatgtgatgatagtagcgggaacacttacaaataaaatggctcctgctttaagaaaagtttatgatcaaatgcctgaacctagatacgttatatccatgggtagttgtgctaatggtgggggttattaccattatgcttattcagttgttagaggttgcgataaaatagtaccagtagacatttatgtaccaggctgtcctccatcagcggaagctttgttgtatggaattatgcaacttcaaaaaaaaataagaagagaaggcactctcgtaagataat

SEQ ID NO: 222150 - DNA, 949 bp, Unknown
  Bacterial polypeptide expressing nucleotide sequence isolated from the Sargasso Sea
aaaatatttaaaaatttgtataatgaacttggttggaagttagaagattcattaaaaagggatgattggctggacacaaaaaatcttattaccaagggaagagattggatcattaatgaaatcaaagcatctgaattaagaggaagaggaggggcgggttttccaactggtttaaaatggtcttttgctcctaaaaaagttggttcaagaccacactatttagtaattaatgccgacgaatcagaaccaggaacttgtaaagatagggacatattaagatttgaaccgcaaaaattgatcgaaggctgttttataacatcttatgcagtaaacgcacacgtttgctacatttatattaggggagaatattacaatgaaggtatcagacttcaacaagcaatagacgaagcatacgaaaaaaactttattggaaaaaatgcttgtaactctggatgggatttagacatatatattcattttggcgcaggcgcttatatctgcggagaagaaacagcactattagaaagtttagaaggaaacaagggccaaccaagattgaaaccgccatttcctgctttagtaggtttgtatggttgtccaacaatagtaaacaatgttgaaacaattgctgtggttccaacaatattaagaaaaggtggaaagtggtttgcgtcaataggacgtccaaaaaatactggaacaaaaatattttgtatttctgggaatgttaatttgccatgtaatgtggaagaagaaatgggaataactctaaaggatcttatagaaaaacatgcaggtggagtaattggtggatggaaaaatttacaggctgttataccaggaggatcttctatgcctcttattccaaaagatatttgtgagacattaaaaatggattttgattctttgattgcggttaaaagcggattaggtaccgcaggagtagttg

SEQ ID NO: 222151 - DNA, 762 bp, Unknown
  Bacterial polypeptide expressing nucleotide sequence isolated from the Sargasso Sea
agataaaaccaccatttcctgcacttataggattatatggatgcccaactataattaacaacgttgaaacaattgcggttgttccaactattttaagaaaaggagctaagtggtttgcaagtattggaaaacctaaaaatactggtactaaaattttttgtatctctggtaacgtaaacaatccttgtaatgttgaagaagaaatgggtgtatctttaaaagatttaatagaacaacatgctggaggagttattggtggttgggagaatttaaaagcagtaattcctggaggatcttctatgcctttattaccaaaagaaatttgtgacacaataaaaatggatttcgattcattggctgaacaaaagagtgccttaggaaccgctggaataatagttataaataaagatcaagatattattaaatgtatagcaagaattgctagattctataaacatgaaagttgtggacaatgtacaccttgtagagaagggtctggatggatgtggcgtatgcttgaaagaatgactaaaggtgaagcatctagagaagaagttgatatgcttatggatgtaactaaacaaatagaaggccatacaatttgtgcatttggagaagcaaccgcatggcctgttcaaggactattaagacattttaaaaaagaagtagttaaaagaaataattttaatcctatgattaataaaaataaaaatattccatatttaattgatcaacatttattagaaaaagaaaatgcttaaa

SEQ ID NO: 222152 - DNA, 481 bp, Unknown
  Bacterial polypeptide expressing nucleotide sequence isolated from the Sargasso Sea
aatgattgaaggcgtgatgaaggaaggcttcatcaccacgagttacgactccgtggtgaactgggccaagaccggttccctgtggccgatgacgtttggtctggcctgctgtgctgtcgagatgatgcacgcggcagcggcccggtacgacatcggccgttttggtgcggaagtgttccgtgccagccctcgtcagtccgatctgatgatcgtggcaggcacgctgtgcaacaagatggccccggctttgcgcaaggtctacgaccagatgtccgagccccgttgggttctgtcgatgggttcgtgcgccaatggtggtggctactaccactacagctactcggtggtgcgcggttgtgaccgcattgtgcccgtagatgtctacgtgcccggctgccctccgacggcagaagccctgatttacgggatcattcagttgcagcagaagatccgccgcaccaacaccattgctcgcgtctga

SEQ ID NO: 222153 - DNA, 724 bp, Unknown
  Bacterial polypeptide expressing nucleotide sequence isolated from the Sargasso Sea
atttgttatatttatattagaggtgaatattttaatgagggtaaaagattacaagatgcaattgatcaggcctacaagaaaggtttcttgggaaaaaatgcatgtagctctggttgggattttgatattcatattcattatggagccggggcttatatttgtggagaagaaacagcgttattagaaagtatagaaggcaataaaggccaaccaagactcaaacctcctttccctgctttagtaggtttatatggttgtcctacaatagtaaacaacgttgaaaccattgctgttgtaccaacaattttaagaagagggggaaagtggtttgcatcaattggaaaaccaaaaaatactggaacaaaaatattctgcatatctggaaacgttaactctccttgtaatgtagaagaagagatgggtatacctctcaaggagttgattgaaaagcatgctggaggtgtgattggtggctgggataatcttcaagcagtaatccctggaggctcatcaatgccattactgtcaaaaaaaatctgtgatacaattacgatggactttgatgcattaatagaaaataaaagtggtttagggacagccggggtggtcgtaattaataaaaaccaagatattatttcttgcatggctaggatagctagattttataaacatgaaagctgcggtcagggcacaccttgtagagaaggagcaggatggatgtgga

SEQ ID NO: 222154 - DNA, 846 bp, Unknown
  Bacterial polypeptide expressing nucleotide sequence isolated from the Sargasso Sea
gatggcaacctcaattatatttttacctctactaggttttcttttttgttttttactaggtaaacagtttaactatagggtttatcaaatatcaacaacttcaatcctttttctttgtactgtattttcttggataatattcattcagtttattaataataaggaaactgaaataatctttatccttaactggataagttctggaaactttattgttgattggtcaattagattagacactttaactgctgtgatgttcattgtggttacaactgtttctgcctgtgttcatttatattcaataggctatatggaagatgatccatcaaatataagatttatgggttatctaagcttatttactttttttatgcttgttcttgtatcaagtaataacttgctgcaaatgttttttggttgggaaggtgttgggctagcctcatatttattaattggtttttggcatcataaagattcagcaaataaagctgctataaaagcatttgttgtaaacagagttggagattttggatacgcaataggaattgctggaattttttatatttttggcacggtaagtttcgacagtatatttttacaagtggatcaatttagtgatcatcaaattcaatttctttcattcagttttccaactttagattttttatgttttcttttattcataggcgcaatgggtaaatccgcccaattaggtttacacacctggttgccagatgctatggaaggacctactcctgtatctgcactaatacatgctgcaacaatggtaacagctggtgtattcttagttgcaagaatgagtcctctttatgaatttgctacatt

SEQ ID NO: 222155 - DNA, 432 bp, Unknown
  Bacterial polypeptide expressing nucleotide sequence isolated from the Sargasso Sea
tatgaatcttactgagagagaaaaacaaattccagaagaatttaaagcacttgccaaagactttagtgaaaaaggttttataacaacatcctttgaaaatttagtaaattgggctagaacaggatcgcttcattggatgacttttggtttagcatgttgtgctgttgaaatgatgcaaacttctatgccaagatacgatttagaaagatttggagcggcaccgagagcttcgccacgtcaatctgatgttatgattgtggcaggtacactaaccaataaaatggcacctgctttaagaaaagtatatgaccaaatgccagagcccagatatgttatatcaatgggaagctgcgctaatggagggggctattatcattattcctattcagttgtaagaggctgtgacagagttgttccggtagatgtttatgt

SEQ ID NO: 222156 - DNA, 862 bp, Unknown
  Bacterial polypeptide expressing nucleotide sequence isolated from the Sargasso Sea
aaattctttggcaggaaatgctctcattggattgccaatattggagttgccctaagttttttccttagcactgtagttctgtatcaaattgtgacgggcgcagagcctgcttttaatgagaatatttatacttggttagaagcgggtggggtgtctttccacataggattcctgatagacactctcacggctctaatgatggttgtggtaacttttgtttcgtggatggtgcatatctacactatagggtatatgtccgaagattctggataccaacgatttttctcgtacatctcactatttaccttcagcatgttgatgcttgttatgtcaaataatttccttcaattatttttcggatgggaagctgtgggcctagtgtcttatctactgataggattttggtttaaaaaagagagtgctatctacgccaatcttaaggcttttttggtaaatcgggtgggcgatttcgggtttttgctaggtatagcaggcgttcttatgtattttggatccttagactatgcggcagttttcgaaatgtcgggccttttggagggggaaacgttttcaatcctacccggcttggtatgggaatcggcaactgttttatgtattttgttgttcataggtgcaatgggaaaatctgctcaggttcccttacacgtttggctgccagattcaatggaaggaccaaccccaatatctgctctaatccatgcagctactatggtcactgctggcattttcatggtggctagaatgtcaccactgtatgagatgtctcctaccgccttggaatttatcatggtggtcggcgccctaacagccttttttatgggtttgctgggtttagtgcaaa

SEQ ID NO: 222157 - DNA, 694 bp, Unknown
  Bacterial polypeptide expressing nucleotide sequence isolated from the Sargasso Sea
accaaaagaaattggatcaagaccacattatttagtaattaatgctgatgagtcagaaccaggaacttgtaaagatagagatattttaagatttgaaccacaaaaattaattgaaggatgtttattagcatcttacgcagtaaatgcacacaaatgctatatttatataagaggagaatatctcaatgaaggaaaaaaacttcaagaagcaatagatgaagcatatgaaaataaattaattggaaataatgcatgtgatagtggttgggatttagacatatatatacattatggagcaggcgcatatatttgtggtgaagaaactgcgttacttgaaagtattgaaggaaacaagggtcaaccaagattaaaaccacctttcccagctttaattggtttgtatggttgtccaacaattattaataatgtagaaacaatagcagttattccaactatattaagaagaagtggaaagtggtttgcttcactaggtagagcaaaaaacactggttcaaaaatttattgtatttctggaaatgttaataacccatgtaatgttgaagaagaaatgggtattccattaaaagatttaattgaaaaacatgcgggtggtgtaataggaggttgggataatcttaaagcagttattcctggtggatcatctatgcctttaataccaaaaaaaatctgtgaa

SEQ ID NO: 222158 - DNA, 628 bp, Unknown
  Bacterial polypeptide expressing nucleotide sequence isolated from the Sargasso Sea
atgcttaaagataaagatagaatatttaaaaatttatataatgatcacggttctgatatttcctcagctatctctataggtgattggtcaaatacaaaagaaattttgttgaaaggaaaagactggatcatcaatgaaataaaagcttccgaacttagaggaagaggaggagcaggatttccaacaggattaaagtggtcttttgctccaaaaaaaattacaaataaacctcattatctaataataaatgcggatgagtctgagcccggaacttgtaaggatagagatatattaaggtttgaacctcataaattgattgaaggttgtttaattacatcctacgctattaatgcaaaaacatgttatatttatttaagaggcgaataccttaacgaggggttaaaacttcaaaatgcaatagatgaagcttataaaaaaaattttattgggaaaaatgtttttggttcaggatgggatctagatatttatgttcactatggtgctggcgcatatatttgtggtgaggaaacagctcttttggaaagtatagaaggaaacaaaggtcaaccaagattaaaacctccatttcctgcattaattggtttatatggatgtccaaccaaatagt

SEQ ID NO: 222159 - DNA, 835 bp, Unknown
  Bacterial polypeptide expressing nucleotide sequence isolated from the Sargasso Sea
atgatcccgggtttttcacgattccttttgttcatgtctctgttcattgcggcgatgctcgggcttgtcatgtcatctggcctactgcaattatttatccattgggagttggtgggtcttacttcttatcttctcatagggttttggtttgagagaccagctgcagctgcagcggcgaaaaaagcatttattgttacacggtttggtgatattggatttgtgatcgcacttacagttatttgggtcaacgtaggaacatttgatatatccgagatcaatctactcgctcatactggtggtataaccgctcctgtacttacgggctttactctgggattgcttgctggggctgctggaaagagcgctcaatttccgcttcatttttggctcccagatgcaatggaaggaccgacaccagtatcgtctatagtgcactcagctacgatggtcgcggcgggtgtctacctgctagctcgtttcttcccagcgatcgacgcggcaccccaatcagtttctactgtcatagcatacgttggcggcttcacggctatttttgcggcctcgatgggtgtggtcgtgactgatataaagcgagtgctcgcatattcaactgtttcgcaattgggctatatggtcatggcgataggtttgggaggatatgtagctgccattttccatttgttcacacatgcctttttcaagagcctcctgttttggggagcaggttcagtgagtcacgctaccggtacttttgagatgggaaaaatgggtggtctgcgtggggtgatgccggtcactttcttaacatttgtcataggctctttgtctctagcag

SEQ ID NO: 222160 - DNA, 868 bp, Unknown
  Bacterial polypeptide expressing nucleotide sequence isolated from the Sargasso Sea
tatggaatatgcaatagtattattacctttattaggttcaattatttccggtttttttggaaaggccgtaggaataaaatatagtcagatattaacaagtctgcttgtatcgatttctgcaattatatctatatatattttttttgaagttttaataaacaattattctagtaacaaattaatttttaactggataacttctggtaattttaatgttaattggtcaattaatatagatccaattacatctgtaatgcttgtagtagtatgtttaatatcttcaataattcatttttattcaattggttatatgattcatgatcctcataagacaagatttatgtcgtacttatctctatttactttctcaatgcttgtattagttactggggataattttttgcaactattttttggctgggaaggagtaggtttatgttcatatttgttaattggtttttggtacaaaaaaccttcagccaactacgctgcaatgaaagcatttattgttaatagagttggagattttggatttgctattggaatctttttaattttctttttttatggaacattgaattataacgaggtttttgatctcacaccatcacttgctgacaaggagatagcattcttaggtatccaatttaatttaataactttgatatgcctaatgctttttattggagcaatgggaaagtctgcacaatttttattacatacatggcttccagatgctatggaagggcccacgccagtatctgcattaattcatgctgccaccatggttacagcgggagtctttttagtcatcagatgttcaccaatttttgagtattcacaagtagctttgaattttgttgctata

SEQ ID NO: 222161 - DNA, 802 bp, Unknown
  Bacterial polypeptide expressing nucleotide sequence isolated from the Sargasso Sea
catttgggataacacgaaatccattttagttaaagggcgagactggatagttgaacaaatgaaggcctctggtctgagggggcgcggaggcgccggctttcctacaggtttaaagtggtcatttatgccaaaagaaagcgatgggcgcccgtcttatttagtagtgaacgcggacgaaagtgagcctggcacttgtaaggatagagagatcatgaggcatgaccctcataccttaattgaaggttgtttaattgcttcgttcgcaatgggagcaaactgttgttacatttacattcggggtgagtacatcagagaaaaagaaatgcttcaaatagcaattgatgaggcttatgaagctggttttgtaggtaaaaatgcgtgcaattctgattggaattttgatatttttcttcatcatggagcaggcgcatatatatgcggcgaggaaacagcattacttgaaagtttagaaggtaaaaaaggtatgccccgaatgaaaccgccgtttccagccgggtcaggcttatacggttgccccacaactgttaacaatgttgagtcaatagccgttgtgccaactattctccggcgggggcctgattggttctctggttttgggaggtcaaacaactttggaactaagctttttgctatttcggggcatgtaaataatccttgtgtggtagaggaggctatgtccatttcgttcgaagagctaatcgataaacattgcggtggaattcgagggggatggaaaaatttaaaagctgttataccaggtggttcgtccgttccctgtgtg

SEQ ID NO: 222162 - DNA, 880 bp, Unknown
  Bacterial polypeptide expressing nucleotide sequence isolated from the Sargasso Sea
cctgatcaacgcccaacgcccgctgatcgtctccggcgcctccctgggcgacaaggccctgatcgaagccgccgccaatatcgccagcgcgctgaagaaccgtgagaagaacggctcgctgagcctggtggtgcccgaagccaacagcctgggccttgccctgctcggtggcgagtccgtcgatgccgcgctacaagccctgagtggcggccaggccgatgccgtgatcgtgctggaaaacgacctgtatcgccgcgccgatgcggccaaggtcgaagccgcgctcagcgccgcgcaggcggtgatcgtcgctgatcaccagcgcactgacaccagcgaacgcgcccatctgctgctgccggtggcctccttcgccgaaggcgacggcaccctggtcagcctcgaaggccgcgcccagcgcttcttccaggtctatgagccgagctactacgacgcgggcatcctgatccgcgaaggctggcgctggctgcacgccctgcacagcaccctgcagggcaaagccgtggactggacgcaactggatcaggtcaccgcggcctgcgccgccagcaatccgcatttgtccggcatcaaggacgccgcgcctagcgcctcgttccgcatcaaggggctcaagctcgcccgcgagccgcaccgctacagcggccgtaccgccatgcgcgccaatatcagcgtgcacgagccgcgtcagccgcaggatcaggattcggccttcgccttctccatggaaggctacgccggcagcaaggaagatcggcaacagattccgttcgcctggtcgccgggctggaactcaccgcaggcctggaacaagttccaggacgaggtcggtggtcatctgcgtgccggcgaccccggc

SEQ ID NO: 222163 - DNA, 847 bp, Unknown
  Bacterial polypeptide expressing nucleotide sequence isolated from the Sargasso Sea
aggatttccaacaggtttaaaatggtcctttgcacctaaagaagttggatcacggccacattatttagttattaatgctgatgaatcagaaccgggtacttgtaaggatagagatattttaagatttgaacctcataaattaattgaaggttgtttgattgcatcatatgcagttcaagcacatgtttgctatatttatattagaggtgaatatttcgttgatggacaaaaacttcaagctgctattgatgaggcatacgaaaagaaattaattggaaaagatgcatctggaactgggtgggatttagatatctttattcattacggtgctggggcttatatttgtggtgaggaaacagcattattagagagtattgagggaaataaaggtcagccaagattaaaacctcctttccctgctttagtaggactttatggttgcccaacaataattaataatgttgaaactatagctgtagttcctactatacttagaagaggtggaaaatggtttgcatcgttaggaagggaaaaaaatacaggtacaaaaattttctgtatttctggaaacgttaattctccatgcaatgttgaagaggaaatgaatattcctcttaaagaattgatcgaagtacatgctggaggtgtagttggtggatgggataatttacaagcagtaataccgggtgggtcgtcaatgcctcttataccaaaagaaaaatgtgaaactttaacaatggattttgactcattagtggctgaaaaaagtggattaggaactgcaggtgtggttgttataaataaagatcaagatattattaaatgtatggctagaatagctaggttt

SEQ ID NO: 222164 - DNA, 517 bp, Unknown
  Bacterial polypeptide expressing nucleotide sequence isolated from the Sargasso Sea
atgaataataaattagatcaagtaccagaggaatttaaacagttagctaaagattttagtgaaaaaggtttcattacaacttcaatgaataatttaataaactggtcaagatcaggttcattgcattggatgacatttggcctggcatgttgtgcggttgaaatgatgcagacagccatgcctagatatgatcttgaaagatttggtgcagctccaagaggttcaccaagacaatcagatgtaatgatagttgcaggcacattaacaaataaaatggcaccagctcttagaaaagtttatgatcaaatgccagagccaagatatgttatatcaatgggaagttgcgccaatggtggaggctattatcactattcatattctgtagtaagaggttgtgatcgtatagtccctgttgatgtttatgtaccaggctgtccaccctctgctgaagcattgttatatgggataatgcagttgcaaaaaaaaattagaaacaaaggttcttttaataggtaaa

SEQ ID NO: 222165 - DNA, 827 bp, Unknown
  Bacterial polypeptide expressing nucleotide sequence isolated from the Sargasso Sea
gggttatttaagtttgtttactttttttatgcttgtacttgtatcaagtaataatttaatacaaatgttttttggatgggaaggagttgggttagcatcttatctactaatagggttttggcatcataaagatactgcaaataatgcagcaattaaagcttttgttgttaacagaattggagattttggatatgcaataggaatagcaggtatattttttatttttggatctattagtttcgataatatttttgatcaagttgaatcatttaaaggtcatcaaatcgaatttctttctataacttttccaactttagatcttttgtgctttcttttatttattggtgccatgggtaaatctgctcaattaggtttacatacctggctaccagatgcaatggaaggacctacacctgtatcagctttgattcatgctgctacaatggtaactgcaggagtatttttagttgcaagaatgagccctctttatgagtttgcaagttttactaatttatttataacttttataggtgcttctactgctatttttgctgcttctatcgccttaacgcaaaatgatataaaaagagtgattgcctattcaacttgtagtcaattaggatatatgttttttgcagctggagtaggagcttataatgcatcaatatttcatttaacaactcatgctttttttaaagctttattgtttctttctgctggttcagtcattcatgcaatgcatcatgaacaagatatgagaaagatgggtggtctttttaaaaaaataccttttacagcaacaatgatgtggattgggtcacttgcaa

SEQ ID NO: 222166 - DNA, 475 bp, Unknown
  Bacterial polypeptide expressing nucleotide sequence isolated from the Sargasso Sea
cttgcagaggattttggtaaaaatggttttataactacttcattagagaatttagtgaattggtcgagatctggatctttacattggatgacttttggtcttgcttgttgcgctgttgaaatgatgcaaacagcaatgccaagatatgatcttgagagatttggtgctgccccaagaggatcacctagacaatcagatgtaatgattgttgctgggactttaacaaacaaaatggctcctgccttaagaaaggtttatgatcaaatgccggaaccaagatatgtcatatcaatgggaagttgcgcaaatggtggaggctattatcattactcatattctgtggttagaggttgcgatcgtatagtacctgtcgatgtatatgttccaggttgtccaccttcggcagaggcattgttgtatggaataatgcaattacaaaaaaagattagaaacaaaggttctttcaagaggtaaa

SEQ ID NO: 222167 - DNA, 825 bp, Unknown
  Bacterial polypeptide expressing nucleotide sequence isolated from the Sargasso Sea
gataaaatttttaaaaatttatatggtttcgaagactggaagctagaaggtgctaaaaaaagaggtatttggtcaaatactaaagagcttattaaaatgggtagtgaagaaattgttgaggaaattaaaaatagtcaattaagaggaaggggaggagcaggtttccctgcgggactaaagtggtcatttatgccaaaagactctggaaaagatcattacctagttgttaatgcagatgagtcagaaccaggtacatgtaaagatcgggagattatgagaaacgacccacatcttcttttagaaggttgtctagttgcagcctttgcaatgcatgctcatacttgctatatttacataaggggtgaatattattctgaatcttctaatttacaaaaagcaataaatgaagcttacgcgaataatttaattggtaaaaatgcatgtggttcaggttgggattttgatatttatcttcacagaggagcaggagcatatatttgtggcgaagaaactgctttacttgaaagtttagagggtaaaaaaggccaacctcgattaaaacctccatttcccgctggcgcaggtttatatggatgtccaacaacagttacaaatgttgaaacagttgccgtttcaccaactattttaagacgtggttcaaaatggttcgctgatttaggaagtgccaacaatacaggtacaaaaatttttagtatttcaggacacgttaataacccatgcaatgtagaagaggaaatgggcataccattaaaagatctcattgaaaaacatgcaggtggggtaattggtggttgggaaaattta

SEQ ID NO: 222168 - DNA, 502 bp, Unknown
  Bacterial polypeptide expressing nucleotide sequence isolated from the Sargasso Sea
atgggagtagaaataaaagaagataattttggcgaagaacttaattctaaaggttttttagttgctaattttgacaaactattaacttgggcaagaacaggttcattatggccaatgacctttggtttggcatgctgtggagtagaaatgattcatacttatatggctagatacgatttagatcgatatggagttattccacgaggaagtcctagacaatcagatgttatgatcgttgccggaacattaacaaacaagatggcaccagcacttagaaaagtttacgaccaaatgccagaacctagatgggtcatatctatgggttcatgcgcaaatggaggcggatattatcattactcatattcagttgtgagaggttgcgatagaattgttccagtagatatatatgtgccaggttgtccccctacagctgaggccctagtatacggtatcttgcaattacaaaaaaaaattaaaagaaaaaataaatttgtaagataat

SEQ ID NO: 222169 - DNA, 839 bp, Unknown
  Bacterial polypeptide expressing nucleotide sequence isolated from the Sargasso Sea
ctcaaagagagaggtgaattgggttaatacaaaagaaattactaacaaaggaagagactggataattaacgaaattaaagaatctcagttaagaggtcgaggtggggcaggatttcctacaggtttaaaatggtcatttgcgccaaaagaagttggatctagaccacactatttagttattaacggtgatgaatcagaaccaggaacttgcaaagatagagatattctaagatttgagcctcataagttaattgaaggttgtttaatagcatcttatgcagttcaagcacatgtttgttacatttatataagaggcgaatattttattgatggccaaaaacttcaggttgcaatagatgaagcttatgagaaaaaactgttaggtaaaaatgcagcaggtactggttgggatttagatatttatattcattatggtgctggagcatatatttgtggagaggaaacagctttattagaaagtatcgaaggtaaaaaaggacaaccaagattaaaaccaccattccctgctttaattggtctttatggatgtccaacaattattaataacgtagaaactatagctgtagtcccaacaattcttagaagaggtggaaaatggtttgcttctcttggaagagaaaaaaatacagggacaaaaatattttgtatatctggaaatgtaaatacaccatgcaatgttgaggaagaaatgaacattcctttaaaagaattaattgaggttcacgcaggtggtgttattggaggttgggataatctacaagcagtaattccaggtggttcatcaatgcctctaattcctaaagagaaatgtgaaacat

SEQ ID NO: 222170 - DNA, 670 bp, Unknown
  Bacterial polypeptide expressing nucleotide sequence isolated from the Sargasso Sea
atgcttaaggaaaaagataaaatttttaaaaatttatacggatttaaagactggaaattagaaggtgctaaaaaaagaggtatttggtcaaataataaagaacttattaaaatgggtagtgaaaaaattgttgaggaaattaaaaatagtcaattaagaggaaggggaggggcaggtttccctgcgggactaaagtggtcatttatgccaaaagattttggaaaagatcattatttagttgttaatgcagatgagtcagagccaggcacatgtaaagatcgagagattatgagaaacgacccacatcttcttttggaaggttgtttagttgctgcttttgcaatgcatgcacatacttgctatatttacataagaggtgaatattattctgaatcttataatttacaaaaagcaatagacgaagcttatgcaaataatttaattggtaaaaatgcatgtggtacagggtgggattttgatatttatcttcacagaggagcaggagcatatatttgtggtgaagaaactgctttacttgaaagtttagagggtaaaaaaggtcagccccgattaaaacctccatttcctgctggcgcaggtttatacggatgtcctacaacagttacaaatgttgaaacaattgccgtatcgccaagtattttaagacgtg

SEQ ID NO: 222171 - DNA, 517 bp, Unknown
  Bacterial polypeptide expressing nucleotide sequence isolated from the Sargasso Sea
atgaataataagttagataaaattcctgatgaatttaaacagttagctaaagattttagtgaaaatggttttatcacaacctctttagataatctggtaaactggtcaagagctggatcattacactggatgacgttcggtcttgcatgctgtgccgttgaaatgatgcagacagctatgcctagatatgatcttgaaagatttggagctgcacccagagggtcaccaagacaatcagacgttatgattgtagccggaacattaaccaacaaaatggctcctgcattaagaaaagtttatgatcaaatgccagagccaagatatgttatttcaatgggaagctgtgctaatggaggtggttattaccattattcgtattcagttgttagagggtgtgatcgtatagttccagtagacatatatgtaccaggctgtcctccttcagctgaagcattattatatggaataatgcaattacaaaaaaaaattagaaataaaggatcaataaatagataat

SEQ ID NO: 222172 - DNA, 517 bp, Unknown
  Bacterial polypeptide expressing nucleotide sequence isolated from the Sargasso Sea
aatgaataacaaaatagatcaagtaccagaagaatttaaacagcttgctgaagattttagtaagaacggctttattacaacatcattagataatttaataaattggtctagatcaggatcgctgcattggatgacttttggacttgcttgttgtgcagttgaaatgatgcaaactgctatgccaagatatgatttagaaagatttggtgcagctccaagaggatcaccaaggcaatctgatgtaatgatagtagcaggaacattaacaaataaaatggctccagctttaagaaaagtttacgaccaaatgcctgaaccaagatatgttatatcaatgggcagctgtgcaaatggaggtggatattatcattactcttattcagtagttagaggttgtgatagaattgttcctgtcgatatatatgttcctggttgtccaccatctgctgaagcgttgttatacggaatacttcaacttcaaaaaaaaattagaaaaaaaggatcttttttaagatag

SEQ ID NO: 222173 - DNA, 475 bp, Unknown
  Bacterial polypeptide expressing nucleotide sequence isolated from the Sargasso Sea
ttggcaaaagattttgctgaaaagggttttataacaacatcttctgaaaatttgattaagtgggctagaacaggctctttacattggatgacatttggactcgcttgttgtgctgttgaaatgatgcagacttcaatgccaagatatgatcttgaaagatttggagcagctcctagagcatcgccaagacaatctgatgtgatgattgtcgctggaactttaacaaataaaatggccccagcacttagaaaagtttatgatcagatgccagaacccaggtatgttgtatcgatgggaagctgcgcaaatgggggaggttattatcactactcttattcagttgtaagaggctgtgataaaatagttcccgtagacatctatattcctggatgccctccatcagcagaggctcttctctatgggattttgcagcttcaaaagaaaataagaagagaaggaacattgcaaagataat

SEQ ID NO: 222174 - DNA, 732 bp, Unknown
  Bacterial polypeptide expressing nucleotide sequence isolated from the Sargasso Sea
aatgcttaaagacgaagatagaatatttcaaaatttgtacaatgacagtggtgctgatattgagtctgctaaattaagaaatgattggaatggaacaaaagaaattttagaaaaaggaagagagtggataatcaatgaagttaaattatcagagcttagaggacgtggtggagctggttttccaactggtctaaaatggtcatttgcacctaaagaagtagggtctagaccacattacctagttatcaatgctgatgagtcagaacctggaacatgtaaagatagagatatattaagatttgaacctcacaaattaatagaaggatgtttaattgcttcttacgcagttaacgcccataaatgttatatttatattagaggtgaatattttaatgaaggtcgaaaacttcaaactgcaatcgatgaggcttacaaaaataatttaattggtaaaaatgctttaaattcaggatgggatctagatatttatattcattatggtgcaggtgcctatatttgtggtgaagaaactgcactacttgagagtttggaaggaaaaaagggtcaaccaagattaaagccaccatttcctgcattaattggattatatggatgccctactatcataaataatgttgaaactgttgcagctgttcctacaattctaagaagaggtgcaaaatggtttagttcacttggaagagctaaaaacaccggaacaaaaatttattg

SEQ ID NO: 222175 - DNA, 682 bp, Unknown
  Bacterial polypeptide expressing nucleotide sequence isolated from the Sargasso Sea
tattttactgaaggacaaaaacttcaagctgcaattgatgaggcttataataaaaatcttcttggaaaaaatgcagctggaactggatgggatttagatatttatattcattatggagcaggagcatatatttgtggagaggagacagcactgcttgagagtatagaaggtaaaaagggacaaccaagattaaaacctccgtttcctgctttaataggactttatgggtgtccaacaataattaataatgttgaaactattgcggtcgttccaacaattcttaggaaaggcagtaaatggttttcttctttaggaagagaaaaaaatacaggcacaaagattttttgcatatctggaaatgtaaacaatccatgtaatgttgaagaagaaatgaatataccattaaaagaattaatagaaattcatgctgggggtgtaattggcggctgggataacctgcaagcagtaattcctggtggatcatcaatgcctttaatcccaaaagaaaaatgtgaaactttaactatggatttcgactcgttaatggcagagaaaagtggattaggaactgctggtgtagtcgtaattaataaggatcaagatattattaaatgtatggctagaattgcaagattttataaacatgaaagttgtggtcaatgtactccttgtagagaaggaa

SEQ ID NO: 222176 - DNA, 772 bp, Unknown
  Bacterial polypeptide expressing nucleotide sequence isolated from the Sargasso Sea
atatttgtggagaagaactgctttattggaaagtcttgagggtaaaaaaggtcaacctagattaaaacctccatttcctgcaggtgtaggattgtatggatgtccttctactgtttcaaatgtagaaactattgctgtagcaccaaccattttaagaagaggggcaaaatggttttctagtctaggaaatccaaagaatactggaacaaaaatttttagtatttcagggcatgttaataatccttgtaacgtagaagaggaaatgggaatttctttaaaagaattaattgaaacccatgcgggaggagtaataggtggctgggataatttattagctgtaataccaggtggcgctagtgttcctttgatacctaaatctatttgcgatactataaaaatggattttgataatctttctcgagttaaaagtggcttaggtactgccgcagtaattgttatgaacaaatcaacagatattgttgaagcaataacaagactttcacatttttatcaacatgaaagttgtggtcagtgcactccttgtagagaaggaacagggtggatgtatagaataatgaaaaaaatgattgaaggaaatattcaatatgaagatatagataagttattaaatgtaacaaaacaagttgaaggacatactatctgtgcactaggtgatgctgctgcttggcctattcaaggtcttatgaggcattttaaacccgaggttgaaaaaagaattaaagattattctaaaaagaaagcagttgcgtaa

SEQ ID NO: 222177 - DNA, 853 bp, Unknown
  Bacterial polypeptide expressing nucleotide sequence isolated from the Sargasso Sea
ttctttatgttgatgcttgtttccagcaacaatttattacaaatgttctttggatgggaaggtgttggtttagcttcttatttattaataggattttggtatcataagtcttcagctaacagtgctgctatcaaagcctttcttgtaaacagagtgggtgactttggttatgctctaggtattgcaggagttttttttatttttggttcaatagaatttgatgtaatttttaataatgctaagaattttaaagatcacactattccttttttaggtttaagtttgagtaccatagatcttctgtgttttttgttatttattggcgccatgggaaaatccgctcaattaggcttacatacttggctacctgatgctatggaagggcctactccagtatctgctcttattcatgcagcaacaatggtaaccgctggagtttttttagttgcaagaatgagtcctttatttgagtatgcgataatcacaaatttatttattacatttattggagccgcaactgctgtttttgctgcaactattgctcttacacaaaatgatataaaaagagtaattgcttattcaacatgcagccaacttggttatatgttttttgctgctggattaggggcttacaatgcttctatttttcatttaatgacccatggtttttttaaagctttattatttttatctgctggctctgtaatacatgcaatgcaccatgaacaagatatgcgtaaaatgggtggattatttaaaaaaattcctttcacaggtactatgatgtggattggttctttggcaataataggtttcccatattttttctgggttattatcaaaggaaaaagta

SEQ ID NO: 222178 - DNA, 634 bp, Unknown
  Bacterial polypeptide expressing nucleotide sequence isolated from the Sargasso Sea
ttgggctgttacatttggaaccttgggcttatttggttttgtttcaatgatggtttttctagctattcttacaattggtttcatatacgagtggaaaaaaggagcattggagtggcaataaatacaaatattgaagagacaagtccagaactagaaagactaaagaagttgtatgctgataaggggtttgttgtcaccagtatcaataaccttattaactgggctcgaacaggctctctgcattggatgacatttggattagcttgttgtgctgtcgaaatgatgcatgttggaacaccgcgctacgacgttgagcgttttggtgcagctccaagagcatcaccaagacatgcagacgttcttatagtggcaggtactttgacaaataaaatggcagcggcattaagaaaagcttacgatcagatgccagagcctcgatatgtaatctctatgggaagttgtgcgaatggtggagggtattatcactactcatattctgttgttagaggttgcgatcgaataatacctgttgatgtttacgtgccagggtgcccacccacagcagaaggcctgctttatggattattgcagttacagaaaaaaataagaagagaaggcaacatcaaaagataat

SEQ ID NO: 222179 - DNA, 832 bp, Unknown
  Bacterial polypeptide expressing nucleotide sequence isolated from the Sargasso Sea
acgcggcgggatatttgggcaaaacgcgtgcggcaccgggctggattttgatgtgaacattcactacggcgccggcgcgtacatttgcggcgaagagacggcgttgattgaatcgttggagggtaagcaagggaaacctcgattgaagcctccgtttcccgccaacgtcggcttgtacggatgtccgacgacggtgaccaacgtcgaaaccgtcgccgtggcgcccaccattttgcgacgcggacccgagtggttcgcctcgttcggtcgcaagaataacgccggcaccaagttgttttgcatctcgggacacgtcaatcaaccgtgcaccgtggaggaggaaatgtccattcccttgcgcgagctcatcgaaaagcacgcggggggagttcgaggcggatgggacaaccttctcgccgtcattccgggcggctcctccgtgcccatgctcaacaaggagacgtgcgacgacgtcttgatggatttcgacgcgttgaaggaggcggggagcggcttgggcaccgccgccgtcatcgtcatggataaatccaccgacgtcgtcgacgccatcgctcgtttggcgtacttttacaagcacgaatcgtgcgggcagtgtacgccgtgcagagagggcacgagctggatgtacaacatcatgcagcgattggtgaaaggcgacgcgcgcgtcgaggaggtggagatgttacaacagattacgaaacagattgaggggcacaccatttgcgtacgtcactcaccgcgtcgcgggagtttttttttgttttttttttcgcaatttcgattcgcgcgacgacgacgagcgcgtgactga

SEQ ID NO: 222180 - DNA, 391 bp, Unknown
  Bacterial polypeptide expressing nucleotide sequence isolated from the Sargasso Sea
aatggatctacaggaaaaaaaaattccggaagaatttaaacaattagcaaaagactttagcgataatggttttatcacaacatcttttgataatttagttaattgggctagagctggatctttacattggatgacttttggtcttgcatgttgtgctgtagaaatgatgcaaacatcaatgccaagatatgatctagaaagatttggtgctgctccaagaggttccccaagacaatcagacgttatgatagttgctggtactttaactaataaaatggctccagctttaagaaaagtttatgatcaaatgccagaaccaagatatgttatatcaatgggcagttgcgcaaatggcggtggttattatcactattcgtattctgtggtgaga

SEQ ID NO: 222181 - DNA, 848 bp, Unknown
  Bacterial polypeptide expressing nucleotide sequence isolated from the Sargasso Sea
tcaaaaaaaatttttaggtaaaaatgcttgtgaatcggggtgggatttagatatttatgtccactatggtgctggcgcatatatttgtggcgaagagactgctctgttagaaagtttagaaggaaaaaaaggtttaccaagacttaaacctccttttcctgcattggtaggactttatggttgcccaactattgttaacaatgttgaaacaattgctgtagttccaacaattcttaaaaaaggtgcaaaatggtttacatccttaggaaagcccaaaaatactggaacaaaaattttctgtatttctggcgatgttaacaatccctgcaatgttgaagaggaaatgggaatacctttaaaagatttaatagaaaagcatgcgggtggtgttattggaggatggaaaaatcttcaagcagtaataccgggaggatcatcaatgccactcttacctaaaagcatctgtgaaagcattacaatggattttgattcattaattaaagcaaagagcggattaggaaccgctggtatagttgtaattaataaagatagagacattattaaatgtatagcgagaatagcaagattttataaacatgagagttgtggtcaatgcactccttgtagagaaggctgtggttggatgtggagaatgttagaaagaatggtagatggagatgccacttataaagaaatagatcttttgcatgatgttactaaacaaatagaaggacatactatatgcgcattcggggaaggtgctgcttggccagtacagggcttacttcgtcattttaggaaagaaatagagaaaagaaatcatgacgaacctttaattaagaaaaaaa

SEQ ID NO: 222182 - DNA, 649 bp, Unknown
  Bacterial polypeptide expressing nucleotide sequence isolated from the Sargasso Sea
atgctgaaagacgaagatcgcatttttaccaatctctacggctggatggattccggcctgaagggcgcaaagacccgcggggactgggacggcacggcaaagctgatcaagctgggccatgacgagatcgtcgagcggatgaaggcgtccggcctccgcggccggggcggcgcgggtttcccgaccggcctgaaatggtccttcatgcccaaggaagtcggcgcccgcccgcattatctggtggtcaatgccgatgagtccgaacccggcacatgcaaggatcgagacatcatccggaacgagccgcacaagctgttggaaggctgtgttctcgccggtttcgcgatgcgtgcgcatgccgcctatatctatatccgtggcgagttcgtgaacgaggcgcgccgccttcaggccgccatcgacgaggcctatgccgctggtcttctcggcgacaatgccgccaattcaggctggaagttcgacatctacctgcatcgcggggctggcgcctatatctgcggtgaggaaaccgcgctgatcgaatcgctggaaggcaagaagggccagccgcgcctgaagccgccgttcccggcgggtgccggcctctatggctgcccgaccaccgtcaacaatgtcgaatccattgccg

SEQ ID NO: 222183 - DNA, 697 bp, Unknown
  Bacterial polypeptide expressing nucleotide sequence isolated from the Sargasso Sea
aatgcttgaagataaagatagaatttttcaaaatttatacaatgattttggtgctgatttaaaatctgcaaaacaaaggggtgactggaaggatacaaaagaaatttgcggcaaaggaagagagtggataattaatgaaattaaagcatcagaacttagaggaagaggtggtgctggtttccctacaggattaaaatggtcttttgctccaaaagaagttggatcaagaccacattatttagtaattaatgcagatgagtctgaacctggcacatgcaaagatagagatattctaagatttgaacctcataaattaatagaaggctgcttaattgcgtcttacgcagttaatgcacacaagtgctatatttatataagaggagaatattttaatgaaggacaaaagcttcaaacagctattgatgaagcttacaaggacggtctcttaggaaaaaattctgcagggacagattgggaattagatatatatattcattatggtgctggagcttatatctgtggcgaggaaactgctttgcttgagagtattgaaggaaaaaaaggtcaaccaagattgaaacctccatttccagctttaataggtctttatggttgcccgacaataataaacaatgttgaaacaatttcagtggtaccaactatacttagaagaagtggaagatggttttcatcactc

SEQ ID NO: 222184 - DNA, 517 bp, Unknown
  Bacterial polypeptide expressing nucleotide sequence isolated from the Sargasso Sea
aatgaataataaaatagatcaagttccagaggaatttaaacaacttgcagaagattttagtaagaatggttttataactacatcacttgataatttaattaactggtcaagatcaggatcacttcattggatgacttttggtttagcttgttgtgccgttgaaatgatgcaaacagctatgccgagatatgatttagaaagatttggagccgctccaagaggatcaccaagacaatcagacgttatgatagttgcaggaacattaacaaataaaatggcaccagctttaagaaaagtttatgatcaaatgcctgaacctcgttatgtaatttctatgggcagttgtgcaaatggaggaggatattaccactattcatattcagttgttagagggtgcgatcgtattgttccagtagatgtttatgtaccaggatgtcctccctctgcagagtcattgttatatggaatactacaattacaaaaaaaaattagaaaaaaaggatcttttattagatag

SEQ ID NO: 222185 - DNA, 631 bp, Unknown
  Bacterial polypeptide expressing nucleotide sequence isolated from the Sargasso Sea
aatgcttgaagacaaagatagaatttttaaaaatctttataacgattttggagctgatgttttgtcatctcaaaaaagaggtgattggttaaatgttaaagaaatttgttcaaagggcagggaatggattattaatgaaattaaatcttcagaactaagaggaaggggaggtgccggttttcccacaggtttaaaatggtcatttgctcctaaagaagttggttcaagacctcattacttagttataaatgccgacgaatccgaacctggcacgtgtaaagatagagatatattaagattcgaaccacataaacttatcgaaggatgtttaattgcttcttacgctattaatgcacacaaatgttatatttatataagaggtgagtattttaatgaaggagaaaaacttcaaaaagcaattgatgaagcatatgaaaagaaattaattggtaaaaatgcgtctgatacaggatgggatttagatatttttattcattatggagctggcgcttatatatgcggtgaagaaacagctctattagaaagtcttgaaggaaaaaaaggactgccaaggttaaaaccaccatttcctgcactaataggattgtatggatgtccaacttataattaa

SEQ ID NO: 222186 - DNA, 868 bp, Unknown
  Bacterial polypeptide expressing nucleotide sequence isolated from the Sargasso Sea
ggcgatttttatcggaaaattgaagcccttcagcgggccgtcgatgaagcctatgatgccggcttgatcggcaaaaatgcttgtgggtccgggtacgatttttttctctacatccatcgtgggtcaggggcctacgtttgcggagaggaaaccgcgctgatcgagagcctcgaagggaaaaagggtcagccaagattaaagcccccgttcccggcgaattctggactttatggctgcccaactactgtgaataacgttgaatccatcgctgtcgtgccaaccatcttgcggcgcggcaaagattggtttgccaaccttggacgggcgaataatacgggcacgaagctttttaacatctccggccatgtggagcagccctgcacaatcgaagaagaaatgagtatccctctgaaggacctgatcgaaaaacatgccggcggtgtgcgcggcgggtgggataatttgctggcaatcattccgggcggtgcttcggttccgtgtcttccaaagggaatttgtgacacagtgctgatggattttgactcactgcgggagcagcagtccggacttggtacagcagccattatggtgatggatcaatcaacggatatagttgccgcggtcgcgcgtctttcctccttttacaagcatgaaagttgtggccagtgcacgccgtgtcgggaagggacgggctggatgtcccgcatgatgtctcgaatggtgacaggcaacgccacagttgaggaaattgatttgctcgaacaggtgacgcgccaggttgaaggccacaccatttgtgccctcggggatgctgcagcctggccgatccagggtgtgatccgtcatttccgccctgaaatggaagccc

SEQ ID NO: 222187 - DNA, 534 bp, Unknown
  Bacterial polypeptide expressing nucleotide sequence isolated from the Sargasso Sea
aatgatagatatcgaaaaggaaaaaaaaatacctgatgaatttaaaaaacttgctaaagattttagtgagaatggatttataactacatcatttgataatctagttaactgggctagaacaggctcactgcattggatgacctttggcttagcatgttgtgctgttgaaatgatgcatacttcaatgccaagatatgatttagaaagattcggagcagccccaagagggtcaccaagacaatcagatgtaatgattgttgctggaactcttacaaataaaatggctccagcattaagaaaagtttatgaccagatgccagaacctagatatgtaatatcaatgggaagttgtgcaaatggaggaggatactatcactattcttattctgtagttagaggatgtgatagaatagtaccagttgatgtttatgttccaggttgtccaccatcggccgaagcacttttgtatggaatattacaactacaaaaaaaaaataagaaacaaaggctctttacaaaggtaaatttatggaa

SEQ ID NO: 222188 - DNA, 739 bp, Unknown
  Bacterial polypeptide expressing nucleotide sequence isolated from the Sargasso Sea
tttggttgggaaggtgttggattagcttcttatcttttgattggattttggcatcataaaaattcagcaaacaaagctgcaataaaagcctttatagttaatagggtgggtgattttggatttctcctaggcattgctggtatttattttatttttgattcagttaattttgatacaatttttgctaatgtaaaaaattttgaaaatcataaaatttattttgctggcatctattttgatacaattgatcttttatgttttcttttatttattggtgcgatgggaaaatctgcgcaattaggtcttcatacttggcttcctgatgcaatggaagggcctacacctgtttctgcattaattcatgctgccacaatggttacagcaggtgtatttatgattgcaagaatgagcccaatgtttgaatttgctataaatacaaatattttcataacttttattggtgcttcaacagcaatttttgctgcaagtatagcgcttacacaaaatgacataaaacgagtgatagcttattctacgtgtagtcaattgggttatatgttttttgctgcaggtgttggagcttataatgcttctatttttcatttgatgactcatggtttttttaaagcactattatttttatctgcaggttcagttattcatgcgatgcatcatgaacaggatatgagaaaaatgggaggtcttcatagcaaaattccttttactgctgttatgaagt

SEQ ID NO: 222189 - DNA, 702 bp, Unknown
  Bacterial polypeptide expressing nucleotide sequence isolated from the Sargasso Sea
aatgcttaaagacgaagatagaatttttaaaaatttgtataatgatctaggctcagatattgagtctgccattaaaagagatgattggaaaaatacaaaagaaatatgtgaaaaaggtagagactggataataaatgaaatcaaaacatctgaattaagaggacgaggtggtgccggttttcctaccggattaaaatggtcatttgctcctaaagaagttggatcaagacctcattatttagttataaatgcagacgagtctgaacctggaacttgtaaagatcgtgatattttaagatttgaaccccataagttgatagaaggttgtttattaagttcttatgctgttaatgctcacgtttgttatatttatattagaggcgagtattataatgaaggtagaaaactacaagaagcaattgatgaagcttatgaaaaaggttttataggtattaatgcttctggtactggttgggatttagatatctacattcattatggtgcaggcgcttatatatgtggagaagaaactgctctattggaaagtttggaaggtaaaaaaggtcaacctagattaaaacctccttttcctgctttaataggtttatatggatgtccaacaataataaataatgttgaaaccatctctgttgtaccaacaatattaaggagaggcggtaaatggttttcatctttaggtag

SEQ ID NO: 222190 - DNA, 825 bp, Unknown
  Bacterial polypeptide expressing nucleotide sequence isolated from the Sargasso Sea
acttttaaagatagaattttactttgagagagaccctcatcaattaattgaaggaataattgttacttcttttgcttccaatatttcaaaagcctttatttatattagaggtgagtatgcaaaacctgcacgaagagtacaagatgctgttgagcaggcttatgaaaaaggttatctaggaaaaaatatctttgattcagggaaagacttagatgttttagttcacctcggggctggtgcctacatctgtggtgaggaaacagctttattaaattcactagaaggtagaagaggagagccaagattaaaacctccttatttcccagcagtaaagggtctttacaacaaaccaaccttggtaaataatgttgaaacaatatcttctgttccttggattataaacaattctggaaaagactacgcaaagcttggtgttgaaggttcaacaggtacaagaatatttagcttgtctggacatgtaaataatcctggaaactttgaaattgaaatgggatgttcgtttggtgaatttattgatacttttggaaatggtgtaagagaaaacaaagcggttaaagcttttattccgggtggagcttcagctccttggtttactggagaacagttagatataaaaatgacaattgatgacgtagccaatgctggatcgatgctaggttctggtgcagtagtggttatggatgaagatacgaatcttgttttagctgcaaaaagtattgttagtttttttgcccatgaatcttgcggtcaatgtacaccatgtagagaaggaactacttggttagaaatgatattagaaagaat

SEQ ID NO: 222191 - DNA, 882 bp, Unknown
  Bacterial polypeptide expressing nucleotide sequence isolated from the Sargasso Sea
tatgaagcacgatatatcatttaatagattttttatttacaccaattttttcacattctctatgctgctgatagtttttgctaataactttttacagcttttcatcggttgggagctagtaggtttatcatcatacctactaataggtttttggataaagaaagaatctgctattaaagcgaattataaagcttttctagttaacagagtcggtgatattggattattgctaggcttatgtctaatacttctctcatacagtacaacagattacaatcaaatatttcaaatcaaaaattcaattaacatggataatgttaatatattcggatttacatttaatgcattgagcgtaatctgcttacttttatttattggagcaatggcaaaatctgcacaagtgcctttacaattttggttacctgactcaatggaagggccaactccaatctcagcgttaattcatgcagcaactatggtaactgctggtatttacatggtcgcccgtctctcgccattatatgaacttactgacggagtcttaatttttatactttatgttggatcaattacagcgtttttcctaggattagttgctctagttcaaaatgatataaaaagaataatagcctactctaccatatctcaattagggtacatgaccgcggctttaggtgcatcgttatattcactagcgatgtttcacttaattacacacgcttttttcaaagctcttctatttttatgtgcagggtcaatcatcattaaatgtcaccatgagcaagatatcagaaaaatagggggcctgagaaaatatatgccaataacatatttagcttttatgtatgcatctctgtctttaataggattccccataacatc

SEQ ID NO: 222192 - DNA, 714 bp, Unknown
  Bacterial polypeptide expressing nucleotide sequence isolated from the Sargasso Sea
ggaggaaacggctttattagaaagtttagaaggcaagaagggaatgcctcggatgaagccaccatttccagctggtgctggtttgtatggctgccctacgaccgtaaataatgttgaatctatagctgttgttccaacaattcttcgccgtggggcagattggttttcgaaattcggtcgtgagaataatgctggaacaaaattattcgctatatctggccatgtaaaccatccatgcgtcgttgaggaagagatgtctatcccgtttgaagaacttattgaaaggcattgtggtggtatccgcggtggatggaaaaacttaaaggctgtaattccgggaggcgcttcagttccatgtgttcggggtggagaaatgcgagaagcactcatggattttgattatcttaggggagagttgggctctggcttgggaactgcagccgttattgttatggaccagagtacagatgtgatcaaagctatttggcgtctttccaaattttacaagcacgaaagctgcggacagtgcacaccttgcagagagggtactggatggatgatgcgggttatggaacggttagtaaatggcgatgcggaccctagtgagattgatatgcttctggacgtgaccaaacaggttgaaggtcacacaatttgtgcacttggtgatgcagcagcatggcctatacagggacttataaaaaattttcgaga

SEQ ID NO: 222193 - DNA, 943 bp, Unknown
  Bacterial polypeptide expressing nucleotide sequence isolated from the Sargasso Sea
attataaatgaaattaaaatatctgagctaagaggtaggggtggcgccggttttcctactgctttaaaatggtcttttgcacctaaagaaattggatccagaccccactatttggtaattaatgcagatgagtcagaaccaggcacttgtaaagatagagacattttaagatttgaaccacaaaaattaatagaaggctgtttaatagctggctactctgtaaatgctcatatttgttacatttatataagaggagaatattttaatgaaggtaaaagactacaagaagctattgatcaagcgtatgaaaaaaattttttaggtaaaaatgcttgtggcactggttgggattttgatatttacattcattttggtgcaggtgcttacatttgcggggaagaaactgctttattagaaagcttggaaggtaacaaaggtcaacctagactaaaaccgccatttccagctttagtaggcctctacggatgtcccacaatagttaataatgtagaaacaatagcagtggtgccaactatattaagaaaaggtgcaaaatggtttacttcaattggtagacctaaaaatactggaactaaaattttttgtatatctggcaatgttaattatccctgtaatgttgaagaagaaatgggaataggattaaaagaattaatcgaaaaatatgcaggaggagtagtcggaggatgggataatttacaagcagtaataccaggaggctcttcaatgcctctgattccaaaaaaaatttgtgataccattaaaatggattttgactctttaataaatgtaaagagcggattaggaactgctgggatagttgttataaataaagatcaggatatcattaagtgtatagcgagaatagctaggttttataaacatgaaagctgtggtcaatgcaccccatgtagagaaggctcag

SEQ ID NO: 222194 - DNA, 379 bp, Unknown
  Bacterial polypeptide expressing nucleotide sequence isolated from the Sargasso Sea
atggaaaaaaggtgcgttggattgggaataaatatgatgaattttaaaaacaaacaaaaagaaatacccgaagaatttaaaaaacttgcaaaagattttagcgacaagggttttataacaacatcattagacaacttaataaactggtctagaactggatcattacactggatgacattcggattagcatgttgtgcagttgaaatgatgcaaacatcaatgccaagatatgatttagagagatttggagcagcaccaagagcttcaccaagacaatctgatgttatgattgtagcaggtacattaacaaataaaatggcaccagcattaagaaaagtatacgatcaaatgccagaaccaaggtatgtaatttcaatgg

SEQ ID NO: 222195 - DNA, 767 bp, Unknown
  Bacterial polypeptide expressing nucleotide sequence isolated from the Sargasso Sea
taaaaatgcttcaggaacaggttgggatttcgatatttatattcattttggtgcaggagcatatatctgtggtgaagaaactgcacttttggaaagtttggagggtaaaaagggacaaccaaggctaaaacctccttttccagccctagtcggtctttacggttgcccaactattattaacaatgttgaaacagtagctgtagttcctacgatattgagaagaggaggaaaatggtttgcttctttaggtaaaccaaaaaatactggaactaaaatattttgtatatctggtaatgtaaataagccttgtaatgtagaagaggaaatgggcgtacctttaaaaactcttatagaaagtcatgctggcggcgtgataggtgggtgggaaaatttaaaagctgtaatacctggaggatcttcaatgcctttacttccaaaagaaatttgcgaaacaataactatggattttgatagtctggtaagtcataagagtggacttggtacagctggaatagtagtgattaacaaagatcaggacatcattaaatgtatggcacgaattgcgagattttataaacatgaaagctgtggtcagtgcactccttgtagagagggatctggttggatgtggaggatgttagaaagaatggctaaaggagaagcatctagagatgaagtagacatgctaatggatgtgactaaacagattgaaggacatactatatgtgcattcggtgaaggttcttcatggccagttcaaggactaa

SEQ ID NO: 222196 - DNA, 976 bp, Unknown
  Bacterial polypeptide expressing nucleotide sequence isolated from the Sargasso Sea
agatatattaagatttgaacctcacaaattaattgaaggttgtctaatatcagctttcgctgtcaatgctcatgtttgttacatatatataagaggagaatattttaatgaaggtcataaacttcaaaaagcaattgatgaagcctatgaagaaggtttaattggaaaaaattcctctggcacagattggaatctagatatttatatccactatggtgcaggtgcttatatttgcggagaagaaactgctttacttgaaagtttagaaggtaaaaagggacagccaagattaaaacctccgtttccagcattaattggattgtatggatgtccaactattattaataatgttgaaacgattgctgtagtaccaactatacttagaagaggaggtaaatggttttcatcgctaggacgagcaaaaaatacaggaacaaaaatttattgtatatctggaaatgttaataatccatgtaatgttgaagaggagatgggcatacccttgaaagatctaatagaaaaacatgcgggtggtgttgttggaggatgggataatttaaaagctgcaataccaggaggatcttcgatgcctttactcccaaaaaaaatatgtgataccatcaaaatggattttgatgcttgtgttgagaacaagacaggtcttggcactgcaggaattattgtaataaataatgatcaagacataattaaatgtatggcaagaattgctagattttataaacatgaaagctgcggtcaatgtactccatgtagagaaggatctggttggatgtggagaatgctagaaagaatggctaagggagatgcaactagggacgaagttgatatgttgatggatgttacaaaacaaatagaaggtcatacaatttgtgcatttggagaaggttcggcatggcctgttcaggggctgatcaagcattttaaagaagaaataattgaaagaaataaattttga

SEQ ID NO: 222197 - DNA, 991 bp, Unknown
  Bacterial polypeptide expressing nucleotide sequence isolated from the Sargasso Sea
agatttgagcctcaaaaattaatagaaggatgcttaattgcatcttatgctataaacgcaaaagtttgttatgtttatataagaggtgagtatataaacgagggtaaaagacttcaagaagccatagacgaagcttattcaaaaaatttaattggtaaaaacgcatgtaactctgggtgggatttagatatttatattcactatggcgcaggagcatatatctgtggcgaagaaacagcacttctggaaagtttagagggaaataaaggtcaaccaagattaaaacctccatttcctgctttggttggactttatggttgtccaacaattgtaaataatgttgaaacaattgctgtggttccaacgatattaagacgaggcgctaaatggtttgcatctatgggaagaccaaaaaatacaggaactaaaatattttgtatttccggaaatgtaaatgcaccttgcaatgttgaagaagaaatggggataccattaaaagaactaatagaaaaacatgctgatggagttgtaggcggatggaaaaatcttcaagctgtaatcccgggtggttcttcaatgccgatggttccgaaagatatttgtgaaacattaagaatggattttgactctttggttgaagtaaaaagtggattaggtactgctggagtagtagtcattaataaagatgaggacatcattaaatgtatggctagaattgcgagattttataaacatgaaagttgtggtcaatgtacgccttgcagagaaggtgcgggatggatgtggcgtattttagagagaacagcaaaaggtgaggcaacgcataaagatattgatttattatctgatgttacaaaacaaattgaggggcatactatatgcgcatttggagaaggttctgcttggcctgttcaaggacttttaagacattttagaaaagaaattgataaaagatgtttttctgaacctttgattaaaaaaaagaaaaata

SEQ ID NO: 222198 - DNA, 523 bp, Unknown
  Bacterial polypeptide expressing nucleotide sequence isolated from the Sargasso Sea
atgaatctagatgaaaaacaaaaaaaaattccagatgagtttaaaaaactagcagaagattttagtaaaaacggttttataacaacaagttttgacaatttagtaaattgggcaagaacaggatctttgcattggatgacttttggtcttgcctgttgtgctgtagaaatgatgcaaacttcaatgccaagatatgatcttgaaagatttggcgctgctccacgtgcatcccctagacaatctgatgtaatgatagtagctggaacactaactaataaaatggcaccagctcttagaaaagtttatgaccaaatgccagaacccagatacgttatatcaatgggcagttgtgcaaatggcggaggttattatcattattcttattctgtagttagaggatgtgatcgaattgtacctgtagatatttatgttccaggatgtccaccatctgctgaagcactattatatgggatcttgcagctgcaaaaaaagattagaaatcgtggatctctagaaagataac

SEQ ID NO: 222199 - DNA, 384 bp, Unknown
  Bacterial polypeptide expressing nucleotide sequence isolated from the Sargasso Sea
acttttggttagcttgttgcgcagtggaaatgatgcaaacatctatgcctagatatgatcttgaaagatttggtgcagcaccaagagcttcaccaagacagtctgacgttatgattgttgcaggaacattaacaaacaaaatggcagcgccacttagaaaagtttatgatcaaatgccagaaccaagatatgtaatatcaatgggtagctgtgctaatggcggagggtattatcattattcttattctgttgtaagaggttgcgatagaattgtacctgtagatatctatgttccaggatgccctccttcagcagaggcattattgtatggagtgcttcagcttcagaaaaaaataagaagagagggaaatcaaaatagataat

SEQ ID NO: 222200 - DNA, 817 bp, Unknown
  Bacterial polypeptide expressing nucleotide sequence isolated from the Sargasso Sea
ggaatatctactgtgctctcattattggtatataagcaccatattatcgatggtgctgcagattataatcaatcaatttatgtttggctgacaagtggtggtattgattttcaaatcggttttttgattgacaaactatcagctacgatgatggtcgtcgtaagttttgtatcatggatgattcatatttataccattggttatatgcaaaatgatccaggttaccagcgtttttttagttatatttccttgtttacgttcgcaatgttgatgttagtaatgtcaaataatttcttacaattgttttttggctgggaggcagtcggattagtctcatatttacttattgggttttggtataaaaaagagagcgctatttttgcaaatttaaaggcatttttagttaataggataggggattttggttttcttttagggatagctgctgtactcatgcatttcgatactcttgattatgtagaggtttttaaaaacgttgagcagcatgttgatacaacgataacaattattaatggtgagtcgtggtctttaatgaccgttatttgtataagtttgtttatcggtgcaatgggtaaatcagcacaggttccactacatgtatggttgccagattcaatggagggtccaaccccaatatcagcactaatccatgcagcaacaatggttacagcaggaatatttatggtatcaagaatgtcaccattatttgaactctctgctacagcattaaattttattttaataattggcgcaattactgctttatctatggggattcttggacttttcaaaatga

SEQ ID NO: 222201 - DNA, 934 bp, Unknown
  Bacterial polypeptide expressing nucleotide sequence isolated from the Sargasso Sea
cccatactgcccatcatgggggtcgagtccgtcgacgcggcgttcctgatagtactcgcacccttcctggcattccccatcatactcgtctccggccagctctacaacggcaacagcacgtggaagcagaacctgaaggagggaggcgtgatcggcctatcggcgctcctggtctcgctcaccaccgcgctatgggtggtcgtcgactacctcaggggcgccagggagatcgccaaggaccccagcggaaacgtcgcgtcctcctggggcgactggatatccttcgacgtactcctgtccgactactcgatgagctcgggcagggtgatcggcgtgggggtatgggtcgactccgtgaccctgatgctgctgttcgtagccaccttcctgtgcttcctgatctgctggttcagcctcggatacatgaacacggaccccatcaacgaggaccggaaccaccggttctacgcggagttcgtcctcttcgcgatgggcatgttcgggatggtcctcgctgacaacttcctgtggctgttcatcttctgggagataatgggactctgctcctacctcctgataggcttctacttctggaaggagagcgccgcctacgcagccaagaaggccttcctgaccactcgagtgggggacgtcttcctgatggtgggcctgctcatcctctacgacatttacggatcgctggagttctcggtgatattcgaggacccctcactcaacggaaccgtggactcggacaagctgttctgggcgctgctgatgctcttcatcggggcggtgggcaagtcagcccagttcccgctgcacgtctggctgccagacgcaatggagggcccgaccccggtctcggccctgatacacgccgccacgatggtcaacgcagggctctacctggtcgcacgccatggtccccatt

SEQ ID NO: 222202 - DNA, 479 bp, Unknown
  Bacterial polypeptide expressing nucleotide sequence isolated from the Sargasso Sea
aatggaagaaaggggctctagaatgggaatagggttttttaataaggaaaaagaaaagcaaattccacaggaattcaaacaaattgccaaagattttagcgaaaaaggttttgttaccacttcatcagataatttaatcaattgggctagaacaggctctttgcactggatgacatttggcttagcctgctgtgcagttgaaatgatgcagacttcaatgccaagatatgatcttgaaagatttggtgcagcaccaagagcttcgccaagacaatcagatgtaatgattgttgcgggaaccttgacgaataaaatggccgcacctttaagaaaagtatacgatcaaatgcctgaaccaagatatgtaatttcaatgggcagttgtgcaaatggcggtggttactatcattactcatattctgttgtaagaggctgcgatagagttgttccggttgacatttatgtacccggatgtccac

SEQ ID NO: 222203 - DNA, 916 bp, Unknown
  Bacterial polypeptide expressing nucleotide sequence isolated from the Sargasso Sea
ggtttttccactggggcttaaatggtcttttgcacctaaagagattggttctagacctcactatttagtaattaatgctgatgagtcagaaccaggaacttgcaaggatagggacatattaagatttgaacctcaaaaattaattgaaggatgtttaattgctggctacgcagtaaatgctcatgtttgttatatttatattagaggtgagtatttaaatgagggtaaaagattacaaaatgctataaatcaagcttatgaaaaaaaatatttgggaaaaaatgcatgcggctctggttgggattttgatattcacatacattatggagctggagcgtatatttgtggtgaggaaacagctttattagaaagcattgagggtaacaaaggtcagccaagattaaaacccccttttcctgctttagtaggtttatacggatgtccaacaatagttaataacgtagaaacaatagctgtggttccaacaatattaagaagaggtggaaagtggtttgcatctttaggaaaaccaaaaaatacaggcacaaaaatattttgcatttctggcaacgttaattcaccatgtaatgttgaagaggaaatgggagtttcgttaaaagaattaatcgagaagcatgctggaggagtaactggagggtgggaaaatctccaagctgtaataccaggtggatcttccatgcctttattgccaaaaaaaatatgtgataccataacaatggactttgacacattaatagaaaataaaagtggattaggtactgcaggaattgtagttataaacaaagatcaagatattatcgaatgcatggcaagaattgcgagattttataaacatgaaagctgcggtcaatgtactccttgtcgagagggagctggttggatgtggagaatttag

SEQ ID NO: 222204 - DNA, 790 bp, Unknown
  Bacterial polypeptide expressing nucleotide sequence isolated from the Sargasso Sea
aatgcttaaagatcaagatagaatttttaaaaatttgtataatgatatgggttcggatgttaaatctgctcaaaaaagaggtgactgggtaaatacatcagaaatagtagcaaaaggaagagattggataataaatgaggtaaaagattcacaactcagaggaagaggaggtgccggatttcctacaggtttaaaatggtcttttgctcctaaagaagtaggatctaggcctcattatttagttattaatgcagatgagtctgagccaggcacttgtaaagatagagatattttaagatttgaacctcataaattgattgaaggttgtttaatagcatcatacgcagttcaagctcatgtttgttatatatatatcagaggtgaatattttatagaaggtcaaaaattacaatcagctattgatgaagcttatgaaaaaaatttaattggtaaaaatgctgctggaactggatgggatttagatatttacattcactacggagcaggtgcttatatttgtggagaagaaactgcattattagagagcatagaaggtaaaaaaggtcaacctagattgaaaccaccatttccagctttaattggcctttatggatgtccaacaattataaacaatgtagagactatagcagtagttccaacaattcttagaaaaagtggaaaatggtttgcctctcttggaagagaaaaaaatactggtacaaaaatattttgtatatcaggaaatgttaatacaccatgtaacgttgaggaagaaatgatattcctttaa

SEQ ID NO: 222205 - DNA, 730 bp, Unknown
  Bacterial polypeptide expressing nucleotide sequence isolated from the Sargasso Sea
tatgcctagaatgaaacctccttttcctgcaggtgccgggttatatgggtgtccgactactgtaaataatgttgagtccatagcggtagttccaactattttgagaaggggtgcagattggttttcaggttttggtagacctaataatactggtactaaaatttttgccatatcaggtcatgtaaacaaaaaatgtgttgttgaagaagaaatgtctataagcctcagggagttgattgaaagacattgtggaggcgttcgcggaggctggaataatttaaaagcagttattccggggggggcctctgttcctttattgccagctgatctttgtgaggatgccattatggattttgactggttacgtgagcaaaagtccggtctcggtactgccgctgtcatcgttatggatcaaagcactgacgtaataaaggcgatttggaggttagcgaagttttataaacatgagagttgtggtcaatgcactccttgtcgggagggaacaggttggatgatgagagtcatggaacgcttgacaaaaggtgaagcaagtgtaagtgaaattgacatgttattagacgttacaaaacaagtagaagggcatactatctgtgcgttaggagatgctgcagcttggccaatacaaggtcttataagacactttcgggatgagattgaggaccgcattaaaaatgtaaagttaaaatctcctgaattagcggcggagtag

SEQ ID NO: 222206 - DNA, 412 bp, Unknown
  Bacterial polypeptide expressing nucleotide sequence isolated from the Sargasso Sea
aatgaatttacaagatagaaaaaaagatatcccagaagagtttaaacaattagcccaagattttagtgataacggttttataacaacttcactagataatcttgttaattgggcaagaactggttcattacattggatgacgtttggactagcttgttgtgctgttgaaatgatgcaaacatcaatgccaagatatgatcttgaaagatttggtgcagcaccaagagcatcaccacgtcaatcagatgtcatgatagtagcaggtacgctaacaaataaaatggctcctgcattaagaaaagtttacgaccagatgccagaaccgaggtatgtaatatctatgggaagttgtgcaaatggtggaggttattaccattattcatattccgtagtgagaggttgtgatcgagtg

SEQ ID NO: 222207 - DNA, 472 bp, Unknown
  Bacterial polypeptide expressing nucleotide sequence isolated from the Sargasso Sea
atgtttcaggaagaaaaattaaaaaaagtacctgatgaatttaaaaaaattgcaaaagattttgcggaaaaaggtttcataacaacctcaactgacaatctaataaattgggcaagaacagggtcattacattggatgacttttggtcttgcgtgttgtgctgtagaaatgatgcaaacttctatgccaagatatgatttagaaagatttggtgcagctcctcgagcttcaccaaggcaatcagatgttatgattgttgcaggcacacttactaataagatggcacctgctttaagaaaagtttatgaccaaatgcctgaacccagatacgttatatcgatgggtagctgtgcaaatggtggagggtattatcattattcttactcagtagttcgaggttgtgacaagattgttccggtagatatatacgtgcctggatgtccaccgtcagccgaggcattcttacggcatc

SEQ ID NO: 222208 - DNA, 800 bp, Unknown
  Bacterial polypeptide expressing nucleotide sequence isolated from the Sargasso Sea
tttattagaaagtatcgagggtaaaaaaggacaaccaagattaaaaccaccattccctgctttaattggtctttatggatgtccaacaattattaataacgtagaaactatagctgtagtcccaacaattcttagaagaggtggaaaatggtttgcttctcttggaagagaaaaaaatacagggacaaaaatattttgtatatctggaaatgttaatacaccgtgcaatgttgaggaagaaatgaatatccctttaaaagaattaattgaagttcatgcaggcggagttattggaggttgggataatcttcaagcagtaattcctggtggttcctcaatgcctctaattccaaaagagaaatgtgaaacattaactatggattttgactcacttatggctgagaaaagtggtttaggaacagcaggcatagtggtcattaataaagatcaggacataattaaatgcatggcaagaatagcaagattttataaacatgaaagttgtggacaatgtacaccatgtagagaaggttccggttggatgtggagaatgcttgagagaatggcaaaaggagatgcaaccaaagatgaagtggacatgctaggagatgttacaaatcaaatagcaggacacactatttgtgcatttggggaaggttcatcctggccagttcaaggattacttagacattttaaaaaagaaattgagaaaagaaataatttggatcctattgttcaaaagaaaaacaatattccttatttagaagatcaacatttattagataaaaaaaatgcttaaa

SEQ ID NO: 222209 - DNA, 934 bp, Unknown
  Bacterial polypeptide expressing nucleotide sequence isolated from the Sargasso Sea
aaattaaatgaaggctgcttaattgcatcttacgcagttaatgctcataagtgttatatttatataagaggagaatattttaatgaaggacaaaagcttcaaacagctatcgatgaagcgtacaaggatggtctcttaggaaaaaattctgcagggactgattgggaattagatatatatattcattatggtgctggtgcttatatctgtggtgaggaaactgctttgctcgagagtattgaaggaaaaaaaggtcaaccaagattaaaacctccatttccggctttaataggtctttatggttgcccgacaataataaacaatgttgaaacaatttcagtggtaccaactatacttagaagaggtggaaaatggttttcatcactcggtagaccaaaaaatactggttctaaaatatattgtatttcaggaaatgtaaataatccctgcaacgtagaggaagaaatgggaattccattaaaagaattaattgaaaaacatgcaggtggagtaataggtggatgggataatctaaaagcagttatacctggtggttcatcaatgccattactaccaaaagaaacatgtgaaacaattaaaatggactttgatgcatgtgttgagaataaaactggtttaggaacagctggtattgttgttataaataaagatcaagacattattaagtgtatggctagaatagcaagattttataaacacgagagttgtggtcaatgtacaccatgtagagaaggttctggttggatgtggagaatgttagagagaatggccaaaggagaagctacaagagatgaagtagatatgttattagatgtaacaaaacaaattgaaggtcataccatttgcgcttttggagaaggatcttcatggcctgttcaaggattgatcagaaatttaaagagaaataatgaaa

SEQ ID NO: 222210 - DNA, 400 bp, Unknown
  Bacterial polypeptide expressing nucleotide sequence isolated from the Sargasso Sea
atgaatttaaatgaaaaaaaaataccagatgagtttaaaaaattagctaaagattttagtgataaaggttttattacaacttcgtctgataatttaataaattgggcaagagcaggctctcttcattggatgacttttggattagcttgttgtgctgtcgaaatgatgcaaacatccatgcccagatatgatcttgagaggttcggagctgcacctagaggctcccctagacaatcagatgtgatgatagttgcaggaactttaactaataaaatggcaccggctttaagaaaagtgtatgatcaaatgccagagcctagatatgtaatttctatgggaagctgtgcaaatggtggaggctattaccattattcttactcagtcgtaagaggatgtgata

SEQ ID NO: 222211 - DNA, 793 bp, Unknown
  Bacterial polypeptide expressing nucleotide sequence isolated from the Sargasso Sea
aacaatgcatgtaattccaaatttgattttgatatttttgttcatagaggtgctggagcttatatttgtggagaagaaacagctttattggaaagtttagaaggtaaaaaaggtcaaccaagattaaaaccaccttttcctgccattatgggattgtatggttgtcctacaatagttaacaatgtagaaactattgcaaacgttccaagtattatgagaagaggatcagattggttttcgaaaataggtaaacccaataatacaggaacaaaaatatttagtgtttccggccatgttaataatccctgcaatatagaagaagaaatgggtataccgcttaaaaaattaattgaaaattatgctggtggtgtaatcggaggttgggataatttattagcagtaattccaggcggtgctagtatgcctcttcttccaaaatctatttgtgattatattacaatggattttgatagtttgaataaagttcaaagtaatttaggcacagctgctgtaatagttatgaacaaatctaccgatataatagaagctgtgtctaggttagcttatttttttaagcatgaatcatgtggtcaatgcactccttgcagagaaggaacaggatggatgtttagaatgatagaaaaaatgatttatggaaatgctaaacttgaagatattgataaacttttcgatgtaactaagcaagtagaaggtcatacaatatgtgcctttggagatgcagcagcttggcctattcaaggattaattagacattttagacctagaaattgaa

SEQ ID NO: 222212 - DNA, 752 bp, Unknown
  Bacterial polypeptide expressing nucleotide sequence isolated from the Sargasso Sea
aatgttaaaagaagaagataaaatttttaaaaatttatatggatttgatgattggtcactttcaggtgcaaaaaaaagaggaatttggtctaatactaaaagtctgatagaaaaaggttctgatggaattatagaagaaattaaaaatagtcaattaagaggcagggggggagcgggattcccagctggtttaaaatggtcatttatgccaaaaaattcaaataaaccacattatcttgttgttaatgcagatgagtctgagcctggtacatgcaaggatagagagataatgcgtaatgatccacatttattacttgaaggatgtttagtagctggttttgcaatgcaagctcatagttgttatatttatataaggggggaatactatagtgaatattcaaatcttcaaaaagctattaatgaggcttatgaaaatcagttaattggaaaaaatgcatgtggaacagattgggaatttaatatttatttgcatagaggagctggtgcatacatatgtggtgaagagactgcactattagaaagtcttgaaggaaaaaaaggccagccacgattaaaaccaccctttccagcaggagcaggattgtatggatgtccaactacggtaactaatgtagaaactgtagcagttgcacctacaattttaagaaaaggctcaaaatggtttgcttctctaggtaaagcaaataatactggtacaaaaatttttagtatttcaggtcatgtaaataatc

SEQ ID NO: 222213 - DNA, 523 bp, Unknown
  Bacterial polypeptide expressing nucleotide sequence isolated from the Sargasso Sea
tatgattccagaagataaattaaaagaaattcctgaagaatttagaaagctagctaaagattttagcgataaaggttttattacaacctccttagacaatcttatcaactggtcaagatctggttctttacactggatgacttttggtcttgcttgctgcgcagtagaaatgatgcacacctcaatgccaagatatgatctagaaagatttggagctgctccaagagcatcaccaagacaatctgatgtaatgattgtagccggtactttaactaacaagatggccccagctttaagaaaggtgtatgaccaaatgccagagccaaggtacgttatctctatgggtagttgtgcaaatggtggtggttactatcattattcttattcagtagtaagaggctgtgatagaattgttccagttgatgtttatgttccaggatgtccgccgtcagctgaagcactattatatggagttttacaattacaaaaaaaaataagaaatcaaggctctttagaaagataa

SEQ ID NO: 222214 - DNA, 889 bp, Unknown
  Bacterial polypeptide expressing nucleotide sequence isolated from the Sargasso Sea
gctcctaaagaagtaggatcaagacctcattacttagtaatcaatggagacgagtcagaaccaggcacttgtaaagatagggatatattaagatttgaacctcataaattaatagaagggtgtttgattgcatcctatgcagtccaagcccatgtttgctatatttatataaggggtgaatattttattgatggccaaaaactgcaagctgcaattaatgaagcttacgaaaaaaatttaattggcaaaaactctgctggtactggatgggatttagatatttacattcattatggtgctggtgcttatatatgtggtgaagagactgcgctacttgaaagtattgaaggtaaaaaaggtcagccaagattaaaacctccttttccagctttaattggactttatgggtgtcctacaataataaataacgttgaaactattgctgtagttccaacaatacttagaagaggcggtaaatggtttgcatctttaggaagggaaaaaaatacagggactaagattttttgtatatcaggaaatgtaaataacccatgtaatgttgaagaagaaatgaatatacccctaaaagaattaatagaagttcacgcaggaggtgttgttggtggttgggataacttaaaagcagtgataccaggaggttcatcaatgccacttattcctaaagaaaaatgtgaaacacttactatggattttgactcattaatggctgaaaaaagtggactaggaaccgctggtgtagttgtaattaacaaggatcaagacataatcaaatgtatggctagaatagctagattttataaacatgaaagttgcaatcagtgcacaccgtgcagagagggatctggatggatgtggagaatgctagaaa

SEQ ID NO: 222215 - DNA, 502 bp, Unknown
  Bacterial polypeptide expressing nucleotide sequence isolated from the Sargasso Sea
atgggagtagaaattaatgaagataattttggtgatcaacttaattctaagggatttttagtttcaaattttgataaactcttaacctgggcaagaactggctctttgtggccaatgacatttggtctagcttgttgtggtgttgaaatgatccatacatatatggcgagatatgatcttgatagatacggtgtaattccaagaggaagtcctcgtcaatctgatgtaatgattgttgctgggactctaactaacaagatggcaccagcactaagaaaagtttatgatcaaatgcctgaacctagatgggtaatatctatgggatcctgtgcaaacgggggaggatattatcattactcttattcagttgtaagaggttgtgatagaattgtcccagtcgatatttatgttcctggatgccctccaacagcagaggccttagtatatggcattttgcaactacaaaaaaaaataaaaagaaaaaataaatttgtaagataat

SEQ ID NO: 222216 - DNA, 847 bp, Unknown
  Bacterial polypeptide expressing nucleotide sequence isolated from the Sargasso Sea
aggagattggaacaatacaaaagaaatatgtgaaagaggtcgtgaatggattattaatgaggtaaaaacttcagaattacgcggaagaggaggagctggatttccaactggtttaaagtggtcttttgcaccgaaagaagttggatctagacctcattatctagtaattaatgctgacgagtctgaacctggaacttgtaaagatcgagatatattaagatttgaacctcaaaaactaatcgaaggttgtttgataacttcttttgcagttaatgctcatgcttgttatatttatataaggggagaatattttaacgaaggtcaaatacttcaaaaagcaattgatgaagcatatgcagaaggattaatcggaaaaaactctttaggaactgattgggatttagatatttatattcattatggtgcaggtgcttatatatgtggagaggaaaccgctttacttgaaagtttagaaggtaaaaaaggccaaccaagattaaaacctccattcccagcattaattggattgtatggctgtccaactattatcaataatgttgaaacgatagcggtagtaccaactatacttagaagaggaggaaaatggttttcatctcttggacgttcaaaaaatactggaacaaaaatttattgtatatctggaaatgttaataatccatgcaatgttgaagaagagatgggtatacctttaaaagatcttatagaaaaacatgcaggtggagttgttggtggatgggataatttgaaagctgtaataccaggcggttcttcaatgccattattacctaaaaaaatatgtgatacaatcaaaatggactttgatgct

SEQ ID NO: 222217 - DNA, 686 bp, Unknown
  Bacterial polypeptide expressing nucleotide sequence isolated from the Sargasso Sea
tatgcctcaattgattgtattccttcctttattaggttttatattctgttttttctttggtaaaagatttggatttaggtcttctcaaatagtaacaacatcactactatttatatctgctattttatcttggattttatttttttcatatttaggtgaaagagaaactgagataatccatatttttaattggtttacttcaggcaattttattgttgattggtcaattcgcttagattcattaacaacgacaatgtttattgttgtatgtagcgtctcagcatgtgttcacctttactctattggatacatgggtgatgacccatgcaaagagagatttatgggttacctaagtcttttcactttctttatgctgatgttagtctcaagcaataatttattacaaatgttttttggctgggaaggagtaggactagcttcatacctacttattggtttttggcatcataaaccatctgcaaataatgctgcgataaaagcttttcttgtaaatagaataggggattttggatatgcattaggtatagcaggtattttttatatttttggctctatagaatttagtgtaatttttgataatgcagaaagttttaaagatcattctataaattttataggtatcaattttagcacaattgacttgctatgctttcttttgtttattg

SEQ ID NO: 222218 - DNA, 903 bp, Unknown
  Bacterial polypeptide expressing nucleotide sequence isolated from the Sargasso Sea
gataaagatcgaatattaaaaaatttatatggcgacgatagttttgagttatcttcagccttaaaaagaggggattggaatgctacggataagatattagcaaaaggcagggagtggataattagtgaaataaagaactctgaattaaggggccgtggtggcgcgggttttccaacaggagtcaagtggtctttcgctccaaagactgtacaaccaaataaacctcactatttaattataaacgcagatgaatctgagccgggcacttgtaaagatagagagattttgagaaatgaaccccacaaattgttagagggttgtttgatttcatctttcgctgtaggagcaaaaaaatgctatatttacataagaggtgagtacgtaagagagggtgagatacttcagaaagctatagacgaagcttacgagagcggattgttaggagagaacgctgctaagtctgggtggagtttagatgtatatatacattatggagcaggagcttatatttgtggtgaagaaactgcattactagaaagtttggagggaaaaaggggtttaccaagactaaaacctccatttccagcattaattggtttgtatgggtgtcctactattgtaaataacgttgaaacagttgctgttgtaccagaaattttaaaaagaggagcaaaatggttttcttcatttggaaggccaaagaatagaggaacaaaaatattttgtatctcaggtaacgtaaacaatccgtgtaatgtggaagagtcaatgagtgttccattgaaggaattaatagaagagcatgctggtggtgttgtaggtggctgggaaaatctacaagctgtaatacctggtggttcttctaatgcccattattgccaaaacaaattctgtgataaggtt

SEQ ID NO: 222219 - DNA, 856 bp, Unknown
  Bacterial polypeptide expressing nucleotide sequence isolated from the Sargasso Sea
ttccccactggtttgaaatggtcttttgctccaaaggaaattggatcaagaccacattatttagttattaatgctgatgaatctgagcctggaacttgcaaagatagagatattttaagatttgaaccacataaactaatcgaaggttgtttaatagcttcatatgctgtgaatgctcataaatgttatatttatgttagaggagaatattttagagaaggtcaaagtcttcaaaaagctattaatgaagcatataaaaaaaatcttattggaaaaaatgcttgcgatacaggatgggattttgacatttatatacactatggtgctggagcatatatatgcggtgaagagacagccttactagaaagtattgaaggaaaaaagggtcaacctagattaaaaccaccctttccagctttgatcggtttatatggatgtccaacaataattaataatgttgagactatagctgtggttcccacaattttaagaagaagtggtaaatggttctcatcaatcggtaaacccaaaaatacaggcactaaaatattttgtatttcaggaaacgttaatagtccatgcaatgtagaagaagaaatgggtatttcattaaaggagttaattgaagttcattgtggaggtgttattggtgggtgggataatttgcaagctgtaataccaggaggttcatcaatgccactcttaccaaaaaaaacttgtgatactatttcaatggattttgacagcttaataaaagagaagagtggattaggcacagcaggtgtaattgtaataaataaagatcaggacatcattcaatgtatggcaagaatcgcaagattttataaacacgaaa

SEQ ID NO: 222220 - DNA, 517 bp, Unknown
  Bacterial polypeptide expressing nucleotide sequence isolated from the Sargasso Sea
atgaataataaattagatcaagtacctgatgaatttaaaaaacttgctgaagattttggtaagaatggatttataactacttcattagaaaatttagtaaattggtcgagatctggatctttacattggatgacttttggtcttgcctgctgtgctgttgaaatgatgcaaacagccatgccaagatatgatcttgagagatttggtgctgctccaaggggatcacctagacaatctgatgttatgattgttgcaggcactttaacaaataagatggcaccagcattaagaaaagtttatgatcaaatgccagaaccaagatacgttatatcaatgggaagctgtgccaatggtggaggatattatcattattcatattctgttgtaaggggttgtgatcgtattgtgcccgtagatgtttatgtaccaggttgtccaccctctgcggaagcattgttatatggaataatgcaattacaaaaaaaaattagaaataaaggatcttttaacaggtaaa

SEQ ID NO: 222221 - DNA, 523 bp, Unknown
  Bacterial polypeptide expressing nucleotide sequence isolated from the Sargasso Sea
tatgaatctagataatacaaaaaaagaaattccagaagaatttaaacaattagcacaagattttagtgataatggttttataactacttcattagaaaatcttgttaattgggctagaacgggctcattacactggatgacattcgggctagcttgttgtgcagttgaaatgatgcaaacatcaatgccaagatatgatctagagagatttggtgctgcaccaagagcatcaccacgccaatcagatgtaatgatagttgctggaactttaacaaataaaatggctcctgcattaagaaaagtttatgatcaaatgccagaaccgagatatgtaatatcaatgggaagttgtgcaaacggtggaggttattatcactattcatattctgtggttagaggttgtgaccgtgttgtacctgttgatgtatacgtgcctggatgccctccgtctgctgaagctttgttgtacgggatacttcaattgcagaaaaaaattagaaataaaggctctttagagagataa

SEQ ID NO: 222222 - DNA, 517 bp, Unknown
  Bacterial polypeptide expressing nucleotide sequence isolated from the Sargasso Sea
aatgaataataagattgatcaagttcctgaggaatttaaacaacttgcagaagattttagtaagaatggttttataaccacatcacttgataacttaattaattggtcaagatcaggttcacttcattggatgacatttggacttgcttgttgtgcagtagaaatgatgcaaacagcaatgccaagatatgatttagaaagatttggtgctgcaccacgtggttcaccaagacaatcagatgttatgattgtagctggaacacttactaataaaatggcaccggcattaagaaaagtttatgatcaaatgcctgaaccaagatatgtaatttcaatgggaagttgtgcaaatggaggaggttattatcactactcatactcagtggttagaggctgtgatagaattgtacctgttgatgtttatgttcctggatgcccaccatctgctgaggctttattatatggaatacttcaacttcaaaaaaaaattagaaataaaggctctttcattaggtaa

SEQ ID NO: 222223 - DNA, 769 bp, Unknown
  Bacterial polypeptide expressing nucleotide sequence isolated from the Sargasso Sea
tttatgccaaaaaaatcttctatacctcactatttagtagttaatgctgatgagtctgagccaggcacatgtaaagacagagagattatgaggaatgatcctcatttacttttagaaggatgtttggtggctggtttcgctatgggggccaatgtttgttatatttacataaggggagaatatttcgaagagtcttcgaatattcaaaaagccattgaagaagcttataagtcaaatttaattggaaagaatgcttcagattctggttgggattttgatatttatttgcacaggggggcgggcgcttatatttgtggagaagaaacagccctacttgagagtttagaaggaaaaaaaggacaaccaagattaaaacctccttttccagcaggttcaggtttatacggatgccctacaacggtcacaaatgttgaaacagtggcagtcgcatcaaccatattgaggaaaggttcaaaatggttttctagtcttggaagcccaaataatactggtacaaaaatatttagtatctctggacatgttaataatccatgtaatgttgaagaggaaatgggaatacctctaaaaaaattgatagaggaacatgctggaggggtgattggcggatgggaaaatttattagctgttattcctggaggagcaagtgtgccattaattccaaaatcagtttgtgaatatgtaaaaatggatttcgatagtttaaaggctgtcaattctggtcttggtactgcagctgtaatagtaatga

SEQ ID NO: 222224 - DNA, 523 bp, Unknown
  Bacterial polypeptide expressing nucleotide sequence isolated from the Sargasso Sea
atgataagtgaagaaaaagaaaaacagatacccgaagaatttaaacaacttgcaaaagattttagtgaaaatggatttataactacttcttttgataatttagtaaactgggctagaactggatctttgcactggatgacttttggtttagcatgttgtgcagtagaaatgatgcatacgtcaatgccaaggtatgacttggaaagatttggtgctgctccaagaggttctccaagacaatcagatgtaatgatagttgctgggaccttaacaaataaaatggctcctgcgcttagaaaagtttacgatcaaatgcctgagccaagatacgttgtgtcaatgggaagttgtgctaatggtggtggttattatcattattcatattcagttgttagaggctgtgatagaatagtgcctgttgatatatacgttccaggatgtcctccatcagctgaagcattactttatggaattatgcaattgcaaaaaaaaataagaaataaaggttctctacaaagataaa

SEQ ID NO: 222225 - DNA, 274 bp, Unknown
  Bacterial polypeptide expressing nucleotide sequence isolated from the Sargasso Sea
tatgattgtagcaggaacattaacaaacaaaatggctcctgctttgagaaaagtatatgatcaaatgccagagccacgatatgtaatatcgatgggtagctgtgcaaatggtggcggctactatcattattcatattccgttgtcagaggttgtgaccgtatcgtaccagttgatgtttatgtaccagggtgtccaccttctgctgaggcattgttatacggaataatgcaattacaaaaaaagattagaaataaggggtcttttaatagataa

SEQ ID NO: 222226 - DNA, 538 bp, Unknown
  Bacterial polypeptide expressing nucleotide sequence isolated from the Sargasso Sea
aatgggaataaaaataaattctactttagagaaacaaaataaaattccagatgagtttaaagacttagcaaaagactttgctgaaaaaggttttattaccacttcaagtgataacctaatcaattgggcaagaacaggatcattacactggatgacatttggtttggcttgttgtgctgtagaaatgatgcaaacttctatgccaagatatgatcttgaaagatttggtgcagcaccacgagcttcaccaagacaatcagatgtgatgattgtagccggtacattaacaaataagatggcaccggcgttaagaaaagtttatgaccagatgccagagccaagatacgttgtttcgatgggaagttgtgcaaacggcggaggatattaccattactcttattctgtagtaagaggttgtgataaaattgtgccagttgatatttatatacctggttgtccaccttctgctgaagctttgttgtatggaattttacaactgcaaaaaaaaattagacgagaaggctcaatagaaagataa

SEQ ID NO: 222227 - DNA, 718 bp, Unknown
  Bacterial polypeptide expressing nucleotide sequence isolated from the Sargasso Sea
atgttaaaagaaaaggataaaatatttacaaatctctttggagatgatgcatacagtctaaagagtgctaaaaaaagaggtgattgggacaatacgaaaacactcataaaaaaaggacgcgattggatcattgatgaaatgaaaaaatctgagttaagagggcgcggcggtgctggttttccgacaggattgaaatggtctttcatgcctaaagaccctgctctgaacaactatcttgttgttaatgctgatgagtccgaaccagggacttgtaaagaccgtgatatgataagaaatgaaccccataagcttatcgagggatgcctgctggcttctttcgccatgaacgcacatacttgttatatttacataagaggtgaatattttaatgaagctgttgttcttcagaatgcaattgatgaggcttacgaagcaggtctggttgggaagaatgctgctaagtctggttgggattttgatgtatatcttcaccgaggagcaggcgcctatatatgtggagaggagacggcgcttcttgagagtcttgagggtaaaaaaggattccctcgacttaaaccaccattccctgcgaataagggcctgtatggagccccaacaactgtcaataatgttgagactattgctgtagtccctacaatactaagaagaggaggagagtggttttcttcatttggtagaaaaaaaaatacagggacaa

SEQ ID NO: 222228 - DNA, 523 bp, Unknown
  Bacterial polypeptide expressing nucleotide sequence isolated from the Sargasso Sea
aatgacaatttctgaaaaagaaaaacaaataccagatgagtttaagaaacttgctaaggattttagtgataatggatttataactacgtcttttgataatctagttaattgggcacggacaggttcactgcattggatgactttcggtcttgcatgctgcgcagttgaaatgatgcaaacatcaatgccaaggtatgatctagagagatttggggcagcgcccagaggttctcctagacaatcagatgtaatgattgtagctggaactttgacaaacaaaatggcaccagccttaagaaaagtttatgatcaaatgccagagccaagatatgttatttcaatgggaagttgcgcgaatggaggagggtattaccattattcatattctgttgtgagaggatgtgatagaattgtaccagttgacatttacgttcctggatgtcccccatccgcagaagcacttctttatggaataatgcagctccagaaaaaaataagaaacaaaggttctttagaaagataa

SEQ ID NO: 222229 - DNA, 727 bp, Unknown
  Bacterial polypeptide expressing nucleotide sequence isolated from the Sargasso Sea
attattggtggtttcttttggcgatcaataggtgaaagccaagctatttatcttactatagcgttactatttttatcttgtttcttaagttggatagtttttctttcacatggggctgatgtagaaaaaataactctctttcgttggataaacagcggagacttatcagctaattggtcgataaggcttgaccgattgacgtcaataatgctggtagttgtaacttccgtttctgctttggttcatctttatagtgtcggttacatggctcatgacgaaaattggaaagaggatgaacattataaagcaaggttttttgcttatttatccttttttacattcacaatgttgatgttggtaacctctgataacttaattcagatgttttttggctgggaaggtgtcggagtagcctcttatttattgattgggttttattaccggaaacaaagtgccaacgcggcagctatcaaggcttttgtagtcaatcgggtgggtgattttggatttgcattaggtatttttggtttattcatgctgactggtagtataaattttgatgatattttttctgcagcccctaaattagccgatacgaggcttacgtttctttggagtgattggaatgcagcaaacttgatcgcttttctccttttttttggagctatgggaaaatctgctcaactttttttacatacctggttgccagacgccatggaaggaccaa

SEQ ID NO: 222230 - DNA, 899 bp, Unknown
  Bacterial polypeptide expressing nucleotide sequence isolated from the Sargasso Sea
tccacataagttggtcgaaggctgcctggttgccgggttcgctatgggtgccgatgcagcctacatctatgtacgcggcgaattctataacgaggcgggcatcctggatgccgctattcagcaggcctatgacgcgggtctcgtcggcaagaacgcctgcggttccggatacgacttcgacgtttacgttcaccgtggcgcgggtgcctatatctgcggcgaggaaacggcgctgctggaaagtcttgagggcaagaagggccagccgcggatcaagccgccgtttccggcaaacacaggtctttatggttgtccgacgacaattaacaatgtcgagaccatcgcggtatcaccgacgatctgcagacgcggggcgtcgtggtttgcggggatcggccgtgaaaacaataccggtacgaaagtgttctgcatttccggtcatgtgaacaatccctgcaacgtcgaagaggcaatgagcattcccttgaaggagctaatcgaaaaacatgccggtggcgtgcgtggtggttgggacaatctgaaagcaatcattcccggcggatcgtccgtgccgctgttgccgaaatctatttgcgatacggttctgatggattttgattccctgcgggaagtgaaatccggtcttggcacggcggcggtcatcgtgatggaccagtccaccgatgtcattgccgccatcgcgcggttggcgaagttttacaaacacgaaagctgcggccagtgcacgccttgccgtgagggcaccgggtggatgtggcgggtgatggaacgcttggtgcgcggcgaggcggaagtcgaagaaatcgacatgctgctcgacgtgtcctatgagatcgaaggtcacacaatctgtgccctgggcgatgcggcggcgtggc

SEQ ID NO: 222231 - DNA, 648 bp, Unknown
  Bacterial polypeptide expressing nucleotide sequence isolated from the Sargasso Sea
aatgcttaaagacgaagacagaatatttcaaaatttatacaacgactttggagcagaattggactctgctaaaaaacgtggagactggttagaaactaaggaaatttttaataaaggtcgaagttggataattgaagaaattaaaacctcccaattgcgtggtcgtggtggagcaggttttccaacaggtttgaagtggtcttttgccccaaaagaagtaggttcgaaacctcattatttggttattaatgctgacgagtcagaaccaggaacgtgtaaagatagagatattttaagatttgaaccccataaattaatagagggatgtttaatagcctcatatgcagtaaatgcacatacttgctacatttatataagaggcgaatattttaaagaaggtcaaaaacttcaaaaagctattgatgaggcttatagtaatggattaattggaaaaaatgcatcatcaactggatgggattttgatatattcattcactatggagctggcgcatacatatgcggagaggaaactgcacttttagaaagtttagagggaaacaaaggccaaccaagactaaaaccaccttttccagcattgattggtttgtatggctgtccaacaattattaataatgttgaaacaattgc

SEQ ID NO: 222232 - DNA, 405 bp, Unknown
  Bacterial polypeptide expressing nucleotide sequence isolated from the Sargasso Sea
aatgaacgacaagctagaaaaagttcctaaagaatttaaaaaacttgctgaggatttcagcaaaaatggttttataacaacttcttttgacaatttggtcaattggtcgagatcaggatctttgcactggatgacttttggtcttgcttgctgtgcggttgaaatgatgcaaacggctatgccaagatatgatcttgaaagatttggtgcagctcccaggggctctccaagacaatctgatgttatgattgttgcaggaacacttaccaacaagatggcacctgcactaagaaaagtttatgatcaaatgcctgaaccaagatatgtgatttctatgggaagttgtgctaatggtggagggtattatcattactcgtattcagtagtaagaggttgtgatcgaat

SEQ ID NO: 222233 - DNA, 505 bp, Unknown
  Bacterial polypeptide expressing nucleotide sequence isolated from the Sargasso Sea
aatgggagtagacacattccaaacaattgaagacgttcaaaaagacgttaaacaaaaaggttttttacttgcaaaatataatgacttattaacttgggcaaggactggttctttatggccaatgacttttggtttggcttgttgcggtgtagagatgatgcattcatatatgagcaggtacgatctagacagatatggagtaatccctagaggcagtccaagacaatcagatgttatgatagttgcaggaacattaactaataaaatggcaccagctcttagaaaagtttatgatcaaatgcctgagccaaggtgggtaatttctatgggttcatgtgctaatggaggaggttattatcattattcttattcggtagttagagggtgcgatagaatagtgccagttgatatttatgtaccaggatgccccccaacagccgaagctttagtatatggtattttacaattacagaaaaaaataaagagaaataacaaatctaatagt

SEQ ID NO: 222234 - DNA, 379 bp, Unknown
  Bacterial polypeptide expressing nucleotide sequence isolated from the Sargasso Sea
tggttagcatgttgtgctgtcgaaatgatgcaaacctcaatgccaagatatgatcttgaaagatttggtgcagctccaagagcatcacctagacaatcagatgtaatgatagttgcaggaactttaacaaataaaatggctccggctttaagaaaggtttacgatcagatgcccgaaccaagatatgttatatcaatgggaagctgtgcaaatgggggaggatattatcattattcttattcagtggttaggggatgcgatagaattgttccagtcgatgtttatgttccagggtgcccgcctacagccgaagcacttctctatggtattttgcaacttcaaaaaaaaataagaaacaaaggttctttgcaaagataaa

SEQ ID NO: 222235 - DNA, 799 bp, Unknown
  Bacterial polypeptide expressing nucleotide sequence isolated from the Sargasso Sea
aaagacgaagatagaatatttaaaaatttatataatgacctcggaaaagatttaatctcttcccaaaaaagaggagattggagcaatactaaagaaatttttgaaaaaggaagagattggattattaatgaaattaaatcatcagaactaagaggaagaggtggggctggatttcccactggtttaaaatggtctttcgcaccaaaggaaaaaggatcaagaccccattatttagtaattaatgccgatgagtcagagccagggacttgcaaagatagggatattttaagatttgaacctcacaaactcatagagggttgtttaattgcatcatatgctgtcaattcaaacaaatgttatatttatataagaggtgaatattttaatgagggccaactattacaaaacgcaatagatgaatcttataaaaataatttaataggaaaaaatgcttctggaacaggttgggatttagatatttatattcattatggtgctggtgcttacatatgcggagaagaaactgctctacttgagagtttagagggaaaaaagggtcagccaagattaaaaccaccttttcccgctttagttggattgtatggctgcccaacaatagtcaataatgttgaaacgatttcagtagtcccaacaattttaagaaaaggtgcgaaatggttttcttctttaggtaaacctaaaaatacaggaactaaaattttttgtatatcaggaaatgtaaataatccttgtaacgttgaagaggaaatgagtattccgttaaaagatttaatcgaaa

SEQ ID NO: 222236 - DNA, 800 bp, Unknown
  Bacterial polypeptide expressing nucleotide sequence isolated from the Sargasso Sea
tttgcagctgttctttggctgggaaggggtgggcgtcgcctcatacctcctgatcggcttctggttcaagaaggacagcgcccataccgcggcgatgaaggccttcgtcgtcaaccgcgtcggcgatttcggcttcgcgctcggtattctcgccgtctatcaggtgttcggatcgatccagttcgacgagatcttcaccaacgcggcggcgatgaaggatgccgagatcatgttcctcggcagcacgctgccggcgctggaagtcgccggtatcctgctgttcatcggcgccatgggcaagtccgcccagctcggcctccacacctggcttcccgacgcgatggaggggccaacgcccgtgtcggcgctgatccacgccgcgacgatggtgacagccggcgtcttcatggtctgccgcctgtcgccgatgctggaatacgcgccgctgtcgctcgacatcatcaccattgtcggcgcgctgacggcgatcttcgctgccaccgttggcatgacgcagttcgacatcaagcgggtgatcgcctattcgacctgttcgcagctcggttacatgttcttcgccgcgggcgtttcggcctatccggcggcgatgttccacctcacgacccacgccttcttcaaggcgctgcttttccttggtgcgggttcggtgatccacgcactgtcggatgagcaggatctgcgcaacatgggcggcatctggcgcaagattcccttcacctacgcgatgatgtggatcgggtcgctggcgctcgccggcttcccgttctttgccggattct

SEQ ID NO: 222237 - DNA, 775 bp, Unknown
  Bacterial polypeptide expressing nucleotide sequence isolated from the Sargasso Sea
gaaactgcacttttggaaagtttggagggtaacaaaggtcaacctagattaaaacctccgtttcctgctctagtaggtttgtacggttgtccaacaatagtaaacaatgttgaaacaatcgcggttgtaccaactattttgagaaaaggcgcaaaatggtttacatctttgggaagagcaaaaaatactggtactaaaattttttgtatttcaggtaatgtaaacaaaccttgtaatgttgaggaagaaatgggtattagcctaaaagatttaatagagcatcatgcaggaggagtagttggtggatgggaaaacttaaaagcagtaattcctggcggttcatcaatgcctttattaccaaaagaaatttgtgaaacaataaaaatggactttgatagtcttgtagaaaataaaagtggtttaggaactgcaggaataatagtaattaataaagatcaagatatcattaagtgtatggcaagaattgcaagattttataaacatgaaagttgtggacaatgtacaccttgtagagaaggttcaggttggatgtggagaatgcttgaaagaatggcaaaaggggaagcttcaagagaagaagtagatatgttaatggatgttacaaaacaaattgaaggacatacaatttgtgcttttggggaaggttcctcatggccagttcaaggtttactaagacattttaagaaagaaattattaaaagaaataattttgatccattaattaacaaatcgagaaacattccgtatttggtcg

SEQ ID NO: 222238 - DNA, 866 bp, Unknown
  Bacterial polypeptide expressing nucleotide sequence isolated from the Sargasso Sea
tggtcactgccacctgcaggacatgacggtgatgaccgggcacaacacccgtcgctaccgcttcaccaagcgtacccaccagaatcaggaactcggcccgttcatcgcccacgagatgaaccgctgcatcgcctgttatcgctgcgtgcgctactacaaggactacgccggcggcaccgacctgggcgtctacggcgcgcacgacaacgtgtacttcggccgcgtcgaggacggcacgctggaaagcgagttttctggcaatctggtcgaggtctgcccgactggcgtgttcaccgacaagacccactccgagcgctacaaccgcaagtgggacatgcagttcgccccgagcatctgccatggctgctccagcggctgcaacatcagccccggtgagcgctacggcgagctgcgccgtatcgagaaccgcttcaacggctcggtgaaccagtatttcctctgtgaccggggccgcttcggctatggctacgtcaaccgcgaagatcgcccacgtcagccgctgctggctggccaggccatcggcatcgatgccgcgctggacaaggccgccgagctgctcaagggcaagcgcgtgatcggcattggctcgccgcgcgccagcctggaatccaacttcgccctgcgcgaactggtcggtgccgacaacttctatagcggtattgctgccagcgaactggccaatattcgcctgatccgcgacatcctgcaaaacggcccgctgcagaccccgaccctgcgcgacgtcgagctgcatgatgccatcttcgtcctcggcgaagacctgacccagaccgccgcgcgtatggccctggccctgcgtcaagccgtcaagggcaaggccaacg

SEQ ID NO: 222239 - DNA, 826 bp, Unknown
  Bacterial polypeptide expressing nucleotide sequence isolated from the Sargasso Sea
gcttatatttgtggagaagaaactgctcttcttgaaagtttagaaggtaagaaagggcaacctagactgaaacctccttttccggcattaattggattatatggatgccctacaataatcaataatgttgaaactattgcagttgttcctactattttgagaagaggtggaaaatggttttcttctttaggtaaagaaaaaaatactggtacaaaaattttttgtatatctggaaatgtaaataatccatgcaatgttgaagaggaaatgtcaattccattaaaagaattaatagaaaatcatgctggtggtgtaataggtggttgggataacttacaagctgttatacctggtggatcatcgatgcccttattaccaaaaaaaacctgtgatacaataacaatggatttcgattctttaatgtctgaaaaaagtggattaggtaccgcaggtattgtggttattaataaagatcaagatattataaaatgtatggctaggattgcacgtttttataaacatgaaagctgcggtcaatgtactccttgtagagaagggtcgggttggatgtggagaatgttagaacgaatggctaaaggtgaagcttcaagagatgaagttgacatgttaatggatgtaacaaaacaaattgaaggacatacaatatgtgcttttggtgagggatcctcttggccagttcaaggtttgttgagacattttaaaaaagagattgaaaaaagaaataattttagtccattaataaataaaaataaaaatattccatatttaatcgatcaacatttgttagataaagataatgcttaaa

SEQ ID NO: 222240 - DNA, 662 bp, Unknown
  Bacterial polypeptide expressing nucleotide sequence isolated from the Sargasso Sea
aatgcttaaagacgaagacagaatatttcaaaatttatacaatgacagtggtgctgatattgagtctgctaaattaagaaatgattggaatggaacaaaagaaattttagaaaaaggaagagagtggataatcaatgaaattaaatcttcagagcttagaggacgtggtggagctggttttccaactggtctaaaatggtcatttgcacctaaagaagtagggtctagaccacattacttggttatcaatgctgatgaatcagaacctggaacatgcaaagatagagatatattaagatttgaacctcacaaattaatagagggatgtttaattgcttcttacgcagtgaacgcccaaaaatgttatatttatattagaggtgaatattttaatgaaggacaaaaacttcaaactgcaatcgatgaggcttataaaaaaaatttaattggtaaaaatgctttaaattcaggatgggatttagatatttatattcattatggtgcaggtgcctatatttgtggtgaagaaactgcattacttgagagtttggaaggaaaaaagggtcaaccaagattaaagccaccatttcctgcattaattggattatatggatgtcctactatcattaataatgttgagactgttgcagctgttcctacaa

SEQ ID NO: 222241 - DNA, 853 bp, Unknown
  Bacterial polypeptide expressing nucleotide sequence isolated from the Sargasso Sea
agcatcggaactcagaggtagagggggagctggcttttcgactggattgaaatggtctttcgcaccaaaaaaagttggttcaagaccacattacttagttataaatgctgacgagtctgaacctggaacttgtaaagatagagatatacttagatttgagcctcaaaaattaatagaaggatgtttgatcgcttcttatgctgtaaatgcaaaagtttgttatgtttacataagaggagaatatttgaatgaaggtaaaagacttcaggaggcgatagacgaggcttattcaaaaaatttaattggtaaaaatgcgtgtaattcaggatgggatttagatatttatattcactatggtgcaggtgcttatatttgtggtgaagaaaccgcacttctagagagtttagaaggaaacaaaggtcaaccaagattaaaaccacctttcccagctttggttggactttatggttgtccaacaattgtaaataatgttgaaacaattgctgtggttccaacaatattgagacgtggagctaaatggtttgcttctatgggtagaccaaaaaatacaggtactaaaatattttgtatttctggaaatgtaaatacaccttgcaatgttgaagaagaaatgggtatcccattaaaagaacttatagaaaaacatggtggtggagttataggaggctggaaaaatcttcaggctgtaatacctggtggatcttcaatgccaatggttccgaaagatatatgtgaaacattaaaaatggattttgactctttagtagaagttaaaagtggattaggcactgctggggtagtagtaattaacaaagatgaagacattgtttaa

SEQ ID NO: 222242 - DNA, 724 bp, Unknown
  Bacterial polypeptide expressing nucleotide sequence isolated from the Sargasso Sea
atgcttaaagaagaaaataaaatatttaaaaatctttataacgattacggttgggaaattgataatgcaatagatcgagacgactggaaagatacaaaaaaattaatttctaaaggaaaagattggattattaacgaaattaaagtttccgagcttagaggtagaggtggcgctggtttctcaactggaatgaagtggtcttttatacctaaacaacaaggatctagacctcattacttagtaattaatgcagatgaatcagagccgggcacatgtaaagatagggacattttaagatttgaacctcaaaaacttattgaaggatgcttaatagctggttttgctgttggagcacacgtttgttatatttacataagaggtgaatacttttttgaaggtaaaagacttcaggaagctattgatcaagcatatgagaaaaatttcttaggtaaaaatgcttgtggaactaattgggattttcatattcacatacactatggggctggtgcctacatttgcggagaggaaactgcacttttggaaagcattgaaggtaataaggggcaacctagacttaaacctccattcccagcactcgttggtctttacggctgtcctacaattgtaaataatgttgagactatagcggttgttcccactattttaagacgtggtggaaaatggtttgcttcgattggaagaccaaaaaaatacgggaactaaa

SEQ ID NO: 222243 - DNA, 955 bp, Unknown
  Bacterial polypeptide expressing nucleotide sequence isolated from the Sargasso Sea
aacagaggagattggtctaatactaaagatatatgcttaaaaggaagagattggataattaatgaaattaaaatttctgaattaagaggaagaggaggagctggttttccaacaggacttaaatggtcttttgctccaaaaacaattggtacaagacctcattacttagtggttaacgctgacgagtcagaacctggaacttgcaaagatagagatattttacgttttgaacctcataaattaatcgagggttgtttaatttcatcatacgcagtaaatgcccacgtttgctatatttatatcagaggagagtatttaagagaaggagaaaaacttcaaaaagcaatagacgaagcttacgaaaaaaatttaattggcaaaaaagcttcgggtacagaatgggattttgatatctatattcactatggcgctggagcttatatttgtggagaagaaacagctttgctagaaagtttagaaggaaaaaagggacaaccaagattaaaaccaccatttccagctcttataggactttatgggtgtccaacaattataaacaatgtggaaacaattgctgttgttccaacaatattgagaaaaggcggaaaatggtttgcttctttaggaaaaccaaaaaatactggaactaaaatattttgtatatcaggaaacgttaacaaaccatgtaacgttgaagaagaaatgggtataccattaaaagatttaatcgaacaccactcaggaggcgttattggtgggtgggaaaatttgaaagctgtaattccaggcggttcatcaatgcctttattaccaaaaaaaatttgcgatacaattactatggatttcgattctttaataaaagaaaaaagtggattaggaactgctggtattattgtaataaataaagatcaagacattattaaatgtatggcccggaatagcccaggttttataa

SEQ ID NO: 222244 - DNA, 694 bp, Unknown
  Bacterial polypeptide expressing nucleotide sequence isolated from the Sargasso Sea
atgttagatagtaaagatagaatttttgacaatttatatggttttgaaccttggaatttagacaacgctaaacttcgtggtgattgggataatacaaaagatattttattaaaaggaagagaaaaaattactgaggaggtcatttcttctggtttgcgaggaagaggtggtgctggattttctacaggagtcaaatggacttttatgccaaaagaaccaactggaaagacgcattatttagttgtcaacgctgatgagtctgagccaggtacatgtaaagatcgagaaatattaagaaatgaacctcataaattattagaaggatgtgttatcgcttgtgcagctatgggagcccaagtttgctacatatatattagaggtgaatttattaatgaaagatatattctcgagtcagcattaaaagaagcttacgatgatggtctagtaggtaaaaatgcatgtggtagcggtttggatattgaaatttttattcatcatggtgctggagcatatatttgtggtgaagaaacagctttattagagagtttagaaggtaaaaaaggtatgccaagattaaagccaccttttccggctgcagcaggtttatatggatgcccaactaccgtaaataatgttgaaagtattgcggttgttccgacgatacttaggagaggatctaactggttttctggaa

SEQ ID NO: 222245 - DNA, 841 bp, Unknown
  Bacterial polypeptide expressing nucleotide sequence isolated from the Sargasso Sea
aatgcttaaagatcaagatagaatatttcaaaatttatataatgatctggggtctgatgttacttcttctcaaaaaagaggtgattgggttaatactaaagaaatcattgataaaggtagagaatggataatcaatgagattaaggactcacagcttagaggtagaggtggtgctggattcccaacaggattaaaatggtcttttgccccaaaagagttaggtgctagaccacattatttagttataaatggcgatgaatcagaaccaggaacttgcaaggatagagatatattaagatttgaacctcataaactaattgaaggttgtttgattgcatcatacgcagttcaagctcatgtctgctatatctatattaggggtgaatattttattgatggtcaaaagcttcaagatgcaattgatgaagcatacgaaaaaaaattattaggtaaaaatgcagctggaacaggatgggatctcgatatttatattcattatggtgcgggtgcatatatttgtggggaagaaacagctctattagaaagtatagaaggtaaaaaaggtcaaccaagattgaaaccaccttttccagcattaataggtctatatggatgtcctacaataattaacaatgtagaaactatagctgtagtaccaacaatacttagaagagggggcaaatggtttgcttcccttggaagagaaaaaaatacaggaacaaaaatattttgtatatcgggaaatgtaaatactccatgtaatgttgaggaagaaatgaatataccgcttaaagaattaattgaagttcatgctggtggtgttattggcggttgggaaaat

SEQ ID NO: 222246 - DNA, 870 bp, Unknown
  Bacterial polypeptide expressing nucleotide sequence isolated from the Sargasso Sea
gctgacgaatctgaaccaggaacgtgtaaagatagagatattctaagatttgaaccccataaattaatagagggatgtctaatagcatcatacgcagttaacgctaatgtctgctatatttatataagaggtgaatattttaatgaaggtcaaaaacttcaaaaagctattgatgaggcttatagcaatggattaattggaaaaaatgcatcatcaactggatgggattttgatatatttattcactatggagctggcgcatatatatgtggagaggaaactgcacttttagaaagtttagaaggaaataaaggtcaaccaagactaaaaccacctttcccagcattgataggcttgtatggctgtccaacaatcattaataatgttgaaacaattgctgttgttccaacaatattaagaagaggaggtaaatggttctattcattaggtagagaaaaaaatacaggaacaaaaattttttgtatttcgggaaatgttaataatccatgcaatgttgaagaagaaatgggtgtacctttaaaagatctaattgagaaacatgcggggggagttgttggaggctgggataatttgaaagctgttatacctggtggatcctcaatgcctttattaccaaaagaagtttgtgatactataaaaatggattttgacgcttgtgtcgaaaataaaacagggcttggaactgctggtattgttgttataaataaagaccaagacataattaaatgtatggcaaggattgccagattttataaacacgaaagctgtggacaatgcactccatgtagagaaggatctggatggatgtggagaatgcttgaaagaatggcaaaaggtgaggcaactaga

SEQ ID NO: 222247 - DNA, 790 bp, Unknown
  Bacterial polypeptide expressing nucleotide sequence isolated from the Sargasso Sea
atgcttaaagaccaagatagaatttttcaaaatttatataatgataaaggttctgatgttgtagcatcacaatcgagaggtgattgggtaaacactaaagaaattactaacaagggaagagattggattattaatgaaattaaagagtcacaacttagaggtcgaggtggagcaggatttcctacaggtttaaagtggtcatttgcaccaaaagaagttgggtcaagaccacattatttagttattaatggtgatgagtctgaaccaggtacttgtaaagatagagatattttgagatttgaacctcataaattaatagagggttgtttgatagcatcatatgcagttcaagcacacgtctgttacatctatattagaggagaatactttattgatggtcaaaaactccaagctgcaattgatgaagcttatgagaaaaaactattaggaaaaaatgcagctggaactggctgggatttggatatttatatacactatggagcaggagcgtatatttgtggtgaagaaacagcattacttgaaagtttagaaggtaaaaaaggtcaaccaaggttaaaaccacctttcccagcattaataggtttatatggatgcccaactataattaataatgttgaaacaattgctgtggtgccaaccattctacgaagaggagcaaaatggtttgcctctttaggtagagaaaaaaatactggcactaaaattttctgtatttctggaaacgttaataatccgtgtaatgtagaagaggagatgagtattccttaaa

SEQ ID NO: 222248 - DNA, 811 bp, Unknown
  Bacterial polypeptide expressing nucleotide sequence isolated from the Sargasso Sea
atgttgaaagatgaagacagaatttttactaacttatatgggtggtttgacgggggattggctggtgcgagaaagcgaggcgactggtctaacacgaaagagctcctgaaaaactccccagatgaaattgtagagttggttaaggcttcgggattacgagggcgcggcggtgccggtttttcaactggtttgaaatggtcgtttatgcccaaggaggtcacagatcggcctcactatttaatagtcaatgcggatgagagtgaaccgggaacgtgtaaagatcgcgaaattatgcgaaacgatccgcataagttggtagaaggatgtttgattggtggttacgcaattagagcctgtgcggcattcatatacatacgtggagaattttataatgaggcccaaaaactgcaagcagctatcgacgaggcatatgatgcaggtttaataggaaagaatgcctgcggttctggttatgactttgacgtcattctgcacagaggagcaggtgcatacatatgtggggaggaaacagctcttttggagagcttggaaggtaaaaagggtcaacctcggcttaaacctccatttcccgccgcctccggcttatacggctgtccgtctactgtaaataacgtagagagtatcgcagttgttccgacgatattaaggaggggacctgaatggtttgccggtttgggtagggagaaaaacgttggtacaaagttgttctgtatctcaggtcatgtcaacaacccatgtaatgtagaagaagaaatggggatacctttaaaggacttgatgaaaaacacgc

SEQ ID NO: 222249 - DNA, 394 bp, Unknown
  Bacterial polypeptide expressing nucleotide sequence isolated from the Sargasso Sea
attggaagaaaaaaataatataccagaagaatttaaaaaacttgcagaagattttggaaaaaatggtttcgtaactacttcttttgaaaatttagttaactgggcaagatccggctctctacattggatgacttttggtttagcttgttgtgctgttgaaatgatgcagacgtcaatgccaagatatgatcttgaaagatttggagcagccccgagaggctctcctagacaatcagatgtgatgatagtcgctggaactttaacaaataaaatggcaccagcattaagaaaagtatatgatcaaatgccagaacctcgttatgttatatctatgggtagctgtgctaacggaggtggttattatcattattcttattcagttgtaagaggatgc

SEQ ID NO: 222250 - DNA, 628 bp, Unknown
  Bacterial polypeptide expressing nucleotide sequence isolated from the Sargasso Sea
aatgcttaaagacgaagatagaatatttacaaatttatacaatgatcttggttcagatatcttgtcagctcaaaaaaggggtgactggcaaaatactggtgaaattattaaaaaaggtaaagaatggataattaatgaaattaaatcttctgagcttagaggcagaggaggagcaggtttcccaactggacttaaatggtcatttgctccgaaagaagttggttcaaaacctcattatcttgttattaatgcagatgaatcagaacctggaacttgtaaagatagagatattttaagatttgaaccacataaattaatagagggctgtttattagctgcatatgcagttaatgcaaaaaaatgttatatttatataagaggggaatattttaatgagggaaacaaacttcaagaagctataaatgaagcttacaagaaaaaattaattggcgttaatgcttctaatagcggatgggattttgatatatatattcattatggtgcaggagcttacatttgtggtgaggaaacagctttattagaaagtcttgaaggtaaaaaaggtcaaccaaggctaaaaccacctttcccagctttaataggtctttatggatgcccaacattataa

SEQ ID NO: 222251 - DNA, 924 bp, Unknown
  Bacterial polypeptide expressing nucleotide sequence isolated from the Sargasso Sea
gaaggatgtctcatagcaggttacgcggtaaacgctcatatttgctacatttatataagaggtgaatactttaatgaaggtaaaagattacaaaaagcaatcgatcaagcatatgaaaaaaactacttaggaaaaaatgcgtgtgcgtctggatgggattttgacattcatattcattatggagcaggtgcatacatatgtggggaggagacagctttattagaaagtatagaaggaaacaaaggacaacctaggctaaaaccaccgttccctgctctagtaggtttatatggttgtcccacaatagtaaataacgtggaaacgattgccgtagttcctacaatacttagaagaggcggtaaatggtttgcttcaattggcaaaccaaaaaatactggaacaaaaatattctgtatatcaggtaatgtaaattcaccctgtaatgtagaagaggagatgggtatacctcttaaagaactaattgaaaaacatgctggaggtgtaatcggaggctgggacaatttacaagctgttattcctggcggttcatcaatgccgttattatcaaaaaaaatctgcgatacaattacaatggattttgactctttgattgataataaaagcggattgggtactgccggtgttgttgttataaataaaaatcaagatatcgtatcttgcatggcaaggatagcgagattttataaacatgagagctgtggtcaatgtaccccttgtagagagggggctggatggatgtggaggatactcgatagagtagaaaaaagaaaagctacttttagcgacatagatttattatctgatgttacgaagcaaatagaaggtcatactatatgtgcctttggggagggatcagcgtggccagttcaaggcttattaagacattttagaaaagaaatgaaa

SEQ ID NO: 222252 - DNA, 817 bp, Unknown
  Bacterial polypeptide expressing nucleotide sequence isolated from the Sargasso Sea
gttggttcaagaccccattatcttattattaatgctgatgaatctgaacctggaacttgtaaagacagagatattttaagatttgaacctcacaaattgatcgaaggttgtttgctagctgcgtatgcagttaatgctaacaaatgctacatttatataagaggagaatactttaacgaaggtaataaactccaagaagctataaatgaggcttatgaaaaaaaattaattggtgtaaatgcttgtgatagtggttgggattttgatatatttatccattatggcgcaggagcttatatttgtggcgaggaaactgctttattagaaagtcttgaaggtaaaaaaggacagcctagattaaaacctcctttcccagcattaataggtttgtatggatgtccgacaatcataaataatgttgaaacaatagcggtagttccaactatattgaaaagaggagcaaaatggtttgcagacattggtaaaccaaaaaacaccggaacaaaaatttattgtatttctggtaacgtaaataatccatgtaatgttgaagaggagatgggaatttcattaaaggaattaatcgaaaaacatgcaggcggtgttgtcggtggatgggaaaatcttcaagctgtaataccaggaggttcttctatgccactactacctaaaaaaatttgtgagacaatcaatatggactttgactcacttgtagaacagaaaagtggattaggtacagctggaattgtagttataaataacgatcaagatataattaaatgtatggcaagaattgcaagattctataaacatgaga

SEQ ID NO: 222253 - DNA, 482 bp, Unknown
  Bacterial polypeptide expressing nucleotide sequence isolated from the Sargasso Sea
attgggattagaaacggataatgatttaattgatcaacaagggcccggttttattattacatccgttgataaactggttaattgggcaagaacaggctcaatgtggccagttacatttggtttagcatgttgtgcaattgagatgatgcatgctggagcatctaggtatgacaccgatcgttttggggtattctttagaccgagtccgaggcaatcagacgtcatgattgtcgcaggaacgcttgtcaataagatggctcctgcactaagaaaagtatacgaccaaatggcagaaccaaaatgggtcatttccatgggctcttgtgccaatgggggtggatattatcaccattcatattctgtggttagaggttgtgatcagattatccccgttgatatctatgttcccgggtgtccaccgacatcagaggcattgatcaatgggatcatagaactccaagaaaaaataaagaatgaagaat

SEQ ID NO: 222254 - DNA, 493 bp, Unknown
  Bacterial polypeptide expressing nucleotide sequence isolated from the Sargasso Sea
cctgaagaatttaagaaaatcgctaaagattttagtgaaaaaggtttcataacaacttcttcggataatttaattaactgggcaagaacaggatcgctgcattggatgacttttggtttagcttgttgcgccgttgaaatgatgcaaacgtcaatgccaagatatgatcttgagaggtttggtgcagcccccagagcttccccaagacagtctgatgttatgattgttgctggaacattaacaaataaaatggcggcacctttaagaaaagtttacgatcaaatgccagaaccaagatacgttatatccatgggtagctgtgctaatggaggaggttattaccactactcttattctgttgttagaggttgtgataaaataattcctgtggacatttatgttccaggatgtccaccatcagccgaagctttactgtatggaattcttcaacttcaaaaaaagattagaagagaaggtactctaagaagataat

SEQ ID NO: 222255 - DNA, 880 bp, Unknown
  Bacterial polypeptide expressing nucleotide sequence isolated from the Sargasso Sea
aatgcctgtgatactggatgggattttgatatatatgtccattacggtgcaggtgcgtatatttgtggtgaggaaactgctttattagaaagtcttgaaggcaagaaaggtcaacctagattaaaacctccctttccagcattaataggtctttatggatgtccaacaatcataaataatgttgaaacagtagctgtagttccaactatattaagaaggggagcaaaatggtttgcaggcattggtaaaccaaaaaatactggaacaaaaatttattgtatttctggcaacgtaaataatccatgtaatgttgaagaagagatggggatttcattaaaagaattaatcgaaaagcatgctggtggtgtaatcggtgggtgggataaccttcaagcagtaataccaggaggttcatctatgccactacttcctaaaaaaatttgtgagacaattaatatggactttgattcacttgttgaacagaaaagtggattaggtacagctggaattgtagttataaataaagatcaagatataataaaatgtatggcgagaatagcaagattttacaaacatgaaagctgtggacaatgtacaccatgcagagaaggatctggatggatgtggagaatgcttgagagaatggcaaaaggcgaagcatcaagagatgaagttgatatgttaatggatgttacaaaacaaatagaagggcatacaatttgtgcttttggagaaggatccgcatggccagtacaaggtttacttagacattttaaaaaagaagtggctaaaagaaataattttaacccactagtaaataggaataaaaaaattccttaccttgtggatcagcatttgtggaaaaataatatcaaataaa

SEQ ID NO: 222256 - DNA, 681 bp, Unknown
  Bacterial polypeptide expressing nucleotide sequence isolated from the Sargasso Sea
gatgcttaaggaaaaagataaaatttttaaaaatttatacggttttgaagattggaaattacaaggtgctaaaaaaagaggtgtttggtcaaatactaaaggacttattaaaatgggtagcgaaaaaattgttgaggaaattaaaaatagtcaattgagaggaagaggaggggcaggttttcctgcaggattaaaatggtcatttatgccaaaagactctggtaaagatcattacctagtcgttaatgcagatgagtcggaaccaggcacatgtaaagatcgagaaataatgcgaaacgacccacatcttcttttagaaggttgtttagtcgctgcctttgcaatgcatgcacatacttgttatatttatataagaggtgaatattattctgaatcttctaatttacaaatagcaatagacgaagcttacgcaaacaatttaattggtaaaaatgcatgtggtacagggtgggattttgatatttatcttcatagaggagcaggagcatatatttgtggtgaagaaactgctttacttgaaagtttagagggtaaaaaaggtcaacctcgattaaaacctccatttcccgctggtgcaggtttatatggatgtccaacaacagttacaaatgttgaaacagttgcggtttcacccactatattaagacgtggttcaaaatg

SEQ ID NO: 222257 - DNA, 841 bp, Unknown
  Bacterial polypeptide expressing nucleotide sequence isolated from the Sargasso Sea
aatgcttaaagacgaagacagaatatttcaaaatttatataatgatagtggtgcagattatgagtctgctaaaaaaagaaatgattggaatggaacaaaagagatacttgataaaggtagggattggattattaatgaagtaaaatcctccgaacttagaggaagaggaggagctggttttcctactggtcttaagtggtcctttgctcctaaagaaataggatctaggccacattatttggttataaacgctgatgagtcagaacctggaacatgtaaagatagagatatattaagatttgaaccacataagttgatagaggggtgtctaattgcttcttatgcaattagtgctcacaaatgttatatttatattagaggtgaatactttaacgaaggccaaaaacttcaaattgctatagatgaagcttatcaaaataatttaatcggacaaaatgcattaaattctggatgggatttagatatttatattcattacggagctggtgcatatatttgtggagaggaaactgcattacttgagagtttagagggtaaaaagggacaaccaagattaaagccaccatttcctgcattaattggattgtatggatgtcctacaataattaataatgttgaaaccgtagctgctgttcctacgattttaagaagaggtgcaaaatggtttagctcacttggaagaccaaaaaatactggtacaaaaatttattgtatttctggaaatgtaaacaatccatgtaatgtggaagaagaaatgggaattccacttaaagaattaattgaaactcacgctggaggagtagtgggtggttgggacaac

SEQ ID NO: 222258 - DNA, 844 bp, Unknown
  Bacterial polypeptide expressing nucleotide sequence isolated from the Sargasso Sea
gatgctgatgctggtgacggcggacaatctgctacagatgttcttcggctgggagggcgtcggcgtggcgtcctatcttctgatcggtttctactggcgcaagcccacggcgggggctgcggccatgaaggcgttcatcgtgaaccgggtcggtgatttcggattcatcctgggcatcttcgcgctgtacatcctgaccgacagtgtcgatttcgcgacgatcttcggtgagatggaccgcttgacgacaacgtcgatcagcttcctcgggctcgatctgccggcactcgaagtggtcggattcctgttgttcatcggtgcgatgggcaagtcggcgcagttgtttctgcacacatggctgcccgacgcgatggaggggccgacaccggtttccgcgctgatccacgcggcgaccatggtgacggcgggcgtcttcctggtctgccggatgtcacccgtttacgacgaggcgatctatgccgccgggttcatcacgacgatcggtgcgctcaccgcattcttcgcagccactgtcggtctggtgcaaaacgacatcaagcgcgttatcgcctattccacctgctcgcagctcggttacatgttcgtggcagcgggcgtcggcttctatcaggcggcgatgttccacctgttcacccatgccgcgttcaaggcgatgctgttcctgggcgccggttctgtgatccacgccatgcaccacgagcaggacatgaggaactatggtggtctgcgcaagaaaatccccatgaccttctggggcatgatgttgggcacgctggccatcaccggcgtcggcattccgttcagctacgatctgttcggcgta

SEQ ID NO: 222259 - DNA, 281 bp, Unknown
  Bacterial polypeptide expressing nucleotide sequence isolated from the Sargasso Sea
ggatgtaatgatagttgctggtactttaacaaataagatggccccagctttacggaaagtttatgatcagatgcctgaacctagatatgtaatttcaatgggaagctgcgctaatggaggaggctattatcattactcatattcagttgttagaggttgtgataaaattgttccagttgatatttatgtgccgggatgtccaccatctgcagaggcactattatatggaattctacaattacaaaaaaaaattagaagagagggagatattaatagatagc

SEQ ID NO: 222260 - DNA, 485 bp, Unknown
  Bacterial polypeptide expressing nucleotide sequence isolated from the Sargasso Sea
gtttaaacaacttgcagaagattttggtaaaaatggatttataacaacgtcacttgacaatcttattaactggtcaagatctggatcacttcattggatgactttcggtcttgcctgttgtgcagttgagatgatgcaaacctcaatgccaagatatgatcttgaaagatttggtgcagcaccaagagcttcaccaagacaatctgatgtaatgattgtagctggtactttaacaaataaaatggcaccggcgcttagaaaagtttatgatcaaatgcctgaacctagatacgtaatttcgatgggaagttgcgcaaatggtggtggctattatcattattcttattcagttgtaagaggctgtgaccgtattgttcctgttgatgtttatgtaccaggatgccctccttcagcggaagcactattgtacggtatacttcaattacaaaaaaaaattagagataaaggctcttttactagataat

SEQ ID NO: 222261 - DNA, 334 bp, Unknown
  Bacterial polypeptide expressing nucleotide sequence isolated from the Sargasso Sea
tagatatgatctagaaagatttggcgcggcacctagagcatcacctagacagtcagacgtaatgatagttgctggcacacttacaaataaaatggcccctgccttaagaaaggtttatgatcaaatgccagaacccagatatgtgatatcaatgggaagctgtgctaatggaggcggttattatcactattcatattctgtcgtaaggggatgtgataaaatcgttcctgttgatatttatgttccaggatgtcctccgtcagcagaggcactattatatggaattcttcaacttcaaaaaaagataaggagagagggtaaccttcagagataa

SEQ ID NO: 222262 - DNA, 388 bp, Unknown
  Bacterial polypeptide expressing nucleotide sequence isolated from the Sargasso Sea
tatgagtttaatagatagagaaaaacagatacccgaagaattcaaagatcttgcaaaagaatttgccgacaagggttttataactacatcaatggataatttaattaattgggcacgcgctggatcactccattggatgacatttggtcttgcatgttgtgcagtagaaatgatgcagacatctatgccaagatatgatcttgagagatttggtgcagctcctagagcatcacctaggcaatcagatgttatgatagttgcaggaactttaacaaataaaatggcaccggcgttaagaaaagtttatgatcaaatgccagaacctagatacgtaatttctatgggaagctgtgcgaatggaggtggatactaccattactcttattca

SEQ ID NO: 222263 - DNA, 945 bp, Unknown
  Bacterial polypeptide expressing nucleotide sequence isolated from the Sargasso Sea
aatgcttaaagatcaagatagaattttcaaaaatttgtataatgattttggtgaggacgttatttctgctcaaaaaagaggtgattggtctgatactaaaacattatgtcaaaaaggaagagaatggataattaatgaaataaaatcatcagaattaagaggaagaggtggtgcaggctttcctactggacttaaatggtcatttgcacctaaggaaattggtactaaaccacattatttagttattaatgcagacgagtcagaacctggaacatgcaaagatagagatattttaagatttgaaccgcacaaactaattgaaggatgtttgttaactgcttacgcagttaatgctcacaagtgttttatttacataagaggagaatattttaaagaaggaaaaaaattacaaaaagcaatagatgaagcttatgaaaaaaatttaattggaaaaaacgcttcaggaacagaatgggattttgatataagtattcattatggagcaggcgcatatatatgtggtgaagaaacagctttattagaaagtttagaaggtaaaaagggtcaaccaaggttgaaaccaccatttccagctttaattggtttgtatgggtgtccaactataattaacaatgttgaaacgattgctgttgtaccaactatattaagaaaaggtgcaaaatggtttgcatcaatcggcaaaccaaaaaatactggcactaaaatattttgcatatcaggaaacgttaacaaaccatgtaacgttgaagaagaaatgggaatatcccttaaagagttaatagaagttcatgcaggtggcgttattggtggttgggaaaatttacaagcagtaatacccggaggatcttccatgccattgttgcctaaaaaaacctgtgaaacaattactatggactttgattcattaattaaagaaaaaagtgg

SEQ ID NO: 222264 - DNA, 889 bp, Unknown
  Bacterial polypeptide expressing nucleotide sequence isolated from the Sargasso Sea
gacaaaggcagagagtggattatcaatgagattaaagaatctcagcttagaggaaggggtggagctggttttccgacaggacttaaatggtcttttgcacccaaagaggtaggatcaagaccacattatttagttattaatgctgatgaatctgaaccaggcacttgtaaagatagagatattttaagatttgaacctcacaaattaattgaaggatgtttaattgcatcttatgcagtccaagcacatgtttgttatatttatatcagaggtgaatattttattgatggacaaaaacttcaagctgcaatcgatgaagcatatgaaaaaaaattaattggcaagaatgcagctggaacaggatgggacttagatatttatattcattatggagcaggagcttatatatgtggtgaagaaacagcattacttgaaagcatagagggaaaaaaaggtcaaccaagattaaaaccgcctttccctgctttaataggactttatggatgtccaactataattaataatgttgagactatagcagttgttccgacaattcttagaagaggtggtaaatggtttgcatctttaggaagggaaaaaaatacaggaacaaaaattttttgtatttctggtaacgtaaatagtccttgtaatgttgaagaagaaatgaatataccattaaaagaattaatagaagttcatgctggtggcgttataggaggatgggataatttacaagctgttattccaggtggatcatcaatgccattaattccaaaagaaaaatgtgaaacattaactatggattttgattctttagtagctgaaaaaagtggattaggaacagcaggtgtagttgtgattaataaagatcaagacataattaaat

SEQ ID NO: 222265 - DNA, 868 bp, Unknown
  Bacterial polypeptide expressing nucleotide sequence isolated from the Sargasso Sea
ggagaatatttcaatgaaggcaaaaaactgcaagaagctataaatgaagcatatgaaaaaaagttacttggtttaaatgcttgtgagagtggatggaattttgacatatatattcattatggggcaggagcttacatttgtggtgaggagactgctttattagaaagccttgaaggcaaaaagggtcaacctagacttaaacctcctttcccagctttaataggactatacggttgcccaacaattataaacaatgttgaaactattgcagtagtcccaacaatattaagaagaggagccaagtggttttcaaatataggtaacccaagaaacacaggaacaaaaatttattgtatttcaggtaatgtaaataatccatgcaatgttgaggaagaaatgggaatttcattaaaagacttgattgaaaaacatgcaggaggtgtaactggtggatgggataatctcaaagcagtaataccaggtggctcttctatgccattactacccaaaaatatttgtgaaacaattaagatggactttgattcattggctgaacagaagagtgggttaggaaccgcaggtattgtggttataaataaagatcaagatataattaaatgtatggctagaattgcaagattctataaacatgaaagctgtggtcaatgtacaccatgtagagaaggatcaggatggatgtggagaatgttagagagaatggccaaaggtgaagcctcaagagatgaagttgacatgctaatggatgttactaaacaaatagaaggacatacgatctgtgcatttggagagggatcagcatggccggtacaaggtttgcttagacattttaaaaaagaagtagcaaaaa

SEQ ID NO: 222266 - DNA, 508 bp, Unknown
  Bacterial polypeptide expressing nucleotide sequence isolated from the Sargasso Sea
gaaaaccaaaaaaaaatacctgagaatttaaacaatagcaaaagatttgcagacaaaggtttcataacaacatcttttgataatcttgttaattgggcaagaaccggatcattacactggatgacttttggtttggcatgctgtgcagttgaaatgatgcaaacctctatgccaaggtatgatttagaaagatttggcgcagcacctagaggatcaccaagacaatcagatgttatgattgtagctggaactttaacaaataaaatggctccagctttaagaaaagtttacgatcaaatgccagaaccaagatatgtaatttctatgggcagttgtgctaatggaggtggttattatcattattcttattctgttgtgagaggatgcgatagaattgtacccgttgatatttatgttccagggtgtccaccatctgcggaagcattactatacggaattttacaattacaaaaaaaaattcgtaacagtggatctttacaaagataaa

SEQ ID NO: 222267 - DNA, 934 bp, Unknown
  Bacterial polypeptide expressing nucleotide sequence isolated from the Sargasso Sea
caagcctcactatttagtagttaacgcagatgaatctgagcctggcacatgcaaagatagagagattttaagaaatgatcctcatttattgcttgaaggttgtttgatagctggttttgctatgcaagctcatacttgttatatttacattaggggagaatattacaatgagtcatctaatttacaaaaagcaatagatgaagcttataaatctaatttaataggtaaaaattcttgtggtacaaattgggattttgatatttttttacacagaggggctggggcttacatatgtggagaagagactgcacttctagaaagcttggaaggtaagaaaggtcaacctagattaaaacctccatttcctgcaggagcaggtttatatggatgtccttctactgttacaaatgtagaaaccattgcggttgctccaacaattttaagaagaggagctaattggtttgccagtcttggaaatcctaaaaatacaggtacaaaaatatttagtatatctggtcatgtaaacaaaccatgtaacgtagaagaagaaatgggaataccattaaaagaattaatagaaactcatgcaggaggagtaataggagggtgggataatttacttgctgttataccaggaggcgcaagcgtaccactaattccaaaatctatctgtgataaagttaaaatggattttgatagtttaaaagaagttcagagtggccttggtactgcagcagtaatagtaatgaataaaagcacagatattgttgaagcaattactagattatcacatttttataaacacgaaagttgcggacaatgtacgccatgtagagaaggaactggatggatgtatagaattatgagtaagatgattaatgggaatatagaaaatgatgatattgataaatttatagatgtcactaagcaatag

SEQ ID NO: 222268 - DNA, 791 bp, Unknown
  Bacterial polypeptide expressing nucleotide sequence isolated from the Sargasso Sea
tacttgctatatttacataaggggtgaatattattctgaatcttctaatttacaaaaagccatagatgaagcttacgcaaataatttaattggtaaaaatgcatgtggttcaggttgggattttgatatttatcttcatagaggggcaggagcatatatttgtggtgaagaaactgctttacttgaaagtttagagggtaaaaaaggccagcctcgattaaagcctccatttcctgctggctcaggcttatatggatgtcctacaacagtcacaaatgttgaaacaattgctgtttcgccaacaattttaagacgtggttcaaaatggtttgctaatttaggaagtgccaacaatacaggtacaaaaatttttagtatttcaggacacgttaataacccatgcaatgtagaagaagaaatgggtataccattaaaagatctgattgaaaatcatgcaggcggggtaattggtggttgggaaaatttattagctgtaattcctggaggggcaagtgtgcctttattacctaagtctatttgtgatactgttaaaatggattttgatagcctaaaagaagttcaaagtggattaggaactgcggctgttattgtaatgaataaatcaacagatattgttgaagcaatagctagattatcacatttttataagcatgaaagttgtggtcaatgcacaccttgcagagaaggtactggatggatgtacagaatgatggaaaaaatgattcatggaaatgttaagcataaagatattgataaaattttagatgtga

SEQ ID NO: 222269 - DNA, 485 bp, Unknown
  Bacterial polypeptide expressing nucleotide sequence isolated from the Sargasso Sea
gtttaaaaaattagctaaagactttagtgacaaaggttttattacaacttcatctgataatttaataaattgggcaagagcaggctcactgcattggatgacctttggattagcatgctgcgctgttgaaatgatgcaaacatctatgcccagatacgaccttgaaaggtttggagctgcaccaagaggttcgcctagacaatcagacgtaatgatagttgctggaactttaactaacaaaatggctcctgcattaaggaaagtttacgaccaaatgccggaacctagatatgtaatttcgatgggtagctgtgcaaatggtggcggttattatcattattcttactctgttgtaagaggatgtgatagaattgttccagttgacatttatgttcctgggtgcccaccttcagcagaagcattgctttatggaattatgcaattacaaaagaaaattagaaatcaaggatctttagaaagataat

SEQ ID NO: 222270 - DNA, 364 bp, Unknown
  Bacterial polypeptide expressing nucleotide sequence isolated from the Sargasso Sea
gctgttgaaatgatgcatacttcaatgcctagatatgatttagaaagatttggtgcagctccaagagcatctccaagacagtccgatgttatgatagtagcaggaactttaacaaacaaaatggctccagcgctcagaaaagtttatgatcaaatgcccgaaccaagatatgttatatccatgggaagctgtgcaaatggtggaggttattatcactattcatattcagtggtcagaggatgtgatagaattgtgccagtagatatttatgttcctgggtgtccaccttctgctgaggcattactgtatggtgttttgcaattacaaaaaaaaataagaaataaaggttctttagaaagataat

SEQ ID NO: 222271 - DNA, 757 bp, Unknown
  Bacterial polypeptide expressing nucleotide sequence isolated from the Sargasso Sea
atgcttaatgctaaagataaagtttttcaaaatcttcatggttttcaagaaccctttatcgaaggagccttacaaagaggttcttggtctaacacaaaagaaattttgtccaaaaatcaaaatgatatcattgaattggtgaaatcaagtcagctcagaggaagaggtggcgcaggcttctctactggtcttaaatggtcatttatgccaaaggatacaggtaagcaacattatctagttgttaacgcagatgagtctgaacctggaacttgtaaagacagagaaattataagaaatgatcctcatacccttgttgaaggttgtttaattgcatcatatgctattcaagcatcaaagtgctatatatatattagaggtgaatatcactacgagtacgttcaattagaaaaggcaatcgaagaagcttataaccgaggctacataggaaaaaatgcctgtggtagtggatttgatttcgatctttatgtccataggggtgctggagcttatatatgtggagaagaaacagctcttttagaaagtttagagggaaaaaaaggtcaaccacgactaaaacccccttttcctgctggtgtcggtttatatggcatgcccacaactattaataacgtagagtcaattgctgtagttcctactatattaagaagaggtccagattggtttaaatcaattggtgccgagaataacacgggtacaaaaattttttgtatatctggaaatgtcaacaagcctgcac

SEQ ID NO: 222272 - DNA, 761 bp, Unknown
  Bacterial polypeptide expressing nucleotide sequence isolated from the Sargasso Sea
attgaaaccaccattcccagctttaattggtctttatggatgtccaacaattataaacaatgttgaaactatagctgttgtcccaacaattcttagaaaaggtggaaaatggtttgcctctcttggaagagaaaaaaatactggtacaaaaatattctgtatctcaggaaatgttaatacaccgtgtaacgttgaggaagaaatgaatatctcattaaaagaattaatagaggttcatgctggaggtgttattggtggatgggataatttgcaagcagttattccaggtggttcgtcaatgccattaattccaaaagaaaaatgtgagacattaactatggactttgattctcttgtggcagaaaaaagtggtttaggaacagctggtattgttgtcattaataaggatcaagatatcattaaatgtatggctagaattgcgaggttttataaacacgaaagttgtggtcaatgtacgccttgtagagagggatctggttggatgtggagaatgcttgagagaatggcaaaaggtgatgcaaccaaagatgaagttgatatgttaggtgatgttactaatcaaattgcaggacacacaatatgtgcttttggagaaggatcttcatggcctgttcaagggcttttaagacattttaaaaaagagatagagaagcgaaataatttggatcctattattcagaaaaaaaatagtattccttatttagtggaccaacacttattggataaaaaaaatgcttaaa

SEQ ID NO: 222273 - DNA, 523 bp, Unknown
  Bacterial polypeptide expressing nucleotide sequence isolated from the Sargasso Sea
aatgaatttagaagatagaaaaaatcaaataccagaagaatttaaaaagcttgcgcaagattttagtgagaatggtttcataacaacttctttagataatctaataaattggtcaaggtctggatctcttcactggatgacttttggtttagcatgttgtgcagttgaaatgatgcaaacttctatgcctagatatgatcttgaaagatttggcgcagcacctagagcctcacccagacaatcagatgtaatgattgttgctggaacattaacaaacaaaatggctcccgctcttagaaaagtttacgatcaaatgcccgaacctagatatgtaatatcaatgggaagttgtgctaatggtggaggttattatcactattcttattcagtagttagaggatgtgatagaatagtacctgttgatgtttatgtacctggctgcccaccatctgctgaagcacttttatatggaataatgcaattgcaaaaaaagattagaaataaaggttctattgataggtaa

SEQ ID NO: 222274 - DNA, 340 bp, Unknown
  Bacterial polypeptide expressing nucleotide sequence isolated from the Sargasso Sea
tatgcccagatatgatttggaaaggtttggagctgcaccacgtggatcaccaagacaatcagatgttatgattgttgcgggtacactaacaaataagatggcaccagctttacgtaaagtttatgatcaaatgccagaaccacgttatgtaatatcaatgggtagctgtgcaaatggtggtggatattatcattactcttattcagttgtgagaggttgtgacaagattgtgcctgtagatatttacgtaccaggttgtccgccctcagctgaagcattgctatatggtattatgcaactacaaaaaaaaatccgtaataatggatcattagaaaggtag

SEQ ID NO: 222275 - DNA, 514 bp, Unknown
  Bacterial polypeptide expressing nucleotide sequence isolated from the Sargasso Sea
aatgggaatagatcaatcaaaagattttattgatcaagcattagacaatgaactatcttccaaaggctttcttgtcgcaagttacgataaggttttaacttgggcaagaactggatcattgtggccgatgacttttggtttagcatgttgtggagtggaaatgattcattcatacatggctagatatgatttagatagatacggcgtaataccaagaggaagcccaaggcaatcagatgttatgatagtagctggaacacttacaaataagatggcaccagcacttagaaaagtttatgaccaaatgccagaaccaagatgggtaatttctatgggatcttgtgcaaatgggggtggttattatcactattcttattctgttgttaggggttgtgatagaattgtccctgtagatgtttatgttccaggatgtcccccaacagctgaagcacttgtttatggaattctgcaacttcaaaaaaaaattagaagagaaaacaaatttaaaagatag

SEQ ID NO: 222276 - DNA, 523 bp, Unknown
  Bacterial polypeptide expressing nucleotide sequence isolated from the Sargasso Sea
aatgaattttgcggaaaaagaaaaaaaaattcctgaagaatttaaagatttagcaaaagattttggagaaaaaggttttataaccacttcttttgataatttaattaattgggcaagaacaggatcacttcactggatgacatttggtttagcatgctgcgccgtagaaatgatgcaaacatctatgccaagatatgatcttgaaagatttggtgctgcgccaagagcttcacctcgccaatcagatgttatgattgtagccggcacattaacaaataagatggcacctgcattaagaaaagtatatgaccaaatgccagaaccaagatatgtcatatctatgggaagttgcgccaatggtggaggatattaccattattcttattcagttgttagaggttgtgacagagttgttcccgtagatgtttatgtgccaggatgccctccttcagcagaagcattattatacggcattttgcaattacaaaaaaaaattagaaataaaggttcaatagaaagataa

SEQ ID NO: 222277 - DNA, 910 bp, Unknown
  Bacterial polypeptide expressing nucleotide sequence isolated from the Sargasso Sea
aaattctgcacaaaatcgaggtgattggaataatgtaaaagaaatttgtgacaaaggtagagattggataataaatgaaattaaaagctctgaattaagaggacgtggtggagctggttttccaacaggattgaaatggtctttttgtccaaaagaacttggttcaagaccacattatttagttataaatgctgacgagtccgaaccaggcacatgtaaagatcgagatattttaagatttgaaccacacaaattgttagaaggttgtttaattgcctcatatgcagttaatgcacacaaatgttacatttatattaggggtgaatattacaatgagggacaaaaattacaaaaagcaattgatgaagcttatgaaaaaaatttaatcggtaaaaatgcctcaaatataggttgggatctagatatttatattcactatggagctggagcttatatatgtggagaagagacagcattgttggaaagcttagaaggaaaaaaaggtcaacctagattaaaacctccatttccagctttaataggtttgtatggatgtccaacaataattaataatgtcgaaacaattgctgttgttccaacaattttaagaagaggagcaaaatggttttcttcattaggaagaccaaaaaatactggaacaaaaatttattgtatttctggaaatgttaacaatccatgcaacgttgaagaagaaatgggaattccattaaaagaattaatagaaaaacatgctggaggagtgactggtggatgggataatttaaaagcagtgatacccggcggatcatcaatgccattattacctaaaaatatttgtgaatctataaaaatggattttgatgcttgtgttgaaaacaaaactggtcttggtacagcaggtatagttgta

SEQ ID NO: 222278 - DNA, 988 bp, Unknown
  Bacterial polypeptide expressing nucleotide sequence isolated from the Sargasso Sea
tttaggggcaattgtcggtgtttttttttgcgtcaaatagtgaaaagccaagctatttatcttacaatagcgttaatattcttatcttgttttttaagttggatagtttttctttcacacggtgctcatgtagaaaaaattactctctttcgttggataaacagcggagacttgtcagctaattggtcgataaggttagaccgattgacgtcaataatgctggttgttgtaacttcagtctctgccttagttcatctttatagtgtaggctacatggctcatgatgaaaattggaaagaggatgaacattataaagcaaggttttttgcttatttatctttttttacgttcacaatgttgatgttggtaacctctgataacctaattcagatgttttttggttgggaaggtgtcggggtagcctcttatttattgattgggttttactaccgtaaacaaagtgcaaacgcggcagctatcaaggcttttgtagtcaatcgggtaggtgattttggatttgcattaggcatttttggtttatttatgttgactggtagtataaattttgatgatattttttctgcagctccgaaattagcagaaacaagccttacgtttctttggagtgattggaatgcagcaaacttaatcgcttttctcctttttgttggagctatgggcaaatctgctcaactttttttacatacttggttgccagatgctatggaaggaccaactccagtgtctgctttaatccatgcagcaacaatggttactgccggtgtttttctggtttgtagaatgtcaccattaatggagtacgcaccaacggccctcagttttattacaatccttggggcttttacagcctttattgctgcaaccattggtttggtgcaaaatgatataaagcgcgtaatagcttactcaacaatgtcccagttaggatatatgtttgttgctgccggtgttgggtgcctattcggta

SEQ ID NO: 222279 - DNA, 880 bp, Unknown
  Bacterial polypeptide expressing nucleotide sequence isolated from the Sargasso Sea
ttcaatattttttttacctctttttggttttcttttttgttttctattcggaaagtattttaatgataaagtatatgaaattactacaacttcacttctttttatttgtgcagtattttcttggataattttttttcaatatatcaataatagggagattgaaattatctttattattaattggataacttcaggtaattttattgtcgattggtctattagattagacacattgactgctgtaatgtttattgttgttacaactgtttctgtttgtgtgcatttatattcaataggttatatggaagaggacccatctaaaataagatttatgggatatttgagcttatttactttttttatgcttgttcttgtatcaagtaataatttattacaaatgttttttggttgggaaggtgttgggctagcatcttatttattaattggattttggcatcataaagactctgcaaataaagcagcaatcaaggcatttgtagtaaatagagttggggattttggatatgctataggaattgcaggtattttttttgtttttggaacaataaatttagataatatatttgatcaagtagatcaatttagtgcacatcaaattgagtttctttcattaagtttccccactctagattttttgtgctttcttttattcataggcgctatgggtaaatctgctcagctaggtttacatacttggttgcctgatgccatggaagggcctactccagtttctgcattaatacatgccgctacaatggtaacagctggtatatttttggttgcaagaatgagtcctctatatgagtttgcgaattttacaaatgtattcattacttttattggagcaggctactgcaat

SEQ ID NO: 222280 - DNA, 517 bp, Unknown
  Bacterial polypeptide expressing nucleotide sequence isolated from the Sargasso Sea
aatgaataataagttaaatcaagtacctgaggagtttaaacaacttgctaaggattttagtgagaatggatttattacaacttctttggataacttaattaattggtcaagatcaggttctctacattggatgacttttggattagcttgttgcgcagttgaaatgatgcaaactgctatgccaagatatgatgttgaaagatttggagcagcacccagaggttcaccaagacagtctgacgttatgatagtagctggtactttaaccaataagatggccccagcgttaagaaaagtatatgatcaaatgccagaacccagatatgtcatttcgatgggcagttgtgctaatggtggtggatattatcattactcatattcagttgtaagaggttgtgatcgaattgttccagttgacatatatgtacctggatgccctccttcagcagaggcattactatatggaatacttcaattacaaaaaaaaattagaaaaaaaggttcgttaaatagatag

SEQ ID NO: 222281 - DNA, 854 bp, Unknown
  Bacterial polypeptide expressing nucleotide sequence isolated from the Sargasso Sea
ttctggaatcgattgggattttgatatttacattcattacggcgcaggtgcctatatttgtggtgaagaaactgctttactcgaaagtttagaaggaaaaaaaggtcaaccaagattaaaacctccatttcctgcattaattggattatatggttgcccaactataattaacaatgttgaaacaatttcagtagtacctacaattttaagaaggggcggcaaatggttttcatctcttggtcgtgcaaaaaatacgggaacaaaaatttattgtatatcaggtaatgttaataatccatgtaacgttgaagaagagatgggtatacctctcaaagatttaattgaaaaacatgcaggtggtgtagttggtgggtgggataatttaaaagctgtaataccaggtggatcatcaatgcctttattgcctaaacaaatatgcgacacaatcaaaatggatttcgatttttgtgtagaaaataaaacaggacttggtacggcaggaattgttgtaataaacaatgatcaagacataattaaatgtatggcaagaattgctagattttacaaacatgaaagttgtggacaatgtactccatgtagggagggatcaggttggatgtggagaatgttagaaagaatggcaagaggagatgcaactagagatgaagtagatatgttattggatgttacaaaacaaatagaaggtcatacaatctgtgcttttggtgaaggttcagcttggcctgtgcaaggattaattagacattttaaagatgaaataattgaaagaaataaatttgaccctattgttaaaaagaaaaaaaatattccttacttagtagatcaacacttat

SEQ ID NO: 222282 - DNA, 781 bp, Unknown
  Bacterial polypeptide expressing nucleotide sequence isolated from the Sargasso Sea
cgaggtgcaggagcatatattctgtggagaggaaacagcattattggagagtttggagggtaaaaaaggtcaaccaagacttaagcctccatttccagctaataagggtttatacggttctcctacaacagtgaataacgttgaaactatagctgtggttccaacaattttaagaaaaggtggtgattggtttgcatcatttggtagagcaaaaaatactggcactaaagttttttgtatctcaggacatgtaaataaaccatgcaacatagaagaagaaatgagtattcctctcaaagaacttatcgaaaagcatgctggaggtgtaattggtgggtggtctaatttaaaagctataatacctggtgggtcatcggtcccactaattccaaaaaagatttgtgacacagtattgatggattttgactcacttgttgaggttaaaagtggcctaggaacagctgcagtaattgttatggataaaacaactgatttagtgaaagcaattgcaaatctatctcatttttataaacacgaaagttgtggtcaatgcactccttgcagagaaggcgcgggatggatgtggagaatgatgctaaaaatttctaagggagaagcctctccatctgatattgataaattattagatgtcacaaaacaaatcgaagggcacactatatgcgctcttggtgatgctgcggcatggcctattcagggactgtttagacattttagagatgaaattgaagatcaattaattaagaaaatcagagctgcgtaa

SEQ ID NO: 222283 - DNA, 523 bp, Unknown
  Bacterial polypeptide expressing nucleotide sequence isolated from the Sargasso Sea
aatgaatttagaggatagaaaaaataatatacctgaggagtttaaacagttagctcaagattttagtgacaatggttttataacaacatctttagataaccttgttaattgggcaagaacaggttcattgcattggatgacgttcggactagcttgttgtgctgttgaaatgatgcaaacatctatgccaagatatgatcttgaaagatttggtgcagcacctagagcatcgccacgtcaatcagatgtcatgatagtagcaggtacgctaacaaataaaatggctcctgcattaagaaaagtttatgaccagatgcccgaacctagatatgtaatttctatgggaagttgtgcaaatggtggaggctattatcattattcatattcagtagtgagaggatgcgatcgagtggtacctgttgatgtatatgttcctggatgccctccttcagctgaagctctactttatggaatcttacagttacagaaaaaaattagaaataaaggttctttagaaagataa

SEQ ID NO: 222284 - DNA, 848 bp, Unknown
  Bacterial polypeptide expressing nucleotide sequence isolated from the Sargasso Sea
ttatattcattatggagctggtgcttatatatgtggagaagaaacagctttattagaaagtttggagggaaataagggacaaccaaggttaaaacctccttttccagcattagttggtctgtatggttgccctactatagtaaacaacgtagagacggttgctgttgttccaacaattttaaggagagggtcaaaatggttttcatcattgggaaaaccaaaaaatactggaactaagatattttgtatttcaggaaacgtcaattctccgtgtaacgtagaggaagaaatgggtatcccgctaaaagagcttatagaaaaatatgctggaggtgtaataggtggatgggaaaatttacaagctgttataccgggaggatcttcaatgcctttattaccaaagaaaatatgtgacagtattaatatggactttgactctttaattgcagcgaaaagtggtcttggaactgcaggaataattgtaattaataaagatcaaaatatcattgaatgtatggctagaatcgcaaaattttataaacatgaaagttgtggtcagtgcactccttgcagagaaggatccggatggatgtggagaattttagaaagactggctaaaggagaggctactcacagcgatattgatctattatctgacgttacaaaacagattgaaggacataccatttgtgcttttggcgaaggttcagcttggcctgtacaaggtttacttagacatttcagaaaagaaatagataaaaaatgtataggagaaccactaattaaaaagaaaagaaacattccatacttagtagatcaacatttattggagaaggacaatgcctaaa

SEQ ID NO: 222285 - DNA, 463 bp, Unknown
  Bacterial polypeptide expressing nucleotide sequence isolated from the Sargasso Sea
aatgaataataaaatagatcaagttcctgaggaatttaaacaacttgctgaagattttagtaagaatggttttataactacatcacttgataatttaattaactggtcaagatcaggatcacttcattggatgacttttggtttagcttgttgtgctgttgaaatgatgcaaacagctatgccgagatatgatttagaaagatttggagcagctccaagaggttcaccaagacaatcagacgttatgatagtagcaggaactttaacaaataaaatggctccagctttaagaaaagtttatgaccagatgcccgaaccaagatatgtgatttcaatgggtagttgcgcaaatggaggtggatattaccattattcatattcagttgttagaggatgtgatcgaattgttcctgtagatgtttatgtaccaggatgtcctccatcagcagaggcattgttatat

SEQ ID NO: 222286 - DNA, 523 bp, Unknown
  Bacterial polypeptide expressing nucleotide sequence isolated from the Sargasso Sea
atgaatctaccaaacagagaaaaacaaataccagaagaatttaaggaacttgcaaaagaatttgctgataaaggttttataactacatcagtcgataatctaattaactgggcgcgttcgggatctttacattggatgacatttggacttgcatgttgtgcggtagaaatgatgcagacgtctatgccaagatatgatcttgaaagatttggtgctgcaccaagagcatcacctagacaatcagatgtaatgatagttgcaggaactttaacaaacaaaatggcaccagcattaagaaaagtttatgatcagatgccagaacctagatacgttatttctatgggtagctgtgcaaatggaggaggatattatcattactcttattcagttgtgagaggttgtgacagaatagttccagttgatgtatatgtgcctggatgcccaccctcagctgaagcattgatgtatggaattttacaacttcagaaaaaaataaggaatcgtggatctttacaaagataaa

SEQ ID NO: 222287 - DNA, 677 bp, Unknown
  Bacterial polypeptide expressing nucleotide sequence isolated from the Sargasso Sea
aatgcttgaagataaagatagaatatttcaaaacttatataatgatggtggtcctgacataaattcagcactaaaaagaggtgattggaaagacacaaaagaaatttgtgaaaaaggtaaagaatggataatcaatgaaattaaatcatcagaattaagaggtagaggtggggctggatttccaactggcttgaaatggtcattcgctccaaaagaagttggttccaaacctcattatcttgttattaatgcagatgagtctgaaccaggaacatgtaaagatcgcgacatattaagatttgaaccacataaattgatagaaggatgtttgattgcttcatatgcagttaatgcacataaatgttatatatatataagaggagaatattttaacgaaggcataaatttacaaacagctattgatgaagcctatgaaaaaaatttaattggaaaaaattcctgtggaaccggatgggatttagatatttatattcattatggagcaggtgcatatatatgtggagaggaaacagctttattagaaagtttagaaggaaaaaaaggccaaccaagactaaaacctccatttcctgcattaattggtttatatggctgcccaacaatagttaataatgttgagacagttgcagttgttccaacaattttaagaagaggag

SEQ ID NO: 222288 - DNA, 499 bp, Unknown
  Bacterial polypeptide expressing nucleotide sequence isolated from the Sargasso Sea
ttgggattagaaacggataatgatttaattgatcaacaagggcccggttttattattacatccgtagataaactggttaattgggcaagaacaggctcaatgtggccggttacatttggtctagcatgttgtgctattgagatgatgcatgcaggagccgcaagatatgataccgatcgttttggtgtattctttagaccgagtccgaggcaatcagacgtcatgatcgtcgcaggaacgcttgtcaataagatggcccctgcacttagaaaagtatacgaccaaatggctgaaccaaaatgggtcatttccatgggatcatgtgccaatgggggcggctattaccatcattcgtattctgtggttagaggttgtgatcagattatccctgttgatatctatgttccgggatgcccgccgacttcagaggcattgatcaatggaatcatagaactccaagaaaaaatcaagaatgaagaatcgatcgcaaatggatagt

SEQ ID NO: 222289 - DNA, 835 bp, Unknown
  Bacterial polypeptide expressing nucleotide sequence isolated from the Sargasso Sea
ttatggagcgggagcatatatttgtggtgaagagacagcactacttgtgagtattgaaggtaaaaagggccaaccaagattaaaacctccttttcctgcattaataggactttatggttgtccaacaataattaataatgttgaaactattgcggttgttccaacaatacttagaaaaagcggtaaatggttttcttctttaggtagagaaaaaaatacaggtacaaagattttttgcatatctggaaatgtaaataatccttgcaatgttgaggaggaaatgaatataccattgaaagaattaatagaagttcatgctggaggtgtaattgggggctgggataacttgcaagcagttattccgggtggatcttcaatgcctttgatcccaaaagaaaaatgtgaaactttaaccatggatttcgattcattagctgctgaaaaaagtggactaggaacagctggagtagtcgtgattaacagggatcaagatattattaaatgcatggctagaattgcaagattttacaaacatgaaagttgtggtcaatgtactccttgtagagaggggacaggatggatgtggagaatgcttgaaagaatgtcaaagggtgaagcaactagagatgaagttgatatgctaagtgatgttacaaatcaaatagcaggacatacaatttgtgcatttggagaaggttcatcttggccggtccaaggattattaagacattttaaaaaagaaatcaaagaaagaaataaatttgatccgattgttaaagaaaacaaaaatattccttatttagttgatcaacatttattggataaaaatgcttaa

SEQ ID NO: 222290 - DNA, 640 bp, Unknown
  Bacterial polypeptide expressing nucleotide sequence isolated from the Sargasso Sea
aatgcttaaagacaaagatcgaatttttcaaaacttatacaatgatttaggagctgatatagactcatcacaaaaaagaggcgattggattaatactaaagagataattgataaaggaagagattggataatagatgagattaaaaactcacaacttagaggaagaggtggtgctggttttccaacaggtttaaaatggtctttcgctcctaaagaagttggtcatagaccacattacttggtaattaatggtgatgaatccgaacctggtacttgtaaagatagagatatattaagatttgaaccccacaaattaattgaaggatgtttaatagcctcttatgctgtccaagcgcatgtttgttatatctatataagaggtgaatattttgtagacggacaaaaactccaagctgcaattgacgaggcttatgagagaaaactaattggtaaaaatgcagctggcactggttgggacttagatatttatattcattatggtgctggagcttatatttgtggtgaagaaacagcgttattagaaagtattgaaggaaataaaggtcaacctagattaaaaccaccttttccagcactaataggtctttatggatgtccaacaataattaataatggttga

SEQ ID NO: 222291 - DNA, 529 bp, Unknown
  Bacterial polypeptide expressing nucleotide sequence isolated from the Sargasso Sea
atgaaaatagatactattaaagaggataataaaatacctgaggaatttaagcagatagctaaagactttagtgaaaatggatttgtaacaacctcgatgacaaatcttgttaattgggcgagaacaggatcactacattggatgacttttggattggcttgttgtgcggttgagatgatgcaaacctcaatgccaaggtatgaccttgaaagatttggtgcagctccgagagctagtcctagacaatcagatgtaatgatagttgctggaactttaacgaataaaatggctccagcacttagaaaagtttatgatcaaatgcctgagccaagatatgttatttccatgggaagttgtgcaaatggtggcgggtattatcattactcatattctgtagtaagaggatgtgacaggattgttcctgttgatatatatgtgcctggctgcccaccatctgcagaggcattattatatggaattatgcaacttcaaaagaaaattagaaataagggatctttagagagataat

SEQ ID NO: 222292 - DNA, 337 bp, Unknown
  Bacterial polypeptide expressing nucleotide sequence isolated from the Sargasso Sea
agcagatatgacttagatcgcttcggattagtatttagaccaagtcctagacaatctgatgttatgatagtagcaggaacattaactaataaaatggctcctgcgttaagaaaagtttatgatcaaatgcctgagcctagatgggttatttcaatgggaagttgtgccaacggtggaggctattatcactattcatactcagttgtaagaggatgcgatagaattgttccagtagacgtgtatgttcctggttgtcctcctactgcagaagcattgttatatggtattattcaattacaaaaaaaaattacccgacagaattcactaggagtgtaat

SEQ ID NO: 222293 - DNA, 308 bp, Unknown
  Bacterial polypeptide expressing nucleotide sequence isolated from the Sargasso Sea
gtttcggcctagcccacgccaatcagatgttatgattgttgcgggcacactaactaataaaatggctccagcgttacgacgtgtttatgatcagatgccagagcctcgctgggttctctctatgggatcatgcgctaatggcggtggctattatcactattcttacgctgttgtgcggggttgtgatcgaattgtgccggtggatgtgtatgtgccgggctgtccgccaactgccgaagcactgatatacggcctattacaattacagaaaaagattcgaagaacagcgacaatttcgcgaaactagg

SEQ ID NO: 222294 - DNA, 835 bp, Unknown
  Bacterial polypeptide expressing nucleotide sequence isolated from the Sargasso Sea
atgcttaaggataaagataaaatttttaaaaatttatatggttttgatgattggaagttagaaggagctaaaaaaagaggtgtgtgggtaggcaccaaagacctcattgaaatgggtagtgagaaaataattgaagaaattaagaatagtcaattaagaggaagaggaggcgcaggttttcctgcaggtttaaagtggtcatttatgcctaaaaactcaggtaaggatcattatttagtagttaatgccgatgagtcagaacctggaacgtgtaaagatagagaaattatgagaaatgaccctcatttattgcttgagggatgtttagttgctagctttgcaatgaatgctcatacttgctatatttatataagaggagaatattattctgagtcttcaaatttacaaaaagcaattgatgaagcctatgctaataatttaattggtaaaaatgcatgtaatactggttgggattttgacatttttcttcataggggtgctggagcttatatttgtggagaagaaacagctttacttgaaagtttggaaggtaaaaagggtcagccaagattaaaaccaccatttccagcgggtgcaggattatatggctgcccaactacagttactaatgtagaaacagttgctgtttcaccaactattctaagacgtggatctaaatggtttgcagatttaggtagtccaaataatactggtacaaaaatttttagtatttctggtcatgtaaataatccatgtaatgttgaagaggaaatgggaatttctcttagggaactaatgaaaaacacgccggtggagttattggtggatgggataa

SEQ ID NO: 222295 - DNA, 313 bp, Unknown
  Bacterial polypeptide expressing nucleotide sequence isolated from the Sargasso Sea
tggtgctgctccgagagcttcacctagacaatcagatgttatgattgttgctggaactcttacaaataaaatggctccagcactaagaaaagtttatgatcaaatgccagaaccaagatatgtaatttctatgggaagttgtgcaaacggtggtggatattatcattactcctattcagtagtaagaggatgtgatcgtattgtaccagttgatgtatatgttcctgggtgccctccttctgctgaagcacttttatatgggataatgcaacttcaaaagaaaatcaggaacaaaggttctctggaaagataa

SEQ ID NO: 222296 - DNA, 874 bp, Unknown
  Bacterial polypeptide expressing nucleotide sequence isolated from the Sargasso Sea
catgggcttcgaagcgattgaaagcgctttcttgattgttgccgtacccttgttaatcttccccgccattctgattattggtcagatgaacaaaggtgaagattggtggaagaatcaactgaaggagggcggaatcgttgcgctcgctggattgatgatcacactctcgttgactgtttggttgattgttgaattcttggtacatcatgccgaattcggtgcacaagggaccatccttgactggattcactttgaagttttgagttcgaatggtgattgggtaacatcaaccctgagcttcggactgtggattgatagcgtctcactcaccgtcctattcgtagccgcattcctctgttttctcatttgctggttcgccattggatacatgaccacagatcatcagaatgaagaccgcaatcaccgattctttgccgagtttgtcttgtttagcatgggcatgttcggtatggtcctcgcggacagtttcctctggttgttcattttctgggaaatcatgggtctctgttcctacttactgattggattctattgggaaaagcccagtgctgctgccgctgcgaagaaggctttcctcaccacacgcgtaggagacgtattcctcatggtcggcttgttcatgctgtatgatttgtatcacagtcttgagttcgctgtcattttcggtgacccaactctaggtggaaccatccagggttcagaacttcagtggccactgattatgatgttcattgggtgtgtaggaaagtctgcccaattccccctccatgtatggttgcccgacgcgatggagggtccaacccccgtctccgcgttaattcacgctgcaaccatggtcaacgccggcctgtat

SEQ ID NO: 222297 - DNA, 898 bp, Unknown
  Bacterial polypeptide expressing nucleotide sequence isolated from the Sargasso Sea
aaggtttttataggtattaatgcttctggtactgggtgggatttagatatctacattcattatggtgcaggcgcttatatatgtggagaagaaactgctctattggaaagtttggaaggtaaaaaaggtcaacctagattaaaacctccttttcctgctttaataggtttatatggatgtccaacaataataaataatgttgaaaccatctctgttgtaccaacaatattaaggagaggcggtaaatggttttcatctttaggtagagcaaaaaatacaggaacaaaaatttattgcatttcaggaaatgtaaacaatccatgtaatgttgaagaagaaatgggtattccattaaaagatttaattgaaaaacatgcgggtggtgtagttggtggatgggataatctaaaagcagttatacctgggggttcgtcaatgccactattgccaaaaaaagtatgtgatacaattaagatggattttgatgcctgtgttgaaaataaaactggacttggtacagcgggcatagttgttataaaccaggatcaagacattattaaatgtatggcaagaattgctagattttataaacatgaaagttgtggacaatgtacaccttgtagggaaggttcaggatggatgtggagaatgctagaaagaatggctaaaggcgaagctacaagagatgaagttgacatgttaatggatgttacaaagcaaattgaaggccatacaatttgtgcctttggagaagggtcagcttggccagtacaaggcttaataagaaattttaaggatgaaataatcgaaagaaataaatttgatcctgtagttaaacagagaaaaaatgttccttatttagtagatcaacatttattagagaaagaaaatgcttaaa

SEQ ID NO: 222298 - DNA, 406 bp, Unknown
  Bacterial polypeptide expressing nucleotide sequence isolated from the Sargasso Sea
atgaataataagatagatcaagttcctgaagagttcaaacaacttgctgatgatttcagtaagaatggatttattactacatcattagataatttaataaattggtcgagatctggctcattacactggatgacctttggtcttgcttgttgtgcagttgaaatgatgcaaactgcgatgcctagatatgatttagagagatttggtgctgcacctcgtggatcaccaagacaatctgatgttatgattgttgctggcacgttaactaacaaaatggcaccagctctaagaaaagtttatgaccaaatgccggaaccaagatatgttatatcaatgggtagttgtgctaatgggggtggctactatcattactcttattctgttgtaagaggttgtgaccgtatgt

SEQ ID NO: 222299 - DNA, 727 bp, Unknown
  Bacterial polypeptide expressing nucleotide sequence isolated from the Sargasso Sea
atgcttaaagacgaagatagaatttttaaaaacttatataacgatttgggtcctgatattttatctgctcaaaagagaggagattggcaaaatactaatgaaattattaaaaaaggtaaagactggataattaacgagataaaaagttctgaactaagagggagaggtggcgcaggctttccaacaggtcttaaatggtcatttgcgccaaaagaaataggctcaagaccacactatcttgttattaatgctgatgaatcagaacctggaacatgtaaagatagagatattttaagatttgagcctcataaactaatagaaggttgtctgttaactgcttacgccgttaatgcaaataaatgctatatttatataagaggagagtattttaacgaaggtaataaacttcaagaagcaataaatgaagcttatgaaaaaaaactaattggtttaaacgcctgtggtagtgggtgggattttgacatatatattcattacggtgcaggagcttatatttgtggagaagaaactgctttattagaaagcctagaaggtaaaaagggtcaacctagattgaaacctccttttcctgctttaattggactttacggctgtccaacaatcataaacaatgttgaaacaatagcggtagttccaacaatattaagaaaaggtgctaagtggtttgcatctttaggaagaccaaaaaacacaggaacaaaaattt

SEQ ID NO: 222300 - DNA, 375 bp, Unknown
  Bacterial polypeptide expressing nucleotide sequence isolated from the Sargasso Sea
gatatgatttagacaggcttggagttattccaagagcatcccctagacaaagtgatttaatgatagtagctggtactttatgtaataaaatggcgccagcattacgtaaggtttatgaccagatgccagagcctagatgggttatttctatggggtcttgtgctaatggtggtgggtattatcactactcatattcagtagttcgaggttgcgatcgaatcgtgccagttgatgtctatgtaccaggttgtcctcctacagctgaagctttggtttatgggattattcagctgcaaaataaaattaagcgtgagaaaactatttttcgggatgatatgtttagccttaaaaaacttatcaaaagaggtaaataat

SEQ ID NO: 222301 - DNA, 911 bp, Unknown
  Bacterial polypeptide expressing nucleotide sequence isolated from the Sargasso Sea
ttcgataggatatatgaatgaggatcaatctaaaataaggtttatgggatatttaagcttatttactttttttatgcttgtactcgtatcaagtaataatttgttacaaatgttttttggttgggaaggagtaggtttggcctcatacttattaataggtttctggaaccataaagaaactgcaaataatgccgcaataaaagctttcattgttaatagagtgggtgattttggatatgcattaggaatagcaggaattttttatgtttttggctcaattagttttgaaaatatttttaatcaagtagatcagtataaagatcataaacttgaatttctctccttaacctttccaacattagacctcttgtgctttcttttatttataggggcaatgggtaaatccgctcagctaggtttacatacctggcttccagacgcgatggaaggtcctacaccagtttctgcattgatacatgcagcaacaatggtaacggctggagtatttttagttgcaagaatgagccctatctatgaatttgcaagttttacaaatttatttattacttttattggagcggctacagctatatttgctgcttctatagcattaacacaaaatgatataaaaagagtcatagcatattcaacatgtagccaactaggatacatgttttttgctgctggagtaggagcctacaatgcatccatatttcatttaactacacatgctttttttaaagcattattgtttttatctgcaggatcagtaattcatgcaatgcatcaccaacaagatatgagaaatatgggaggtctttttaaaaaaattccttttaccggatcaatgatgtggattggatctcttgctataataggttttccatatttttcaggaatattattctaaa

SEQ ID NO: 222302 - DNA, 844 bp, Unknown
  Bacterial polypeptide expressing nucleotide sequence isolated from the Sargasso Sea
aatgcttaaagatcaagatagaatttttcaaaatttatataatgacaaaggctcagatgtatcttcatcacaagaaagaggcgattgggtaaatacaaaagaaattacagacaaaggaagagactggataattaatgaaattaaagaatctcaattaagaggtcgaggtggtgcaggatttcctacaggtttaaaatggtcatttgcaccaaaagaagttggatcaagaccacattacttagttattaatggtgatgaatctgaaccaggaacatgtaaagatagagatattttaagatttgagcctcataagttaatagaaggttgtttaattgcatcctatgcagtgcaagcacatgtttgttatatttatataagaggtgaatattttgttgatggtcaaaaacttcaggctgcaattgatgaagcttatgagaaaaaactcttaggtaaaaatgcagcaggtactggttgggatttagatatttatattcattatggtgctggtgcatatatttgtggagaggaaacagctttattagaaagtatcgaaggtaaaaaaggccaacctagattaaaaccaccattccctgctctaattggtctttatggatgtccaacaattattaacaatgtagaaactatagccgtagtcccaacaattcttagaagaggtggaaaatggtttgcttctcttggaagagaaaagaacacaggtacaaaaatattttgtatatctggaaatgtaaatacgccttgtaatgttgaggaagaaatgaatattcctttaaaagaattaatcgaagttcatgctggtggagtaattggtggatgggaaaattta

SEQ ID NO: 222303 - DNA, 890 bp, Unknown
  Bacterial polypeptide expressing nucleotide sequence isolated from the Sargasso Sea
tctgctatgcgaagaggtgtattgggaaggaacaaaacaaatcatgtctaaagatcctgatgaaattatagaaagtataaaaaactcaggtttaaggggaagaggcggtgcagggttttctacaggtttaaaatggtcatttatgccaaaggtcgtaaaagacagacctcattacttagtagttaatgctgatgaatctgagcctggcacttgtaaagatagagatattataagaaatgaaccacataagctcttagaagggtgtttgattgctggttatgcgatgagggcccataaatgctatatttatattagaggtgagttttttaatgaggcgaatattttacaatctgcaattactgaagcttattcatcaaaacttttgggaaaaaatgctgcaaaatcaggttgggattttgatgtttatctccatcgtggtgctggtgcatatatctgtggagaagaaactgcattattagagtctttagaaggaaaaaagggacaaccaagattaaaacctccatttcctgctggtgtaggcttgtatggttgtcctactacggtaaataatgttgagtctatagctgttgtgccaactatcttaaagagaggagaagtttggttttcaagtctaggaaatgataacaatactggaacaaagctattttgtatatccgggcatgttaataatccatgtaacgttgaagaggagatgggaatacctcttaaagacttgattgaaaaacatgctggcggtgttagagggggatggcataatttattagctgtaatacctggagggagttctacaccattattaccaaaagaagtatgtgatgatattaaaatggattttgattcattgaaatcagttggaagtggtttaggga

SEQ ID NO: 222304 - DNA, 415 bp, Unknown
  Bacterial polypeptide expressing nucleotide sequence isolated from the Sargasso Sea
aatgatagatatagataaggaaaaaaaaatacccagcgaattcaaacaactagctaaagattttagtgagaacggttttataactacttcatttgataatttagttaattgggctagaactggttcattgcattggatgacttttggcttagcatgttgtgctgttgaaatgatgcatacatcaatgccaagatatgatttggaaagatttggcgctgctccaagagggtcgccaagacagtcagatgtaatgattgttgctggaacccttacaaataagatggcaccagcattgagaaaagtctatgatcaaatgccagagccaagatatgttatttctatgggaagctgcgcaaatggaggtggatattaccattattcatattcagtagtaagaggttgcgatagaatagtg

SEQ ID NO: 222305 - DNA, 874 bp, Unknown
  Bacterial polypeptide expressing nucleotide sequence isolated from the Sargasso Sea
agaggaaggggtggtgctggatttccaactggtctaaaatggtcttttgctccaaaagaagtaggttctagaccacattatttagttataaacggagatgaatctgaaccagggacatgcaaagatagagatattttaagatttgagccacataaattaattgaaggatgtttaatagcatcatacgcagtccaagcacatgtatgttatatctatattagaggcgaatactttattgaaggtcaaaaacttcaaacagctattaatgaagcttatgaaaaaaaattattaggtaaaaatgcagcaggaactggttgggatttagatatttatattcattatggtgctggagcttatatttgtggagaggaaacagctttattagaaagtatagaaggtaaaaagggacaacctagattgaaaccaccattcccggcactaattggtctttatggatgtccaacaattataaataatgtggaaactattgctgtagtcccaactattcttagaaaaggtggcaaatggtttgcctctctcggaagagaaaaaaatactggtacaaaaatattttgtatttcaggaaatgtgaatacaccttgtaacgttgaggaagaaatgaatattccattaaaagaattaatagaggttcatgcaggaggagttattggtggatgggataacttgcaagcagttataccaggaggttcttcaatgccattaattcccaaagaaaaatgtgaaacattaactatggattttgattctcttatggcagaaaaaagtggtttaggaacagctggtattgttgtgattaataaggatcaagatattattaaatgtatggctagaattgcaaggtttttaaacacga

SEQ ID NO: 222306 - DNA, 925 bp, Unknown
  Bacterial polypeptide expressing nucleotide sequence isolated from the Sargasso Sea
atgttaaaaggtagagactggataattaacgaaattaaaacatctgaacttaggggaagaggaggtgctggttttccaactggtttaaaatggtcttttgcacccaaagaagttaaatcaagacctcattatttaataattaatgcggatgaatctgagcctggaacatgtaaagatagggatattttaaggtttgaaccacataaattaattgaaggttgtttgattgcttcgtacgcggtcaatgctcatgtttgttatatatatattagaggagaatattttaatgaaggagaaaaacttcaaaaagctattgatgaagcttatcaaaaaaatttaattggcaaaaacgcttctgatactgggtgggattttgatatttatattcattatggagctggtgcttatatttgcggagaagaaacagcgttacttgaaagcttggaaggcaagaaaggccaaccaagattaaaacctccatttccagctttaataggattatacggatgtccaacaattattaacaatgttgaaactattgcagttgttccaacaatattaagaagaggcagtaaatggtttgcatctttaggaaaaccaaaaaacactggtactaaaattttttgtatttcagggaatgttaataatccttgcaatgttgaagaagaaatggggattccattaaaaaaattaatagaaaatcatgcaggtggagtaattggcggttgggaaaatttgaaagcagtaatccctggcggatcttcaatgcctttattgccaaaaaaaacatgtgatacaatcacaatggattttgattcattagttcaggaaaaaagcggactaggtactgcaggaatagttgtaataaataatgatcaagacataataaaatgcatagcacgaattgctagattttataaacacg

SEQ ID NO: 222307 - DNA, 703 bp, Unknown
  Bacterial polypeptide expressing nucleotide sequence isolated from the Sargasso Sea
aatgcttaaagacgaagatagaatatttcaaaatttatataatgacagtggtgctgacatagagtctgctaaattaagaaatgattggaatggaacaaaagaaattttagaaaaaggaagagagtggataatcaatgaagttaaatcttctgagcttagaggacgtggtggagccggttttccaactggtctaaaatggtcatttgcacctaaagaagtagggtctagaccgcattatttagttattaatgctgatgagtcggaacctggaacatgcaaagatagagatatattaagatttgaacctcacaaattaatagaaggatgcttaattgcttcttacgcagttaatgcccataaatgttatatttatattagaggtgaatattttaatgaagggcaaaaactacaaactgcaatcgatgaggcttataaaaataatttaattggtaaaaatgctttaaattcaggatgggatttagacatttatattcattatggcgctggtgcttacatttgtggtgaagaaacagcattattggaaagtttggaaggaaaaaaaggacaaccaagattaaagccgccatttcctgcattaattggattatatggatgtcctactataattaataatgttgaaacagttgcagctgttcctacaattctaagaagaggtgcaaaatggtttagttcacttggaaga

SEQ ID NO: 222308 - DNA, 523 bp, Unknown
  Bacterial polypeptide expressing nucleotide sequence isolated from the Sargasso Sea
atgaatttagaagaaaaaaaaaaaaatattccagaagaatttaaacaattagcacaagatttcagtgataatggttttataacaacttcactagataatctagttaactgggctagaactggatcattacattggatgacttttggtcttgcatgttgtgcagtcgaaatgatgcaaacttcaatgccaagatatgatttagaaagatttggtgctgcccctagagcttcacctagacaatcagatgttatgattgttgctggaactctcacaaacaaaatggctccagcactaagaaaagtttatgatcagatgccagaaccaagatatgtaatttccatgggaagttgtgcaaatggtgggggatattatcattactcttattctgtagtaagaggatgtgatcgtattataccagttgatgtatatgttcctgggtgccctccttctgctgaagcacttttatatgggataatgcaacttcaaaaaaaaatcaggaataaaggttctctggaaagataaa

SEQ ID NO: 222309 - DNA, 550 bp, Unknown
  Bacterial polypeptide expressing nucleotide sequence isolated from the Sargasso Sea
atggaaaaagggagcgctagagtggaattaagtttaggtagtagcggcccaaaatcattagttaaggatacagagtttgccaaacaaatgtccgataagggttatttacttacatctgcagaaagtgtgattaactgggctcgtactggtagtttgcattggatgacatttggtttggcttgttgtgcggttgaaatgatgcatacttcaatgcctagatatgatttagaaaggttcggtactgcccctagggcaagcccaagacaatctgacctaatgatcgttgctggaacgcttacgaataaaatggcccctgcattaaggaaagtatatgatcaaatgccagaacctaggtatgtaatatcaatgggctcttgtgcaaatggggggggctactatcattattcttattcagttgttcgaggttgtgataaaatagttccggttgatatatatgtacctggttgtccaccgacggcagaagctttgctttatgggatcctacagttgcagagaaaaattagaagaactggtacaattattaggtagg

SEQ ID NO: 222310 - DNA, 688 bp, Unknown
  Bacterial polypeptide expressing nucleotide sequence isolated from the Sargasso Sea
atgcttaaagataaagatagaatctttcaaaatttatataatgatttgggatctgatatcacctcatcacaaaaaagaggtgattgggttaacactaaagatattattgatagaggcagagattggataattaatgaaattaaagactctcaattaagaggacgaggtggagcgggatttcctacaggattaaaatggtcatttgctcctaaagaggttggatctagacctcactatttagttataaatggagacgagtcagagccaggtacttgtaaagatagagatatactcagatttgagcctcataaactaatagaaggttgtttaatagcctcttatgctgtgcaagctcacgtgtgttatatttatatacgaggagaatattttattgaaggacaaaaacttcaagtcgctattaatgaggcttatgaaaaaaatttaataggtaaaaacgcagcagggacaggatgggatttagatatttatattcattatggtgctggagcttatatatgtggagaagaaacagcattacttgaaagtattgagggcaataaaggtcaaccaagattaaaacctccattcccagctttaataggattgtatggatgcccaacaataataaataatgttgaaacaattgcagttgtgccgacaattcttagaagaggtggaaaatggtttg

SEQ ID NO: 222311 - DNA, 502 bp, Unknown
  Bacterial polypeptide expressing nucleotide sequence isolated from the Sargasso Sea
aatgggagtagaaattaatgaagataattttggtgatgaactaaattctaaaggatttttagttgcaaattttgataaactactgacctgggcaagaacaggctctttgtggccaatgacttttggtttagcttgttgtggagttgaaatgatccatacatatatggcaagatatgatcttgatagatatggtgtaataccaagaggaagtcctcgtcaatctgatgtaatgattgttgctggaactttaactaacaagatggctccagcattaagaaaagtttatgaccaaatgccagaacctagatgggtaatatctatgggctcttgcgcaaatggtggtggatattatcactactcttattctgttgtaagaggttgcgatagaattgtcccagttgatatttatgtgcctggatgtcctccaactgcagaggccttagtatatggcattttacaattacaaaaaaaaattaaaagaaaaaataaatttgtaagataa

SEQ ID NO: 222312 - DNA, 475 bp, Unknown
  Bacterial polypeptide expressing nucleotide sequence isolated from the Sargasso Sea
ttgaatacagagctatcttctaaaggcttcttagttgctagctacgataaaattcttacatgggcgagaacagggtctctatggccaatgacttttggattggcatgttgtggagttgaaatgatacattcatacatggcaagatatgacttagatcgttatggagtaatacctagaggtagtccaagacagtctgatgtaatgatagttgctggtaccttaacaaataaaatggctccagctttaagaaaagtctatgaccaaatgccagagcctcgatgggttatctcaatgggttcttgtgctaatggagggggatattatcactactcttactcagtagttagaggatgcgatagaatagttcctgttgatgtttatgtacctggatgccctccaacagcagaggcattagtttatggtatacttcaattacaaaaaaaaattcgaagagagaataaattcaagagataat

SEQ ID NO: 222313 - DNA, 265 bp, Unknown
  Bacterial polypeptide expressing nucleotide sequence isolated from the Sargasso Sea
tcgttgctggactttaacaaataagatggcaccagcattaagaaaagtttatgaccaaatgccagaacctcgttgggtaatttcaatgggttcttgcgccaatggcggggggtattatcattattcttattctgttgtcagaggatgtgatagaatagtcccagtcgatatttatgtgcctggttgtcctcctactgcagaagcattagtatatggaataatgcaacttcaaaaaaaaataaaaagaaaaaacaaaaataattga

SEQ ID NO: 222314 - DNA, 772 bp, Unknown
  Bacterial polypeptide expressing nucleotide sequence isolated from the Sargasso Sea
aatgttacaggataaagaccgtatttttactaatatttatggctggcaggaagctggattatctggcgctaaaaaacgtggcgactgggataatacaaaagcgatattagcagttgggcatgatgaaatcgtggataggatgaagcagtctggactgcggggacgtggcggtgctggtttcccaacaggggtaaaatggtcttttatgccaaaagaggtaacgaatagacctcattatttagtggttaatgcagatgagtccgagcctggtacttgtaaagatagagatattataaggcatgagcctcataaattaattgaaggatgcttggtcgctggttttgctatgaggtcgcatgtggcatatatttacattcgcggtgaatttgtaaatgaatacaaagcactacagagcgcagtagatgaggcttatgaagatggcttgctcggtggtaatgctgcagattctgggtgggcgtttgatgtttatgtgcatcgcggcgctggcgcttatatttgcggtgaagaaacagcgcttcttgaatcgctagaaggtaagaagggtcaaccaagattaaagcctccatttccagcaggtgttggtttatatggctgtccaactactgtgaataatgttgagtctattgctgttggtcctactatactgcgccgtggagcagattggttttcttcgctgggaaaagagaataacacgggaacgaagttattttgtatctctggtcatgtaaatgcgccttgtaatgtcgaagaa

SEQ ID NO: 222315 - DNA, 487 bp, Unknown
  Bacterial polypeptide expressing nucleotide sequence isolated from the Sargasso Sea
aatgaagataattttaggcgaccaactaaattctaagggatttttagtttcaaattttgataaactcttaacctgggcaagaactggctctttgtggccaatgacatttggtttagcttgttgtggagttgaaatgattcatacatatatggcgagatatgatcttgatagatacggtgtaattccaagaggaagtcctcgtcaatctgatgtaatgattgttgctggaactctaactaacaagatggcgccagcattaagaaaagtttatgatcaaatgcctgaacctagatgggtaatatctatgggatcttgcgcaaacggcggaggatattatcattactcttattctgttgtaagaggttgcgatagaattgtcccagttgatatttatgttcctggatgccctccaacagcagaggccttagtatatggcattttacagctacaaaaaaaaataaaaagaaaaaataaatttgtaagataa

SEQ ID NO: 222316 - DNA, 526 bp, Unknown
  Bacterial polypeptide expressing nucleotide sequence isolated from the Sargasso Sea
tttgaaagtttttcgaaaaaggaaaaagagataccttgaggaatttaaagatctagcaaaaaattttgccgagaaaggttttataaccacatcctctgaaaatttaattaattgggctagaacaggctcattgcattggatgacttttggtcttgcttgttgtgcagttgagatgatgcaaacttcaatgccaagatatgatcttgaaagatttggtgctgcacctagagcatcaccaagacaatcagatgttatgatcgttgcaggtacattaacaaataaaatggcaccagcactaagaaaagtttatgaccaaatgcccgaaccaagatacgtagtttcaatgggcagttgtgctaatggaggaggttactatcattattcttattcagttgtgagaggatgtgataagatagtcccagtagatatttatattcctggttgcccaccatctgccgaagcattgttatacggaattttacaacttcaaaaaaaaattagaagagaaggctcaattaaaagataa

SEQ ID NO: 222317 - DNA, 710 bp, Unknown
  Bacterial polypeptide expressing nucleotide sequence isolated from the Sargasso Sea
aatgcttgaggataaggatcgaatatttcaaaatttatacaatgacttaggagaagacgtagattcatctaggaaaagaggtgattggaaagatactaaagaaattattttaaaaggaagagattggataattaacgaaataaaatcatctgaattaagaggaagaggtggagcaggttttccaacaggactaaaatggtcttttgctccaaaagaagttggctcaagacctcattatttagtaatcaatgcagatgaatctgaaccagggacttgtaaagatagggacatattaagatttgaacctcataaactgatagagggatgtttatttgctgcttatacagtaaatgcacatgtttgttatatttatatcagaggagaatattataacgagggacaaaaactgcagaaagcaatcgacgaggcatattcacaaaaattgattggcaagaatgcttcgaatacaggttgggatttagatatttatatacattatggagcaggagcatacatatgtggtgaggaaacagctctgcttgaaagtttagaaggtaaaaaaggtcaaccaagacttaaacctcctttcccagcactcattggactttacggatgcccaacaattataaataatgtagagacgattgctgtagtccccacaatattaaaaagaggcgcaaaatggttttcaagtttaagtaaaccaaaaa

SEQ ID NO: 222318 - DNA, 729 bp, Unknown
  Bacterial polypeptide expressing nucleotide sequence isolated from the Sargasso Sea
aagccgccatttcctgctttaattggattatatggatgtcctactataattaataatgttgagactgttgcggctgttcctacgattctaagaagaggtgcaaaatggtttagttcacttggaagacctaaaaacactggaacaaaaatttattgtatttctggaaatgtcaataacccatgtaatgttgaggaagaaatgggaattccacttaaggaattaattgaaacccacgctggtggtgtcgttggtggatgggataatcttaaagcagtgatacccggtggttcttcaatgccaatgttgcctaaagaaatttgtgacaatatgaaaatggattttgatgcatgtgttgaaaataaaacaggactgggaacagctggtatagttgtaatcaacaatgaccaagatattattaagtgtatggcaagaatagctagattttataaacatgaaagttgtggtcagtgtactccatgtagggaaggatctggatggatgtggagaatgttggaaagaatggcagtaggcgaggcaaccccagacgaagtggatatgctttttgatgtaacaaaacaaatagaaggtcatactatttgtgcgtttggcgaaggttcttcttggcctgttcaaggattgatcagacattttaaagatgaaatacttgaaagaaacaaatttgatcctgttgtgaaaaaaaacaaaaatattccttaccttgttgatcaa

SEQ ID NO: 222319 - DNA, 745 bp, Unknown
  Bacterial polypeptide expressing nucleotide sequence isolated from the Sargasso Sea
gatgcttaaagaagaagataaaatttttaagaacttatatggttttgaagattggtctttaacaggggcaaagcaaagaggcatttggtctaacacaaaagaaattattgaaaaaggatctgattttattgttgaagaaattaaaagcagccaattacgtggaagaggtggggcaggtttcccagctggattgaaatggtcatttatgcctaagaattcaggcaaacctcactacttagtagtaaatgcagatgagtctgagcctggaacatgtaaagatagggaaatcatgagaaatgatccacacttacttttagaaggatgtttagttgcaggatttgctatgcacgctaatgcttgctatatttatataagaggtgaatattatgatgaagcctcgaatcttcaaaaggcaattgatgaggcttatgctaataatttaattggaaaaaatgcttctggaactaattggcattatgatatttatttacatagaggtgccggcgcatatatttgtggagaagaaactgcactacttgaaagtctagaaggtaaaaagggacaaccaagattaaaaccaccctttccagctggtgcaggactttatggatgccctaccacagtaacaaatgtggaaaccattgcggtcgctcccaccataattagaagaggggcttcttggtttaatgctttagggagagaaaacacacaggtacaaaaatttttagtatttcagggcatgtaa

SEQ ID NO: 222320 - DNA, 406 bp, Unknown
  Bacterial polypeptide expressing nucleotide sequence isolated from the Sargasso Sea
actggatctttatggcctatgacttttggcttagcttgttgtggagtggaaatgatgcatgcatacatgagtcggtatgatttagatagatatggcgttataccaagaggaagcccaagacaatcagatgtaatgatagttgctggaactcttacaaacaaaatggcaccagccttaagaaaagtttatgatcaaatgcctgaacctagatgggtaatctctatgggatcttgcgccaatggagggggttattatcattattcttactctgtagtaagaggttgtgacagaattgtaccagtagatatttatgttcctggatgtcccccaactgctgaagctttagtttatggaattatgcaattacaaaaaaaaattaaaaaaaagaacaaagataatagataaa

SEQ ID NO: 222321 - DNA, 651 bp, Unknown
  Bacterial polypeptide expressing nucleotide sequence isolated from the Sargasso Sea
gatggcaacctcaattatatttttacctctacttggttttcttttttgttttttaataggtaaacagtttaactatagggtttatcaaatatcaacaacttcaatcctttttctttgtactttattttcttggataatattcattcagtttattaataataaggaaacagaaataatctttatccttaactggataagttctggtaactttattgttgattggtcaattagattagacactttaactgctgtaatgttcattgtggttacaactgtttctgcctgtgttcatttatattcaattggctatatggaagatgatccatcaaaaataagatttatgggttatctaagcttatttactttttttatgcttgttcttgtatcaagtaataacttgctgcaaatgttttttggttgggaaggtgttgggctagcctcatatttattaattggtttttggcatcataaagattcagcaaataaagctgctataaaagcatttgttgtaaatagaattggagattttggatacgcaataggaattgctggaattttttatatttttggcacggtaagtttcgacagtatatttttacaagtggatcaatttagtgatcatcaaattgaatttctttcattcagttttcc

SEQ ID NO: 222322 - DNA, 787 bp, Unknown
  Bacterial polypeptide expressing nucleotide sequence isolated from the Sargasso Sea
atgcttaaagatcaagatagaatttttcaaaatttatataacgataaaggctctgatgtagcagcgtcacaattaagaggtgattgggtaaacactaaagaaattactgaaaaaggaagagattggattattaatgaaattaaagagtctcaacttagaggtcgaggtggcgcaggatttcctacaggtttaaagtggtcatttgcaccaaaagaagttggatctagaccacattatttagttattaatggtgatgagtctgaaccaggcacttgtaaagatagagatattttaagatttgaacctcataaactaatagaaggttgtctaatagcatcatacgcagttcaagcacatgtttgctacatatatattagaggagaatattttgttgatggtcaaaaactccaagctgcaattgatgaagcttatgagaaaaaactattgggaaaaaatgcagctggaactggctgggatttagatatttatatccactatggagcaggagcgtatatttgcggtgaagaaacagcattacttgaaagtttagaaggcaaaaaaggtcaaccaagattaaaaccacctttcccagctttgattggtttatatggatgcccaactataattaataatgttgaaaccattgctgtggtgccaactattctaagaagaggagcgaaatggtttgcttctttaggaagagaaaaaaatacaggtactaaaattttctgtatttctggaaatgttaataatccgtgtaatgtagaagaggaaatgagtatcctta

SEQ ID NO: 222323 - DNA, 760 bp, Unknown
  Bacterial polypeptide expressing nucleotide sequence isolated from the Sargasso Sea
tatgcttaagcctgaagatagaatttttaaaaacctttacaatgaactaggttgggaaatcgataacgcaatcaaaagaaatgactggaaagatactaaagatataatttctaagggaagagaatggattattaatgaggtaaaaacttcagaattaagaggaagagggggagcaggtttttctaccggtcttaaatggtcatttgctccaaaagaagttggttctagaccgcactacttagttattaatgcagatgagtcagaacctggaacttgtaaagatagagacatattaaggtttgaaccccagaaattaattgaaggttgcttgattgctggttatgcggtgaatgctcatgtttgttacatttatattagaggagaatatgttaatgaaggtagaagattacaaaatgcaattaatcaagcctatcaaaaaaattttttaggaaaaaacgcatgcggttctggatgggattttgatattcatgttcattatggagctggtgcttatatttgtggcgaagaaactgctttactagaaagtatggaaggaaataaagggcaaccaagattaaaacctccttttccagcattagttggtttatatggatgtcccactattgttaataatgtagaaacaatagcagtcgtaccaacaattcttagaagaggaggcaaatggtttgcttcaatcggtaaaccaaaaaatactggaactaaaatattttgtatttctggaaaatgtaaattcaccatg

SEQ ID NO: 222324 - DNA, 886 bp, Unknown
  Bacterial polypeptide expressing nucleotide sequence isolated from the Sargasso Sea
tgtttaatagctggttacgcagtaaacgcccatatatgctacatatatattagaggcgaatactttaatgaaggtaaaagactacaagaggctatcgatcaagcctatgaaaaaaagtatttaggaaaaaatgcatgtggttctggatgggattttaatattcatattcattatggagctggtgcttacatttgcggtgaagaaaccgctctcttagaaagcattgagggcaataaaggacaaccaagattaaaacctccttttcctgccttggtcggtttatatggttgtccaactatagtaaataatgtggaaacagtagcagtggttccaactattttaagacgaggtggaaaatggttttcttcaatagggaaaccaaagaacactggaacaaaaatattttgtatttctggaaatgtaaattctccatgtaacgtagaagaggaaatgggtattcctttaaaagacttgattgaaaaacatgctggaggagttgttggcggttgggaaaatcttcaagcagttattcctggaggatcctctatgcctttattacctaagaaaatttgcgacaccataacaatggattttgactcacttatagaaaacaaaagtggattaggcactgcaggaattgtggttataaataatgatcaagatattgtaaaatgtatggctagaatagctcgtttttacaaacatgaaagttgtggtcagtgtacaccatgccgagaaggatccggatggatgtggagaattcttgacagagtagttaaaagaaaagcaacttataatgatgtagaattgttagcagatgtgactaaacaaattgaaggtcataccatttgcgctttcggcgaaggatcagcgtggccagtccaag

SEQ ID NO: 222325 - DNA, 871 bp, Unknown
  Bacterial polypeptide expressing nucleotide sequence isolated from the Sargasso Sea
atgagtcgagaactgctttacctgcttatcccgctttcttgcctcgccgcggcactggttgcggggttcctgggtcctcgaatcggcagagtgaatgcgcatcgttcagcgatcgggggcgtggggttcgcgttcgttctgtcatgcgttgtcgcctgggatgttttcgcaggcaaccatttcaacgggccggtatatacctgggcaatcagtggaggaacccattttgagatcgggttcctgatcgaccccctctcggcggtgatgatggtgatcgtgactttcgtctcgctaatggtccacatctatacgatcggctacatggcggaggatccgggatatacccggtttttcagttacatcgcactctttacctttgcgatgctgatgttggtgatgtcgaacaactttctgcagttgttcttcgggtgggaaggggtgggactggtttcttacctgctgatcgggttctggtatgagcgcgatagcgcgatccgggccaatatgaaagcgttcctggttaatcgcgtaggggactttggatttattctcggaattggcgcggtcctcgcgcttttcggcagtctggattaccaaagcgtgttcgatgcggctccgacattcgcagatcacaccacgcaaggacccttcgggtctgagtggcactggctaacgctgatttgcctgctattgttcgttggcgcgatgggcaaatccgcacaggtgccgctgcatgtctggctcccagattccatggaaggtccgactccgatctcggctcttattcatgcggcaaccatggtcacggcgggaatcttcctggtggccccggatgtcccccgttatttgaactgtcctcaaccgctctatc

SEQ ID NO: 222326 - DNA, 424 bp, Unknown
  Bacterial polypeptide expressing nucleotide sequence isolated from the Sargasso Sea
aatgggaataaattttttaggttcaaaaaataaagactctgagattcctcaagaatttaaaaaaatcgcgaaagattttagtgaaaaaggatttataacaacatcttcagacaatttaattaattgggcacgaacaggatcattacattggatgacttttggacttgcatgttgtgccgtagaaatgatgcaaacttctatgcccagatatgatctagaaagatttggtgctgccccaagagcttctccacgtcaatctgatgttatgattgtagctggaacattaacaaataaaatggctgcacctttgagaaaagtttatgatcaaatgcccgaaccaagatatgtaatatctatgggaagttgcgcaaatggtggtggttactaccactattcttattcagttgttagaggctgtgataaa

SEQ ID NO: 222327 - DNA, 478 bp, Unknown
  Bacterial polypeptide expressing nucleotide sequence isolated from the Sargasso Sea
aatggaaaaagggagctctggaatgggagtgatggatccatcactggcaaaaccgataccgcccggttctgatcaggacgcaatcttaaatgccgttggtgaagaaattactaatcggggttttgtcattgctaaagctgataagcttttcaattgggcgcgatctgggtctctgtggccaatgacatttggtcttgcttgctgcgccgtagaaatgatgcactcggcggcaagccgttatgacatggaccgctatggtatgctttttcgcccaagtccacgtcaatcagatgtgatgattgttgctggtacgctgacgaacaaaatggcgccagcattgcgtcgcgtttatgaccaaatgccagaaccgcgctgggtgctttcaatgggatcatgcgccaatggtggtggatattaccattattcctatgctgtggtgcgaggctgtgaccgcattgtgccagtagatgtttatgtg

SEQ ID NO: 222328 - DNA, 449 bp, Unknown
  Bacterial polypeptide expressing nucleotide sequence isolated from the Sargasso Sea
aatggatttagaaaaagaaaaacaaattcctgaagaattcaaaaagcttgctaaagattttagtgaaaaaggatttataacaacatcaatggataatcttataaattggtcaagatctggctctcttcactggatgacatttggattagcttgctgcgcagttgaaatgatgcaaacctctatgccaagatatgatcttgaaaggtttggagccgctccaagagcatcacctagacaatcggatgtgatgatagttgcaggaactttaactaataaaatggcacctgcgttaagaaaagtttatgatcaaatgcccgagccacgttatgtaatctctatgggaagctgtgcaaatggcggaggctattatcactattcttactctgtagtaagaggttgtgatcgaattgtacctgtagatgtatatgttcctggatgtccaccatcag

SEQ ID NO: 222329 - DNA, 523 bp, Unknown
  Bacterial polypeptide expressing nucleotide sequence isolated from the Sargasso Sea
aatgaatttacaagataaaaaaaaagatatcccggaggagtttaaacaattagctcaagattttagtgataatggttttataacaacatcgctagacaatcttgtaaattgggcaaggactggttcattgcattggatgacatttggattagcttgttgtgcagttgaaatgatgcaaacatcaatgccaagatatgatctcgaaagatttggcgcagcaccgagagcatcgccacgtcaatcagatgtaatgatagtagctggtactttaacaaacaaaatggctccagcattaagaaaagtttatgaccagatgccagaacctagatatgtaatatcaatgggaagttgtgcaaatggtggaggttattaccattactcatattcggtagtgagaggttgtgatcgagttgtaccagttgatgtatatgttcctggttgccctccttcagctgaagcattactttatggtattttacaattacagaaaaaaattagaaataaaggttctttagaaagataa

SEQ ID NO: 222330 - DNA, 787 bp, Unknown
  Bacterial polypeptide expressing nucleotide sequence isolated from the Sargasso Sea
tagaaagtattttgagggtaaaaaaggtcaaccaaggttaaaacctccttttcctgctcttataggactttatggttgtccaacaattataaataatgttgaaacaatttctgttattccaactatattaagaagaggaggaaaatggttttcatcgttaggtagacccaaaaacacaggttctaaaatttattgtatttctggtaatgttaataatccgtgtaatgtagaagaggaaatgggcatacccctcaaagtattaatagataaacatgccggaggagttgttggtggatgggacaatctcaaagcagttatacctgggggatcttcgatgccactaataccaaaagatatttgtgaaacaattaaaatggattttgacactcttgttgaaaataaaagtgggttaggaacagctggtatagtcgtgattaacaaagatcaagatataattaaatgtatggccagaattgcaaggttttataaacatgaaagttgtggtcaatgcacaccttgcagagaaggttcaggatggatgtggagaatacttgaaagaatggcaaaaggagaatgttcgaaagacgaagtagatatgctgttggatgttacaaaacaaattgaggggcacacaatttgtgcatttggagagggttcttcatggcctgtacaaggcttaataagacactttaaaaaagatattttaagtaggaacaatttcaatccacttgttaaaaaagataaaaatgttccttatttaattgatcaacatttattagaaaaataa

SEQ ID NO: 222331 - DNA, 666 bp, Unknown
  Bacterial polypeptide expressing nucleotide sequence isolated from the Sargasso Sea
tatgttatccgataaaaacagaatttttacaaacttgtatggttttaagggaaatgacttgaaagctgcaattagactaggagattggagtaatactaaatctatcttatctaagggaaaggaatggattttagaggaagttaaaaagtcaggcctcagaggtagaggcggagctggttttccatcaggtttgaagtggtcgttcatgaaaaaaaagcctaatattcctaattacctagtcattaatgcagatgaaagtgagcctggaacttgtaaggatagagaaattttgagaaatgagccttataaattgctagaaggtatactttatgcctcattagcaatggaagctaataattgttatatctacattagaggcgagttttataatgaatataaaaagttgcagaaagctgtagatgaatgctacgaagctgctcttttaggaaaaaatatacttaaatctggatgggatcttcaggtgcatattcatagaggagccggtgcatatatatgtggagaagaatcagctttgattgaaagtttagaaggaaaaaagggtcaaccaaggcttaaacctccttttccagcaaatgtaggcttgtacggatgtccaacaacagttactaatgtcgaaacggttgcagtagttccagaaattcttaa

SEQ ID NO: 222332 - DNA, 462 bp, Unknown
  Bacterial polypeptide expressing nucleotide sequence isolated from the Sargasso Sea
aatgcaaaacaaaatagatcaggttcctgaagaatttaaacaactcgcagatgattttagcaagaatggatttattacaacttcactaaataatttgataaattggtcaagagcaggatcacttcattggatgacatttgggttagcttgttgtgctgttgaaatgatgcaaacatcgatgccaagatatgatcttgaaagatttggtgctgcaccaagagcttcgccaagacaatcagatgtaatgattgttgcaggtactttgactaataaaatggcacctgctttaagaaaagtttacgatcaaatgccagagccaaggtatgttatttctatgggaagttgtgcaaatggtggtgggtattatcattattcttattctgtagtaagaggatgcgataggatagttccagttgatatttatgtgcctggatgccctccttctgcagaggctttattgta

SEQ ID NO: 222333 - DNA, 913 bp, Unknown
  Bacterial polypeptide expressing nucleotide sequence isolated from the Sargasso Sea
agaatggataattaatgagataaaagactcacaattgagaggcaggggtggagcaggtttccctacaggtttaaaatggtcatttgctccaaaagaattaggatctaaacctcattatttagtaattaatggagatgagtctgagcctggaacttgtaaagatagagatatattaagatttgagccacataaattaatagaaggctgtttaattgcctcatatgctgtccaagcacatgtttgttacatttatataagaggagaatattttatagatggtcaaaaactccaagctgctatcaatgaggcatatgaaaaaaaattaattggtaaaaatgcagcaggaacaggttgggatttagatatttatattcattatggagccggtgcatatatttgtggtgaggagacagctttacttgaaagtatagaaggtaaaaaaggtcaaccaagattaaaaccaccttttccagctctaataggtttatatggatgtccgacaatagttaataatgttgaaactatagctgtagttccaacaatacttagaagaggtggaaaatggtttgcttctttaggaagagaaaaaaatacaggtactaaaattttttgtatatccggtaatgtaaatacaccatgtaatgtagaggaagaaatgaacatacctttaaaagaattgatagaggttcatgccggtggagtagttggtggatgggataacttacaagcagtgatacccggtggttcatcaatgccgttgataccaaaagataaatgcgaaacacttactatggattttgactctttggtcgctgaaaaaagtggattaggtacagcaggtatagttgttattaataaagatcaagacataattagatgtatggcaaggattgctagattttataaacatgaa

SEQ ID NO: 222334 - DNA, 523 bp, Unknown
  Bacterial polypeptide expressing nucleotide sequence isolated from the Sargasso Sea
aatgaattttgcggaaaaacaaaaacaaattccagaagagtttaaagaattagcaaaagattttagtgataaaggttttatcacaacatcatttgataatttaataaattgggctaggacaggctcactccattggatgacctttgggcttgcctgttgtgcagtagaaatgatgcatacatcaatgccaagatatgacctagaacgttttggagcagcacccagggcatcccctcgtcaatcagacgtaatgattgttgctggaactctgacaaataaaatggctccagcgttaagaaaagtctatgaccagatgccagaacctagatatgtaatatcaatgggtagctgcgctaatggtggtggttattatcactactcatattctgttgtaagaggttgtgatagaatagttcctgtagatgtttatgttccaggatgtccaccatcagcagaagcattactatatggcataatgcaattgcaaaagaaaattagaaacaaaggctcaatagaaagataa

SEQ ID NO: 222335 - DNA, 385 bp, Unknown
  Bacterial polypeptide expressing nucleotide sequence isolated from the Sargasso Sea
catgaatttagaagatagaaaaaaaaatattcctgaggaattcaaacaactagctcaagattttagtgataatggatttataacaacatctttagataatcttgtaaattgggcaagaactggatcattacattggatgacatttgggttagcttgctgcgcagtagagatgatgcaaacatcaatgcctagatacgatcttgaaagatttggggcagcaccaagagcatcaccacgtcaatcagatgtgatgatagtagctggaacattaacaaataaaatggctccagccttaagaaaggtttatgatcagatgccagaacctagatatgttatatctatgggtagttgtgcaaatggtggaggttattatcactattcatat

SEQ ID NO: 222336 - DNA, 415 bp, Unknown
  Bacterial polypeptide expressing nucleotide sequence isolated from the Sargasso Sea
aatgggaataaaagactttcaaaatattgaggaagttcaaaaagatgtaaaacaaaaaggttttttgcttgctaagtatcaagatttattaacttgggctcgaaccggctctttatggcccatgacctttggtttagcatgctgtggtgttgaaatgatgcatacttatatgtccagatatgacctggatagatttggtgtaatacctagaggcagtcctagacagtctgatgttatgatagtagctgggactttaacaaataaaatggcacccgctcttagaaaagtttacgatcaaatgcctgaaccaagatgggttatatcaatgggatcttgtgccaacggcggtggttattatcattactcatactctgtagtgagagggtgtgataggattgttcctgtagatatttat

SEQ ID NO: 222337 - DNA, 526 bp, Unknown
  Bacterial polypeptide expressing nucleotide sequence isolated from the Sargasso Sea
atgactgggtcgaatactgctggacgtgattttgaagtggaaacaacggctctaagtggtcagctgcaagacaagggctatttgcttacatctactgaagatgtcataaactgggcaagaactgggtcgcttcattggatgacattcggtttggcctgctgtgcagtagagatgatgcacacctcaatgccacgatatgacttagagcgttttggtactgcaccaagggcatctccaaggcaatctgatttaatgattgtcgccggcactttgacaaacaaaatggcacctgctttgagaaaagtatatgatcaaatgccagagccaaggtacgtgatatcaatgggttcatgcgcaaacggtggtgggtattatcattactcttattcagtcgttagggggtgtgatcgaattgtgccagtggatgtgtatgttcctggctgtcctccaaccgcagaggctcttttatacggaataatggctttgcaacgtaaaattcgtaggacgggaactattgttcgatgac

SEQ ID NO: 222338 - DNA, 673 bp, Unknown
  Bacterial polypeptide expressing nucleotide sequence isolated from the Sargasso Sea
atgcttaaagatcaggatagaatatttaaaaacttatataatgacatggacgcagatgttgctgctgctcaaacaagaggggattgggtaaatacctctgatttaacctcaaaaggaagagattggataattaacgaaataaaagactctcaattaagaggtagaggaggtgcaggtttccctactggtttaaaatggtcttttgctccaaaagaagttggttctagacctcattatttagtcattaatgctgacgagtcagaaccaggcacgtgtaaagatagagatattttaagatttgaacctcataaattaattgagggatgtttgatagcctcatacgctgttcaagcacatgtttgttatatttatatcagaggtgaatattttatagagggtcaaaaattacaaacagccattgatgaggcttatgaaaagaagttattaggtaaagatgctgctggaactggatgggatttagatatctacattcactatggagcaggtgcttatatttgtggtgaagaaacagctttacttgaaagtatagaaggcaaaaaaggacaaccaagattaaaacctccttttccggcattgattggactttatggttgtccaacaattattaacaatgttgaaactattgctgttgtgccaacaattcttagaagag

SEQ ID NO: 222339 - DNA, 517 bp, Unknown
  Bacterial polypeptide expressing nucleotide sequence isolated from the Sargasso Sea
atgaataataaaatagataaagttccagaggagtttaaacaacttgctgaagattttagtaagaacggatttataacaacgtcacttgataatctaattaattggtcaagatctggatcgcttcattggatgacttttggtcttgcatgttgcgctgttgagatgatgcaaacttctatgcctaggtatgatcttgaaaggtttggtgcagcaccaagagcttcgccaagacaatctgatgtgatgattgttgctggtaccttgactaataaaatggcaccggcacttagaaaagtttatgaccaaatgcctgaacctagatacgtaatttctatgggaagttgcgcaaatggtggtggctattatcattattcttattcagttgtaagaggttgtgatcgtattgttcctgttgatgtttatgtgccaggttgtcctccttcagctgaagcactattgtacggtattcttcaattacaaaaaaaaattagagataagggctcttttattagataga

SEQ ID NO: 222340 - DNA, 792 bp, Unknown
  Bacterial polypeptide expressing nucleotide sequence isolated from the Sargasso Sea
aatgcttaaagacgaagatagaatatttcaaaatttatacaatgacagtggtgcagacatcgagtcagctaaattaagagatgattggaacggaacaaaagaaattttagaaaagggaagagaatggataatcaatgaagttaaatcctctgaacttagagggcgtggaggcgctggttttccaactggtttaaaatggtcattcgcacctaaagaagtgggatctagacctcattatttagtcattaatgcagatgagtcagaacctggaacatgtaaagatagagatatattaagatttgaacctcataaattaatcgaaggatgtttaattgcatcgtatgctgttaatgcacataaatgttacatttatattagaggtgaatattttaatgaaggacaaaaacttcaaactgcaatcgacgaggcttataaaaataatttaattgggaaaaatgctttaaatttaggatgggatttagatatttatatacactatggtgctggtgcctatatttgtggtgaagaaactgcactgttggagagtttggaaggaaaaaagggtcaaccaagattaaagccaccatttcctgcattaattggattatatggatgtcctactataattaataatgttgagactgttgcagctgttcctacaattctaagaagaggtgcaaaatggtttagttcacttggaagacctaaaaacactggaacaaaaatttattgtatttctggaaatgtaaataatccatgtaatgtagaggaagaaatgggaattccacttaa

SEQ ID NO: 222341 - DNA, 520 bp, Unknown
  Bacterial polypeptide expressing nucleotide sequence isolated from the Sargasso Sea
atgaatttagatgaaaaaagaaaaataccggaagagtttaagcaattatcagaagattttagtaaaaatggttttataacaacatctttagataatcttataaattggtcaagaactggatcgttacattggatgacttttggtttagcttgttgtgctgttgaaatgatgcataccagcatgccaaggtacgacctagaaagatttggagcagcgccaagagcttcacctaggcaatcagatgtaatgatagttgctggaacactaacaaataaaatggctccagctttaagaaaagtttatgatcaaatgcctgaaccaagatatgttatttcaatgggcagctgtgctaacggaggtggatattaccattattcatattcagttgtaagaggttgtgacagaattgtccctgttgatatttatgttcctggttgcccaccttcagcagaggcattgctttatggaataatgcagttacaaaaaaaaataagaaacaaaggttctttagaaagataaa

SEQ ID NO: 222342 - DNA, 523 bp, Unknown
  Bacterial polypeptide expressing nucleotide sequence isolated from the Sargasso Sea
atgaatgttactgaaagagaaaaacaaattccagatgaattcaaagaactagctaaggattttagtgaaaaaggttttataacaacctcttttgataatttagtaaattgggctagaacaggatcattacactggatgacttttggtctagcatgttgtgctgtagaaatgatgcaaacttcaatgcctagatatgatcttgaaagatttggtgcagcgccaagagcttcacctagacagtctgatgttatgattgttgccggaactcttacaaataaaatggctcctgcattaagaaaagtctatgatcaaatgcctgagccaagatatgtaatttcaatgggcagctgtgcaaatggaggaggctattatcattactcgtattctgtagtcagaggatgtgacaggatagttccagtagatatttatgttccaggatgcccaccttctgctgaagctttattgtatggaataatgcaattacaaaaaaaaataagaaacaaaggttctatagaaagataat

SEQ ID NO: 222343 - DNA, 769 bp, Unknown
  Bacterial polypeptide expressing nucleotide sequence isolated from the Sargasso Sea
tttcgatgtcttctgcatcgcggcgccggcgcgtatatctgcggcgaagagaccgcgatgctcgaaagccttgagggtaaaaagggccagccgcggctgaagcctcctttccccgcgggtgcgggcctgtatggctgcccgaccacggtgaacaatgtcgaatcgatcgcggtcgtgccgacgatcctgcggcgcgggtccgaatggttctcgtccttcgggcgcgagaataacaagggcaccaagctcttccagatttcgggccatgtcgaacgtccctgcgtcgtcgaagagacgatggggatcacgttccgcgagctgatcgaaacgcattgtggcgggatcaagggcggctgggacaatctgctggcggtgattccgggtggctcgtcagtgccgctggttccggctgcggaaatcatggacgcgccgatggatttcgacgggctgaaggacctgaaatcgggcctcggcacggcggccgtcatcgtgatggacaagtcgaccgatgtggttcaggcgatcagccgcatcagctatttctacaagcatgaaagctgcggccagtgcacgccgtgccgtgagggtacgggctggatgtggcgcgtgatggaacggctgcgcaccggcgatgccgacatcgccgaaatcgatacgctgtgggaagtcaccaagcaggtcgaaggtcatacgatctgcgcgcttggcgatgccgctgcctggccgatccagggcctgatccgccatttccgcccagaactcgaacgtc

SEQ ID NO: 222344 - DNA, 744 bp, Unknown
  Bacterial polypeptide expressing nucleotide sequence isolated from the Sargasso Sea
tatggcacaattaattgtatttcttcctttgttaggttttttattttgttttttcttaggaaaaatatttggttttaaagcttctcaaattgtaactacttcattcctttttatatcagctattttatcttggtttttatttttctcttatttgggtgaaagagaaatggaagttatatatatttttaattggtttacttcaggaaattttatagttgattggtcaatacgtttggactcattaactactacaatgtttattgttgtttgtagtgtttcagcgtgtgttcatctttactcaattggctacatgagtgatgatccatcaaaggaaagatttatgggatatctaagtcttttcactttttttatgttgatgttggtctcaagtaataatttaatacaaatgttttttggttgggagggtgtaggacttgcttcatacttactaatagggttttggtatcataaaccttctgcaaataatgctgctataaaagcttttattgtaaatagaattggagattttggatatgctctaggcatagcaggtgttttttatatttttggatctgtagagtttagtgttatttttgataattcagaaagttttaaagaccattcaatacaattcataggtgttagctttaatacaatagatttattgtgctttcttttgtttattggtgcaatgggtaagtcagcacaacttggtttgcatacatggttacctgatgccatgga

SEQ ID NO: 222345 - DNA, 492 bp, Unknown
  Bacterial polypeptide expressing nucleotide sequence isolated from the Sargasso Sea
cagaggagtttaaagatttagcaaaaaattttgctgagaaaggctttataactacttcatctgaaaatttgattaattgggcaaggacaggatcgttacactggatgacttttggtttggcttgttgtgcagtcgaaatgatgcatacttcaatgccaaggtatgatcttgaaaggtttggtgcagcacctagagcctcaccaagacaatctgatgttatgattgtagcaggaactcttacaaataagatggctcctgctttaagaaaagtttacgatcaaatgccagaaccaagatacgtagtctctatgggcagttgtgctaatggtggaggttattaccactattcttattctgtagtaagaggttgtgataaaatagtacccgtagatatttatatccccggatgtcctccgtcagcagaagctcttctttatggaattttgcaacttcaaaaaaaaattagaagagaaggaaatataaatagataaa

SEQ ID NO: 222346 - DNA, 670 bp, Unknown
  Bacterial polypeptide expressing nucleotide sequence isolated from the Sargasso Sea
atgctcaaagataaagatagaatatttcaaaatttatataatgatttaggttctgatgtagcttcgtctcaaaaaagaggtgactggacaaaaacgaaagaactaataagtaaaggtagagattggataattaacgaaattaaagattcacaattaagaggtagaggtggagctggttttccaacagggttaaaatggtcatttgcaccaaaagaagtaggatcaaggccacattatttagttattaatggtgatgagtctgagccaggtacttgtaaagatagagatatccttagatttgagcctcataagttaattgagggatgcttaatagcgtcttatgcaattcaagcccatgtttgttatatttatataagaggtgaatactttgttgatgggcaaaaacttcaagccgcaattgatgaagcatatgaaaaaaatttaattggtaaaaatgcagctggatcaggatgggatctagatatttatattcactacggagctggtgcatatatatgtggtgaggagacagcattacttgagagtatagagggaaaaaaagggcaaccaagattaaaaccaccttttcctgctttaataggtctttatggttgtccaacaataattaataatgttgaaacaattgctgtagttccaacaatttcttaga

SEQ ID NO: 222347 - DNA, 434 bp, Unknown
  Bacterial polypeptide expressing nucleotide sequence isolated from the Sargasso Sea
ttttagatatctagtaaatgggcaaaggactggctctttgcactggatgacatttggacttgcatgttgtgcagttgaaatgatgcaaacatctatgccaaggtacgatctagagagatttggcgctgcaccaagagcatccccaagacaatcagacgtaatgattgttgctggaactttaactaacaaaatggctccagcgttaagaaaagtttatgatcaaatgcctgagccgagatacgtgatatctatgggtagctgtgcgaatggtggcggttattaccattactcatattcagttgttagaggatgcgatagagttgttccagttgatgtttatgtaccaggatgccctccctcagctgaggccttattatatgggatcatgcaattacaaaaaaagataagagaccaaggttcaataagcagataat

SEQ ID NO: 222348 - DNA, 892 bp, Unknown
  Bacterial polypeptide expressing nucleotide sequence isolated from the Sargasso Sea
tagtgaagcatcaaaccttcaaaaggcaatcgatgaagcatatcaaaacaatttaattggcaagaatgcatgtgggactaattggaattatgacatttatttacatcggggtgccggagcttatatttgtggagaagaaactgcacttctagagagtcttgaaggaaagaaaggtcaaccaagattaaaacctcctttccccgcaggtgctggactttacggatgcccaactacagttactaatgttgaaactatagcagtagcacctaccattataagaagaggagcttcttggtttagtggtcttggtagagaaaataatactggttcaaaaatatttagtatttcaggtcatgtaaataatccatgtaatgttgaagaagaaatgggcattgggttaaaagaacttattgaaaatcatgctggtggggtaataggaggatgggataatttattagcagtaatacccggcggtgccagcgtaccacttcttccaaaatcaatttgtgacacagttaaaatggactttgatagcttaaaagaagttcaaagcggtcttggtacagcagcagttatagtgatgaataaatctactgatattgttgatgcaatatgtagactgtcacacttttataaacatgaaagttgtggtcaatgcacaccttgtagagaaggaacaggttggatgtttaggatgatggagaaaatggttaaaggctctgcacaagttgacgatattgataaacttttagatgtaaccaaacagattgaaggacatactatttgtgcattaggagatgcagcagcttggcctatacaagggcttattagacacttcaggcctgaagtagaaaaaagaataaaagaataccaacttagagaagtagcataa

SEQ ID NO: 222349 - DNA, 520 bp, Unknown
  Bacterial polypeptide expressing nucleotide sequence isolated from the Sargasso Sea
tatggcccaattaattgtttttcttcctttaataggttttctgttttgttttttcttcggcaaaaaattgaattttaaagtatcacaaatcctaacaacatcgctgctattcttatctgcaattctatcctggattttatttttctcctatattggagaaagagaaactcaaataattcatattttcaattggttcacatcaggtaattttattgtcgattggtctattcgattggactcacttactaccacaatgtttgtagtggtatgtagtgtttcagcttgtgttcatctttactctattgggtatatgagtgatgacccatcaaaagagagatttatgggatatttaagtcttttcactttctttatgttgatgttagtctctagtaacaatttgctgcaaatgttttttggctgggaaggagtgggcttagcttcatatttactaattggtttttggtatcataaaccgtctgcgaataacgctgcaataaaagcttttcttgtaaatagggta

SEQ ID NO: 222350 - DNA, 514 bp, Unknown
  Bacterial polypeptide expressing nucleotide sequence isolated from the Sargasso Sea
atgggaataaaatttggagttaatcaagataggcaaaaaaaaatccctgaggagtttaaagatctcgctaaagattttgcagaaaaaggttttataactacctcatcagaaaatttagtcaattgggctaggacaggatcattacattggatgactttcggtttagcttgttgtgcagttgaaatgatgcaaacctcaatgccaaggtatgatctagaaagatttggtgcagctcctcgagcctcaccaagacagtcagacgttatgatagttgccggaacattgacaaataaaatggctccagctttgagaaaagtttatgatcaaatgcctgaacctagatacgttgtatctatgggaagttgcgctaatggaggtggttattatcattattcatattcagtagttagaggttgtgataaaattgttcctgtagatatttatatccctggttgtccaccatcagcagaagctcttttatacggtattttacaattgcaaaagaaaattaggc

SEQ ID NO: 222351 - DNA, 355 bp, Unknown
  Bacterial polypeptide expressing nucleotide sequence isolated from the Sargasso Sea
gatgatgcactcttatatgagtagatatgatttagatcgtttaggtgtaatacctagaggatctccaagacaatctgatgtaatgatcgttgctggaactcttacaaacaaaatggcacctgctttacgaaaggtttatgatcaaatgcctgaaccaagatgggtaatttctatgggttcttgtgctaatggtggaggttattatcattactcttactccgttgttagaggatgcgatagaatagtgcctgtagatatttatgttccaggttgtccaccaactgctgaagctcttttgtacgccatcatgcaacttcaagataaaataaaaaagaaaaagaaaatttataggtaa

SEQ ID NO: 222352 - DNA, 915 bp, Unknown
  Bacterial polypeptide expressing nucleotide sequence isolated from the Sargasso Sea
aatgcttaaagaagaagataaaatatttaaaaatttatataatgattttggttggactctagaagattctctaaaaaggaatgattggtcgaatacaaaagatataatttctaaaggaagagaatggattattaatgaaataaaaacatctgagttaagaggcagaggaggggcaggttttcctacaggcgttaaatggtcttttgctccaaaaaaagttggttcacgccctcactatttggttattaatgctgatgagtcagaaccaggcacatgcaaagacagagatataatgaggtttgagcctcaaaaattaattgaaggttgtttgattacctctttcgcagttaatgcacatatttgctatatctatattagaggtgaatattttaatgaaggaaaaagacttcaggaggcaatagacgaagcttacaaaaataattttattggaaaaaatgcatgtaattcaggttgggatctggatatttatattcattttggtgcaggagcatatatttgtggagaagaaacagctctacttgaaagtcttgaaggaaataaaggacaacctagattaaaacctccattccctgctctggttggcttatacggttgcccaacaattgtaaataacgttgaaacaattgcagtagtcccaactattttaagaaagagtggaaagtggtttgcatctattggacgtccaaaaaatactggaacaaaaatattttgcatttctggtaatgtaaacaaaccatgtaacgttgaagaagagatgggaattcctttgaaggaattaatagagaaacatgcagggggtgtgattggaggtttggaaaatttgcaggcagttattcccggtggttcttctatgcctctaattccaaaagatacatgtgatacgataaaaatggg

SEQ ID NO: 222353 - DNA, 775 bp, Unknown
  Bacterial polypeptide expressing nucleotide sequence isolated from the Sargasso Sea
aaaaggacaaccaagattaaagccaccatttcctgcattaattggattatatggatgtcctactataattaataatgttgaaactgttgcagctgttcctacaattctaagaagaggcgcaaaatggtttagttcacttggaagacctaaaaatacagggacaaaaatttattgtatttctggaaatgttaataatccatgtaacgtagaagaagaaatgggaattccacttaaagaattaattgaaactcatgctggtggtgtaattggtggatgggataatctcaaagcagtaatacccggaggttcttcaatgccaatgttacctaaagaaatttgtgacaacatgaaaatggattttgatgcatgtgttgaaaataaaacaggactaggaacagctggtattgttgttatcaataatgaccaagatattattaagtgtatggcaagaatagcaagattttataaacatgaaagttgtggtcagtgtacaccatgtagggaaggatctggatggatgtggagaatgttggaaagaatggcagcaggtgaggcaactccagacgaagtggacatgctttttgatgtaacaaaacaaattgaaggacatacaatttgtgcatttggtgaaggttcctcttggccagttcaaggattaatcagacattttaaagatgaaatacttgaaagaaataaatttgatcctgtagtgaaaaaacaaaaaaatattccatacttagtagatcaacatttattagaaaaagaaaatgcctaa

SEQ ID NO: 222354 - DNA, 903 bp, Unknown
  Bacterial polypeptide expressing nucleotide sequence isolated from the Sargasso Sea
cctacaggtttaaagtggtcatttgcacctaaagaagttggatctagaccacattatttagttattaatggtgatgagtcagaaccaggcacttgtaaagatagagatattttgagatttgaacctcataaactaattgagggttgtttgatagcatcatatgcagttcaagcacacgtctgctatatctatattagaggagaatattttgttgatggtcaaaaactccaagctgcaattgatgaagcttatgagaaaaaactattaggaaaaaatgcagctggaactggctgggatttagatatttatatccactacggagcaggagcatatatttgtggtgaagaaacagcgttacttgaaagtttagaaggtaaaaaaggtcaaccaagattaaaaccacctttcccagctttaataggtttgtatgggtgcccaactattataaataatgttgaaaccattgctgtggtgccaactattctaagaagaggcgcaaaatggtttgcttctttaggaagagaaaaaaatacaggaacaaaaattttttgtatttctggaaatgttaacaatccatgtaatgtagaggaagagatgagtattcctttaaaagaattaatagaaattcacgctggtggagtgattggtggatgggataatttacaagctgtaataccaggtggatcctctatgcctttaattccaaaagatagatgtgaaacactaaagatggattttgatgcgtgtgtcgaagagaaaagtggattaggaacagctggaatagtggttatcaataaagatcaagacataattaaatgtatggcgagaattgctagattttataaacatgaaagttgtggacagtgtacaccttgcagagaaggttctggatggatgtggaga

SEQ ID NO: 222355 - DNA, 898 bp, Unknown
  Bacterial polypeptide expressing nucleotide sequence isolated from the Sargasso Sea
tgacaaaggctcagatgtatcttcatcacaagaaagaggcgattgggtaaatacaaaagaaattactgacaaaggaagagactggataataaatgaaataaaagaatctcaattaagaggtcgaggtggtgcaggatttcctactggtttaaaatggtcatttgcgccaaaagaagttggatctagaccacattacctagttataaatggcgatgagtctgagccaggaacctgtaaagatagagacattttaagatttgaacctcacaagttaatagaaggttgtttaattgcatcttacgcagtgcaggcacatgtttgttatatttatataagaggagaatattttgttgatggtcaaaaacttcaagcagcaatagatgaagcttatgataaaaaactcttaggtaaaaatgcagccggtactggttgggatttagatatttatattcattatggtgctggtgcatatatttgtggagaggaaacagctttattagaaagtattgaaggtaaaaaaggacaaccaagattaaaacccccatttcctgctttaattggtctttatggatgtccaacaattattaacaatgtagaaactatagccgtagtcccaacaattcttagaaggggtggaaaatggtttgcttctcttggaagagaaaagaatacaggcacaaaaatattttgcatatctggaaatgtaaatacaccttgcaatgttgaggaagaaatgaacattcctttaaaagaattaattgaaattcatgcaggtggtgttattggaggttgggataatcttcaagcagtaattccaggaggttcatcaatgccactaattccaaaagagaaatgtgaaacattaactatggattttgactctcttatggctgagaaa

SEQ ID NO: 222356 - DNA, 481 bp, Unknown
  Bacterial polypeptide expressing nucleotide sequence isolated from the Sargasso Sea
atacaacttgcagatgattttagcaagaatggatttataactacatcacttgacaatttaataaattggtcaagaacaggatcacttcattggatgacatttggcctcgcatgttgcgctgttgaaatgatgcaaacgtcaatgccaagatatgatcttgaaagatttggtgctgcaccaagagcttcgccaagacaatctgatgtaatgattgtagctggtaccttaactaataaaatggcaccagcacttagaaaagtttatgatcagatgccagaacctagatatgtaatttcgatgggaagttgtgcaaatggtgggggatattatcattattcttattcagttgttaggggttgtgatcgaattgtaccagttgatgtttatgtgccagggtgccctccatcagcagaagctttgctgtatggaatactacaattacaaaaaaaaataagagataaaggttcatttcttagatagt

SEQ ID NO: 222357 - DNA, 740 bp, Unknown
  Bacterial polypeptide expressing nucleotide sequence isolated from the Sargasso Sea
gggttgcgcgggcgtgggggtgctggattcccaacatggtcttaaatggtcatttatgccgaaagaggtcaaggagcggccgcattacctagtaataaatgccgatgagtcggagcccggtacatgtaaagaccgggatatcatccgccacgaaccgcataaactgcttgaagggtgtgtggtggctggcttttcgatgcgcgcgcacgcggcctatatatatattcggggcgaatttgtgaatgaagcccgccagttgcaaacggcgattgacgaagcttatgacgctggcctgcttggcaaaaatgcggcaaaatcgggatgggattttgatatttatctgcatcgcggtgcgggggcttatatttgtggtgaggaaacagctttgctggaatctcttgagggcaaaaaaggccagccgcgtttaaagccaccatttccagcaggtgttggtctctatggttgtccgacaacggtgaataatgtagaatctatcgcagtgactcctacgattttgcgacgtgggcccggctggtttgccggtcttggtaaggaaaataataccggcacaaagctgttttgtatttcgggccatgtgaataagccgtgtaacgttgaagaagaaatgggtattccgcttcgcgaattgctggaaaagcacgcaggcggcgttcgtggcggttgggataatttgctggcagtgataccgggtgggtcatcaacgccgctcatgccaatcg

SEQ ID NO: 222358 - DNA, 797 bp, Unknown
  Bacterial polypeptide expressing nucleotide sequence isolated from the Sargasso Sea
tgaaggaaacaaaggacaaccaagattaaaaccaccttttcctgcccttgtaggattgtatggatgtcctacaattataaataacgttgaaactatagctgttgtaccaacaatactaagaaaaggatcaaaatggtttgcatctttaggcaaaccaaaaaacaccgggactaaaatattttgcatttcaggtaatgttaatagtccatgtaacgttgaagaagaaatgggtattaaattaagagacttaatagaaaaacatgcaggtggtgtagttggtggatgggataatttgcaagctgttattccaggaggctcatcaatgccaatgctaagtaaagaaataagtgaaaatataaccatggactttgattcattagtagaaaataaaagtggtttaggtactgcagggatagttgttataaataaagatcaagatattattaaatgcatggctagaattgctagattttataaacacgaaagttgtggacagtgtacaccatgtagagaaggctctggttggatgtggagaatcttagagaggatggcaaaaggagaagcttccaaagatgaggtcaatatgctttccgatgttactaaacaaattgaaggtcatactatttgcgcgtttggagaaggttcagcctggccagtacaaggtttattgagacattttaaaaaagaaattattgagagaaataattttgatccgttagttaaaaataacaaaaatattccatatttaatcgatcaacatacattagaggaagatattaaaaatgttaaaagttaga

SEQ ID NO: 222359 - DNA, 511 bp, Unknown
  Bacterial polypeptide expressing nucleotide sequence isolated from the Sargasso Sea
atgtatgaaaataaaatacctgatgagtttaaaaaaatagctaaagattttagtgataacggttttgtaacaacttcttttgaaaatttagttaattgggcaagatctggatctttgcactggatgacttttggtcttgcctgttgtgcggttgaaatgatgcaaacatctatgcctagatacgatcttgaaagatttggtgccgcaccaagaggatctcctaggcaatctgatgttatgatcgttgcaggtactttgactaataaaatggcaccagctttgaggaaagtttatgatcaaatgccagaaccaaggtacgtaatatcaatgggtagttgtgctaacggaggtggctactatcattattcttattcagttgttcgtggatgtgacagaatagtaccggttgatatatatgttcctggctgtccaccttctgctgaagctttattgtatggtattttacaacttcaaaaaaaaattagaaataaaggctctttagagagataac

SEQ ID NO: 222360 - DNA, 566 bp, Unknown
  Bacterial polypeptide expressing nucleotide sequence isolated from the Sargasso Sea
gatgtatttgatagctatattttcgcctctgttgggaagtcttttagccgggtctctatccctcctaatacctagagtaagtgaaacaaaaagggccttatttgatcgtgccgcccaagtagtcactattactggtatgttgattgcctccttggctggaacctattcctttatagatgtagttgttttagacaatccaaactatacaccactttttacatgggttaattcaggtgacttaagttttgagtgggctctgcgcggggatactctttcagtattgatggtgttaatggtcacatggatttcaacaatgatccatatttattcagtcggctatatgtctcacgacaaatctattccgcgatttatgagttatttatctttatttactttttttatgttgatgttggtaacttccaacaaccttatacagctattttttggatgggaaggagtgggcttagcttcctatctgttgatcggtttttggtatgaaaaaccttcagcgtgtgctgctgctataaaggcttttgtagttaatagggttggagattttggctttg

SEQ ID NO: 222361 - DNA, 334 bp, Unknown
  Bacterial polypeptide expressing nucleotide sequence isolated from the Sargasso Sea
agatatgatttagaaagatttggtgcagctccaagaggatcacctagacaatctgatgttatgattgtagcaggcaccttaactaataaaatggcaccagctttgagaaaagtttatgatcaaatgccagaacctagatatgttatttctatgggtagctgtgctaatggaggtggctactatcactactcatattctgttgttagaggttgtgatagaattgtaccagttgatatttacgttcccggatgtccaccatctgcggaagcacttctttatggaattctgcaattacaaaaaaaaattcgtaataatggatctttggaaagataat

SEQ ID NO: 222362 - DNA, 295 bp, Unknown
  Bacterial polypeptide expressing nucleotide sequence isolated from the Sargasso Sea
atcaccaaggcaatcagatgttatgattgtagcaggaactttaacaaataaaatggcaccagcgctaagaaaagtttatgaccaaatgccagaaccaagatatgtgatatcaatgggaagttgcgcaaacggtggtggctattaccattattcatattctgtagtaagaggatgcgatcgaattgttcctgtagatatatatgtacctggctgtccaccatctgctgaagcgttattatatggggttttacaacttcaaaaaaaaattagaaacaaaggttctctagaaagataa

SEQ ID NO: 222363 - DNA, 481 bp, Unknown
  Bacterial polypeptide expressing nucleotide sequence isolated from the Sargasso Sea
caaaaagttagctaaagattttagtgaaaatggttttataacaacatcttttgacaatctagtaaactgggctagaacgggctcattacattggatgacttttggtcttgcatgctgcgctgttgaaatgatgcatacatcaatgccaagatatgatctagaaagatttggagccgctccgagaggttcaccaagacaatctgatgtaatgatagtagcaggaactttaacaaacaaaatggctcctgctctaagaaaagtatatgaccaaatgccagaaccaagatatgttatatcaatgggtagttgtgcaaatggtggtgggtattaccattactcttattctgttgttagaggttgtgatcgaattgttccagtagatatatatgttccaggttgccctccgtcagcagaagcacttctttatggtgtattacaacttcaaaaaaaaatacgaaataaaggatctttagagagataa

SEQ ID NO: 222364 - DNA, 511 bp, Unknown
  Bacterial polypeptide expressing nucleotide sequence isolated from the Sargasso Sea
attgggagtaaatatagaacataataactctcttaatatagatgaagtctttgaaaaaaaaggttttgttacagcttcattcgaaaatttgattaattgggcacgctctggttctttatggcctatgacatttggtttggcttgctgtggagttgagatgatgcactcttatatgagtagatatgatttagatcgtttaggtgtaatacctagaggatctccaagacaatctgatgtaatgatcgttgctggaactcttacaaacaaaatggcacctgctttacgaaaggtttatgatcaaatgcctgaaccaagatgggtaatttctatgggttcttgtgctaatggtggaggttattatcattactcttactccgttgttagaggatgcgatagaatagtgcctgtagatatttatgttccaggttgtccaccaactgctgaagctcttttgtacgccatcatgcaacttcaagataaaataaaaaagaaaaagaaaatttataggtaa

SEQ ID NO: 222365 - DNA, 725 bp, Unknown
  Bacterial polypeptide expressing nucleotide sequence isolated from the Sargasso Sea
tatggccaccattcatgtagacggtaaagagtacgaggtagacggggcagataacctgctgcaagcctgtctgtcccttggtctggacgtcccctatttttgctggcacccggcgctcggtagcgtcggcgcctgccgccagtgtgcggtgaaacagtatcagaatgccgacgacaagcgcggccgcctggtcatgtcctgcatgaccccctccaccgatggcacctatatctccatcgaggacgaagaggcgaaggagttccgcaagacggtggtggagtggcagatgaccaaccacccccacgactgcccggtgtgtgaagagggtggctcctgccacctgcaggacatgacggtgatgaccggccacaacagccgccgctaccgtttcaccaagcgcacccaccagaatcaggatctgggccccttcatcaaccacgagatgaaccgctgcatcgcctgctatcgctgcgtccgttactacaaggactacgccggcggcgaggatctcggggtctacggcgcccacgacaacgtctacttcggccgagtcgaagatggcaccctggagagcgagttctccggcaacctggtggaggtctgccccaccggcgtgttcaccgacaagacccactccgagcgctacaaccgcaagtgggacatgcagttcgcccccagcatctgccaagggtgctcggttggctgcaacatcagcccgggcgagc

SEQ ID NO: 222366 - DNA, 337 bp, Unknown
  Bacterial polypeptide expressing nucleotide sequence isolated from the Sargasso Sea
cccagatatgatttagaaagatttggcgcggccccaaggggatcacctagacaatcagacgtgatgatagtagctggaactttaactaacaaaatggctcctgcattaagaaaagtatatgatcaaatgccagaaccaagatatgttatatcgatgggtagttgtgctaatggtggaggttattaccattattcatactctgttgttagaggttgtgaccgtatagttccagttgacatttatgttcctggctgtcctccttcagcagaagcacttctatacggaatattacaacttcaaaaaaaaataagaaacaaaggatcattagaaagataaa

SEQ ID NO: 222367 - DNA, 349 bp, Unknown
  Bacterial polypeptide expressing nucleotide sequence isolated from the Sargasso Sea
atgggaatagatttttttagatcaaaaagtagagagaaagaaattcctgctgaatttaaacaaatagcaaaggatttcagtgaaaaaggctttataacaacttcatcagataatttaattaattgggctagaacaggatcacttcattggatgacttttggtttagcttgctgtgcagtagaaatgatgcagacctcaatgccacgatacgatcttgaaagatttggtgcagctccaagagcttcacctagacaatctgatgtcatgatagttgctggaacattaacaaataaaatggcagctccattaagaaaagtttacgatcaaatgccagaaccaagatattaat

SEQ ID NO: 222368 - DNA, 340 bp, Unknown
  Bacterial polypeptide expressing nucleotide sequence isolated from the Sargasso Sea
cctggcaaaagattttgctgaaaaaggtttcataacaacttcatctgaaaatttaattaattgggctagaacaggttcattacactggatgacttttggtcttgcttgttgtgctgttgaaatgatgcaaacttcaatgccaagatacgatcttgaaagattcggtgcagctccaagagcttcaccaagacagtcggatgtaatgatagtagcaggaacattgaccaacaaaatggccccagctcttaggaaagtttacgatcaaatgccagagccaagatatgtagtttccatgggtagctgtgcaaatggtggtggttattaccattactcttactca

SEQ ID NO: 222369 - DNA, 655 bp, Unknown
  Bacterial polypeptide expressing nucleotide sequence isolated from the Sargasso Sea
atggcccaattaattgtttttcttcctttaataggttttttgttttgttttttcttaggcaaaaaatttaactttaaagtatcacaaattttaacaacatcactgctattcttatctgcgattttatcctggattttatttttctcctatattggagagaaagaaactcaaataatttatatcttcaattggttcacatcaggtaattttattgtcgattggtctattcgattggactcactcacaaccacgatgtttgtagtggtatgtactgtttcagcttgtgttcatctttactctattggatatatgagtgatgacccatcaaaagagagatttatgggatatttaagtcttttcactttctttatgttgatgttagtctctagtaacaatttgctgcaaatgttttttggctgggagggagtaggcctagcgtcatatttactaataggtttttggtaccataaaccatctgctaacaatgctgcaataaaagcttttcttgtcaatagggtaggagattttggatatgccttgggtatagcaggtgttttttatatttttggatctattgagtttaatgttatctttgataacgctgaaaattttaaggatcacaccattcattttataggtttaaatttcagtacca

SEQ ID NO: 222370 - DNA, 641 bp, Unknown
  Bacterial polypeptide expressing nucleotide sequence isolated from the Sargasso Sea
agattaaaacctccgtttcctgctttaataggactttatgggtgtccaacaataattaataatgttgaaaccattgcggtcgttccaacaattcttagaaaaggcagtaaatggttttcttctttaggaagagaaaaaaatacaggcacaaaaattttttgcatatctggaaatgtaaacaatccatgtaatgttgaagaagaaatgaatataccattaaaagaattaatagaaattcatgccgggggtgtaattggcggctgggataacctgcaagcagtaattcctggtggatcatcaatgcctttaatcccaaaagataaatgtgaaactttaactatggatttcgactcgttaatgacagagaaaagtggattaggaactgctggtgtagtcgtaattaataaggatcaagatattattaaatgtatggctagaattgcgagattttataaacatgaaagttgtggtcaatgtactccatgtagagaaggaacaggatggatgtggagaatgcttgagaggatgtctaaaggtgaagcaactagagacgaagttgatatgctaagtgatgtaacaaatcaaatagcagggcacacaatttgtgcatttggagaaggctcttcttggccagtttcagg

SEQ ID NO: 222371 - DNA, 388 bp, Unknown
  Bacterial polypeptide expressing nucleotide sequence isolated from the Sargasso Sea
atgatcttagaagataaaaaaaaagaaattccagaggagtttaaacagctagcacaagattttagtgataatggctttataacaacttcattagataatcttgtaaattgggcaagaacaggttcattacactggatgacatttggactagcttgttgtgctgttgaaatgatgcaaacttctatgcctaggtatgatcttgaaaggtttggtgcagcaccaagagcttcaccacgacaatcagatgttatgatagtagctggaaccctaacaaataaaatggctccagctctaagaaaggtttatgatcaaatgccagaacccagatatgtaatatctatgggaagctgtgctaatggcggaggttattatcattattcgtattctg

SEQ ID NO: 222372 - DNA, 845 bp, Unknown
  Bacterial polypeptide expressing nucleotide sequence isolated from the Sargasso Sea
tcataagttaattgaaggttgtctaattgcatcttatgcagttcaagcacatgtttgttatatttatataagaggagaatattttgttgatggtcaaaaacttcaggctgcaatagatgaagcttatgagaaaaaactcttaggtaaaaatgcagcaggtactggttgggatttagatatttatgttcattatggtgctggtgcatatatttgtggagaggaaacagctttattagaaagtatcgaaggtaaaaaaggccaacctagattaaaaccaccatttcctgctctaattggtctttatggatgtccaacaattattaacaatgtggaaactatagcagtagtcccaacaattcttagaaaaggtggaaaatggtttgcttctcttggaagagaaaagaacacagggacaaaaatattttgtatatctggaaatgtaaatacaccttgcaatgttgaggaagaaatgaacattcctttaaaagaattaattgaagttcatgcaggtggtgttattggaggttgggataatctacaagcggtaattcctggtggttcatcaatgccactaattccaaaagagaaatgtgaaacattaactatggattttgactcacttatggctgagaaaagtggtttaggaactgcaggcatagtagtcattaataaagatcaggacataattaaatgcatggcaagaatagcaagattttataaacatgaaagttgtggtcaatgtacaccttgtagagaaggttctggttggatgtggagaatgcttgagagaatggcaaaaggagatgcaaccaaggatgaggtggatatgctaggagatgttacaa

SEQ ID NO: 222373 - DNA, 1009 bp, Unknown
  Bacterial polypeptide expressing nucleotide sequence isolated from the Sargasso Sea
agaaattgatgctttgacttcaacaatgctaatagttgtaacatctgtatcattttgcgtacacttatattctattggatatatgcaagctgataaatcaatttctcgttttatggcttatttaagtttatttactttttttatgctgatgttggttactagcgataatctagtccaaatgttttttggatgggaaggtgttggattaacatcttatcttctaataggtttttggagtcataaagagtctgcaaataaagctgcaatcaaagcttttgtagttaatagagttggtgattttgcttttgcattaggcattgcaggtatattttttgtttttaattcaattcaatttagcacaatatttgataatgcatctttttttgctgatcacaaaatttattttgttggtttcgagatctctacaattaatttcttatgttttttattatttcttggagcaatgggaaaatcagcacagttagggttacatacttggctaccagatgcaatggaaggacctactcccgtttctgctttaatccatgctgctactatggttacagcaggggtgttcatggtagcaagattaagtccattgttcgaacatgctgattttacgaatttatttataacatttgttggtgctaccactgcagtttttgcagcaacaatagctttgactcaaaatgatattaaacgagttattgcttattcaacttgtagtcaattaggatatatgttttttgcagcaggtttaggagcttataatgcttcaatctttcatctaacaactcatggcttttttaaagcattattatttttatcagctggttctgttattcatgcaatgcatcatgaacaggatatgagaaaaatgggaggcttatttaccaaaataccttttactgctttaatgatgtggattggttcattagctattataggctttccttatttttcaggatattattcaaaagaaagtattttggaaaatgcttactttcat

SEQ ID NO: 222374 - DNA, 805 bp, Unknown
  Bacterial polypeptide expressing nucleotide sequence isolated from the Sargasso Sea
attttaagatttgaaccacataaattgattgagggatgcttaattgcttcatatgctgttaatgcgcacatttgttatatttatataaggggtgaatattttaacgaaggtcaaaaactacagcaagcaattgatgaagcttataaagaaggtttactaggaataaacgcctcagacacaggttgggatttagatatctatattcattatggggctggcgcttacatatgtggagaagaaactgctcttttggaaagtttagaaggtaaaaagggtcaaccaagattaaaacctccttttcctgctctaattggattgtatggatgtccaacaatagtaaataatgttgaaactattgctgttgtgccaacaatattaagaagaggtggaaaatggttttcatctttaggtagagcaaaaaatacaggaacaaaaatttattgtatttcaggaaatgtaaataatccatgtaatgttgaagaagaaatgggcgttccattaaaagatttaattgaaaaacatgctggtggtgttgtaggaggatgggataatttaaaagcagtcatccccggtggttcttcgatgccattattacctaaaaaaatttgtgatactattaaaatggattttgatgcttgtgttgaaaataaaactggacttggtacagccggtatagttgttataaataaagatcaagacataattaaatgtatggctagaattgccagattttataaacatgaaagttgtggacaatgtacaccttgtagagaaggttcaggatggatgtggagaatgttggaaa

SEQ ID NO: 222375 - DNA, 517 bp, Unknown
  Bacterial polypeptide expressing nucleotide sequence isolated from the Sargasso Sea
aatgaataataaaatagatcaagttccaaaggaatttaaacaacttgcagatgattttagcaagaatgggtttataactacatctcttgataatttaattaattggtcaagatcaggatcacttcattggatgacatttggtcttgcttgttgtgcagttgagatgatgcaaacttccatgccaagatatgatcttgaaagatttggtgcagcgccaagagcttcgccaagacaatctgatgtaatgattgtggctggaactttaactaataaaatggcaccggctcttagaaaagtttatgatcaaatgccagagcctagatacgtaatttcgatgggaagttgcgctaatggtggtggatattatcattattcttattctgttgttaggggttgtgacagaattgtaccagttgatgtttatgtaccaggatgtccaccatcagctgaagcgctactttatggaatattacaattacaaaaaaaaataagagataaaggttcttttcttagataa

SEQ ID NO: 222376 - DNA, 645 bp, Unknown
  Bacterial polypeptide expressing nucleotide sequence isolated from the Sargasso Sea
tatgcttaagcctgaagataaaatttttaaaaatctctacaatgaactaggttgggaaattgataatgcaattaaaagaaatgactggaaagacactaaagatataatttctaagggaagagaatggattattaatgaggtaaaaacttctgaattaagaggaagagggggagcaggtttttctaccggtcttaaatggtcatttgctccaaaagaagttggttctagaccacactacttagttattaatgcagatgagtcagaacctggaacttgtaaagatagagacatattaaggtttgaaccccagaaattaattgaaggttgcttgattgctggttatgcggtgaacgctcatgtttgttacatttatattagaggagaatactttaatgaaggtagaagattacaagatgcaattaatcaagcctatcaaaaaaattttttaggaaaaaatgcatgcggttctggatgggattttgatattcatattcattatggagctggtgcttatatttgtggcgaagaaactgctttactagaaagcatggaaggaaataaagggcaaccaagactaaaacctccttttccagcattagttggattatatggatgtccaactattgttaataatgtagaaactat

SEQ ID NO: 222377 - DNA, 415 bp, Unknown
  Bacterial polypeptide expressing nucleotide sequence isolated from the Sargasso Sea
tatgaataatcttgataaaagcaaaacaattccagaagaatttaaagatatagctaaagattttagtgacaacggatttataacaacctctatggataatctagtaaattgggctagaactggatcgttacactggatgacttttggtcttgcttgttgtgccgtggagatgatgcaaacatcaatgccaagatatgatttggagcgtttcggggcagcaccaagagcaagcccaagacaatctgatgttatgatagttgcaggcactttaacaaataaaatggcccctgctttaagaaaagtttatgatcaaatgcctgaaccaagatatgtaatatctatgggaagctgtgcaaatggaggtggttattatcactattcttactccgtagtaagaggatgcgatagaattgtt

SEQ ID NO: 222378 - DNA, 908 bp, Unknown
  Bacterial polypeptide expressing nucleotide sequence isolated from the Sargasso Sea
tatggatttggcaattattttttcaccgttaatcggatcaattctttcaattttacttggaaatagattgggttatagatattcgcagctcattacttgtttatttattttaatttccgcaatcttttctacttttattttttatgaagtaaattttaataatactttttataataacgatatttttatttgggttacttcaggtcaatttgaagcttcctggtccgtccatatcgatactcttacttcggtgatgttgattgttgtaacttatgtttcgttgttagttcatgtttattcaattggatatatggatcatgatcctcacaaacctagattcatgtcttatttatccctttttacatttgccatgttggtacttgtcacatcaaacaattttttacaattattttttggctgggaagctgtggggctttgttcttatcttttgattggattttggtataaaaaaaaatctgcaaacaatgcagctataaaagcatttattgtgaatagagttggtgattttggtcttatcataggaatatttttaatatttttatattttgatacaatttattattcagatgtttttagcaatgctgctaattttaaagatacaacaatattttttcttggatttgagtttaatttaataactctaatttgtgttgctctttttattggttgtatgggtaaatcagctcaaatatttttacatacgtggttgccagacgcaatggaaggacctacgccagtttctgcgcttatccatgctgccacaatggtgactgctggagtatttttagtggcgagatgttctccaatattcgaatattctcaagttgctctaaattttgttgcggttataggaatgataacggcattttttgcagcttcagttgctt

SEQ ID NO: 222379 - DNA, 421 bp, Unknown
  Bacterial polypeptide expressing nucleotide sequence isolated from the Sargasso Sea
aattaattggtcaagatctggctctcttcactggatgacttttggtttagcatgttgtgcagttgaaatgatgcaaacttctatgcctagatatgatcttgaaagatttggcgctgcacctagagcctcacccagacaatcagatgtaatgattgttgctgggacattaaccaacaaaatggctcccgctcttagaaaagtttacgatcaaatgcctgaacctagatatgttatatcaatgggaagttgcgctaatggtggaggttattatcactattcgtattcagtagttaggggatgtgataggatagtacctgttgatgtttatgtcccaggttgtccaccctccgctgaagcacttttatatggaataatgcaattgcaaaaaaagattagaaataaaggttctattgataggtaa

SEQ ID NO: 222380 - DNA, 523 bp, Unknown
  Bacterial polypeptide expressing nucleotide sequence isolated from the Sargasso Sea
aatgaatttaaaagaaaaagaaaatcaaattccaaaagagtttaaacaacttgccaaagattttgcggataaaggttttataacaacttctttggataatttggtaaattgggctagaacaggttcattgcactggatgacatttggacttgcctgttgtgcggttgaaatgatgcaaacatctatgccaaggtatgacctggagagatttggagctgctccaagagcttcgccaagacaatcagatgtgatgattgttgccggaacattaactaataaaatggctccagcgttaagaaaagtttatgatcaaatgcctgaaccaagatatgtaatatctatgggaagttgtgcaaatggtggtggctactatcattattcatattctgttgttagaggatgcgatagagttgttccagttgatgtttacgtaccaggatgccctccctcagctgaggctttattatatggaataatgcaattacaaaaaaagattagagatcaaggttcaataagcagataa

SEQ ID NO: 222381 - DNA, 451 bp, Unknown
  Bacterial polypeptide expressing nucleotide sequence isolated from the Sargasso Sea
atgggagtagaaattaatgaagataattttggtaatgagctaaattctaagggatttttagtttcaaatttcgacaatcttttaacttgggcaagaacaggttctttgtggcctatgacttttggtttagcttgctgtggagttgaaatgatacatacatatatggcaagatatgatcttgatagatatggtgtaattccaagaggaagcccccgtcaatctgatgtaatgattgttgctggaactttaactaacaaaatggcaccagcattaagaaaagtttatgaccaaatgccagaacctaggtgggtaatatctatgggatcttgcgcaaacggtggaggatattatcattactcatattctgttgtaagaggttgtgatagaattgtcccagtagatatatatgtacctggttgtccaccaacagcagaggctttagtttacggaa

SEQ ID NO: 222382 - DNA, 430 bp, Unknown
  Bacterial polypeptide expressing nucleotide sequence isolated from the Sargasso Sea
atgaataataagatagatcaagttccagaagagttcaaacaacttgctgatgattttagtaagaatggatttattactacatcattagacaatttaataaattggtcgcgatcaggctcattacactggatgacctttggacttgcttgttgtgcagttgaaatgatgcaaactgcgatgcccagatatgatttagagagatttggtgctgcaccacgtggatcaccaagacaatctgatgttatgattgttgctggaacgttaactaacaaaatggcaccagctctaagaaaagtttatgatcaaatgccggaaccaagatatgttatatcaatggggagttgtgctaatggtggcggctactatcattactcttattctgttgtaagaggttgtgaccgtattgttccagttgatatttatgtaccag

SEQ ID NO: 222383 - DNA, 286 bp, Unknown
  Bacterial polypeptide expressing nucleotide sequence isolated from the Sargasso Sea
tcaatcagatgtgatgatagtagcaggtacgctaacaaacaaaatggctcctgcattaagaaaagtttacgaccaaatgcctgaacctaggtacgtaatatctatgggaagttgtgcaaatggtggaggctattatcattattcatattctgtagtaagaggatgcgatcgagtggtacctgttgacgtatatgttcccggatgccctccttcagctgaagcattgctttatgggattttacaattacagaaaaaaattagaaacaaaggttctttagaaagataa

SEQ ID NO: 222384 - DNA, 829 bp, Unknown
  Bacterial polypeptide expressing nucleotide sequence isolated from the Sargasso Sea
cgggttgggtcttgatattcatatacactttggtgcaggagcttatatctgcggagaagaaacggctttactagaaagtcttgaaggcaataaaggccagcctagattaaaaccgccttttccagccctggtgggcttgtatggttgtccaaccatcgtaaataatgttgaaacaatagctgttgtaccaactattttaagaagaggtggaaaatggtttgcttctattggacgtccaaaaaataccggaactaaaatattttgtatatctggaaacgttaataccccatgcaatgttgaagaagagatgggaattcctttgaaagaacttgtagaaaaacatggcggaggtgtaattggtgggtggaaaaatttacaagcagtgattccaggagggtcttctatgcctcttataccaaaagaaacatgtgaaacaataaaaatggactttgattctctagtagcggaaaaaagtggtttggggacagcagcagtaattgtaattaataaagaccaggacattattaaatgtatggctagaatagctaaattttataaacacgaaagttgtggtcaatgcacaccctgtcgcgaggggtccggatggatgtggagaattcttgaaagagctgcgaaaggagaagcaacttttaaagatatagaactattatctgatgtaacaaaacaaatcgaaggacatacaatctgtgcatttggagaaggttctgcttggcctgtgcaaggacttttaagacatttcagaaaagaaatagataagagatgtttttcagagcctttgataaaaaagagaaaaaaaattccttattta

SEQ ID NO: 222385 - DNA, 406 bp, Unknown
  Bacterial polypeptide expressing nucleotide sequence isolated from the Sargasso Sea
atgggagtaaagattaatcaattagataatcgacaaaaggaaattcccgaagaatttaaaaaattagctaaagatttttctgaaaagggttttattactacatcatcagaaaatttaataaattgggcaaggacaggttcattacactggatgacttttggattagcttgttgtgctgttgaaatgatgcaaacgtcaatgccaagatacgatttagaaagatttggagcagcacctagggcttctcctagacaatctgacgttatgatagttgctggaacattaacaaataaaatggctccggctttaagaaaagtttatgaccaaatgcctgaacctagatacgttgtatcaatgggaagctgtgctaatggaggcggatattatcattattcttattcagtag

SEQ ID NO: 222386 - DNA, 751 bp, Unknown
  Bacterial polypeptide expressing nucleotide sequence isolated from the Sargasso Sea
gttgacaacttcaattctttttatatgtaccattttttcttggataatattttttcaatatttagaaaataaagaaacagaaattatatttattcttaactggatttcatctggaaaccttgttgttgattggtctataagattagatgcactaacttctgttatgtttatggtagttacaactgtttcaggatgtgtgcatttgtattctataggttatatgaatgaggacccctctaaggtaagatttatggggtatttaagcttatttactttttttatgctggtacttgtatcaagtaataatttattacaaatgttttttgggtgggaaggagtaggcttagcttcatatttattaattggtttctggcatcataaagaaactgcaaataaagctgcaattaaagcttttattgttaatagagttggtgattttggatatgcaattggaatagcgggtatattttacatatttggttcagttaatcttgacaatatatttagtcaagttgatcaatataaagatcatcaaattgaatttatttctttaacttttccaactttagattttctatgctttcttctgtttataggagctatgggtaagtctgcacagttaggtttgcatacttggcttcctgatgcaatggaaggtccaacaccagtatctgcattaattcatgctgcaacgatggttactgcaggtgtatttttagtgtcaagaatgagtcctttatatgaatttgca

SEQ ID NO: 222387 - DNA, 689 bp, Unknown
  Bacterial polypeptide expressing nucleotide sequence isolated from the Sargasso Sea
aatgcttaaagataaagatagaatatttaaaaatttatataatgatatgggttctgatattgtttcttcccaaaagagaggtgactgggttaacactaaagaaattatagataaaggtagagattggataataaatgaaatcaaagattctcaacttagaggtaggggtggtgctggtttcccaactggtttaaaatggtcttttgctcctaaagaactaggttcgagaccacattatttagttataaatggtgatgagtcagaaccaggtacgtgtaaggatagagatattttaagatttgagcctcacaaattaattgaaggttgcttaatagcctcatatgcagttcaagcacatgtttgttatatatatataagaggtgaatattttgttgaaggcgaaaaacttcaagcagctattgatgaagcttatgaaaaaaagttattggggaaaaatgctgctggaacaggctgggatttagatgtttatattcattatggcgctggagcttatatctgtggagaggaaacagctttattagaaagtatcgaaggtaaaaaaggacaacctagattgaaacctcctttcccagctttaattggtctttatggatgtccaacaataataaacaatgtcgaaactatagctgtagtaccgacaattcttagaaaaggtggaaaatggtttg

SEQ ID NO: 222388 - DNA, 529 bp, Unknown
  Bacterial polypeptide expressing nucleotide sequence isolated from the Sargasso Sea
aatggaaaaaaggggccttggaatgggaatagatgactttcaatcaatagaagaagttcaaaaggatgtaaaacaaaaagggttcttattagctaaatataatgatttattaacttgggctagaactggatctttatggcctatgaccttcggcttagcttgttgtggagtggaaatgatgcatgcatacatgagtcggtatgatttagacagatatggcgttataccaagaggtagcccaagacagtcagatgtcatgatagtagctggaactcttacaaataaaatggccccagctttaagaaaagtttatgatcagatgcctgaacctagatgggttatttctatgggctcatgcgcaaatggaggaggttattatcattattcttattctgttgtaagaggttgtgacagaattgtgccagtagatatttatgttccaggatgtccaccaactgccgaagctttagtttatggaattatgcaattacaaaaaaaaattaaaaaaaagaacaaagataatagataa

SEQ ID NO: 222389 - DNA, 287 bp, Unknown
  Bacterial polypeptide expressing nucleotide sequence isolated from the Sargasso Sea
acaatcagatgtcatgatagttgctgggacactaacaaacaagatggctccagctttaagaaaagtttacgatcaaatgcctgaaccaagatatgtaatatctatgggcagctgtgctaatggaggcggttattaccattactcttattcagtagtcagaggatgcgatcgaatagttccagtagatatttatgttcctggatgtccgccatcagcagaagcattactttatggagttcttcagttacaaaaaaaaattagaagagaaggatctatccaaagataat

SEQ ID NO: 222390 - DNA, 523 bp, Unknown
  Bacterial polypeptide expressing nucleotide sequence isolated from the Sargasso Sea
aatgaacttaaaagaaaaagaagatcaaattccaaaagaatttaaacaacttgctaaagattttgcagataaaggttttataacaacttcttttgataatttggtaaattgggctagaacaggttcgttgcactggatgacatttggacttgcctgttgtgcagtagaaatgatgcaaacatctatgccaagatacgaccttgagagatttggagctgcaccaagagcttcaccaagacaatcagatgtaatgattgttgctggaactttaactaataaaatggccccagcgttaagaaaagtttatgatcaaatgcctgaaccaagatatgtgatatctatggggagctgcgcaaatggtggtggctactatcattattcatattctgttgttagaggatgcgatagagttgttccagttgatgtttatgtgccaggatgccctccctcagctgaggctttattatacgggatcatgcaattacaaaaaaagataagagaccaaggttcaataagcagataa

SEQ ID NO: 222391 - DNA, 787 bp, Unknown
  Bacterial polypeptide expressing nucleotide sequence isolated from the Sargasso Sea
caaaaattaatcgagggttgtttaataactgcttacgcagtcaatgcacacaaatgttatatttatattcgtggcgaatatacaaaagagggagagtatttacaaaaagctatagacgaagcatatgaaaaaaatttaattggaaagaacgcgtgtaattctggttgggatttggacatttatattcattatggagccggggcatatatatgcggagaagaaactgctttgttagaaagtcttgagggaaacaagggtcagcctagacttaaacctccttttccagctttagtcggattatacggctgtccaacaattgtaaataatgttgagactattgctgtggttccaacaattctaaggagaggagcaaaatggtttgcttctttgggaagacctaaaaatacaggcactaaaatattttgcatatcagggaatgtaaacaaaccgtgcaacgtagaagaagaaatgggtatatcattgaaagatttaatcgaaaagcacgcaggtggagtgattggcggatgggaaaatttacaagctgtaattcccggaggatcttcgatgcctctaataccaaaagcatcatgcgatactcttaaaatggattttgactcgctggttgctgaaaaaagtggattaggaacagctggtgttattgttattaataaagatcaagatattttgaaatgtatggcaaggatcgctagattttataaacataaaagctgtggtcaatgtactccttgtagagaaggctctggttggatgtggagaattttagaaa

SEQ ID NO: 222392 - DNA, 538 bp, Unknown
  Bacterial polypeptide expressing nucleotide sequence isolated from the Sargasso Sea
aatgggaataataaacgacacttctttcaataaacaaaaagaaattcctgaagagttcaaagacctagctaaagactttgctgaaaaaggttttataacaacttcgagtgataatttaattaattgggcaaggaccggctctttgcattggatgacttttggtcttgcgtgctgtgcagtagaaatgatgcaaacttctatgccgagatatgatcttgaaagatttggcgctgcacccagggcttcacctaggcaatcagatgtgatgattgttgcaggaacattaacaaataaaatggcaccagctttaagaaaagtatatgaccaaatgcccgagccaaggtacgtagtatcgatgggaagttgtgctaatggcggcggttattaccattactcttattcagttgtaagaggatgtgataaaattgttccagttgatatttacataccaggttgtcctccttccgcagaggcattgttatacggaatattacaattacaaaaaaaaattagaagagagggttcactagaaagataa

SEQ ID NO: 222393 - DNA, 925 bp, Unknown
  Bacterial polypeptide expressing nucleotide sequence isolated from the Sargasso Sea
tttgcacctaaagaagttgggtctagacctcattacttagtcattaacgcagatgagtcagacctgggaactgttaaagatagagacttattaagatttgaccctcataaactaatagaaggttgcttaatagcttcattcgcagttcaagcacatgtttgttatatctatattagaggagaatattttactgaaggacaaaaacttcaagctgcaattgatgaggcttataataaaaatcttcttggaaaaaatgcagctggaactggatgggatttagatatttatattcattatggagcaggagcatatatttgtggagaggagacagcactgcttgagagtatagaaggtaaaaagggacaaccaagattaaaacctccgtttcctgctttaataggactttatgggtgtccaacaataattaataatgttgaaactattgcggtcgttccaacaattcttaggaaaggcagtaaatggttttcttctttaggaagagaaaaaaatacaggcacaaagattttttgcatatctggaaatgtaaacaatccatgtaatgttgaagaagaaatgaatataccattaaaagaattaatagaaattcatgctgggggtgtaattggcggctgggataacctgcaagcagtaattcctggtggatcatcaatgcctttaatcccaaaagaaaaatgtgaaactttaactatggatttcgactcgttaatggcagagaaaagtggattaggaactgctggtgtagtcgtaattaataaggatcaagatattattaaatgtatggctagaattgcaagattttataaacatgaaagttgtggtcaatgtactccttgtagagaaggaacaggatggatgtggagaatgcttgagaggatgtctaaaggtgaagcaactagagacgaag

SEQ ID NO: 222394 - DNA, 385 bp, Unknown
  Bacterial polypeptide expressing nucleotide sequence isolated from the Sargasso Sea
atgggaataaagttaggatcattttcaaataagcaaaaagagatacctgaagaatttaaagacttagctaaagattttgcagaaaagggttttattacgacatcttcggaaaatttaatcaactgggctagaacaggctcactacattggatgactttcggactagcctgttgtgcggttgagatgatgcaaacgtcaatgccaagatatgatttagaaagatttggagcagcacctagagcttcacctagacgatcagacgtgatgatagttgccggtacattaacaaacaaaatggctcctgctttaagaaaagtttatgatcaaatgcctgagccgaggtatgtcgtttcaatgggaagttgcgcaaacggtggaggttatt

SEQ ID NO: 222395 - DNA, 820 bp, Unknown
  Bacterial polypeptide expressing nucleotide sequence isolated from the Sargasso Sea
tttacatttgctatgcttatgcttgttacatcagataacttattgcagttattttttggatgggagggcgtaggtttagcatcatacctattgattggtttttggtatgaaaaaccctctgctaatgctgctgcaatgaaggcttttgtagttaatagggttggagattttggttttcttttaggtattgcggtaatttatatcgcaacaggatcaataagctttgatgttatttttcaaaaaattaataatgttaatcaatttactataaatatagcatgtttattgctttttatgggagcaatgggaaagtctgctcaactctttttacatacatggttgcccgatgcaatggagggccctacaccagtttcagctttaattcatgcggcaactatggttacagctggaatatttcttgtggcaagatgttcgccaatttttgaaaattctgatcttgcgttatcatttatcataattattggagcatctactgcgttttttgcagcaacagttggacttgtacaaaatgacattaaaagaattattgcttattcaacttgttcccaactaggctatatgtttgttgctttgggtgttggggcgtatcaagtagctatctttcatctttttactcatgcttttttcaaagctcttctttttcttgggtctgggtcagttatccacgctatgtctgatgaacaagatattcaaaagatgggaggtttatacaaaattattccatttacatggataatgatgttaaagggaactttagcgctaactggagcccccttattatctggttattattcaaaag

SEQ ID NO: 222396 - DNA, 808 bp, Unknown
  Bacterial polypeptide expressing nucleotide sequence isolated from the Sargasso Sea
taaagatcgtgatattttaagatttgaacctcataagttgatcgaaggttgtatgttaagttcgtttgctgttaatgctcacgtttgttacatttatattagaggtgagtattataatgaaggtagaaaactacaagaagcaattgatgaagcttatgaaaaaggtttaataggtattaatgcttcaggtactggctgggatttagatatctatattcattatggtgcaggtgcttatatatgtggagaagaaactgctctactggaaagtttggaaggtaaaaaaggtcaacctagattaaaacctccttttcctgctttaataggattatatggatgcccaacaataataaataatgttgaaactatcgctgttgtaccaacaatattaagaagaggtggtaaatggttttcatctttaggtagagcaaaaaatacagggacaaaaatttattgtatttcaggaaatgtaaataatccatgtaatgttgaagaagaaatgggtataccattaaaggatttaattgaaaaacatgcaggcggtgtagttggaggttgggataatttaaaagcagttataccaggaggatcgtcaatgccactattgccaaaaaaaatctgtgatacaattaaaatggattttgatgcctgtgttgaaaataaaactggacttggtacagcgggcatagttgttataaaccaagatcaagacattattaaatgtatggcaagaattgctagattttataaacatgaaagttgcggacaatgtacaccttgtagagaagggtcaggatggatgtggaga

SEQ ID NO: 222397 - DNA, 841 bp, Unknown
  Bacterial polypeptide expressing nucleotide sequence isolated from the Sargasso Sea
cattatggtgctggagcttatatttgtggtgaagaaactgcattgctagaaagtttggaaggaaacaaaggtcaaccgagattaaaaccaccattccctgctttagtaggattgtatggttgtccgacaatagtgaacaacgttgagacaattgcggtagttccaacaattttaagaaaaggtggaaaatggtttgcatctattggacgtcctaaaaatactggaacaaaaatattctgtatttcaggaaatgttaacaatccatgtaatgttgaagaagaaatgggtgttccattaaaatttcttatagaaaaatatgctggtggtgtgattggtggttggaaaaacttaaaagctgtaatacctggaggttcatcaatgccacttattcccaaagatgtttgtgaaacaattaaaatggattttgattcattagttgctgcaaaaagtggccttggtacagctggaattgtagtgataaataatgaccaagacattctgaagtgcatggccagaatagcaaaattctataaacatgaaagttgtggtcaatgcaccccatgtagagagggttcgggttggatgtggagaatcttggaaagagcagcaaaaggagacgctactaaagaagatattaatttactatctgaagttacaaaacaaattgaaggccatacaatatgtgcatttggagaaggttcggcttggcctgtccaaggacttttaaggcattttagaaaagaaattgataaaagatgtttttcggagccggttattaaaaagaaaagaaaaataccataccttgttgatcaacatttactagaaagtaaggatgcctaaa

SEQ ID NO: 222398 - DNA, 476 bp, Unknown
  Bacterial polypeptide expressing nucleotide sequence isolated from the Sargasso Sea
acttgcaaaagattttagtgataatggatttataacaacatcttttgataatttagttaactgggcaagggccggttctttgcattggatgacttttggtcttgcttgttgtgcagttgaaatgatgcacacatcaatgcctagatatgatttagaaagatttggtgctgccccaaggggatctccaagacaatctgatgtgatgatagtagctggcactttgacaaataaaatggctcctgcattgagaaaagtttatgaccagatgcctgaaccacgatatgtaatttcaatgggaagctgtgcaaatggtggtggatattatcattattcttattcagtagttagaggttgtgatcgaattgtaccggttgatatttatgtccccggctgtcctccatctgcggaagcacttctttatggaatattgcaattacagaaaaaaattagaaacaaaggctctttagaaagataaa

SEQ ID NO: 222399 - DNA, 397 bp, Unknown
  Bacterial polypeptide expressing nucleotide sequence isolated from the Sargasso Sea
tctgaaaaaatttcaagataaagaaaaacaaattccagaagaatttaaagaactagctaaaaactttgctgaaaaaggttttattacaacatctacagacaacttaattaactgggctaggacaggatctttgcactggatgacatttggattagcttgttgtgctgtcgagatgatgcatacttcaatgccgaggtatgacttagaaagatttggtgctgctccgagaggttcgccaagacaatctgatgtaatgattgttgctggaacactaacaaacaaaatggctccagcacttagaaaagtttatgatcaaatgcctgaacctagatatgttatatcaattgggaagttgtgcccaacggtggagggtattatcactattcttactccgtag

SEQ ID NO: 222400 - DNA, 709 bp, Unknown
  Bacterial polypeptide expressing nucleotide sequence isolated from the Sargasso Sea
atgcttaaagatcaagatagaatttttcaaaatttgtataatgatttgggttcagatgtctcttcatcacaaaaaagaggtgattgggtaaatacaaaagaaattactgataaaggaagagactggataattaatgaaataaaagaatctcagttaagaggtcgaggaggtgctggttttccaactggattaaaatggtcatttgcaccaaaagaagttggatcaagaccacattacttagttattaatggtgatgagtctgaaccaggaacttgtaaggatagagatatattaagatttgaacctcataaattaatagagggctgtcttatcgcttcatacgctgttcaagcacatgtttgttatatttatattagaggtgaatattttgttgatggacaaaaacttcaagctgcaattgatgaagcttatgaaaaaaaattaattggtaaaaatgctgctggaacaggatgggatttagatatttatatacattatggagctggtgcatacatttgtggtgaagagactgcattgcttgaaagtttagaaggaaaaaaaggccaacctagattaaaaccaccttttccagctttgataggtttatatggatgtcctacaataattaataatgttgaaacaattgcagtggttccaactattttaagaagaggagctaagtggtttgcttctttagggagagaaaaaa

SEQ ID NO: 222401 - DNA, 712 bp, Unknown
  Bacterial polypeptide expressing nucleotide sequence isolated from the Sargasso Sea
acctagacttaaaccgccatttcctgcaggtgcaggattgtatggttgtccaacaactgtaacaaatgttgaaacaattgctgtttcaccaactattttgagacgtggatctaaatggtttgcaggtttaggtagtctaaataatactggaacaaaaatttttagtatttcagggcacgtaaataatccatgtaatgttgaagaagaaatgggaatttcattgaaagaacttattaataataatgctggaggagtaattggtggttgggataatttattggctgtaattcctggaggagctagtgttccgttaataccaaaatctatttgtgatactgtaaaaatggattttgatagtttgaaagaagttcaaagtggtttaggaactgcagctgtgatagtgatgaataagtctactgatattgtggaagctatagctagactatcacatttttataaacatgaaagttgtggccaatgcacaccatgtagagaaggtactggatggatgtatcgtatgatggaaaaaatgactcatggtaatgcacaaaatcaagatattgataaacttttagatgttacaaaacaaatagaagggcatacaatttgtgcactgggagatgcagctgcttggcctattcagggtttgtttagacattttagacccgaaatagaaaaaagaatagaagaaagaaatcgtagagtagcataa

SEQ ID NO: 222402 - DNA, 925 bp, Unknown
  Bacterial polypeptide expressing nucleotide sequence isolated from the Sargasso Sea
atgcttaaagatcaagatagaatatttagaaatttatataacgatatgggttccgacgttgtttcttctcaaaaaagaggggattgggttaacactaaagaaattacagacaagggtagagattggattataaatgaaattaaagactctcaacttagaggcaggggaggtgctggatttccaactggtttaaaatggtcttttgctcctaaagaagtaggttctagaccacattatttagttataaatggtgatgagtcagaaccaggcacatgcaaagatagagatattttaagatttgagccacataaattaattgaaggttgtttaatagcatcatacgcagttcaagcacatgtttgttatatctatataagaggtgaatactttgttgatggtcaaaaacttcaagcagctattgatgaggcgtatgaaaaaaaattattaggtaaaaatgcagcaggtactggttgggatctagatatatatattcattatggtgctggagcttatatttgtggagaggaaactgcattattagaaagtatagaaggtaaaaaggggcagcctagattaaaaccaccattcccagccctaattggtttatacggatgtccaacaataataaacaatgtggaaactatagcagtagtaccgacaattcttagaagaggtggaaaatggtttgcctctcttggaagagaaaagaatacaggcacaaaaatattttgtatatctggcaatgtaaatactccgtgtaatgttgaggaagaaatgaatattccattgaaagaattaatcgaagttcatgctggaggagttattggaggttgggataatttacaagcagttattccaggtggttcgtcaatgccattaataccaaaagaaaaatgtgaaacactaactatggattttgactcac

SEQ ID NO: 222403 - DNA, 724 bp, Unknown
  Bacterial polypeptide expressing nucleotide sequence isolated from the Sargasso Sea
atgcttaaagatcaagacagaatttttcaaaacttatacaatgatttaggacctgatttgatttcatctcaaaaaagaggtgactgggtaaacaccaaagagataacaggtaaaggcagagactggatcattaatgaaattaaagactcacaacttagaggaagaggtggagcaggatttccaactggcttaaaatggtcatttgcacctaaagaagttggttcaagaccccattacttggtgattaacggagatgagtccgaaccaggtacatgcaaagacagagatattttaagattcgaacctcacaaattaattgaaggatgcttgatatcgtcatacgtaattcaagctcatgtttgctacatttatattagaggtgaatatttcgtagaagggcaaaaactacaagcagcaattgatgaggcttatgaaaaaaaattattaggtaaaaacgctgcaggtacaggatgggatttagatgtttatattcactatggagctggtgcttatatttgtggagaagaaacagcattactagagagtattgagggaaaaaaaggtcaaccaagattaaaacctccttttccggcattaattggcctttacggttgcccaacgataattaacaatgttgaaacaatagcagtagtaccaacaatacttagaagaggtggtaaatggttttcatctttaggtagagaaaaaaatacaggtactaaaa

SEQ ID NO: 222404 - DNA, 598 bp, Unknown
  Bacterial polypeptide expressing nucleotide sequence isolated from the Sargasso Sea
aatgatattttttgtagtatttttgcctttaattggtttcctattttgtgctttttttggaaaaaaattcaatgatatttattctcaagttataactacttttttattatttgtttcttctattttttcatggattattttttttaaatatctgaaaaaaatagaaactgaacaaatatatcttttaaattggttaacttctggaaatttttctgttgattgggcttttagaatagattccttaacatctacaatgttgatagtcgttactacagtttcagcatgtgtccatctttattctgtaggttacatgaaagaggataaatctattaatagatttatgggttatttaagtttatttacattttttatgcttgttttagtaacaagtaataatcttttacaaatgttttttggatgggagggagttggacttgcatcatatttattaataggtttttggtttaaaaaaaatactgctaatttagctgcaattaaagcttttatagttaatagaataggtgattttggttttgcgcttggaatagtaggaatttatttttatttttggatcaatagattttcaagtaatttttga

SEQ ID NO: 222405 - DNA, 828 bp, Unknown
  Bacterial polypeptide expressing nucleotide sequence isolated from the Sargasso Sea
cttagaggaagaggaggcgcaggttttcctactggattgaaatggtcttttgctccaaaagaagttggctctagacctcactatcttgtaattaacgctgatgaatcagagccgggaacttgcaaagatagagatattttaagattcgaaccacataaattaattgaaggttgtttgttagctgcatacgcggttaatgcaaataaatgttatatttatattagaggtgaatattttaatgagggaaataaactccaagaagcaataaatgaagcctacgaaaaaaaattaattggtaaaaatgcatgtgatagcggatgggattttgacttatatttacattatggtgcaggagcttatatatgtggtgaagaaactgcattattggaaagtcttgaaggaaaaaaaggtcaacccaggttaaaaccaccttttccagctttaattggattatatggctgtcctacaattataaacaatgttgaaacaattgcagtagtaccaactatattaaggagaggagcaaaatggttttcaagcattggtaaaccaaaaaatacgggcacaaaaatttattgtatttcaggaaatgtaaataatccatgcaatgttgaagaagaaatggggatttcattaaaagatttaatagatacacatgctggaggtgtaattggtggttgggataatcttaaggctgtaatacctgggggctcatctatgccgctattacctaaaaatatttgtgaaacaataaagatggattttgactcattggttgaacagaaaagtggactaggaactgcaggaattgtggttataaacaaagat

SEQ ID NO: 222406 - DNA, 853 bp, Unknown
  Bacterial polypeptide expressing nucleotide sequence isolated from the Sargasso Sea
agatatatatattcattatggtgctggtgcttatatctgtggtgaggaaactgctttgctcgagagtattgaaggaaaaaaaggtcaaccaagattgaaacctccatttccggctttaataggtctttatggttgcccgacaataataaacaatgttgaaacaatttcagtggtaccaactatacttagaaaaggaggaaaatggttttcatcactcggcagaccaaaaaatactggttctaaaatatattgtatttcaggaaatgtaaataatccctgcaacgtagaagaagaaatgggaattccattaaaagaattaattgaaaaacatgcaggtggtgtaataggtggatgggaaaatctaaaagcagttatacctggtggttcatcaatgccattactaccaaaagaaacatgtgaaacaattaaaatggactttgatgcatgtgtcgagaataaaactggtttaggaacagctggtattgtggttataaataaagatcaagacattattaaatgtatggctagaatagcaagattttataaacacgagagttgcggtcaatgtacaccatgcagagaaggttctggttggatgtggagaatgttagagagaatggcaaaaggtgaggccacaagagatgaagtagatatgttattagatgtgacaaaacaaattgaaggtcatacaatttgtgcttttggagaaggatcttcatggcctgttcaaggattgatcagaaattttaaagatgaaattattgaaagaaacaaatttgatccaattgtgaaaaagaaaaaagatataccttatttaattgatcaacatttattagaaaaagaaaatgcttaa

SEQ ID NO: 222407 - DNA, 486 bp, Unknown
  Bacterial polypeptide expressing nucleotide sequence isolated from the Sargasso Sea
aatttaaacaattagctgaagatttcagtaagaatggttttattacaacttcattagataacttaataaattggtcaagatcaggttcacttcattggatgacatttggacttgcatgttgtgcggttgagatgatgcaaactgcgatgccaagatacgatcttgaaagatttggtgctgcaccaaggggatcgccaagacagtcagatgttatgatagttgctggtacattaactaataaaatggcaccggctttaagaaaagtttatgatcaaatgcctgagccaagatatgtaatatctatgggtagctgtgctaatggaggtggttattatcattactcttactctgtagttagaggatgtgatcgaatagttccagtagatgtttatgttccaggatgtcctccatctgcagagtcgttattatatggaataatgcagctacaaaaaaaaattagaaataaaggatctttaactagataaa

SEQ ID NO: 222408 - DNA, 844 bp, Unknown
  Bacterial polypeptide expressing nucleotide sequence isolated from the Sargasso Sea
atgcttcaagataaagatagaatattccaaaatctatataatgacatgggttctgatgttatttcttctcaaaaaagaggtgattgggttaatactaaagatttaatagataaaggaagagaatggataataaatgaagtcaaaacatctgaattaagaggaagaggaggagcaggatttcctactggtttaaagtggtcttttgcacctaaagaaatcggatcacgacctcattatttagttattaatgcagatgagtcagaaccaggaacatgtaaagatagagacatattaagatttgaacctcataaattaatagagggttgtctgatcacatcatatgctgttcaagcacatgtttgttatatttatattagaggtgaatattatattgagggacaaaaactacaatcagcaatagacgaagcttatgaaaaaaaattgatcggtaaaaatgcatcaggaactggttgggatttagatatttttattcattatggcgctggtgcatacatttgtggagaagaaacggctcttctcgagagtatagaaggtaaaaaaggccaaccaagattaaaaccacctttcccagcattgattggtctttatggatgcccaacaataataaataatgttgagacaattgcggttgttccaacaattcttcgaagaggtggtaagtggttttcttctttaggtagagcaaaaaatactggaactaaaattttttgtatatcaggtaatgtaaacaatccttgcaatgtagaagaagaaatgaatataccattaaaagaattaatcgaagtacatgctggtggagtaattggtgggtgggataatttac

SEQ ID NO: 222409 - DNA, 754 bp, Unknown
  Bacterial polypeptide expressing nucleotide sequence isolated from the Sargasso Sea
atgcttaaagatcaagacagaatttttcaaaatctttataatgacttaggatgtgatgttatttcatctcaaaaaagaggtgattgggttgatactaaagaattgactaataaaggacgtgattggattattaatgaaattaaagagtcgcaactcaggggaagaggaggcgctggttttccaactggattaaaatggtcttttgcacctaaagaagttgggtcaagaccgcactatttagttatcaatgcagatgaatctgaaccaggtacttgcaaagatagagatatattaagatttgaaccacacaaattaattgagggatgtttaattgcttcatatgcggttcaggctcatgtttgttatatttatatacgaggcgaatattttattgatggacaaaagcttcaagctgctatcgatgaagcttatgaaaaaaaactaattggtaaaaatgcagcaggaacaggctgggatctagatatatatattcattacggtgcaggagcatatatttgtggagaagaaacagcactacttgaaagtattgagggtaataaaggtcaaccaaggttaaaaccaccattcccagcattaataggactttatggatgcccaactataattaacaatgttgaaacaatagcagtagtaccaacaattttaagaagaggtggtaaatggttttcatcactaggcagagaaaaaaatacaggtactaaaattttttgtatttccggcaatggtaaataac

SEQ ID NO: 222410 - DNA, 412 bp, Unknown
  Bacterial polypeptide expressing nucleotide sequence isolated from the Sargasso Sea
aatgaataataaaattgaacaagttcctgatgaatttaaaaaacttgcagatgattttagcaagaacggatttataactacatcatttgacaaccttgtcaactggtcaagatctggatcactacattggatgacatttggtcttgcttgttgtgcagtagaaatgatgcaaacatcgatgccaagatatgatcttgaaagattcggtgctgcgcctagagcttcaccaagacaatctgatgtaatgatagttgctggtactttgaccaataaaatggcaccagctttgcgtaaagtttatgaccaaatgccagaacctaggtatgtaatttcaatgggaagctgcgcaaatggaggaggttattaccattattcttattcagtagtaagaggttgtgatcgaatagttcca

SEQ ID NO: 222411 - DNA, 888 bp, Unknown
  Bacterial polypeptide expressing nucleotide sequence isolated from the Sargasso Sea
ctatctattgtattagccccacttcttggctcattggttgcaggcttatttggtaattccattggccgagctggtgcacactgggtgacaattattggtgttgcaatatcaagcctactttcaatgattgtatacaagcaccacgtaattaatagtgctcctgattataacgaagctgtttatacttggttaactagtggtggtattgatttccaaattggttttttgatagatccgctctcagctacaatgatggtagtggttagttttgtttcatggatgattcatatttacaccatcggttatatgcatgatgaccctggctatcaacgtttctttagttatatctctttatttacattcgctatgttgatgttagttatggccaataattttttacaattattttttggttgggaggcagtcggtttagtctcttatttattaattgggttttggtataaaaaagagagtgctatttttgcaaatttaaaagcatttattgttaacagagttggagattttggttttttacttggtattgcagcaatattaatgtacttcaatacattagattacatcgatgtatttaataatcttgaacaacataaagataccaccattactattattaatggtgaatcctggtcggtaatgacagtaatttgtcttagtttattcatcggtgcgatgggtaagtcagcgcaagttcctttacatgtatggttacctgattcaatggaaggaccaactcctatttctgcgcttattcatgcagcaactatggtgaccgcaggtatttttatggtttctagaatgtctccattatttgaattatctgttaccacgttaaattttatcttagtaatcgggtcaattactgcattg

SEQ ID NO: 222412 - DNA, 754 bp, Unknown
  Bacterial polypeptide expressing nucleotide sequence isolated from the Sargasso Sea
tttggaaggcaaaagggaatgcctcgggatgaagccaccatttccagctggtgctggtttgtatggctgccctacgaccgtaaataacgttgaatctatagctgttgttccaacaattcttcgccgtggggcagattggttttcgaaattcggtcgtgagaataatgctggaacaaaattattcgctatatctggccatgtaaaccatccatgcgtcgttgaggaagagatgtctatcccgtttgaagaacttattgaaaggcattgtggtggtatccgtggtggatggaaaaacttaaaggctgtaattccgggaggcgcttcagttccatgcgttcggggtggagaaatgcgagaagcactcatggattttgattatcttaggggagagttgggctctggcttgggaactgcagccgttattgttatggaccagaatacagatgtaatcaaagctatttggcgtctttccaaattttacaagcacgaaagctgcggacagtgcacaccttgcagagagggtactggatggatgatgcgggttatggaacggttagtaaatggcgatgcggaccctagtgagattgatatgcttctggacgtgaccaaacaggttgaaggtcacacaatttgtgcacttggtgatgcagcagcatggcctatacagggacttataaaaaattttcgagacgaaattgaagatcgtttaaaaaatcaaagttcaatgcaaaacagtttggtggccgcgcaatga

SEQ ID NO: 222413 - DNA, 352 bp, Unknown
  Bacterial polypeptide expressing nucleotide sequence isolated from the Sargasso Sea
aatgggactagatcaaggtagtagtgattttatagaaggtaaagctgcttttgaagcagctgcttcagatgtaagaaataaaggttttgtagtagcaagaatagataaattatttacatgggctaggacgggttctttatggcctatgtcgtttggccttgcgtgttgtgcagttgaaatgatgcatgcaggagcaagtagatatgacttggatcgttttggtttagtatttagacctagtcctaggcaatctgatgttatgattgtggcaggaacattaacaaataaaatggctccagccttaaggaaagtctatgatcagatgcctgaacctaggtgggttatatctatg

SEQ ID NO: 222414 - DNA, 844 bp, Unknown
  Bacterial polypeptide expressing nucleotide sequence isolated from the Sargasso Sea
aaaatttttaaaaatttatatggggaggatgattggtctcttactggtgcattaaaaagaggtatatgggataatactaaagatttgatctcaatgggtagtgataatattattgatgaaataaaaaaaagtgatttaaggggaagaggtggcgctggttttccagcaggtctaaagtggtctttcatgcctaaagattcgggtaaacctcattatttaatagttaatgcagatgaatctgaacctggtacatgcaaggatagagagattttaagaaatgatcctcatttattacttgaaggttgtttgattgctggttttgcaatgcatgctcatacttgttatatttatattagaggagaatattacaatgagtcgtctaatttacaaaaagctatagatgaagcttataaatctaatctaataggtaaaaatgcttgtggaacaaactgggattttgatatttttttacatagaggagctggggcttatatatgtggagaagaaactgcacttttagaaagtcttgaaggtaagaaaggtcaacctagattaaaacctccctttcctgcaggatctggtttgtatgggtgcccttctactgttacaaacgtagagactattgcagttgccccaacaattttaagaagaggagctaattggttttctagtcttggaaatccaaaaaatacaggtactaaaatatttagcatatctggccacgtaaacaacccttgtaatgtagaagaagaaatgggaatacctttaaaaaaattaatagaaactcatgcaggaggcgtaattggaggatgggataatttacttgcagttataccaggagggg

SEQ ID NO: 222415 - DNA, 822 bp, Unknown
  Bacterial polypeptide expressing nucleotide sequence isolated from the Sargasso Sea
agaatatttcaaaatttatacaatgacagtggtgcagatatcgagtctgctaaattaagaaatgattggaatggaacaaaagaaattttagaaaaaggaagagagtggataatcaacgaagttaaatcttctgaacttagaggacgtggtggagctggttttccaacaggtctaaaatggtcatttgcacctaaagaggtggggtctagaccgcattatttagttatcaatgctgatgagtcagaacctggaacatgtaaagatagagatatattaagatttgaacctcacaaattaatagaaggatgcttaatcgcttcttatgcagttaatgcccataaatgttatatttatattagaggtgaatattttaatgaagggcaaaaacttcaaactgctattgatgaagcatacaaaaataatttaattggcaaaaacgcattaaactcaggatgggatttagatatttatattcattatggtgctggtgcatacatttgtggagaggagacggcattacttgaaagtctggaaggaaaaaaaggacaaccaagattaaagccaccatttcctgcattaattggtttatatggatgtcctactataattaataatgttgaaactgttgcagctgttcctacaattttaagaagaggtgcaaaatggtttagttcacttggtagacctaaaaatacaggaacaaaaatttattgtatttccggaaatgtcaataatccatgtaatgttgaggaagaaatgggagttccacttaaagaattgattgaaaaccatgctggaggtgtagttggtggatgggacaat

SEQ ID NO: 222416 - DNA, 523 bp, Unknown
  Bacterial polypeptide expressing nucleotide sequence isolated from the Sargasso Sea
catgaatcaaattgatagacaaacaaaaataccagatgaattcaaagaactagcaaaagatttcagtgaaaaaggttttattactacatcttttgacaatttaattaattgggctagaaccggttcactgcattggatgacttttggattagcatgttgtgctgtagaaatgatgcaaacatcaatgccaagatatgatttagagagatttggtgctgcaccaagggcctcacctagacaatctgatgtaatgatcgttgctggaacacttacaaataagatggcaccagctttaagaaaagtttatgatcaaatgccagagccaagatatgtaatatcaatgggaagttgcgcaaatggtggtggttattatcattattcttattccgtagtaagaggatgtgatagagttgttcctgttgatgtatatgttccaggatgtcccccatccgctgaagcacttttgtatggaataatgcaattacaaaagaaaataagaaataaaggttcaatagaaagataa

SEQ ID NO: 222417 - DNA, 447 bp, Unknown
  Bacterial polypeptide expressing nucleotide sequence isolated from the Sargasso Sea
aatgaacgataaaatagaacaagttcctgaagaatttaaacaacttgctaaagattttagtaaaaacggttttataactacatcgctagataatttaattaattggtctaggtctggctctttgcactggatgacttttggtcttgcttgctgtgcagttgaaatgatgcaaacagcaatgccacgatatgacttagagagatttggagctgctccacgtggatctccaagacaatcagacgtaatgattgttgcaggaacattaactaacaaaatggcaccagcattaaggaaagtttacgaccaaatgccagaacctagatatgtaatttctatgggtagctgtgctaatggtggtggttattatcattattcatattcagttgtaagaggatgtgatcgtatagttccagttgatgtatacgttccaggttgtcctccatctgc

SEQ ID NO: 222418 - DNA, 340 bp, Unknown
  Bacterial polypeptide expressing nucleotide sequence isolated from the Sargasso Sea
atgccaaggtatgatcttgaaagatttggtgcagcgccaagagcatcacctagacagtcagacgtgatgatagttgcaggaaccttaacaaataaaatggctccggctttaagaaaagtttacgatcaaatgccagaacctagatatgtagtgtctatgggaagttgtgctaatggtgggggttattatcattactcatactcagtagtaagaggttgcgataaaattgtacctgttgatatttatataccaggctgcccaccttcagccgaagccctgctttacggaattttacaattacaaaaaaaaattagaagagaaggcaatttacaaagataaa

SEQ ID NO: 222419 - DNA, 355 bp, Unknown
  Bacterial polypeptide expressing nucleotide sequence isolated from the Sargasso Sea
gatgatgcatacttcaatgccgcgatatgacttagagcgtttcggtacagcacctcgcgcatctccgcgccaatctgatttgatgattgtagctggaaccttaacgaataaaatggctcccgcgttaagaaaagtttatgatcaaatgccagagcccagatatgttatatcgatgggctcgtgcgctaatggcggcggttattatcattacagctattccgttgtgcgaggttgtgatcgaatagtgcctgttgatgtttatgttccaggttgcccgccaacggcagaggcacttttgtatggtattttggcacttcagaaaaaaatccgaagaacagggacgatcaaaagatga

SEQ ID NO: 222420 - DNA, 959 bp, Unknown
  Bacterial polypeptide expressing nucleotide sequence isolated from the Sargasso Sea
attgcatcttatgcagttaatgcacacaagtgctttatttatataagaggggaatattttaatgaagggcaaaaacttcaaatggctatcgatgaagcttacaaagatggtctcttaggaaaaaattctgcagggactgattgggaattagatatttatattcattatggtgcaggggcttatatctgtggtgaggaaactgccttacttgagagtattgaaggaaaaaaaggacaaccaagattaaaacctccatttccagctttaataggtctttatggttgcccgacaataataaacaatgttgaaacaatttcagtggtaccaactatacttaggagaggtggaaaatggttttcatcattgggtagaccaaaaaatactggttctaaaatatattgtatttcaggaaatgttaataatccctgcaacgtagaagaagaaatgggaattccattaaaagaattaattgaaaaacatgcaggtggagtaataggaggatgggataacttaaaagcagttatacctggtggttcatcaatgccattacttccaaaagaaacatgtgaaacaattaaaatggactttgatgcatgtgttgagaataagactggtttaggaacagctggtattgttgttataaataaagatcaagacattattaagtgtatggcaagaatagcaagattttataaacacgagagctgtggtcaatgtacaccatgcagagaaggttctggttggatgtggagaatgttagagagaatggccaaaggagaagctacaagagatgaagtagatatgttattagatgtaacaaaacaaattgaaggtcatacaatttgcgcttttggagaaggatcttcatggcctgttccaggattgatcagaaattttaaagatgaaataattgaaagaaataagtttgatccaatagtgaaaaagcaaaagatataccg

SEQ ID NO: 222421 - DNA, 373 bp, Unknown
  Bacterial polypeptide expressing nucleotide sequence isolated from the Sargasso Sea
agcgtgttgtgcggtagaaatgatgcatacatcgatgccaagatacgatttagagagatttggagctgcgccaagagcttcacctcgacaatcagatgttatgattgttgcaggcacacttacaaataagatggctcctgcattaagaaaagtttatgatcaaatgccagagcctagatacgtaatatcaatgggtagctgtgcaaatggtggaggttattaccactattcttattctgttgtaagaggttgtgatagaatagttccagttgatgtttatgtccctggatgtcctccttcagctgaggctttgttgtatgggataatgcaattacaaaaaaaaataagaaacaagggttcaatagagagataa

SEQ ID NO: 222422 - DNA, 396 bp, Unknown
  Bacterial polypeptide expressing nucleotide sequence isolated from the Sargasso Sea
aatgataaaagaaaaaaaagaaataccagaagaatttaaacaattagcaaaagattttagcgaaaaaggttttattactacatctttagataacttgattaattggtcaagaaccggttctttacactggatgacttttggtctggcttgttgcgctgttgagatgatgcaaacatcaatgccaagatatgacttagaaagatttggtgctgctccacgagcatctcctagacaatctgatgttatgatagttgctggaactttgactaataaaatggcgccagctttgagaaaggtttatgatcaaatgcctgaaccaaggtatgttatatcgatgggaagctgtgcaaatggcggaggttactatcattattcttatttcagtgtaagaggttg

SEQ ID NO: 222423 - DNA, 523 bp, Unknown
  Bacterial polypeptide expressing nucleotide sequence isolated from the Sargasso Sea
tatgaaaattcaatcaacagatgaaaaaatacctgaagaatttaaacaacttgcaaaagactttagcgacaatggttttataacaacttcatttgataatttagttaattgggcaagaacaggatctttgcactggatgacttttggattagcctgctgtgcagttgaaatgatgcatacttcaatgccaagatatgatcttgaaagatttggtgctgcaccaaggggctcaccaagacaatcagatgtaatgattgttgctggtactcttactaacaaaatggctccagctttaagaaaagtttatgaccaaatgccagaaccaagatatgtaatatctatggggagctgtgcaaatggtggaggctattatcattactcatactctgttgtaagaggttgtgataaaatcgtaccagttgatatttatgttcctggatgcccgccctcagctgaagcattactatatggaattttgagacttcaaaagaaaattagaacaaaaggttctattcagagataa

SEQ ID NO: 222424 - DNA, 856 bp, Unknown
  Bacterial polypeptide expressing nucleotide sequence isolated from the Sargasso Sea
ttagatatttatattcattatggtgcgggtgcttacatttgtggcgaagagactgctttacttgaaagtttagagggtaaaaaaggacaaccaagattaaaacctccttttcctgctcttattgggttgtatggttgtccaacaataataaataacgttgagacaatcgcagtagttccaacaatattaagaagaggagcaaaatggtttgcttctttaggaaaaccaaaaaacacaggaacaaaaattttttgcatttctggaaatgtaaacaatccctgcaatgttgaagaagaaatgagcgtttctcttaaagatttaattgaaattcatgcaggaggtgtaatcggtggatgggaaaatttaaaagcagttatcccagggggctcatcaatgccattacttccaaaaaaaatttgcgatacagtaagaatggattttgattcattgatagcggaaaaaagtggtttaggaacagcaggaatagtagttataaataacgaccaagatattattcaatgtatggctagaatagctagattttataaacatgaaagttgtggccaatgcacaccatgtagagaaggctctggttggatgtggagaatgttagaaagaatggcaaaaggtgaagcatcaaaagatgaggtagaaatgttaatggatgtcacaaaacaaatagaaggtcatactatttgtgcatttggtgaaggttctgcgtggccagttcaagggcttttgagacattttaaaaaagaagtagaaaaaagaaacaattttaatcctttagtaaataggaataaaaatattccttatttagtagatcaacacttgttagataaaaaaaatgtttaaa

SEQ ID NO: 222425 - DNA, 523 bp, Unknown
  Bacterial polypeptide expressing nucleotide sequence isolated from the Sargasso Sea
atgaatttaaatgatagaaaagatcaaataccagaagaatttaaaaaacttgctcaagattttagtgataacggtttcataactacttctttagataatttaattaattggtcaagatcaggctctttacattggatgacttttggattggcttgttgtgcggttgaaatgatgcaaacatctatgccaagatacgatctagaaagatttggtgccgcccctagagcttcacctaggcaatctgatgtaatgattgttgctggaacattgactaataaaatggctccagctttaagaaaagtttatgatcagatgccagagccaagatacgtaatatcaatgggcagttgcgctaatggaggaggttattatcattattcttattctgtagtcagaggttgtgacagaattgttccagttgatatatatgttcctggatgtcctccttctgcagaagctctcttgtatggaataatgcaattgcaaaaaaagattagaaacaagggttctataaatagataaa

SEQ ID NO: 222426 - DNA, 475 bp, Unknown
  Bacterial polypeptide expressing nucleotide sequence isolated from the Sargasso Sea
ctggctaaagactttagtgaaaatgggtttattacaacatcgtttgacaatttaataaattgggcgagaacagggtcgcttcactggatgacatttggtttagcatgttgtgcagttgaaatgatgcaaacttcaatgcctagatatgaccttgaaagatttggagcagcgccgcgtgcatcacctagacaatcggatgttatgatagtagcgggaactctaacgaacaaaatggctcctgctcttagaaaagtttacgatcaaatgccggaaccaagatatgtgatttcaatgggtagctgcgcgaatggaggtggatattatcattattcatactcagttgtcagaggatgtgatcgtgtagtgcctgtagatgtttatgtgcctggatgcccaccatctgcagaggctttattatatggaattctgcagcttcaaaaaaaaattagaaacagcggtaacataaatagataaa

SEQ ID NO: 222427 - DNA, 889 bp, Unknown
  Bacterial polypeptide expressing nucleotide sequence isolated from the Sargasso Sea
atgcttaaagacgaagatagaatttttacaaatttatataacgatttgggtcctgatattttatctgctcaaaaaaggggtgactggaaaaatactaacgaaattataaaaaaaggaaaagaatggataattaatgaaataaaatcttctgagcttaggggaagaggaggagcaggttttcctactggacttaaatggtcatttgcacccaaaaaagttggttcaagaccacattatcttgttattaatgctgatgagtcagaaccgggaacttgtaaagatagagatattttaagatttgagcctcataaattaatagaaggttgtttattaacagcgtatgcagttaatgcaaacaaatgctacatttatattagaggagaatacataaatgaaggtattaaactccaagaagctataaatgaagcttatgaaaaaaaattaattggtcaaaatgcttgtgaaacaggttgggattttgacatatacattcattacggtgcaggagcttatatatgtggagaagaaactgctttattagagagtcttgaaggtaaaaaaggccaaccaagactaaaaccaccttttccagctttaataggattatatggttgcccaacaattataaataatgttgaaactatttctgtggttccaactatattaagaagaggcgctaaatggttttcaagtttaggcaaaccaaaaaacacaggaacaaaaatttattgtatttcagggaatgttaacaagccatgcaatgttgaagaagaaatgggaatttccttaaaagatttaattgaaaaacatgctggtggagtaattggaggttgggataatcttaaagcagtaataccaggtggttcttctatgccgttatacccaaaag

SEQ ID NO: 222428 - DNA, 452 bp, Unknown
  Bacterial polypeptide expressing nucleotide sequence isolated from the Sargasso Sea
aatgaacgataaaatagatcaggttccagaagaatttaaacaacttgctaaagattttagcaaaaatggttttataactacatctcttgacaatttaattaattggtcaagatctggctctttgcactggatgacttttggtctcgcttgctgtgcagttgaaatgatgcaaacagcaatgccaagatacgacttagaaagatttggagctgctccacgaggatcaccaagacaatcagatgtaatgattgttgctggaacattaacaaacaaaatggcaccagctttaagaaaggtttatgatcaaatgccagaacctagatacgtgatttctatgggaagctgtgccaatggtggaggttattatcattattcatattcagttgttagagggtgtgatcgtatagttccagttgatgtatatgttcctggatgtcccccttctgcagagg

SEQ ID NO: 222429 - DNA, 815 bp, Unknown
  Bacterial polypeptide expressing nucleotide sequence isolated from the Sargasso Sea
aatgaggtctcatattggctacatctatatacgaggcgagttttatgaggaatcggatagattgcaagctgctattgatcaagcatatgaagcaagattaataggaaaaaatgcttgcaactcaggatgggattttgacctttttatacatcgaggagctggtgcctatatttgtggagaggaaactgggcttatagaaagtctagaaggtaaacctgggagacctcgtttaaagcctccttttcctgctggtgctggtttatatggttgtccatccacagtaaataatgttgaaacgatagcagtagctccaacaatactcagacgtggtgcaaattggttttctggtctcggtcgaccaaaaaattccggtactaagttattttgtatatctggtcatgtaaatgagccttgcaatgttgaagaggaaatgggtatccccctcagagaattaattgataaacatgctggaggagttagaggtggatgggataatctcttagctgtaattccaggtggatcctctgttcctgtaataccaaaagttatatgtgatgaagtactaatggattttgatagtcttatcgaagtcaaatcaggactaggtacagctgcggtcatagttatggacaagtctgctgatattattgaggctatcgcaagattatctcatttttatatgcacgaaagttgtggtcaatgtactccatgccgcgaaggaaccggatgggtttatagagttatgcaaagactaataactggcaatgccgcagtaagtgaaattgataagttagaggatgtagtggacaaataga

SEQ ID NO: 222430 - DNA, 483 bp, Unknown
  Bacterial polypeptide expressing nucleotide sequence isolated from the Sargasso Sea
ttaaaaaattagcagaagattttagtaaaaatggatttatcacaacttcgattgataatttaattaattggtcacgttcaggatctttacattggatgacttttggtttggcatgctgtgcagttgaaatgatgcaaacagctatgccaagatatgatttagagagatttggagcagctccaagaggctcaccaagacaatctgatgtaatgattgttgccggaactttaacgaacaaaatggcaccagcattaagaaaagtttatgatcaaatgcctgaaccaagatatgttatttctatgggcagttgtgctaatggtggtggctattatcattattcatattcagttgtgaggggatgtgaccgaatagttcctgtagatatttatgttcctggatgtccaccttcggcagaagctttgttgtatggaataatgcagttacaaaaaaaaattagaaacaaaggttcatttaacagataaa

SEQ ID NO: 222431 - DNA, 361 bp, Unknown
  Bacterial polypeptide expressing nucleotide sequence isolated from the Sargasso Sea
tttggatacagataaacaaaaaaagataccagaagaattcaaagatttagcaaaagattttgctgaaaaaggttttataactacctcttctgaaaatttaataaattgggctagaactggctccttacattggatgacttttgggttagcctgttgtgctgttgaaatgatgcaaacatcaatgccacgatatgatttagaaagatttggagctgctcctcgcgcatcaccaagacaatcggatgtgatgattgtagctgggaccttgactaataaaatggctccagctctaagaaaagtttatgaccaaatgcctgaaccaaggtacgtggtatcaatgggcagctgtgctaatggcgga

SEQ ID NO: 222432 - DNA, 499 bp, Unknown
  Bacterial polypeptide expressing nucleotide sequence isolated from the Sargasso Sea
attgggattagagactgataataatttaattgatcaacagggtccgggctttatcatcacttcagttgataagcttgtcaattgggctagaaccgggtctatgtggccagtaacttttggattggcttgttgtgctattgaaatgatgcatgcaggagcatcaagatatgatacagatcgttttggagtgttctttaggcctagtccaagacaatcagacgtcatgattgtcgctggaacattggttaataagatggcgccagcactaagaaaggtctacgatcaaatggcagaacccaaatgggttatttctatgggatcgtgtgctaatggaggcggttactatcatcactcatactctgtagtcagaggttgtgatcaaattattccagttgatatctatgtacctggttgtcctcccacttcagaggcactaatcaatggaatcatagaacttcaagaaaaaataaaaaaagaagaatcaatagcaaatggatag

SEQ ID NO: 222433 - DNA, 724 bp, Unknown
  Bacterial polypeptide expressing nucleotide sequence isolated from the Sargasso Sea
aatgcttaaagaggaaaataaaatattcaaaaatttatataacgaacaaggttgggagttagaaaatgctcttaagagagatgattggtcagatactaaaaaaattatagataagggaagagactggattataaatgaaatcaaaacatcggaactcagaggcagagggggagctggcttctcgactggattgaaatggtctttcgcaccaaaaaaagttggttcaagaccacactacttagttataaatgctgacgagtctgaacctggaacttgcaaagatagagatatacttagattcgagcctcaaaaattaatagaaggatgtttgatcgcttcttatgctgtaaatgcaaaagtttgttatgtttatataagaggagaatacttgaatgaaggtaaaagacttcaggaggcgatagacgaagcttattcaaaaaatttaattggtaaaaacgcgtgtaattcaggatgggatttagatatttatattcactatggtgcaggagcatatatttgcggtgaagaaaccgcacttctagagagtttagagggaaacaaaggtcaaccaagattaaaaccacctttcccagctttggttggactttatggttgtccaacaattgtaaataatgttgaaacaattgctgtggttccaacaatattaagacgtggagctaaatggtttgcttctatgggtagaccaaaaaaatacaggtactaa

SEQ ID NO: 222434 - DNA, 676 bp, Unknown
  Bacterial polypeptide expressing nucleotide sequence isolated from the Sargasso Sea
atgcttaaagaagaaaataaaatttttaaaaatttatataacgagcacggctggagtcttgacgactctttaaaacgaaacgattggtcgaatactaaagagattatttcaaaaggaagagattggataataaatgaaattaaattatctgaattaagaggaagggggggagcaggatttccaacaggtgtaaaatggtcattcgcccccaaaaaagttggttctagaccacattacttagtaataaatgctgatgagtccgaacctggaacttgtaaagatagagatatattaaggtttgaaccacaaaagttaatagaaggcagtttgatttctgcctttgctgttaatgcgcatacttgttatatctatattagaggagaatattttaatgaaggccagagacttcaggaagctttagatcaagcttatagcaagaaacttatcggaaaaaatgcttgtaattcaggttgggatttagatatttatattcattatggtgccggagcctatatttgtggtgaagagacagcattattagaaagcttagaaggaaataagggacagccaagattaaaacctccatttccagctttagtagggttatacggatgtccaactatagtaaacaatgtggaaaaaattgccgttattcctactattttaagaaaaggag

SEQ ID NO: 222435 - DNA, 559 bp, Unknown
  Bacterial polypeptide expressing nucleotide sequence isolated from the Sargasso Sea
atggaaaaaaggggcactggagtgggaatgagaatactaaactcaaaggacaagttaaatcaagttccagacgaatttaaacaaattgcaaaagattttgcagaaaaaggatttataacgacatcaacaaataatttaattaactgggcaagaactggttcattacactggatgacttttggtttagcttgttgtgcagtagaaatgatgcatacttcaatgccaagatatgatctagaaagatttggtgctgctcctagagcttcaccacgacagtccgacgtgatgattgttgctggaacattaacaaataagatggctccagctttaagaaaagtttacgatcaaatgccagaacccagatatgtaatttccatgggtagttgtgctaatggaggaggttattatcactattcttattctgttgttagaggatgtgataaaatagtaccagtggatatatatgttcctggctgcccaccttcagcagaggctttattatatggaattcttcaattacaaaaaaaaattagaagagaaggtgatgtgaacagataaa

SEQ ID NO: 222436 - DNA, 511 bp, Unknown
  Bacterial polypeptide expressing nucleotide sequence isolated from the Sargasso Sea
atggaaaaaaggggctttagagtgggaatagaagaatctaataaagtaaaacaaaaaagttttttattagctaaatttgacgatcttctaacatggtcaagaacaggatctctttggcctatgacatttggtttggcgtgttgtggagttgaaatgatgcactcttatatgagtagatatgatcttgataggtatggagttattccaagagcaagtccaagacaatctgatgttatgatcgttgccggaactctaacaaataaaatggcaccagcactccgtaaagtttatgatcagatgcctgaacctagatgggttatttccatgggttcttgcgcaaatggaggaggttattatcattattcttattcagtagtgagaggatgtgatagaattgtaccagttgatatttacgtccctggatgtcctccaacagcagaggcattagtatacggcatacttcaacttcaaaaaaaaattaaaagactaaatgcttctagcaagagttaat

SEQ ID NO: 222437 - DNA, 523 bp, Unknown
  Bacterial polypeptide expressing nucleotide sequence isolated from the Sargasso Sea
atgaatattgataaacaagaaaatcaaatacctgaggaatttaaaaaacttgcgaaagattttagtgaaaacggttttataactacctctttcgataatttagttaattgggctcgcacaggctctctccattggatgacatttggcttagcttgttgtgcagttgaaatgatgcagacttctatgccaagatatgatttagagagatttggagctgctcctagaggctcacctagacagtctgatgttatgattgttgcaggaactttaacaaataaaatggctccagctttaagaaaagtttacgaccaaatgcctgagccaagatatgtgatatcgatgggtagttgtgctaacggaggaggttactatcattactcttactcagtagttcgtggttgtgaccgtatagttccagttgatatatatgttcccggatgtccaccatcagccgaagcacttttgtatggaattatgcaattacaaaagaaaattcgtaatcacggatctttagaaagataaa

SEQ ID NO: 222438 - DNA, 511 bp, Unknown
  Bacterial polypeptide expressing nucleotide sequence isolated from the Sargasso Sea
aatgggaataaataataatgaagtttctgaaaaaaattttgataaagaattaaagtctaaagggtttttagttactagtatagataatattctaacttgggctagaacaggatctttatggcctatgaccttcggtttagcttgttgcggagtagaaatgatgcattcatatatgagtcgctatgatttagatagattaggtgtaatccctagaggaagtcctagacaatcagatgttatgattgttgcaggtacattaactaataaaatggctccagctttaagaaaagtttatgatcaaatgcctgagcctcgatgggtaatatcaatgggatcatgtgcgaatggtggtggatactatcattattcttattcagtagttagaggttgtgatcgtatagtaccagttgatatatatgttccaggatgcccccctacagctgaagctttggtttatggtattatgcagttacaaaaaaaaattaaaagattaaataaagataatatataa

SEQ ID NO: 222439 - DNA, 821 bp, Unknown
  Bacterial polypeptide expressing nucleotide sequence isolated from the Sargasso Sea
atatttgtggtgaagaaacagctttactagaaagcattgagggaaataaaggacagcctagattaaaacctccttttcctgctttagtgggactttacggttgcccaactatagtaaataacgttgagactattgcagttgttccaaccatattaagaagaggtggaaaatggtttgcatcattaggtaaaccaaaaaataccggaacaaaaattttttgtatatccggtaatgtaaattctccttgcaacgtagaagaagaaatgggcatctctttgaaagagctaattgagaaacatgcaggtggtgtagttggtgggtgggacaatcttcaggctgtgataccgggtggatcttccatgccattattatcaaaaaaaatatgtgacacaatcacaatggattttgactctcttatagaaaataaaagtggtttaggtactgctggaatagtcgttattaataaagatcaagacatagttgcttgtatggcaagaatagcaagattctataaacatgaaagctgcggtcaatgtactccttgcagagaaggagctgggtggatgtggaggatattagatagggttgaaaaaaggaaagctacttttagtgatattgatttattgtctgatgttacgaaacaaatagaaggtcatactatttgtgcattcggtgaaggatctgcatggccggttcaggggttgcttagacactttagaaaagaaattgaaagtcgttgtagagaagaaccattaattaaaaagaaaagcaataacccatatctagttgatcaacatttattagagaataaaaatgcctaa

SEQ ID NO: 222440 - DNA, 322 bp, Unknown
  Bacterial polypeptide expressing nucleotide sequence isolated from the Sargasso Sea
atgaataataaaatagatcaagtacctgaggaatttaaacaattagcagaagattttagcaagaatggattcataaccacatcacttgacaatttaattaattggtcaagatcaggatcacttcattggatgacttttggattagcttgttgtgcagttgaaatgatgcaaacagctatgccgagatatgatttagaaagatttggagcagcaccaagaggttctccaagacaatcagatgttatgatagttgctggaactttaacaaataaaatggcacctgctttaaggaaagtttatgatcagatgccagaaccaagat

SEQ ID NO: 222441 - DNA, 634 bp, Unknown; identical to SEQ ID NO: 222178
  Bacterial polypeptide expressing nucleotide sequence isolated from the Sargasso Sea

SEQ ID NO: 222442 - DNA, 395 bp, Unknown
  Bacterial polypeptide expressing nucleotide sequence isolated from the Sargasso Sea
acattggatgacatttggccttgcttgttgtgcagttgagatgatgcaaacatctatgccaagatatgatttagagagatttggagcagcacctagagcatcaccaaggcagtcagatgttatgatagttgctggtacattaacaaacaaaatggctccagctttaagaaaagtttatgatcaaatgccagaacccagatatgttatatctatgggcagttgtgctaatggaggtggttattatcattattcttattcagtagttcgaggctgcgatcgaattgttccagttgatgtttatgttccaggttgtcctccatctgcagaagctcttttatatggaataatgcaattacaaaaaaaaattagaaataaaggctcactaaacagataac

SEQ ID NO: 222443 - DNA, 352 bp, Unknown
  Bacterial polypeptide expressing nucleotide sequence isolated from the Sargasso Sea
atgcaaacatctatgccaaggtatgacctggagagatttggagctgctccaagagcttcgccaagacaatcagatgtgatgattgttgccggaacattaactaataaaatggctccagcgttaagaaaagtttatgatcaaatgcctgaaccaagatatgtaatatctatgggaagttgtgcaaatggtggtggctactatcattattcatattctgttgttagaggatgcgatagagttgttccagttgatgtttacgtaccaggatgccctccctcagctgaggctttattatatggaataatgcaattacaaaaaaagattagagatcaaggttcaataagcagataat

SEQ ID NO: 222444 - DNA, 790 bp, Unknown
  Bacterial polypeptide expressing nucleotide sequence isolated from the Sargasso Sea
gatgattgtgaaaaacacaagagatttaattactaaaggacgagaatggataattaatgagataaaaacttctgaactaagaggtcgtggaggagcaggtttttcaactggacttaaatggtcgtttgctcctaaagaggtcgggtctagaccacattatttagttataaatgcagatgaatctgaaccaggcacatgtaaagatagagatatattaagatttgaacctcagaaattaatagaaggttgtttagtggctggttatgcagttaatgcacatgtttgttatatttatattcgtggagaatatttaaacgagggaaaaagattacaagaggctataaaccaagcatatgataaaaattttcttggaaaaaacgcatgtggagctggctggaactttgatattcatattcattatggtgctggagcgtatatttgtggcgaagaaactgcgttactagaaagtatcgaaggcaataaaggacaaccaagattaaaaccaccttttcctgctctagtaggtttatatggatgcccaacaattgtgaataacgttgaaactatcgctgtagtcccaactattttgagaagaggaggaaaatggtttgcttcattaggtaaaccaaaaaatacaggaacaaaaatattctgtatatctggaaatgtaaattctccatgtaatgttgaggaagagatgggaattccacttaaagaattaattgaaaaatatgcaggaggtgttgttgggggctggaacaatctacaagcagtaattcctggaggatcc

SEQ ID NO: 222445 - DNA, 523 bp, Unknown
  Bacterial polypeptide expressing nucleotide sequence isolated from the Sargasso Sea
atgaatttagaagacaaaaaaaatcaaataccagaagaatttaaaaaacttgcacaagattttagtgataatggttttataactacttctttagataatctaataaattggtctagatctggttcacttcattggatgacttttggattggcatgttgcgctgttgaaatgatgcaaacttctatgccaagatacgatcttgaaaggtttggtgctgcgcctagagcttcacccagacaatcagatgtaatgattgttgcaggaactttaaccaataaaatggcacctgcacttagaaaagtttatgaccaaatgcccgaacctagatatgttatatcaatgggaagttgtgctaatggtggtggttattatcattattcatattcagtagttagaggttgcgataggatagtgccagttgatatttatgtaccaggctgcccaccttctgctgaggcacttttatatggaataatgcaattacagaaaaagattagaaacaaaggttctattgacagataaa

SEQ ID NO: 222446 - DNA, 254 bp, Unknown
  Bacterial polypeptide expressing nucleotide sequence isolated from the Sargasso Sea
aacaaataaaatggcacctgccttaagaaaagtatatgatcaaatgcctgaaccaagatgggtaatctcaatgggctcttgtgcaaatggagggggatattaccattactcttactcagttgttagaggttgtgacaggatagttccagtagatatctatgtaccaggttgcccaccaacagctgaagctctcgtttatggaattttacaattacaaaaaaaaataaaaagaaaaaatacttataaaagttaaa

SEQ ID NO: 222447 - DNA, 462 bp, Unknown
  Bacterial polypeptide expressing nucleotide sequence isolated from the Sargasso Sea
aatgaaactagaagataaaacaaaaaaaattcctgaagaattcaaacaattagctaaagattttagtgataatggttttataactacatcattagataatttaattaattggtctagaactggatctttgcattggatgacttttggattagcatgttgtgcagtcgaaatgatgcaaacttcaatgccaagatatgatttagaaagatttggagctgcaccgagagcatcacctagacaatctgatgtaatgatagttgcaggaaccttaacaaacaaaatggcaccagctcttagaaaagtttatgatcaaatgccagaacccagatatgttatatctatgggaagttgtgcaaatgggggtggatattatcattactcttattcagtagtaagaggatgtgatagaatagtacctgtcgatgtttatgtacctggatgcccaccatctgctgaagcatt

SEQ ID NO: 222448 - DNA, 544 bp, Unknown
  Bacterial polypeptide expressing nucleotide sequence isolated from the Sargasso Sea
atggaagaagggcgccttagaatggcaataaatacagatattcaagaaacaagccccgaattagaaagactaaaagaactctatgctgataaaggctttgttgtaacaagtatcaacaatcttataaattgggcgcgaacgggctcactgcattggatgacctttggactggcttgttgcgcagtagaaatgatgcatgtcggcacacctcgttatgatgtagagagatttggcgctgcaccaagagcatcaccaagacacgcagatgtattaatagtagctggaactttaactaataaaatggcctcagctctaagaaaagcgtatgaccaaatgcccgaacctaggtatgtcatctcaatgggaagttgtgcaaatggtggtggttattatcattattcatattctgtagtaagagggtgtgatcgcattattccagttgatgtttacgtacctggatgtccaccaactgcagaaggattgctgtatggtcttctgcaactgcaaaaaaaaattaggcgtgagggtaatataaaaagataat

SEQ ID NO: 222449 - DNA, 847 bp, Unknown
  Bacterial polypeptide expressing nucleotide sequence isolated from the Sargasso Sea
ttgtggtcatgccgatgagtccgaacccggcacttgtaaggaccgtgacattatccggcatgaaccacacaagcttcttgagggatgtgttgtggccggatttgcaatgcgagcccatgttgcatacatctatatccgtggtgaatttgtgaatgaagcgcgccgcttacaagccgccatagatgaggcttatgacgctggtttgcttggcaaaaacgcggtgaaatctggttgggcttttgacatttatttgcatcgcggtgcgggcgcctatatctgtggggaagaaacagctctgctggaatcgttggagggtcgcaagggtcagccgcgcctaaaaccgccttttcctgccggtgttggcctttatggctgtccaacaacagtcaataatgttgagtcaattgctgttgcaccaaccattcttcgacgtggtgctgactggtttgccggtctcggtaaagaaaataacacaggcaccaagttgttttgtatttcgggtcatgtgaataatccgtgtaatgttgaagaagaaatgggtattccacttcgtgagttgcttgaaaagcatgctggcggtgttcgcggtggctgggcaaatcttatggcggttattccgggtggatcatcgacccctctaatgccaattgacgtctgtgccgatattacgatggattttgacgcgctgcgcaatgctggaactggccttggtacggcgggcgtgatagtgatggataaaagtactgatgtagtgcaagccatcgcgcgtttgtcttatttttacaagcatgaatcatgtggtcaatgcacgccatgccgagagggcacaggctggatgtggcgaatg

SEQ ID NO: 222450 - DNA, 715 bp, Unknown
  Bacterial polypeptide expressing nucleotide sequence isolated from the Sargasso Sea
tattgcttcctacgcagtacaagctcatgtttgttatatttatataagaggcgaatattttgttgagggtcaaaaacttcaagcagctattgatgaggcgtatgaaaaaaatttaataggtaaaaaagctgctggtacagattgggatttagatatttacattcactatggtgcaggagcgtatatctgtggtgaagaaacagctttattagaaagtatagaaggtaaaaaaggtcaaccaagattaaaaccaccttttccagcattgataggactttatggatgtccaacaattataaataatgttgaaacaatagctgtagttccaacaattcttagaagaggtggaaaatggttttcttctttaggaagagaaaaaaatactggtacaaaaattttttgtatatcaggaaatgttaataatccttgcaatgttgaagaagagatgaatatacctttaaaagaattaattgaagtccatggtggaggagttattggtggatgggaaaatttacaagctgtaattccaggtggttcatcaatgccactaataccaaaagaaaaatgtgagacattaaccatggactttgattcactaatggctgaaaaaagtggattaggaactgccggtattgtggttattaacaaggaccaggacattattaaatgtatagcaaggatagctagattttataaacacgaaagttgtggccaa

SEQ ID NO: 222451 - DNA, 742 bp, Unknown
  Bacterial polypeptide expressing nucleotide sequence isolated from the Sargasso Sea
aatgcttgaagataaagatagaatatttaaaaatttatacaatgacaaaggatctgacattgattcttcactcttaagagatgattggaaaaatacaaaagaaattttatctaaaggaagagaatggataataaatgaaatcaaattatctgacctaagaggaagaggcggtgcaggttttcctacaggtcttaaatggtcattcgcacctaaagaattaggatcaaaacctcattatctggttattaatgctgatgagtcagaacctgggacctgcaaagatagagatatactcaggtttgagccacaaaaattattagaaggttgtttaatagcttcttatgcaattaatgctcacagctgctatatttatgttagaggtgaatatttcagagaaggtcaaaaattacagactgctataaatgaagcctatgaaaaaaaatatataggtaagaactcttgcgatactggatgggaattaaatatttatattcactatggagccggagcatatatatgcggtgaagaaacagctttattagaaagtttagaaggaaacaaaggtcaaccaagactaaaaccaccattcccagctcttatcggactgtatggatgtcctactattgttaacaatgttgaaacaattgcagtagtaccaacaatattaagaaaaggagccaaatggttttcatcaataggaaaacctaaaaatacgggaactaaaatattttgcatatcaggc

SEQ ID NO: 222452 - DNA, 846 bp, Unknown
  Bacterial polypeptide expressing nucleotide sequence isolated from the Sargasso Sea
gacaaaggttcagatgttgtttctgctcaatctagaggtgattggtcaaatactaaagaaattttttctaagggtagagattggattattaatgaaataaaaacttcagaattaagaggaaggggtggagcaggttttccaactggactaaaatggtcttttgcacctaaagagcttggatctagaccgcattatctagtcattaatgctgatgaatccgagccagggacttgtaaagatagagatattttgagatttgaaccacataaacttattgaaggttgtttaatagctgcatatgcggttaatgctcataaatgttatatatacattagaggtgaatattttaacgagggtcaaaaacttcaaaacgctattgatgaagcatatcaaaaaaaattaattggtaaaaatgcatctaatactggttgggatttagatatttttatacattatggagcaggagcatatatttgcggcgaagaaaccgcattattagaaagtttagaaggtaaaaaaggattaccaagattaaaaccaccttttccagctttaataggattgtatggctgtccaacaattgtgaacaatgttgaaacaattgctgtagtacctacaattttaagaagaggagctaaatggttttcatcattaggtagtccaaaaaatactggaactaaaattttttgcatctcaggaaatgtcaataaaccttgcaatgttgaagaagaaatgggtatttcattaaaggacttaatagaaaaacatgcgggcggagtagtaggaggatgggaaaatcttaaagcagttattcctggtggatcttcaatgccacttttgcccaaa

SEQ ID NO: 222453 - DNA, 334 bp, Unknown
  Bacterial polypeptide expressing nucleotide sequence isolated from the Sargasso Sea
tatgaataataaacttgatcaagtcccgcaagaatttaaaaaattagctaaagatttcagtgagaatggttttataacaacttcacttgataatctaattaattggtctagatcaggatcacttcattggatgacatttggtttagcatgctgcgctgttgaaatgatgcagacagctatgcccagatatgatttagaaagatttggagctgcaccacgtggatcgcccagacaatctgatgttatgattgtagccggtactttaaccaacaagatggctccagctttgaggaaagtctacgatcaaatgcctgaaccgagatatgttatatca

SEQ ID NO: 222454 - DNA, 748 bp, Unknown
  Bacterial polypeptide expressing nucleotide sequence isolated from the Sargasso Sea
atgcttaaagatcaagatagaatttttaaaaatttatataacgacctaggatctgatattacctcatctcaaaaaagaggtgattgggccaacacaaaagaacttacaaacaaaggaagagattggatcattaatgagattaaagaatcacaacttagaggaagaggaggagcaggttttccaactggattaaaatggtcttttgcacctaaagaagttgggtctagacctcattacttggttattaatgctgatgagtcagaacctggaacttgtaaagatagagacttattaagatttgaacctcataaacttatagaaggttgcttaatagcttcattcgcagttcaagcacatgtttgttatatttacattagaggagaatattttatcgaaggacaaaagcttcaagctgcaattgatgaggcttataataaaaatcttattgggaaaaatgcagctgggacgggatgggatttagatatttacattcattatggagcaggagcttatatttgtggtgaggagacagcactacttgagagtatagaaggtaaaaagggacaaccaagattaaaacctccttttccagctttaataggactctatgggtgtccaacaataattaataatgttgaaactatagcggttgttccaacaattcttagaaaaggcagtaaatggttttcttctttaggtagagaaaaaaacacaggcacaaagattttttgtatatctggaaatgtaa

SEQ ID NO: 222455 - DNA, 514 bp, Unknown
  Bacterial polypeptide expressing nucleotide sequence isolated from the Sargasso Sea
gaagataagcaaaataaaataccatgaagaatttaaaaaacttgctgaagattttggaaaagatggtttcatcaccacatcttttgataatttagttaattgggctagaactggttctttgcattggatgacttttggactagcttgttgtgctgttgaaatgatgcaaacttcaatgccaagatatgatttagaaagatttggggcagctccaagagcatccccaagacagtcagatgttatgatagtagccggtacattaacaaacaaaatggccccagcattaagaaaagtatatgatcaaatgccagaaccaagatacgttatatccatgggaagttgtgcaaatggcggaggttattatcattattcatattcagtcgtaagaggatgtgacagaattgtaccagttgatatttatgtacctggatgccctccttctgcggaagctctcttatatgggataatgcaattacaaaaaaaaataagaagaaaaggctcgttagaaagataa

SEQ ID NO: 222456 - DNA, 529 bp, Unknown
  Bacterial polypeptide expressing nucleotide sequence isolated from the Sargasso Sea
aatggaaaaaaggagctttggaatgggagtgaaaaactttcagtccatcgaagaagttcaacaagatgtaaagcaaaaaggttttttgctagccaaatatgatgatctgcttacctgggctagaactggatcgttgtggccaatgacatttggtcttgcatgttgtggtgtagaaatgatgcattcttatatgagtcgttatgatttggataggtatggagttattccaagaggaagtcccagacaatcagatgtaatgatagtagctggaacattaacaaacaaaatggcacctgcattaagaaaagtatatgatcaaatgcctgaacctcgatgggtgatatctatgggatcatgtgctaatggaggagggtattaccattattcatattcagtagttagagggtgcgatagaatagttcctgtagatatttatgtacctggttgtcctcctacagcagaagctttggtttatggaattatgcagctacaaaataaaataaaaagacaaaacaaacaaaataaatag

SEQ ID NO: 222457 - DNA, 382 bp, Unknown
  Bacterial polypeptide expressing nucleotide sequence isolated from the Sargasso Sea
ttggtctttgcgtgttgtgcagtagaaatgatgcaaacttctatgccaagatatgatttagaaagattcggagcagctccaagagcgtcgccaagacaatctgacgtgatgatagttgctggcacattgacaaataaaatggcaccagctttaagaaaggtttatgaccaaatgccagagccaagatatgttgtatctatgggaagctgtgctaatggaggaggatactatcattactcatactctgtggttagaggttgcgataagatcgttccagtagatatttatatacccggatgcccaccgtctgctgaagctttgctttatggcattttacaattacagaaaaaaatacgaagagaaggaaatttacaaaggtaag

SEQ ID NO: 222458 - DNA, 531 bp, Unknown
  Bacterial polypeptide expressing nucleotide sequence isolated from the Sargasso Sea
gatggcaacctcaattatatttttacctctacttggttttcttttttgttttttactaggtaaacagtttaactataaggtttatcaaatatcaacaacttcaatcctttttctttgtactttattttcttggataatattcattcagtttattaatgataaggaaactgaaataatctttattcttaactggataacttctggaaactttattgttgattggtcaataagattagacaccttaactgccgtgatgttcattgtggttacaactgtttctgcttgtgtccatttatattcaataggatatatggaagaagatccatcaaaaataagatttatgggctatctaagcttatttactttttttatgctcgttcttgtatcaagtaataacttgctgcaaatgttttttggttgggaaggtgttggactagcctcatatttattaattggtttttggcaccataaagattcagcaaataaagctgcaataaaagcatttgttgtaaaacagagttggagattttg

SEQ ID NO: 222459 - DNA, 1039 bp, Unknown
  Bacterial polypeptide expressing nucleotide sequence isolated from the Sargasso Sea
gatgcttaaggaaaaagataaaatttttaaaaatttatacggttttgatgactggaaattagaaggtgccaaaaaaagaggtatttggtcaaatactaaagaacttattaaaatgggcagcgaaaaaattgttgaggaaattaaaaatagtcaattaagaggaagaggaggagcaggtttccctgcgggacttaagtggtcatttatgccaaaagactctggaaaagatcattacctagttgttaatgcagatgagtcagagccaggcacatgtaaagatcgagagattatgagaaacgacccacatcttcttttagaaggttgtttagttgctgcctttgctatgcatgcacatacttgttatatttatataaggggtgaatattattctgaatcttctaatttacaaaaagcaatagatgaagcctacgcaaacaatttaattggtaaaaatgcatgcggtacagggtgggattttgatatttatcttcacagaggagcaggagcatatatttgtggtgaggaaactgctttacttgaaagtttagagggtaaaaaaggccagcctcgattaaaacctccgtttcccgctggcgcaggtttatatggatgcccaacaacagttacaaatgttgaaacagttgccgtttcaccaactattttaagacgtggttcaaaatggttcgctaatttaggaagtgccaacaatacaggtacaaaaatttttagtatttcaggacacgttaataacccatgcaatgtagaagaggaaatggggataccattaaaagaactgattgaaaaacatgcaggtggtgtaattggtggttgggaaaatttattagctgtaattcctggaggtgcaagtgtgcctttattacctaagtctatttgcgatacagttaaaatggattttgatagcctaaaagaagttcaaagtggattaggaactgctgctgttattgtaatgaataaatcaacagatattgttgaagcaatagctagattatcacatttttataaacatgaaagctgcggt

SEQ ID NO: 222460 - DNA, 1286 bp, Unknown
  Bacterial polypeptide expressing nucleotide sequence isolated from the Sargasso Sea
tatgtcaacgatactcaatgaaaacctgctgctggcgatcccgctggcaccgctggccggctccctgattgcggggctgttcgggaaagcggtagggcgagccggtgcgcactcggttacgatcctcggcgtcgcgatctcgttcatcctttcggctgtcgtcttcttccaggtgatggacggcgcgagcttcaatgcgaccgtctataactggatgcagatcggccagaccaagttcgagatcggcttcctggtcgactcgctgacggcaatgatgatgtgtgtggtgaccttcgtgtcgctcatggtgcacatctacacgatcggctacatggccgacgacgacggctaccagcgtttcttctcctacatctcgctgttcacgttctcgatgttgatgctcgtgatgagcaacaacttcctgcaactgttcttcggctgggaagcagtgggtctggtttcgtacctgctgatcggcttctacttcacgcgcccgaccgcgatctacgccaacatgaaggcgttcatcgtgaaccgcgtcggcgacttcggtttcctgctcggtatcggcctgctgttcgcgttcgccggttcgatgaactacggcgatgtattcgcgaagcgtactgaactcgcggcattgagcttcccgggtaccgactggggtctgctgacggtggcctgcatctgtctgttcatcggcgcgatgggtaagtcggcgcaattcccgctgcacgtgtggctgccggattcgatggaaggcccgacgccgatctccgcgctgattcacgcggctaccatggtgacggccggtatcttcatggtcacgcgcatgtcgccgctgttcgaattgtcggatacggcgctgtcgttcgtcatgatcatcggcgcaatcaccgcgttgttcatgggtttcctcgggatcatccagaacgacatcaagcgcgtggtcgcttactccacgctgtcgcagctcggctacatgacggtcgcgctgggcgcatcggcctactcggtcgcagtgttccacctgatgacgcacgcgttcttcaaggcgctgctgttccttggcgcgggttccgtgattatcggcatgcaccacgatcaggacatccgcaacatgggcggcctgcgcaagtacatgccgatcacctggatcacgtcgctggtcggttcgctggcgctgatcggtacgccgttcttctcaggcttctactcgaaagactcgaacatcgacgcggtgaagctgtcgcatctgccgggttcgggcttcgcctacttcgcgg

SEQ ID NO: 222461 - DNA, 943 bp, Unknown
  Bacterial polypeptide expressing nucleotide sequence isolated from the Sargasso Sea
atggctaatgcaataatctttttacctctcttcagtttcttattttgttttttattaggtaatagatttaattttaaaatttatcaaattatcactactggaattctttttatttgttctatttttgcatggataatattttttcaatatttaggaaacaaagaacctgaaattatatatattcttaattggatttcttcaggtaattttatagttgattggtcaataagattagacactctaacagcagttatgtttatagttgttactactgtttcagcttgtgtacatttatattctattggatacatggaggaagatacttcaaaagtaagatttatgggatacttgagcttatttactttttttatgttagttcttgtatcaagcaataatttattacaaatgttttttggctgggagggtgtaggcctagcttcgtatttgttaataggattttggcatcataaggaaactgctaataatgctgcaattaaagcttttgttgtaaatagagttggagattttggctatgcaataggcattgcaggtatattttttgtatttggctcaattagttttgataatatatttgaacaagctgatttatttaaaaatcatcaaattgaattcctttcattaaatttcccaactttagatcttttatgttttcttttatttattggcgctatgggcaaatctgctcaattaggtttgcatacatggcttcctgacgcaatggaaggtccaactccagtttctgcactaattcatgcagctaccatggtaacagctggtgtatttttagttgcaagaatgagtccactatatgaatttgcaaattttactaatttatttattacatttattggtgcagccacagctatttttgctgcctctatagctttaacacaaaatgatataaaaagagtaattgcatact

SEQ ID NO: 222462 - DNA, 535 bp, Unknown
  Bacterial polypeptide expressing nucleotide sequence isolated from the Sargasso Sea
aatggaaaaaaggagcattagagtgggagtagatgaagccaaaaaatatgtagacaatactctaaacacagaactatcttcaaaaggttttttagtagcaagttatgataagattcttacttgggcaagaacaggctccttatggcctatgacatttggattagcttgctgtggagttgaaatgatacattcatatatggcaagatatgaccttgatagatatggtgtaataccaagaggtagtcctagacaatcagatgtaatgatagttgctggaacattaactaataaaatggctcctgctctgagaaaagtttatgatcaaatgcctgaacctcgatgggtaatatcaatgggttcatgtgctaatggaggaggatattatcactattcatattctgtagttagaggttgtgataggattgtgcctgttgatgtatatgttccaggatgtccaccaacagctgaggcattagtatatggtatacttcaattacagaaaaaaattagaagagaaaataaatttaaaagataa

SEQ ID NO: 222463 - DNA, 451 bp, Unknown
  Bacterial polypeptide expressing nucleotide sequence isolated from the Sargasso Sea
aatggaaaaaaggagccttagaatgggaatagatgatttccaatcaatagaagaagttcaaaaggatgttaggcaaaaaggtttcttattagctaaatataatgatttattaacttgggctaggactggatctttatggcctatgacctttggcttagcttgttgtggagtagaaatgatgcatgcttatatgagtcggtatgatttagataggtatggcgttataccacgaggaagtccaagacaatcagatgtgatgatagtcgctggaactcttacaaataaaatggctcctgccttaagaaaagtttatgaccagatgcctgaacccagatgggtaatctcaatgggctcatgcgcaaatggaggaggttattatcattattcttattctgttgtaagaggttgtgacagaattgtaccggtagatatttatgttccaaggatgtcc

SEQ ID NO: 222464 - DNA, 514 bp, Unknown
  Bacterial polypeptide expressing nucleotide sequence isolated from the Sargasso Sea
atgggagtagataaagctaaaaaatatgttgaagatactttaaatacagaactatcttctaaaggtttcttagttgctagctatgacaaagttcttacttgggccaggacaggttctttatggccaatgacttttggattagcatgttgtggtgttgaaatgattcattcatatatggcaagatatgatctagatcgttatggagtaataccaagaggtagcccaagacaatctgatgtaatgatagttgcaggtactctaacaaacaaaatggctccagctttaagaaaagtatatgatcaaatgcctgagcctcgatgggttatctcaatgggttcatgtgcaaatggaggaggatattatcactactcatattcagtagtaagaggatgcgatagaatagttcctgttgatgtttatgtaccaggatgtcctccaacagcagaggcattagtttacggaattcttcaattacaaaaaaaaataagaagagaaaataaatttaaaagataat

SEQ ID NO: 222465 - DNA, 754 bp, Unknown
  Bacterial polypeptide expressing nucleotide sequence isolated from the Sargasso Sea
atgcttaaagatcaggatagaatatttaaaaacttgtataatgatatggggacagatgttgctgctgctcaagcaagaggggattgggtcaaaacttcagatttaactgtaaagggaagagattggataattaacgaagtaaaagactctcaactaagaggcaggggcggtgcaggattccccacaggtttgaaatggtcctttgctccaaaagaggttgggtccagacctcattatttagtgattaatgctgatgaatcagaacccggaacatgtaaagatagagatattttaagatttgaacctcataaattaattgagggatgcctgatagcttcatacgcagtacaagcccatgtttgttacatttatataagaggtgaatattttattgagggtcaaaaattacaagcagctattgatgaggcttatgaaaagaaattattaggtaaaaatgctgctggaactgaatgggatttggatatttacattcactatggagcaggtgcttacatttgtggagaagaaacagctttacttgaaagtatagagggcaaaaaaggacaaccaagattaaaacctccttttccggcattaattggtctttatggatgtccaacaattataaataatgttgaaacaatagctgttgtaccaacaatacttagaagaggtggaaagtggttttcctcattaggaagagaaaaaaataccggtacaaaaattttttgtatatcaggcaaatgtaaataac

SEQ ID NO: 222466 - DNA, 517 bp, Unknown
  Bacterial polypeptide expressing nucleotide sequence isolated from the Sargasso Sea
atgaataataaaatagatcaagttcctgaggaatttaaacaacttgcagaagattttagcaagaacggttttataactacttctttggataacttaattaactggtcaagatcagggtcacttcattggatgactttcggtttagcatgttgtgcagttgaaatgatgcaaacagctatgccgagatatgatttagaaagatttggtgcagctccaagaggttctccaagacaatcagatgttatgattgttgcaggaactttaacaaataaaatggcaccagccttaagaaaagtttatgatcaaatgcctgaaccaagatacgttatttcaatgggcagttgtgcaaatggaggaggttattatcattactcttactctgtagtacgtggttgtgataagattgtgcccgtagatgtttatgtgccgggatgtcctccctctgcagaagcgcttttgtatggaataatgcaattgcaaaaaaagattaggaacaaaggttcactagaaagataaa

SEQ ID NO: 222467 - DNA, 523 bp, Unknown
  Bacterial polypeptide expressing nucleotide sequence isolated from the Sargasso Sea
atgaacctagaagaaaaaaataaaaaaattccagaagagtttaaagaaatagcaaaagattttagtgagaatggctttattaccacttccatggacaatttagttaattgggctagaacaggttctcttcactggatgacttttggtttagcttgttgtgcagtagaaatgatgcaaacatcaatgccaagatatgatttagaacgttttggagctgctccaagaggatctccaagacaatcagatgtaatgattgtagcaggaacattaacaaataaaatggctcccgcattaagaaaagtttatgatcaaatgcctgaacctagatatgttatatcaatgggaagttgtgcaaatggaggtgggtattaccattactcatattctgttgttagaggttgtgatagaattgtacctgtcgatgtttatgttccaggttgtccaccatctgctgaagctcttttgtatgggatattgaaacttcaaaaaaaaattagaactaaaggatctatagaaagataaa

SEQ ID NO: 222468 - DNA, 865 bp, Unknown
  Bacterial polypeptide expressing nucleotide sequence isolated from the Sargasso Sea
gtatgacgctggtttgcttggcaaaaacgcagcgaaatctggttggccttttgatgtttatttgcatcgcggtgcgggcgcttatatttgtggggaagaaacggccttgctggaatcgttggagggacgcaagggccagccacgtttaaaacctccattccctgccggtgttggcctttatggctgtccaacaacagtgaataatgtggagtcaatcgccgttactccgaccattcttcggcgcggtgctgactggtttgctagtcttggcaaagaaaataatacgggcactaagctgttttgtatttcgggtcatgtgaataatccgtgcaatgttgaagaagaaatgggtattccacttcgtgagttgcttgaaaagcatgctggcggtgttcgtggtggctgggcaaatcttctggcggttattccgggtggttcgtcgacccctctgatgccagatggcgtctgtgccgatataacgatggattttgacgcgctgcgcaatgccggaactggtcttgggacggcgggagtaatcgtgatggataaaagtaccgatatagtgcaagccatcgcgcgtctatcttatttctacaagcatgaatcatgtggtcaatgtacaccatgccgagaaggcacaggctggatgtggcggatgatggagcgactggtaagcggcgaggcggaaagccatgaaatcgataccctcgaccaggtgacccgtcagattgaaggtcacacgatttgcgcattgggtgatgcggccgcatggccaattcagggattgatcaagcattttcggccggaaattgaaagacggattgcagcgcggcattcgattgacgccgtgaacgtggcagaatag

SEQ ID NO: 222469 - DNA, 508 bp, Unknown
  Bacterial polypeptide expressing nucleotide sequence isolated from the Sargasso Sea
aatgggaatagatgattttcaatcaatagaagaagttcaaaaggatgtaagacaaaaaggtttcttgttagctaaatataatgatttgctaacttgggctaggactggatctttatggcctatgacatttggattagcttgttgtggagtggaaatgatgcatgcttacatgagtcgttatgatttagatagatatggtgttattccaagaggtagtcccagacaatcagatgtcatgatagtagctggaacacttacaaataaaatggctccagctttaagaaaagtttatgatcagatgcctgaacctagatgggttatctctatgggctcatgtgcaaatggaggaggttactatcattattcttattctgttgtaagaggatgtgacagaattgtaccagtagatatttatgttcctggttgtccaccaactgctgaagccttagtttatggaattatgcaattacaaaaaaaaattaaaaaaaagaacaaagataatagatag

SEQ ID NO: 222470 - DNA, 511 bp, Unknown
  Bacterial polypeptide expressing nucleotide sequence isolated from the Sargasso Sea
ttgggagtaaatatagaacataataattctcttaatatagatgaagtctttgaaaaaaaaggtttcgttacagcttcatttgaaaatttgattaattgggcacgctctggttctttatggcctatgacatttggtttggcttgctgtggagttgagatgatgcattcttatatgagcagatatgatttagatcgtttaggcgtaatacctagaggatcaccaagacaatctgatgtgatgattgttgctggaactcttacaaacaaaatggcacctgctttacggaaggtttatgatcaaatgcctgaaccaagatgggtaatctctatgggttcttgcgctaatggtggaggttattatcattactcttactccgttgttagaggatgcgatagaatagtgcctgtagatatttatgttccaggttgcccaccaactgctgaagctcttttgtatggcatcatgcaacttcaagataaaataaaaaagaaaaagaaaatttataggtaaa

SEQ ID NO: 222471 - DNA, 523 bp, Unknown
  Bacterial polypeptide expressing nucleotide sequence isolated from the Sargasso Sea
gatgaatagtgtggaacatgataaacaaatacctgatgaatttaaagaaattgcaaaaaactttagtgaaaaaggtttcataacaacatcgtttgataatttaattaattgggcaagagcaggatctttacactggatgacttttggtcttgcttgttgcgctgtagaaatgatgcaaacatctatgccaagatatgatcttgaaagattcggtgctgctccaaggggttcgccaagacagtctgatgttatgattgttgctggaacactgacgaataaaatggctccagctttaagaaaagtttatgatcaaatgcctgaacccagatatgttatatctatgggaagttgcgcaaatggaggaggatattaccactactcttattctgtggttagagggtgtgatagaattgttcctgttgatgtgtatgtacctggatgcccaccatcagcagaagcattattgtatggaatattgcagttacaaaaaaaaattagaaatcgtggatctctggaaagataa

SEQ ID NO: 222472 - DNA, 847 bp, Unknown
  Bacterial polypeptide expressing nucleotide sequence isolated from the Sargasso Sea
atgcttgaagataaagatagaatatttaaaaacttatacaatgacaaaggttctgacattgattcttctctcttaagaggtgattggaaaaatactaaagaaattttatctaaaggtagagaatggataataaatgaaataaaattatctgatttgagaggaaggggtggagcaggttttcctaccggtcttaaatggtcattcgcacctaaagaattaggttcaaaaccacattacttagttattaatgccgatgagtcagaacccggaacttgtaaagatagagatatactaagatttgaaccacaaaaattattggaaggttgtttaatagcttcgtatgcaattaatgcccacaactgttatatttatgttagaggagaatattttagagaaggacaaaaattacaaactgctataaatgaagcttattcaaaaaattatataggtaagaactcatgtgatactggatgggaattaaatatttatattcactatggagcaggagcatatatatgtggggaagaaacagccttattagaaagccttgaaggaaataagggtcaaccaagactaaaaccaccattcccagcccttattgggttatacggatgtcctactatagttaacaatgttgaaacaatagcagtagttccaacaatattaagaagaggagccaagtggttttcatcaataggaaaacccaaaaatactggaactaaaatattttgtatatcgggcaatgtaaataaaccatgtaacgttgaagaggagatgggaatccctcttaaaagtttaatagaacaccatgctggaggagttataggcggttgggataatttaaaag

SEQ ID NO: 222473 - DNA, 804 bp, Unknown
  Bacterial polypeptide expressing nucleotide sequence isolated from the Sargasso Sea
cggcactattagagagtttggaaggtaaaaaagggcaaccaagactaaagccaccatttcctgcattaattggattatatggatgtcctactataattaataatgttgagactgttgcagctgttcctacaattctaaaaagaggtgcaaaatggtttagttcacttggaagacctaaaaatacaggaacaaaaatttattgtatttctggaaatgtcaataatccatgtaacgttgaagaagaaatgggaattccactcaaagaattaattgaaactcatgctggtggtgtaattggtggatgggataatctcaaagcagtaataccaggaggttcttcaatgccaatgttacctaaagaaatttgtggcaacatgaaaatggattttgatgcatgtgttgagaataaaacaggattaggaacagctggtattgttgtaatcaataatgaccaagacattattaaatgtatggcaagaatagctagattttataaacatgaaagttgtggtcagtgtacaccttgtagggaaggatctggatggatgtggagaatgttggagagaatggcagcaggtgaggcaaccccagatgaagtagatatgctttttgatgtaacaaaacaaattgaaggacatacaatttgtgcttttggtgaaggctcatcctggcctgttcaaggattaattagacattttaaagatgaaatacttgaaagaaataaatttgatcctgttgtgaaaaaacaaaaagatattccatacttagtagatcaacatttattagaaaaggaaaatgcctaaa

SEQ ID NO: 222474 - DNA, 1219 bp, Unknown
  Bacterial polypeptide expressing nucleotide sequence isolated from the Sargasso Sea
ctgggagctaaaagcagaggtatttggtctgatactaaagaaataattgaaaaaggatcagatttcattgttgaagaaattaaaagtagtcaattacgaggaagaggtggggcaggttttcctgcaggattgaaatggtcatttatgccaaaagattctggaaaacctcattatttagtagtcaatgctgatgaatctgagcctggaacatgtaaagatagagaaataatgagaaacgacccacatcttttattagaaggttgtttaattgctggttttgctatgcatgcaaatatttgttacatttatattaggggggaatattatgatgaagcctcaaatcttcaaaaagcaattgatgaagcatatgaaaataatttaattggtaagaatgcgtgcggaactaactggaattatgacatttatttgcaccgaggtgccggagcttatatttgtggcgaagaaacagctcttttagagagccttgaaggaaaaaaaggccaaccaagattaaaacctcccttcccagcaggtgccggattatatggatgtccaactacagttacgaatgttgaaactatagctgttgcacctactattcttagaagaggagcttcttggtttagcagtctaggtagagaaaataatactggttcaaaaatatttagtatttcaggtcatgtaaataacccatgtaatgttgaagaagaaatgggtatcggattgaaagaacttattgaaaatcatgctggtggggtaattggtggatgggataatttattggcagtaattcctggaggtgctagtgttccacttattccgaaatcaatatgtgatacagttaagatggattttgatagcttaaaagaagttcaaagtgctcttggtacagctgcagtcatagtaatgaataaatctactgacattgttgacgctatatgcaggctttctcatttttataaacatgaaagttgtggtcaatgtacaccttgtagagaaggaactggttggatgtttagaatgatggaaaaaatggttaaaggtagtgcaaaaattaatgatatcgataagcttttagatgtaactaaacaggttgaaggtcatactatctgtgctttaggagatgcagctgcttggccaatacaaggacttatgagacactttagacccgaagttgaaagaagaataaaagaataccgattaggagaagttgcataat

SEQ ID NO: 222475 - DNA, 1324 bp, Unknown
  Bacterial polypeptide expressing nucleotide sequence isolated from the Sargasso Sea
atgcttaaagacgaagatagaatttttactaacttatataacgatctaggaccagatattttatctgcccaaaaaagaggggattggaaaaatacatctgatattattaaaaaaggaaaagaatggataattaacgaaattaaaacatccgaacttagaggaagaggaggagctggctttcctactggattgaaatggtcttttgctccaaaagaagttggttctagaccccactatcttgtaattaatgctgatgaatctgaaccaggaacttgtaaggatagagacattttaagatttgaacctcataaattaatagaaggctgtttgttagctgcatactcagttaatgcaaataaatgttatatttatattagaggtgaatattttaatgaaggaaataaacttcaagaagcaataaatgaagcctacgaaaaaaaattaattggtaaaaatgcgtgtgatagtggatgggattttgacatatacatacattatggtgcaggtgcatatatttgtggtgaagaaactgctttactagaaagtcttgaaggaaaaaaaggtcaacctaggttaaaaccaccttttccagcattaattggattatatggttgtcctacaattataaacaatgttgaaacaattgcggtagttccaaccatattaaggagaggagccaaatggttttctagcattggtaaaccaaaaaatactggaacaaaaatttattgcatttcaggaaatgtaaataatccctgcaatgttgaagaagaaatgggaatttctttaaaagatttaatagagaaacatgctggaggtgtaattggtggttgggataaccttaaggctgtaataccaggtggctcttctatgcctctgttacctaaaaatatttgcgaaacaataaagatggattttgactcattggttgaaaacaaaagtggactaggtacagcaggaatcgtggttataaataaagatcaagatataattaaatgtatggctagaatcgcaagattctacaaacatgagagttgcggtcaatgtactccttgtagagaaggatcaggatggatgtggagaatgctagaaagaatggccaaaggtgaagcatctagtgatgaggtagatatgcttatggatgttaccaaacagatagaaggacatacaatttgtgcatttggcgaaggatcagcttggccagtacaaggtcttcttagacattttaaaaaagaagtagcgaaaagaaataattttaatccattggtaaatagaaataaaaatattccatatttagtggatcaacatttattagacaaataat

SEQ ID NO: 222476 - DNA, 787 bp, Unknown
  Bacterial polypeptide expressing nucleotide sequence isolated from the Sargasso Sea
tcacagaggagctggggcttatatttgtggagaagaaactgctttgttagaatcgcttgaaggaaaaaaagggcaaccaagattaaagccacctttccccgcaggggttggactttatggttgcccaacaactgtaaataatgtcgaatcaatagccgttgtccctactatcctaagaagaggtgaaaattggttttcaaaattaggaaaagaaaataatactggaacaaaattattttgtatatcaggacatgtgaataaaccatgtaatgtagaagaagaaatgggtatacctttaagagaattaatcgaaaaacatgctggtggagttattggtggttggaataacttgctagctattattcctggtggaagttcaacgccaatgttgcctaaacaagtttgtgatacaattacaatggactttgattcacttaaaaatgctggaactggtttaggtacagcaggtgttattgtaatggataaaacaacagatattgttgaagcaatagttagattggcttttttttacaagcatgaaagttgtgggcaatgtacaccttgcagagaaggtactggttggatgtggagaatgcttaaaaaaatagcttctaaagatgcaagtccgagagatattgacaatcttttagaactcacaaaacaagttgaagggcatactatatgtgctcttggtgatgcggcagcatggcctattcaaggattatttaaaaactttagaggtgaaatagaaatgggcttgaaactaaaaaaaatagcagctgaataa

SEQ ID NO: 222477 - DNA, 888 bp, Unknown
  Bacterial polypeptide expressing nucleotide sequence isolated from the Sargasso Sea
tttggagctaattattttattttcgcctcttttaggggcaattgttggtgggtttttttggcggtcaataggtgagagccaagctatttatcttacaatagcgttactatttttatcttgttttttaagttggatagttttcctttcacacgatgctcatgtagaaaaaattactctctttcgttggataaacagcggagacttgtcagctaattggtcgataaggttagaccgattgacgtcaataatgctggtggttgtaacttcagtctctgccttagttcatctttatagtgtaggttacatggctcatgatgaaaattggaaagaggatgaacattataaagcaaggttttttgcttatttatctttttttacgttcacaatgttgatgttggtaacctctgataacctagttcagatgttttttggctgggaaggtgtcggtgtagcctcttatttattgattgggttttactaccggaaacaaagtgcaaacgcggcagctatcaaggcttttgtagtcaatcgggtgggtgattttggatttgcattaggtatttttggtttatttatgctgactggtagtataaattttgatgatattttttctgcagctccgaaattagcagatacgagtcttacgtttctttggagtgattggaatgcagcaaacttaatcgcttttctcctttttgttggagctatgggcaaatctgctcaactttttttacatacttggttgccagatgctatggaagggccaacaccagtttctgctttaatccatgcagcaacaatggttactgccggtgtttttctggtttgtagaatgtcacctttaatggagtacgcacccactgccctcagttttattacaatccttgg

SEQ ID NO: 222478 - DNA, 904 bp, Unknown
  Bacterial polypeptide expressing nucleotide sequence isolated from the Sargasso Sea
tatgaaaaaaaattacttgggaaaaaatgcagcaggaactggttgggatttagatatttatattcattatggtgctggcgcatatatttgtggggaagaaacagctttactggaaagtttagagggtaagaaaggacaacctagattgaaaccaccttttccagctttagttggtctttatggatgtccaacaattattaacaacgtcgaaacaattgccgtagtaccaacaatattaagaaaaagtgctaaatggttttcttcattaggaagagaaaaaaatacaggaacaaaaattttttgtatatcaggaaatgtaaataatccatgtaacgtcgaagaagaaatgaacataccattgaaagagttaatagaaattcatgcaggtggcgttgaaggtggatgggataatttacaagctgtaattccaggcggttcatcaatgccattaatacctaaaaaaacatgtgaaacattaactatggattttgattcattagttgcagaaaagagcggattaggaactgctggaatagtagtaataaataaagatcaagacattataaaatgtatggcaagaattgcaaaattttacaaacatgaaagttgtggccaatgtactccttgtagagaaggatcaggctggatgtggagaatgcttgaaagaatggcaaaaggtgaagcaaccaaagatgaaatagatatgttgggtgatgtcacaaatcaaatagcaggacatactatttgcgcatttggcgaaggttcttcttggccagttcaaggacttctaagacatttcaaaagcgaaattgaagaaagaaataatttggacccaataatacaaaaaaaaaataatattccttatttagtagatcaacacttattagataaaaaaaatgcttaa

SEQ ID NO: 222479 - DNA, 550 bp, Unknown
  Bacterial polypeptide expressing nucleotide sequence isolated from the Sargasso Sea
aatggaaaaaaggagctttggaatgggattagcggaagatcagcaatcaaataataaagatttaactcaatacagcaatgccgaaagttatcagcagaaaggcttcatggtaacaagtattgatgctttgatgaattgggcaagaacgggttcaatgtggccaatgacttttggtttagcgtgttgcgctgttgagatgatgcatgcaggtgctgcaagatatgatttagatcgttttggaattatttttagacctagtccacgtcagtctgatgtaatgattgttgctggaactcttgttaataagatggccccagcattaagaaaagtctatgatcagatgccagaacctagatgggttatctctatggggtcgtgcgctaatgggggaggttattatcactattcatattctgtagttcgaggttgcgaccgcattgttccagttgatgtctatgttcctggttgtccaccaacagctgaagctctcgtttatggattacttcaattgcaaaagaaaattagaaagacaacaacaatagcgagataa

SEQ ID NO: 222480 - DNA, 460 bp, Unknown
  Bacterial polypeptide expressing nucleotide sequence isolated from the Sargasso Sea
aatgaataataaaatagatcaagtacctgaggagtttaaacaactagctaaagattttagtaaaaatggttttattaccacttcattagataatttagttaattggtcaagatcaggatctttacattggatgacctttggtcttgcttgttgtgcagtagaaatgatgcaaactgctatgcctagatatgatttagaaagatttggcgcagctccaagagggtctcccagacaatctgatgtaatgatagtagcaggcacattaactaataaaatggcaccagcattaagaaaagtttatgatcaaatgccagaaccaaggtacgtaatatctatgggtagttgtgctaacggaggtggatattaccattattcatattctgttgtaagaggttgtgatcgaatagttcctgtagatatttatgtaccaggatgtccgccatcagctgaagctctatgt

SEQ ID NO: 222481 - DNA, 1252 bp, Unknown
  Bacterial polypeptide expressing nucleotide sequence isolated from the Sargasso Sea
tatggcacaattaattgtatttcttcctttgtttggttttttattttgttttttctttggaaaaatatttggttttaaagcctctcaaattataactacttcattcctttttatatcagctattttatcttggtttttatttttctcttatttaggtgaaagagaaatggaagttatatatatttttaactggtttacttctggcaattttatagttgattggtcaatacgcttggactcattaactacaacaatgtttattgttgtttgtagtgtttcagcatgtgttcatctttactcaattggctacatgagcgatgatccatctaaggaaagatttatgggatatcttagtcttttcactttttttatgttgatgttggtttcaagtaataatttgttgcaaatgttttttggttgggaaggtgtaggacttgcctcttatttactaattgggttttggtatcataaaccatctgcaaataatgccgctataaaagcttttcttgtaaatagaattggagattttggatatgctttaggtatagcgggtattttttatatttttggatctgtagaatttagtgttatttttgataacgcagaaagttttaaagatcattcaatacaatttataggtcttaactttagtacaattgatttattatgctttctgttgtttattggtgcaatgggtaagtcggcccaacttggtttgcatacatggttacccgatgcaatggaagggccaacgcctgtttcagccctaatccatgcagccacaatggtgacagccggtgtatttttattagctagaatgagtccattatttgaatatgctttatttacaaatttatttattatttttataggagcttctactgctatttttgctgcaagtattgcccttactcaaaatgatataaaaagagtgattgcgtattcaacatgcagtcaacttggctatatgttttttgccgcaggtttaggagcttataatgcttcaatttttcatttgatgactcatggattttttaaagcactactatttttatcagctggatcagtaatccatgcaatgcatcatgagcaagatatgcgaaaaatgggtggattgtttaaaaaaattccttttactggtacaatgatgtggattggatcacttgctattattggttttccatatttttctggctattattctaaggaaagcattttagaaaatgcttattattcaaattcatcaatggct

SEQ ID NO: 222482 - DNA, 406 bp, Unknown
  Bacterial polypeptide expressing nucleotide sequence isolated from the Sargasso Sea
aatgaataataaattagatcaagtacctgatgaatttaaacaacttgcggaagattttggcaagaatggatttataactacttcattagaaaatttagtaaattggtcaagatctggatctttgcattggatgacttttggtcttgcttgctgtgcggttgaaatgatgcaaacagctatgccaagatatgatcttgagaggtttggtgctgctccaaggggatcacctagacaatctgatgttatgattgttgcaggtactttaacaaataagatggcaccagcattaagaaaagtttatgatcaaatgccagaaccaagatatgttatatcaatgggaagttgtgctaatggtggaggttactatcattattcatattctgttgtaagaggttgtgatcgtatt

SEQ ID NO: 222483 - DNA, 514 bp, Unknown
  Bacterial polypeptide expressing nucleotide sequence isolated from the Sargasso Sea
aatgggagtagatgaagcaaaaaaatatgttgatgatactttaaatacggagctatcttctaaaggttttttagttgctagctatgataaagttcttacatgggcaagaactggttctctatggccaatgacttttggtttggcttgttgcggtgttgaaatgattcattcatatatggcaagatatgatttagatcgttatggagtaatacctagaggcagtccaagacagtctgatgtaatgattgttgctggcaccttaacaaataaaatggctccggctttaagaaaagtttatgatcaaatgcctgagccccgatgggtaatatcaatgggttcctgtgcaaatggtggtggatattatcattactcatattcagtagtaagaggctgtgacaggatagttcctgttgatgtttatgtaccaggatgtcctccaacagcggaggctttagtttacggaattcttcaattacaaaaaaaaataagaagagaaaataaatttaaaagataa

SEQ ID NO: 222484 - DNA, 463 bp, Unknown
  Bacterial polypeptide expressing nucleotide sequence isolated from the Sargasso Sea
aatgtacactcctgacaacatcttcacaacaactattgataaagctgtcagatggtcaaggactcagtcaatgtggccagttacatttggacttgcatgctgtgcaatagaaatgatggctgccggaagtgctaagtatgatctagcaagatatggaatggaagtttttagagcatcaccccgtcaagcagacttgatgattgtagcaggaagagtatctcaaaaaatggcaccagtgttaagacaagtttatgatcaaatggctgatcctaaatgggtaatcgccatgggcgcttgctcttcaactggtggaatgtttaacaactatgctttagtccagggcgtagaccacatagttccagttgatatttatgttcccggatgtccgccaggaccacagtcacttatgcacggaattttaactttacacgacaaaataatggatggagagataaatagatga

SEQ ID NO: 222485 - DNA, 721 bp, Unknown
  Bacterial polypeptide expressing nucleotide sequence isolated from the Sargasso Sea
atgcttaaagaccaagatagaatttttcaaaatttatataatgataaaggttctgatgttgtagcatcacaatcgagaggcgattgggtaaacactaaagaaattaccgaaaaaggaagagattggattattaatgaaattaaagagtctcaacttagaggtcgaggtggagcaggatttcctacaggtttgaagtggtcatttgcaccaaaagaagttgggtcaagaccacattatttagttattaatggtgatgagtctgaaccaggtacttgcaaagatagagatattttgagatttgaacctcataaactaatagagggttgtttgatagcatcatatgcagttcaagcgcacgtttgttatatctatattagaggagaatactttgttgatggtcaaaaactccaagctgcaattgatgaagcgtataagaaaaaactattaggaaaaaatgcagctggaactggctgggatttagatatttatatccactatggagcaggagcatatatttgtggtgaagaaacagcattacttgaaagtttagaaggtaaaaaaggtcaaccaagattaaaacctcctttcccagctttgataggtttatatggatgcccaactataattaataatgttgaaacgattgctgtggtgccaactattctacgaagaggagcaaaatggtttgcctctttaggtagagaaaaaaatactggcacta

SEQ ID NO: 222486 - DNA, 604 bp, Unknown
  Bacterial polypeptide expressing nucleotide sequence isolated from the Sargasso Sea
atgcttaaggaaaaagataaaatttttaaaaatttatatggttttgaagactggaaattagaaggtgctaaaaaaagaggtatttggtcaaatactaaagaacttattaaaatgggtagcgaaaaaattattgaggaaattaaaaatagtcaattaagaggaaggggaggagcaggtttccctgcgggacttaagtggtcatttatgccaaaagactctggaaaagatcattacctagttgttaatgcagatgagtcagagccaggcacatgtaaagatcgagagattatgagaaacgacccacatcttcttttagaaggttgtttagttgctgcctttgcaatgcatgcacatacttgttatatttatataaggggtgagtattattctgaatcttctaatttacaaaaagcaatagatgaagcctacgcaaataatttaattggtaaaaatgcatgtggtacagggtgggattttgatatttatcttcacagaggagcaggagcatatatttgtggtgaagaaactgctttacttgaaagtttagagggtaaaaaaggtcagccccgattaaagcctccatttcctgctggtgcaggtttat

SEQ ID NO: 222487 - DNA, 892 bp, Unknown
  Bacterial polypeptide expressing nucleotide sequence isolated from the Sargasso Sea
gatggcaacctcaattatatttttacctctacttggttttcttttttgttttttactcggtaaacagtttaactataaggtttatcaaatatcaacaactttaatcctttttctttgtactttattttcttggataatattcattcagtttattaataataaggaaactgaaataatttttattcttaactggatcacctctggaaactttattgttgattggtcaattagattagacactttaactgctgtgatgttcattgtggttacaactgtttctgcttgtgttcatttatattcaataggctatatggaagaagatccatcaaaaataagatttatgtgttatctaagcttatttactttttttatgcttgttcttgtatcaagtaataacttgctgcaaatgttctttggttgggaaggtgttgggctagcctcatatttattaattggtttttggcatcataaagactcagccaataaagctgctataaaagcatttgttgtaaacagagttggagattttggatacgcaataggaattgctggaattttttatatttttggcacgataagtttcgacagtatattttcacaagtggatcgatttagtgagcatcaaattcaattcctttcattcagttttccaactttagattttttatgctttcttttattcataggtgcaatgggtaaatctgcccaattaggtttacacacatggttgccagatgccatggaggggcctactcctgtatctgcactaatacatgctgcaacaatggtaactgctggtgtatttttagttgcaagaatgagtcctctttatgagtttgcgacatttactaatttattcattacttttattggtgcagccacagctattttg

SEQ ID NO: 222488 - DNA, 517 bp, Unknown
  Bacterial polypeptide expressing nucleotide sequence isolated from the Sargasso Sea
aatgaataataaaatagatcaggttcctgaggaatttaaaaaacttgcagaagattttagtaagaatggttttataacaacatcacttgataatttagttaattggtctagatcaggatcacttcattggatgacttttggattagcttgttgcgcagtagaaatgatgcaaacagctatgccgagatatgatttagaaagatttggagcagctccacgaggatccccaagacaatcagatgttatgatagttgcaggaactttaacaaataaaatggcaccagctttaagaaaagtttatgatcagatgcctgaaccaaggtatgttatttcaatgggaagttgcgcaaatggaggtggatattatcattattcctattcagttgttaggggttgtgaccgaattgttcctgtagatgtttacgtaccaggatgccctccatcagcagaggctttgttgtatggaatacttcaattgcaaaaaaaaattagaaaaaaaggatcttttatcagatag

SEQ ID NO: 222489 - DNA, 1333 bp, Unknown
  Bacterial polypeptide expressing nucleotide sequence isolated from the Sargasso Sea
aatgcttaaagatcaagatagaatttttcaaaatttatataatgatagaggttcagatatagcatcttcaaaagagagaggtgattgggtaaatacaaaagaaattatagacaaaggaagagattggataattaatgagattaaagattctcagttgagaggtcgaggtggggcaggatttcctactggtttaaaatggtcatttgcaccaaaagaagttggatctagaccacattacctagtcattaatggcgatgagtctgaaccaggaacttgtaaagatagagatattttaagatttgaacctcataagttaatagaaggttgtttaattgcctcttatgcagtgcaagcgcatgtttgctatatatacataaggggagagtattttattgatggtcaaaaacttcaagctgcaatagatgaagcttatgagaaaaaattgttaggtaaaaatgcagcaggtactgggtgggatttagatatttatattcattatggtgctggagcatatatttgtggagaggaaacagctttattagaaagcattgagggtaaaaaaggtcaaccaagattaaaacctccattcccagctctaattggtctttatggatgcccaacaattattaataatgtagaaactatagctgtagtcccaacaattcttagaaaaggtggaaaatggtttgcttctctgggaagagaaaaaaatactggaacaaaaattttctgtatttcaggaaatgttaacaatccatgtaacgttgaggaagaaatgaatattcctttaaaagaattaattgaagttcatgcaggtggtgttattggaggctgggataatcttcaagcagtaattccaggtggatcatcaatgcctttaattccaaaggagaaatgtgaaacattaacaatggattttgactcattaatggctgaaaaaagtgggttgggaaccgcaggcatagtagttattaataaagatcaagacataattaaatgtatggcgaggatagctagattttataaacacgagagttgtggtcaatgtacaccttgtagagaaggttctggttggatgtggagaatgcttgagagaatggcaaacggagaggcaactaaagatgaggtagacatgttaggggatgttacaaatcaaatagcaggacatacaatttgtgcttttggtgaaggttcatcttggccagtccaaggattgcttagacattttaaaaaagaaattgagaaaagaaacaacctggatccaattgttcaaaagaaaaataatattccttatttggtagatcaacatttattggataaaaaaaatgcttaa

SEQ ID NO: 222490 - DNA, 463 bp, Unknown
  Bacterial polypeptide expressing nucleotide sequence isolated from the Sargasso Sea
atgttttctcctgataatattttcacaacaactattgataaagcggtccgttggtcaagaacgcaatccatgtggcctgttacttttggacttgcatgctgcgctattgaaatgatggctgcaggatctgcaaaatacgacttggcaagatatggaatggaggtattcagggcatcaccaagacaggctgatttgatgatagttgctggtagggtttctcaaaaaatggcaccagtattgagacaagtttatgaccaaatggcagagccaaaatgggtaatagcaatgggtgcttgctcttcaactggtgggatgtttaataactatgctcttgtacaaggtgttgaccacatagttcctgtagacatatatgtacctggatgtccacccggaccccaatcattaatgcacggaatcctaacacttcatcaaaaaattatggatagagagataaatagataat

SEQ ID NO: 222491 - DNA, 1246 bp, Unknown
  Bacterial polypeptide expressing nucleotide sequence isolated from the Sargasso Sea
accttaactgctgtgatgttcattgtggttacaactgtttctgcttgtgttcatttatattcaataggctatatggaagaagatccatcaaaaataagatttatgggttatctaagcttatttactttttttatgcttgttcttgtatcaagtaataacttactgcaaatgttttttggttgggagggcgttggactagcctcatatttattaattggtttttggcaccataaagactcagcaaataaagctgctataaaagcgtttatcgtaaatagagttggagattttggatacgcaataggaattgctggaattttttacatttttggcacgataagtttcgacagtatattttcacaagtggatcaatttaatgagcatcaaattcaattcctttctttcagttttccaactttagattttttatgttttcttttattcataggtgcaatgggtaaatctgcccaattaggtttacacacctggttgccagatgctatggaggggcctactcctgtatctgcactaatacatgctgcaacaatggtaacagctggtgtatttttagttgcaagaatgagtcctctttatgaatttgctacatttactaatttattcattacttttattggtgcggccacagctatttttgctgcctctatagccttaacgcaaaatgatattaaacgagtcattgcatattcaacatgcagtcaattaggatatatgttttttgcagcaggtgtcggcgcttataatgcatcaatatttcacttaacaactcatgccttttttaaagctcttctatttctttctgcaggttctgtaattcacgcaatgcatcatgagcaggatatgagaaaaatggggggactttataaaaaaataccttttactgctacaatgatgtggattggatctcttgcaattattggtttcccatatctatctggttactattcaaaagaaagtattttagaaaatgctttctatacttcaaatggaatagcatactttgcatatttagtaggtattttaactgctttacttactgctttttattcatggagattattattcctaacatttcatggtgaaaatagatcaaataataaaacatatgatcacgcccatgaatcacctttagtgatgacagttccattatttattcttgcaactggttctattttttctggaatattctttgctgattattttattggatattacaaaaaagaatttt

SEQ ID NO: 222492 - DNA, 2071 bp, Unknown
  Bacterial polypeptide expressing nucleotide sequence isolated from the Sargasso Sea
atggagttatttgtcatattttccccactcgtcggggctattcttgcgggttttggatggaaaatcattggtgaaaaagcagctcttatttcggctactttgttactttttttagcgtgtttcgtcagttggtttctttttataggttttgacggtgatctgagaattatagaaatttccaaatggatgagttcggggtctcttgaagcttattgggctattcgttttgatcgtttaacagcaatcatgttgatcgtagtgaccactgtttctgcattggtgcatctatatagtttcggctacatggatcatgatcccaactgggagcatgatgaaagttataaaccgcgtttctttgcatatttatcgttctttacatttgcaatgctaatgttagtgacttctgataatttacttcaaatgttcttcggatgggaaggtgtcggcgtagcatcctatttgcttattggcttctactacaaaaaaccaactgctaattcagcggcaattaaagcttttgtcgtcaatagagttggtgattttggattcgcattaggtatatttggaattttctacttaaccggtagcattcagttctccgatgtttttttattagcaccgggtttagtagatcaagaaataagctttctatggactgagtggaacgctgctaacttaattgcctttcttttgtttgttggagcaatgggcaagtctgctcagcttttcctccatacttggctgccagacgctatggaaggtcctactccggtttcagcactcattcatgcagcaacaatggttacagctggtgttttcctggtttgtcgtatgtctccgctcatggagtttgcgccgaatgcaatggcatttattacgttcattggagctacgacagcattttttgctgctactatcggtcttgtgcagaatgatatcaaaagggttattgcatattcgacgtgctctcaacttgggtatatgttcgttgctgccggctcgggagtgtactcggcagcaatgttccatttgttcacgcatgcatttttcaaggctctgctatttttaggtgctgggtcagtaatacacgctatgcatcatgagcaagatatgagaaattatggcggtttgagaaagaaaataccgtacacttttgtcgctatgatgattggaacattagcaataacgggtgttggtatccctttaacgcattacgggtttgctgggtttttgtccaaagacgcaataatcgaaagtgcttacgcagcgtcagtaggtggttactcgttctggatgttggttatgtcggcgttgtttacgtctttttacagttggaggctaatctttatgacattttacggtaagcctcgtggagattcacatactcatacttcagcccatgaaagccctaaagtgatgattataccgttggctattctatcattaggagcaatattttcaggaatgatttggtacaaaagcttttttggtgatcattacagcgtaaataagttttttggtattgaagaaacggaataccactcgcaatataatggtgataatcatgggtcttcagatgtgaaaaatgagggtttgaataaccactcatctatttatttgccatcaggtgctatttacatggctcctgataatcacattttggatgaagctcaccatgttcctaaatgggttaaattgagtccgtttgtggctatgctgttagggtttatactatcttacaccttttatatttggcgtacagatctaccccaaaaattagctgagaaccaaaggcctttatatctcttcctactcaacaaatggtactttgatgaagtttatgaaattctttttgttcggtctgctaagtttttcggacgccttttgtggaagaagggcgatggtacggtaatagatgggtttatagataatctttcgatggtatttattccattgcttacgagactggccgggcgtgcccagtcaggatatatttttacttatgcttttgccatggtcctaggaattgttgttcttattacatggatgacattagggacaggtagctaat

SEQ ID NO: 222493 - DNA, 901 bp, Unknown
  Bacterial polypeptide expressing nucleotide sequence isolated from the Sargasso Sea
atgcttcagcgcgcaattgacgaggcatatgaagcaggtcttgttggtaaaaatgcatgtaattctgggtgggattttgacattttccttcaccatggagcaggtgcttatatctgtggagaggaaacagctttacttgaaagtttagagggtaaaaagggtatgcctagaatgaagccaccctttccagctggagctggtttgtacggatgccccaccacagtaaacaacgttgagtcgatagctgtcgtgccaactattctaagacgcggagcgcattggttttcatcttttggtagacctaataattctggaacaaagctctttgctatttctggacatgtgaataatccgtgtgtggtagaggaggttatgtccatttctttccaagaattgatcgataaacattgtggtggcgtacgtggaggttggaagaatttgaaggcagtaatcccgggtggttcctcagttccttgtgtccgcggcgaagatatgaaagatgcaatcatggattttgattatctgcgaagtgatttagggtctgggttaggcactgccgcagttatagtaatggataattctgtagatattattaaggctatatggcgtttatcaaaattctataagcatgaaagttgtggccaatgcacaccatgtcgcgaaggtacaggctggatgatgagagttatggagcgacttgtgcacggtaacgctgaaaaagatgagattgatatgcttttcgatgtaactaagcaggttgaagggcatactatttgcgctttaggagatgctgctgcatggcctattcagggtctcatacggaatttcagagatgagatagaggagagaataataaatagagatatcgccaatgttagtaaacctttagctgctgagtaat

SEQ ID NO: 222494 - DNA, 2227 bp, Unknown
  Bacterial polypeptide expressing nucleotide sequence isolated from the Sargasso Sea
catgggggtcgagtccgtcgacgcggcgttcctgatagtcctcgcgcccttcgtcgctttcccgatcatactggtctccggccagctctacaacggcaacagcacgtggaagcagaacctgaaggaggggggagtcatcgggctctcggccctcctggtctcgctcaccacgtcactgtgggtgctcgtggactacctaaggggggcgagggagatcgccaaggaacccgccggaaacgtcgcagcctcatggggagactggatatccttcgacgtcctgctctcggactactcgatgagctctggcagggtgatcggagtgggcgtctgggttgactcgatcaccctgatgctgctgttcgtcgccaccttcctgtgcttcctgatctgctggttcagcctcgggtacatgaacacggacccgatcaacgaggacaggaaccaccgcttctacgcggagttcgtcctgttcgcgatggggatgttcggcatggtcctcgctgacaacttcctgtggctgttcatattctgggaggtgatgggactgtgctcctacctcctcataggcttctacttctggaaggagagcgccgcctacgcggccaagaaggccttcctgaccactcgcgtcggcgacgtgttcctcatgatcgggctcctcatcctctacgacatatacggctcgctggagttctcggtgatattcgaggacccctccatcaacggcaccgtggactcggacaagctgttctgggcgctgctgatgctcttcatcggggcggtgggcaagtccgcccagttcccgctgcacgtctggctgccagacgcaatggagggcccgaccccggtctcggccctgatacacgccgccacgatggtcaacgcagggctatacctggtcgcacgcatggtcccgttcgtcgacgtgggcgcccacggggtggacgggctcagcgagctgggcctgatagtcgcctacgtcggagggatcacggcgttcatggccgcctccatagcgttcgtccagaacgacatcaagaaggtgctggcctactccacgatgagccagctggcgtacatcttcaccgggctgggagtggcgctctggttctacaacaacggcaagaccgaggcagccaccctcgtgttcggcggggcgatgttccacctgttcaaccacgccatggccaagggcatgctcttcatggccagcggctcggtcatccacgaggtacaccacgcccacgaccacctccacgagggcgacgggcacaaccaccacgacgacttcgacccgcaggacatgcggaacatggggggcctggcctccaagctgcccgtgacgtctgcagccatgatgatcggttccatgtcgataatcgggatacccctgataggcggcttctggtccaaggaggcaatcgtagccaagacgtggaaggcgtccctggactacgagcccctgatgttcggaccagcgatactggtcctgctgaccgcgggcatgacgggcttctacatgtccaggatgtggttcatgacgttcgccggggagcccaagcacgaggtcgtcgaccacgtgcacgagtccaccccctggatcaaggagccactcctcatactatccgtgatcagcgccctgggcggcttcggcctcgcggtgctgaacgtggtgaagtggctcgcgaagccatacagctacgacctggggctgaacggcgactccgtcgtctccagggtcgtgtacgagctcgagcacgcgttcctgcccgaggaccccaacctcaggatcgtcgggtggaccaccatattcctctcgctcgtcatcgggcctatcttcgctgccagggtgcatggaggctcccttagggagggccagtccgcaggcccgctggtgtcatggctggtatggctctcgggcaggttcggctcgcaggacgtcaaggagctgtccgagtccagcctctccgaggccctgcacaaccgcctctacttcgaccactactacgagctggcactgtccaagaccgtcgtcccgctcgccgcgttcgcggcctggttcgacaggaaagtcatcgacggggtcatcaagagggtcgagtcgaactccgtcctgggctcggtccagatcaggagggtcaccaccggcagggccagcgactacatcctgatggcggcggtgggcgcgctctcgatattcgcgctggcgtggggggtgagcgggtga

SEQ ID NO: 222495 - DNA, 1300 bp, Unknown
  Bacterial polypeptide expressing nucleotide sequence isolated from the Sargasso Sea
atgaaagaaacactattgctaacaaaacatatgagagaaaatcccgaaaacagtcatttgatagacgtttatgagaagaacaacggatacagtgcagctagaaaagtatttaaagaaaacaatcctggagacgtaattgaagaaattaaaacctcgaacattagaggaaggggtggggcaggatttcctactggtgtgaagtggggatttttagcagaagacgaagaaagatatttagttattaacgctgatgaatcagaaccaggaacttttaaagatagaattttacttgaaagagatccacatcaattaattgaaggaataatagttacatcttttgcttctaatatttcaaaagcctttatttatattagaggtgagtatgcaaagcccgcacgaagagtacaagacgctgttgagcaggcttatgaaaaaggttatttaggaaaaaatatttttgattccgggaaagacttagatgttgtggtgcaccttggtgctggcgcgtatatttgtggagaggaaacagctttattaaattcactagaaggcaggagaggagagccaagattaaagcctccttactttccagcagtaaaagggctatacaataaaccaacattggtaaataatgttgaaacaatatcttctgttccttggattataaataattctggaaaagattatgcaaagctgggtgttgaaggctcaacaggaacaagaatatttagcctgtctggacatgtaaataccccaggaaattttgaaattgaaatgggatgttcatttggagaatttattgataattttggaaatggtataaaagaaaacaaatctgttaaagcatatattcctggcggagcttcagccccttggtttactggagaacagttagatataaaaatgactattgatgatgttgccaatgctggatcaatgttaggttctggggcagtagtggttatggatgaggatacaaaccttgttttagctgcaaaaagtattgttagtttctttgctcatgaatcttgtggtcaatgtactccgtgtagagaaggtacaacttggttggaaatgatattagaaagaattgctagtgggagaggtagaacatcagacatagatttacttcttgatgtatgcgacaacatatctcccggattggcctggcctcctcaaatgactacaatttgcccactaggaccatcagctgtatctccaattacctcattaatgggaagttttcgagaagaggttgaaagcttgcttccaaagaaagtactaattaataatgagtgaa

SEQ ID NO: 222496 - DNA, 463 bp, Unknown
  Bacterial polypeptide expressing nucleotide sequence isolated from the Sargasso Sea
atgttttccccagataatatatttaccacaactattgataaagctgtcagatggtctagaacacaatcgatgtggcctgtaacatttggcctagcttgttgcgctattgaaatgatggcagcaggatctgcaaaatatgatttagcaagatacggtatggaagtatttagggcatctccgcgtcaggctgacttaatgattgttgccggaagagtatctcaaaaaatggcaccggtattaaggcaggtatatgatcaaatggccgaaccaaaatgggttattgcaatgggagcatgttcctcaacagggggaatgttcaataattatgcattagtacagggtgtagaccatattgtcccagttgatatttatgtacctggttgtcctcctggaccgcagtctttgatgcatggaattttaactttacacgacaaaataatggaaggtgaaatcaacagatgag

SEQ ID NO: 222497 - DNA, 1330 bp, Unknown
  Bacterial polypeptide expressing nucleotide sequence isolated from the Sargasso Sea
aatgcttaaggatcaagatagaatttttcaaaatttatataacgatttgggttcagatttaacttcagctcaaagaagaggtgattgggtaaatacaaaagaaattactgaaaaaggtagagactggatcataaatgaaatgaaagactctcaattaagaggaagagggggagcaggttttcctacaggtcttaagtggtcatttgcaccaaaagaagttggatctagacctcactaccttgttattaatggtgatgagtcagagccaggtacctgtaaagatagagatatcttaaggtttgaaccacataaactcattgagggttgtttaatagcttcatatgcaattcaagcacatgtttgttatatttatataagaggcgagtattttgtagatggacaaaaacttcaagctgcaattgacgaagcttatgaaaaaaaattaattggaaaaaatgcggctggaactggatgggatttagatatttatatacattacggtgcaggagcttatatctgtggagaagagacagcattactcgagagcattgaaggtaacaaaggtcagccaagattaaaaccacctttcccagcattaattggtttatatggatgtccaacaataattaacaatgttgagaccatagctgtagttccaacaattctaagaagaggtggtaaatggtttgcttccttgggtagagaaaaaaatactggtactaaaatattttgtatttctggaaatgtaaataatccatgtaatgttgaggaggaaatgaacatacctttgaaagagttaatagaagttcatgcaggaggtgtaataggtggttgggacaatctacaagctgtaatacctggaggatcttcaatgccacttattccaaaagaaaagtgtgaaacactaacaatggattttgactctttagttgccgaaaaaagcgggctaggtacagcaggagtagtcgttataaataaagatcaagacataattaaatgtatggcaagaatagctagattctataagcatgaaagctgtggtcaatgtacaccttgtagagagggttcagggtggatgtggagaatgcttgagagaatggctaaaggagaggcttcaaaagatgaaattgaaatgttaggtgatgtaacaaaacaaattgaaggtcacacaatatgtgcatttggtgagggatcatcttggcctgttcaaggtttgttaagacattttaaagatgaaattaaaaaaagaaataattttgatccaattgtaaaagaaactcagaatattccttatttggtggatcagcacttattagataagaatgcttaa

SEQ ID NO: 222498 - DNA, 463 bp, Unknown
  Bacterial polypeptide expressing nucleotide sequence isolated from the Sargasso Sea
aatgtattcacctgataatatttttacaaccacaattgataaagccgtaagatggtctcgtacacaatctatgtggcccgtaacttttggtcttgcatgttgtgcgatagaaatgatggcagcaggttcagcaaagtatgacctagcaagatacggaatggaagtttttagagcttctccaagacaagctgacctaatgatagttgctggaagagtctcacaaaaaatggctcctgtattgagacaagtctatgatcaaatggccgaaccaaaatgggtaattgcaatgggggcatgttcctcgactgggggaatgtttaacaattatgcattagttcaaggtgttgatcacatagtccctgtagatatatatgtacctggatgtcctcccggacctcaatcattaatgcacggaattttaacattacatcagaaaattatggacagagagattaatagataa

SEQ ID NO: 222499 - DNA, 640 bp, Unknown
  Bacterial polypeptide expressing nucleotide sequence isolated from the Sargasso Sea
aatgcttaaagatcaagatagaatatttacaaatttatataatgataaaggaactgatgtcgaagcatcaaaaaaaagaggagattggaataatacaaaagaattttgtgaaaaaggtaaagattggataattaatgaaattaaatcatctgaattgagaggtagaggaggtgctggttttcctacaggattgaagtggtctttttgtccaaaagaaataagtaataggccacattatttagttattaatgctgatgagtcagaaccagggacttgtaaagatagagatattttaagatttgaacctcaaaaactgatagagggatgttttatcgcgtcttatgcagttaatgctcatgtctgttacatttatataagaggggaatattttaatgaaggaaaaaaacttcaagaagctatagatgaggcatatgaaaaaaaattaattggaaagaatgcttgtggaactaattgggatttagatatctacattcattatggtgcaggtgcatacatatgtggagaagaaacagcattattggaaagtttagaagggaacaaaggccagcctagattaaaaccaccttttccagctttaataggattgtatgggtgtccaacaataataaataatgtggaa

SEQ ID NO: 222500 - DNA, 1270 bp, Unknown
  Bacterial polypeptide expressing nucleotide sequence isolated from the Sargasso Sea
aatgttaaaagaaaaagataaaatatttactaatttatttggcgatgagccttttcatttaaaaaatgcacaggcaagaggtgattgggacaatacaaaagaacttattaaaaaaggaagagaatggataattgatgagatgaaaaaatctgagttaaggggaagaggaggtgcaggtttccctaccggattaaaatggtcatttatgcctaaagattcaaagcttactaattaccttgttgttaatgcagatgagtctgaaccaggcacttgcaaagatagagatatgatacgaaatgagcctcataagctaattgaaggatgcttgttagcatcttttgctatgaatgctcatacttgttacatttatattcgtggtgaatatttcaatgaagctgttgttcttcaaaaagcgattgacgaagcatacgacgctggattaattgggaaaaatgctgctaagtcgggttgggatttcgatatattcttacatcgaggcgcaggagcatacatatgtggagaggagacagctctacttgaaagcttggaaggaaaaaagggccaaccaagactcaaacctccttttccagctaataaaggtctatatggatctccaactactgtaaataatgttgaaaccatagctgttgttccaacaattttaagaagaggtggagaatggttttcatcttttggtcgaccaaaaaatacaggtacaaaagttttttgtatttctggtcatgttaataatccttgcaatatagaagaagaaatgagcattcctcttagggagcttatagaaaagcatgctggaggtgtaactggtggatgggataatcttaaagctgtaattcctgggggctcatctgttccacttataccaaaatcaacttgcgatactgtcctgatggatttcgattcactgtctgcagttaaaagtgggttaggcacagccgctgtaatcgtaatggataaaagcactgacctcgtcaaagctatctctaagctatctcacttttataaacacgaaagttgcggtcaatgcacgccttgtagagaaggaacagggtggatgtggagaatgatggagaagattggaaacggtcatgcaagttcaaatgatattgataagttacttgatgtgacaaagcaaatcgaaggccatacaatttgcgcacttggtgatgcggcggcatggccaattcaaggattgtttaggcattttagagatgaaatagaagagcaacttaaaaagactaaggctgcataa

SEQ ID NO: 222501 - DNA, 906 bp, Unknown
  Bacterial polypeptide expressing nucleotide sequence isolated from the Sargasso Sea
aatgattaaagaagataataaaatttttcataatctttacaatgattttgggtgggaaatagacaattctattaaacgcaatgactggaataatactaaggaaattatttctaagggaagagagtggataattaacgaagtaaaatcttctgaacttagaggtaggggaggagcaggttttccaacaggattaaagtggtcttttgcccctaaggaggtgggctcaagaccacattatctagtaataaatgccgatgagtcagaacctggaacttgcaaagatagagatattttgagatttgagccacaaaaattattggagggctgtttaattgctggctttgctgttaacgctcacgtttgttacatttatattagaggagaatattataatgagggcaaaagacttcaagaggctattaatcaagcatataagaaaaattttttaggtaaaaacgcatgtggtacaggatgggattttgaaattcatattcattacggtgcaggagcatacatctgtggtgaagagacagcactgcttgaaagtttagagggaaatagagggcaaccaagactaaagcctccttttccagctttagtaggtctatatggatgtcctacaattgtaaataatgtggaaactattgcagttgttcccactattttaagaaaaggcgcaaaatggttttcgtctataggtaaacctaaaaacacaggaacaaaaatcttttgcatatctggcaatgtaaataatccttgtaatgttgaagaagaaatgggcatacctttgaaagatttaatagaaaaatatgcgggaggcgttgttggaggatgggataatttacaagcagtcatcccaggtggatcatcaatgcctttactgccaaaaaatatatgtgaaactat

SEQ ID NO: 222502 - DNA, 483 bp, Unknown
  Bacterial polypeptide expressing nucleotide sequence isolated from the Sargasso Sea
aatgaacttaaaaaaagaagatcaaattcctcaagaatttaaacaacttgctaaagattttgcggataaaggttttattacaacttctttagacaatttggtaaattgggctagaacaggttcattacactggatgacatttggacttgcctgttgtgcggttgaaatgatgcaaacatctatgccaagatatgacctagagagatttggagctgccccaagagcttcaccaagacaatcagatgtaatgattgttgctggaactttaactaataaaatggctccagcgttaagaaaagtttatgatcaaatgcctgaaccaagatatgtgatatcaatgggtagctgtgcaaatggtggtggctattatcattattcatattcagtcgttagaggatgcgatagagttgttcccgttgatgtttatgtaccaggatgcccaccctcagccgaggccttattatatggaataaatgcattaca

SEQ ID NO: 222503 - DNA, 337 bp, Unknown
  Bacterial polypeptide expressing nucleotide sequence isolated from the Sargasso Sea
catgaatactgaattatcatctaaaggatttttagttgctagttatgacaagatattaacttgggcaagaactggttctttatggccaatgacatttgggttagcttgttgtggagtagaaatgatacattcatatatggctcgatatgatttggataggtacggtgttattccaaggggtagtccgagacagtcagatgtaatgatagttgctggaactctaacaaacaaaatggctcctgctttaagaaaagtttacgatcaaatgcctgaaccaagatgggttatatcaatgggctcatgtgctaatggtggaggatattatcactattcatat

SEQ ID NO: 222504 - DNA, 1333 bp, Unknown
  Bacterial polypeptide expressing nucleotide sequence isolated from the Sargasso Sea
atgcttaaagacgaagatagaatatttcaaaatttatacaatgacagtggcgcagatattgagtctgctaaactaagaaatgattggaacggaacaaaagatattttagaaaagggaagagaatggataatcaatgaagttaaatcctctgaacttagagggcgtggtggagctggttttccaactggtttaaaatggtcatttgcacctaaagaagtgggatctagacctcattatttagtcattaatgctgatgagtcagaacctggaacatgtaaagatagagatatattaagatttgaaccacataaattaatagaaggatgcttaatcgcttcttatgcagttaatgcccataaatgttatatttatattagaggtgaatattttaatgagggacaaaaacttcaaactgcaatcgatgaggcgtataaaaataatttaattggtaaaaatgccttaaattcaggatgggatttagatgtttatattcattatggtgctggtgcttacatttgtggtgaagaaacggcactattggagagtttggaaggaaaaaaaggacaaccaagattaaagcctccatttcctgcattaattgggttatatggatgtcctactataattaataatgttgagactgttgcggctgttcctacaattctaagaagaggtgcaaaatggtttagttcacttggaagagctaaaaacactggaacaaaaatttattgtatttctggaaatgtcaataacccatgtaatgttgaagaagaaatgggaattccacttaaggaattaattgaaacccacgctggaggtgtagttggcggatgggacaatctcaaagcggtaatacctggtggttcttcaatgccaatgttacctaaagaaatttgtgacaatatgaaaatggattttgatgcatgtgttgaaaataaaacaggactaggaacagctggtattgttgtaatcaataatgatcaagatattattaaatgtatggcaagaatagctagattttataaacatgaaagttgtggtcagtgtactccatgcagggaaggatctggatggatgtggagaatgttggaaagaatggcagcaggtgaagcaactccagacgaagtggatatgctttttgatgtaaccaaacaaatagaaggccatactatttgtgcatttggtgaaggttcttcttggccggttcaaggattaatcagacattttaaagatgagataattgaaagaaataaatttgaccctgttgtgaaaaaacaaaaaaatattccataccttgttgatcaacatttattagaaaaggaaaatgcctaaa

SEQ ID NO: 222505 - DNA, 535 bp, Unknown
  Bacterial polypeptide expressing nucleotide sequence isolated from the Sargasso Sea
aatgggaatagggttttttaataaagaaaaagaaaagcaaattccacaggagtttaaacaaatcgcaaaggattttagcgaaaaaggatttgtaacaacttcatcagagaacttaataaattgggcgagaacaggatctctacactggatgacgtttggccttgcatgttgcgcagtagaaatgatgcaaacatctatgcccagatatgatcttgaaagatttggcgcggcaccaagagcttcaccaagacagtctgacgttatgattgttgcaggaacattaacaaacaaaatggcagcgccacttagaaaagtttatgaccaaatgccagaaccaagatatgtaatatcaatgggtagctgtgctaatggcggaggctattatcattattcttattctgtcgtcagaggttgcgatagaattgtaccggttgatatttatgtacctggatgtcctccttcagcagaggcattattatatggagttcttcagcttcagaaaaaaataagaagagaaggaactcaaaacagataa

SEQ ID NO: 222506 - DNA, 487 bp, Unknown
  Bacterial polypeptide expressing nucleotide sequence isolated from the Sargasso Sea
aatgggaatagggttttttaataaagaaaaggaaaagcaaattccacaggagtttaaacaaatcgcaaaggattttagcgaaaaaggatttgtaacaacttcttcagagaatttaataaattgggcgagaacaggatcacttcactggatgacttttggtttagcttgttgcgcagtggaaatgatgcaaacatctatgcctagatatgatcttgaaaggtttggagcagcaccaagagcttcaccgagacagtctgacgttatgattgttgcaggaacattaacaaacaaaatggcagctccacttagaaaagtttatgaccaaatgccagaaccaagatatgtaatatcaatgggtagctgtgccaatggcggagggtattatcattattcttattctgttgtaagaggttgcgatagaattgtaccagtcgatatttatgtgcctggatgtcctccatcggcagaggcattattgtatggagtg

SEQ ID NO: 222507 - DNA, 589 bp, Unknown
  Bacterial polypeptide expressing nucleotide sequence isolated from the Sargasso Sea
tttgattggagatcttgcgaaagtaaatggagaaggcttagaaggattagagcacaactttattactgcaagaatcgaaaaccttgttaagtggtcacgggcgcgtagttgttggccagcaacttttggtttggcatgttgcgcgattgaaatgatggccaccggagctgcacactatgacttagctagatacggaatggaagttttccgagcttctcctagacaagcagatctaatgattgtagcgggacgtgtttctcaaaaaatggctccaatactccgacaaatttacgaccaaatgatggaacccaaatgggttatatccatgggggtctgcgcttcatccggagggatgtttaacaattatgcaattgttcaaggggttgatcaggtagttccagtagatgtctatgcacccggttgcccacctggcccagaaactcttatgcatgcgattctgactttgcatgaaaaaattcagtctggtgaattaacacgcaggcgagaagaaaattctggaggggctgcaattcagctttctgaaccttcagtagaaataagtcagccggttgaattggagtctcggtga

SEQ ID NO: 222508 - DNA, 523 bp, Unknown
  Bacterial polypeptide expressing nucleotide sequence isolated from the Sargasso Sea
aatgaatatacaagatagaaaaaaagatattccagaagagtttaaacaattagctcaagactttagtgacaacggttttataacaacatcactagacaatcttgttaattgggcaagaactggttcattgcattggatgacatttggattagcatgttgtgctgttgaaatgatgcaaacatctatgccaagatatgatcttgaaagatttggtgcagcaccaagagcatcaccacgtcaatcagatgtaatgatagttgcaggcacactaactaataaaatggctcctgcattaagaaaagtttacgaccagatgcctgaacctagatacgtgatatctatgggaagctgtgcaaatggtggaggctactatcattattcatactctgtagtgagaggatgcgatcgtgtagtacctgttgacgtatatgttccaggttgtccaccttcagctgaagcattactttatggaattttacaattacagaaaaaaataagaaataaaggttctttagaaagataa

SEQ ID NO: 222509 - DNA, 1333 bp, Unknown
  Bacterial polypeptide expressing nucleotide sequence isolated from the Sargasso Sea
aatgcttaaagacgaagatagaatatttcaaaatttatacaatgacagtggtgcagatattgaatctgctaaattaagaaatgattggaatggaacaaaagaaattttagaaaaaggaagagagtggataatcaacgaagttaaatcctctgaacttagaggacgtggtggtgctggttttccaactggtctaaaatggtcttttgcgcctaaagaggtggggtctagaccacattatttagttatcaatgcagatgaatcagaacctggaacatgtaaagatagagatatattaagatttgagcctcacaaattaatagaaggatgcttaattgcttcttatgcagttaatgcccataaatgttatatttatataagaggtgaatattttaacgaaggacaaaaacttcaaactgcaatcgatgaggcttataaaaataatttaattggtaaaaatgccttaaattcaggatgggatttagatatttatattcattatggtgctggtgcttatatttgtggtgaagaaactgcactacttgagagtttggagggaaaaaagggtcaaccaagattaaagccaccatttcctgcattaattggtttatatggatgtcctactattataaataatgttgagactgttgcagctgttcctacaattctaagaagaggtgcgaaatggtttagttcacttggaagagctaaaaacactggaacaaaaattttttgtatttctggaaatgtaaataacccatgtaacgttgaggaagaaatgggagttccacttaaggaattaattgaaacccacgcaggaggtgtagttggtggatgggaaaatctcaaagcagtaatacctggtggttcttcaatgccaatgttacctaaagaaatttgtgacaatatgaaaatggattttgatgcatgtgttgaaaataaaacaggactaggaacagctggtattgttgtgattaataatgaccaagatattattaagtgtatggcaagaatagcaagattttataaacatgaaagttgtggtcagtgtactccatgtagagaaggatctggatggatgtggagaatgttggaaagaatggcagcaggtgaggcaaccccagacgaagtggatatgctttttgatgtaacaaaacaaatagaaggtcatacaatttgtgcttttggtgaaggttcatcttggccagtccaaggattaattagacattttaaagatgaaatacttgaaagaaataaatttgatcctgtagtgaaaaaacaaaaaaatattccatacctggttgatcaacatttattagaaaaagaaaatgcctaa

SEQ ID NO: 222510 - DNA, 502 bp, Unknown
  Bacterial polypeptide expressing nucleotide sequence isolated from the Sargasso Sea
atgaaatcaagtttttctaaccgtcaagcctcttctagtgaatacattatttcgaaagttgatggcttaattaactgggcccgtcaaggatctctttggccgatgacttttggcttagcttgttgcgcagttgaaatgatgcatacaggagcagctcgttatgatttagatcgatttggaatgatttttcgtccaagtccacggcaatcagatgtaatgattgtggcaggcacactcacaaataaaatggccccagcactcagaaaagtgtatgatcaaatgcctgagcctaggtgggtaatttctatgggatcttgcgcaaatggtggaggttattaccactattcatactcagtagttagggggtgtgatcgtattgttcctgttgatatctacgtacctggatgcccaccaaccgctgaagctttgctttacggtttgttacaactgcagaagaaaattgcgcagaacaaaaccactcttctttggtataacaggtaaa

SEQ ID NO: 222511 - DNA, 868 bp, Unknown
  Bacterial polypeptide expressing nucleotide sequence isolated from the Sargasso Sea
atgttaagtgataaagaccgaattttcagtaatctttacggtatgtatgattgcagcctaaaaggtgccttgtcacgaggccattgggataacacaggggggcttcttaaaaagggtcaagattggataattgaagaagtaaaattgtctggtcttagaggtagaggtggagctggctttcctactgggctcaaatggtcatttatgccaaagcagaccgatggaaggccgagttacctagtagttaatgcagatgagtcagaacctggaacttgtaaagatagagagattatgaggcatgatccccattcgttagttgaaggatgcttgatagccggattcgccatgtcggctgcaagcgcctacatttatatccggggggaatatattcgagagcgagaagctctacaaatagcaatagatgaggcttattctaagggttttttaggaagaaatgcatgtaaaagtggatacgattttgatttgtttttgcatcatggagccggagcttatatatgtggtgaggagacagcgcttcttgaaagtctggagggcaaaaagggtatgccaaggatgaaaccaccgtttcctgcgggtgcaggattgtacggatgtccaacaactgttaataatgtcgaatcaatagcgatggttcctactatactcaggcgaggagcagtttggttttctagcttcgggagaaaaaacaacgcaggaacaaaaatcttttctatttccggacatgtcgaacgcaagtgcgtggttgaggaagaaatgtctattccattgagggagctaattgacaaacattgcggaggcgtaagaggaggttgggataatttgaaagcgggtaattcctggaggagct

SEQ ID NO: 222512 - DNA, 1085 bp, Unknown
  Bacterial polypeptide expressing nucleotide sequence isolated from the Sargasso Sea
aatgcttaaagacgaagatagaatatttaaaaatttatataatgacctaggttcagacatagagtcgtcacaaaaaagaggagattggagtaatacaaaggatatcattaaaaaaggaagagagtggattatcaatgaagttaaaacatctgagctaagaggaagaggaggtgctggcttcccaacaggtcttaaatggtcatttgccccaaaagaagttggttcaaaacctcactatttagttattaatgctgatgagtcagagcctggaacttgtaaagatagagatatattaagatttgaatctcataagttaattgaaggctgtttaatttcttcttatgcagtaaatgcacatgtttgctatatctatattagaggtgaatattataaagaaggtcaaatcctacaaaaagcaatagatgagtcatatgccaaaggattagttggaaaaaatgctgcagacacaggttgggatttagatatttatattcattatggtgctggagcgtatatttgtggagaggaaactgctttattagaaagtttggagggtaacaaaggtcaacctagattaaaacccccatttccagctttaatcggtttatatgggtgccccacaataattaataatgttgaaactatagcagttgttccaacaatcttaagaagaggaggaaaatggttttcttcattaggaagatctaaaaatactggcactaaaatttattgtatttctggaaatgtaaataatccctgcaatgtagaggaagaaatgggaatacctttaaaggatttaattgaaaaacatgctggaggtgttgttggtggttgggataatttaaaagcagttataccaggtggatcttcaatgccattattaagaaaagaagtatgtgatactataaagatggattttgacgcttgtgtagaaaacaaaactggtctcggcactgccggaattgttgtaataaataaagatcaggacattatcaaatgtatggcaagaatagcaagattttataaacatgaaagttgtggacaatgcacgccttgtagagaaggctcaggttggatgtggagaa

SEQ ID NO: 222513 - DNA, 2056 bp, Unknown
  Bacterial polypeptide expressing nucleotide sequence isolated from the Sargasso Sea
tatgtcaacgacactcaatgaaaacctgctgctggcgattccgctcgctccgctggccggctcgctgattgcggggctgttcgggaacgcagtcgggcgcaagggcgcacaccggatcacgatcctcggcgtaatgatcgcgttcctcctgtcggcgaaagtcttcttcgacgtgatgggcggcgcaagcttcaacgcgaccgtctacgaatggatgaacgtcggttcgctgaagctcgaagtcggcttcctcgtcgattcgctgaccgcgatgatgatggtcgtcgtgaccttcgtctcgctgatggtgcacgtgtacacgatcggctacatggcggaagaagacggctaccagcgcttcttctcgtacatttcgctgttcacgttctcgatgctgatgctcgtgatgagcaacaacttcctgcagctgttcttcggctgggaagcggtgggtctggtgtcgtacctgctgatcggcttctacttcacgcgtgagagcgcgatctacgcgaacatgaaggcgttcctcgtgaaccgcgtgggcgacttcggcttcctgctcggcatcggcctgctgctcgcgttcgccggctcgatgaactacggcgaagtgttcgcaaagcgcgcggaactcgcgagcctgcacttcccgggcaccgactggggcctgctgaccgttgcctgtatctgcctgttcatcggcgcgatgggtaaatcggcccagttcccgctgcacgtgtggctgccggactcgatggaaggcccgaccccgatctccgcgctgattcacgcggcgacgatggtcaccgccggcatcttcatggtgtcgcgcatgtcgccgctgttcgagctgtcggataccgcgctgtcgttcatcacggtgatcggcgcgatcacggcactcttcatgggcttcctcgggatcgtccagaacgacatcaagcgtgtggtcgcgtactcgacgctgtcgcagctcggctacatgaccgtcgcgctcggcgtgtccgcttacccggtcgccgtgttccacctgatgacgcacgcgttcttcaaggcactgctgttcctcggcgccggctcggtcatcatgggcatgcaccacgaccaggacatgcgcaacatgggcggcctgcgcaagtacatgccgatcacgtggatcacgtcgctcgtcggttcgctcgcgctgatcggtacgccgttcttctcgggcttctattcgaaggactcgatcatcgacgcggtgaagctgtcgcacctgccgggttcgggcttcgcgtacttcgcggtcgtcgcgagcgtgttcgtcacggcgctgtactcgttccgcatgtacttcctggtgttccacggcgaagagcgcttccgcaagccgaagcatccggaatcgccgatgggcatggcggctgcgcacggccacgacgaccacggccatggccacggtcatgacgaccacgcgcacgaaccgcacgagaccccgtgggtcgtgtgggttccgctggtcctgctggcgatcccgtcggtcatcatcggtgcgatcgcgatcagcccgatgctgttcggcgacttcttccagcacggcgttgcattcgacaaggtgatcttcatcggcgaaaaccatccggccctggccgagatggccgaggagttccacggctgggtgggcatgggcctgcactcggtgtcgggtctgccggtctggctcgcgcttgccggtgtcgttgtcgcctggttcctgtacctgaagcgtccggaactgccggcgtcgatccgccgcgcgttcggcccgatctacacgctgctggacaacaagtactacatggacaagatcaacgaagtggtgttcgcccgtggttcggtggcgatcggccgcggcctgtggaaggagggtgacgtcgtggtgatcgacggcctcgtcaatggcagcgcccggttcatcggctggttcgccggcgtgatccgcttcctccaatccggttacatctatcactacgcgttcgccatgatcatcggcatgctggggctcctgaccctgtttgtaacgctcggcggcaaataa

SEQ ID NO: 222514 - DNA, 880 bp, Unknown
  Bacterial polypeptide expressing nucleotide sequence isolated from the Sargasso Sea
aatgagtagaggagattggcttaatactaaagagttatgccaaaaaggtaaagaatggttaattaatgaaattaagatttctgaacttagaggaagaggtggagccggattccccacaggtttaaaatggtcttttgcaccaaaggagataggttctaggcaacattatttagtgataaatgcagatgagtcagaaccaggaacttgcaaggatagggatattttaagatttgagcctcacaagttaattgaaggatgtttattagcagcttacgcagttggagcacataaatgttatatttatgttagaggagagtactttaacgaaggtaacaaactacaatatgcaattaatgaagcttatgaaaaaggattaataggtaaaaatgcatcaggaacaaactgggatttagatatttatattcattatggtgcaggtgcatatatttgtggtgaagaaacagctttattagaaagtattgaaggaaaaaaaggacaaccaagattaaaaccaccattcccagcattaatcggattatatggttgccctactatagtaaataacgttgaaacgatagctgttgtaccaactattttaagaagaggcggtaagtggtttgcgtcactaggtaaaaagaaaaatacaggaactaaaattttttgtatttcaggaaatgttaataatccatgtaatgtagaagaggaaatgggtattactttaaaagagttaatagagaaacatgcaggaggtgtaataggtggatgggataacttgaaagcagttatacctggtggatcatcaatgccacttttaccaaaagaaatatgtgaaactattacaatggactttgacactctaattgaaaacaaaagtggatta

SEQ ID NO: 222515 - DNA, 1276 bp, Unknown
  Bacterial polypeptide expressing nucleotide sequence isolated from the Sargasso Sea
gatgcttaaggaaaaagataaaatttttaaaaatttatacggttttagagactggaaattagaaggtgccaaaaaaagaggtatttggtcaaatactaaagaacttattaaaatgggtagtgataaaattattgaggaaattaaaaatagtcaattaagaggaaggggaggagcaggtttccctgcgggacttaagtggtcatttatgccaaaagactctggaaaagatcattacctagttgttaatgcagatgaatcagagccaggcacatgtaaagatcgagagattatgagaaacgacccacatcttcttttagaaggttgtttagtggctgcctttgcaatgcatgcacatacttgttatatttatataaggggtgaatattattctgaatcttctaatttacaaaaagctatagatgaagcttacgcaaataatttaattggtaaaaatgcatgtggtacagggtgggattttgatatttatcttcacagaggagcaggagcatatatttgtggtgaagaaactgctttacttgaaagtttagaaggtaaaaaaggtcagccccgattaaagcctccatttcctgctggtgcaggtttatatggatgtcctacaacagttacaaatgttgaaacaatcgctgtctcgccatctattttaagacgtggttctaaatggtttgctaatttaggtagtgcaaataatacaggtacaaaaatttttagtatctctggacacgtaaaaaacccatgtaatgtagaagaagaaatgggcataccactgaaagatctaattgaaaaacatgcaggtggtgtaattggtggttgggaaaatttattagctgtaattcctggaggcgcaagtgtacctttattacctaagtctatttgtgatactgttaaaatggattttgatagtttaaaacaagttcaaagtggattaggcactgcagctgttattgtaatgaataaatcaacagatattgttgaggcaataaccagattatcacatttttataagcatgaaagttgtggtcaatgtaccccttgcagagaaggtactggatggatgtacagaatgatggaaaaaatgattaatggaaatgttgaacatcaagatattgataaaattttagatgtgacaaagcaaattgaaggtcatactatttgtgccttaggcgatgctgctgcttggcctattcaaggtttgtttagacactttagacctgaaattgaaaaaagaattcaagaaagaaacagaagagtagcctag

SEQ ID NO: 222516 - DNA, 436 bp, Unknown
  Bacterial polypeptide expressing nucleotide sequence isolated from the Sargasso Sea
aaattttgataaacttttaacttgggcaagaactggatctttgtggcctatgacctttggcttagcttgttgtggagttgaaatgatccatacttacatggcaagatatgatctggacagatatggagtgattccaaggggcagtccaagacaatcagatgttatgatagtggctggaactctaacaaataaaatggcacctgcattaagaaaagtttatgatcaaatgcccgagcctagatgggtaatatctatgggctcatgcgcaaatggaggtgggtattatcattactcatattcagttgtgaggggttgcgatagaattgttcctgttgatatttatgttccgggttgtccaccaacagctgaagcattagtttacggaattttacagctacaaaaaaaaattaaaagaaaaaacaaattcgtacgataa

SEQ ID NO: 222517 - DNA, 1066 bp, Unknown
  Bacterial polypeptide expressing nucleotide sequence isolated from the Sargasso Sea
ttatattcaataggttatatggaagaagacccgtccaaaatcagatttatgggctatctaagcttatttactttttttatgcttgttcttgtatcaagtaataacttgctgcaaatgttctttggttgggaaggtgttgggctagcttcatatttattaattggtttttggcaccataaagattcagcaaataaagctgctataaaagcatttgttgtaaacagagttggagattttggatacgcaattggaattgctggaattttttatatttttggcacgataagtttcgacagtatattttcacaagtggatcaatttagtgagcatcaaattcaattcctttcattcagttttccaactttagattttttatgttttcttttattcataggtgcaatgggtaaatctgcccaattaggtttacacacatggttgccagatgccatggagggacctactcctgtatctgcactaatacatgctgcaacaatggtaactgctggtgtatttttagttgcaagaatgagtcctctttatgagtttgcgacatttactaatttattcattacttttattggtgcagccacagctatttttgctgcctctatagccttaacgcaaaatgatattaaacgagtcattgcatattcaacatgtagtcaattaggatatatgttttttgcagcaggtgtaggagcttataatgcatcaatatttcacttaacaactcatgcattttttaaagctcttctatttctttctgcaggttctgtaattcacgcaatgcatcatgaacaggatatgagaaaaatgggggggcttttcaaaaaaataccttttactgcttcaatgatgtggattgggtctcttgcaattattggtttcccatatctatctggttactattcaaaagaaagtattttagaaaatgctttctatgcttcaaatggaatagcatactttgcatatttagtaggtattttaactgctttacttactgctttttattcatggagattattattcctaacatttcatggtgaaaatagatcaaataaataaa

SEQ ID NO: 222518 - DNA, 1300 bp, Unknown
  Bacterial polypeptide expressing nucleotide sequence isolated from the Sargasso Sea
tatgaaagaaacattattgctaacaaaacacatgagagaaaatcctgaaaatagtcatttgatagatgtttatgagaagaacaatggatatagtgcagcaagaaaagtattaaaagataataatccaggtgatgtaattgaagaaattaaaacctcgaatattagagggaggggtggtgctggatttcctactggtgttaaatggggatttttggcagaagaccaagaaagatatttagttattaatgcagatgaatcagaaccaggaacttttaaagatagaattttacttgaaagagatccgcaccaattaattgaaggaataatagttacttcttttgcttccaatatttcaaaagcctttatttatattaggggtgagtatgcgaaacctgcacggagggtacaagatgctgttgaacaagcttatgaaaaaggttatctaggaaaaaacatctttgattcaggaaaagacttagatgtagtggttcatcttggtgccggtgcatatatttgtggtgaggaaacagctttgttaaattcattagaaggcaggagaggagagccaagattaaaacccccttacttcccagcagtaaagggtctttacaataaaccaaccttagtaaataatgtcgaaacaatatcttctgttccttggattataaacaattccggaaaagactatgcaaaattaggtgttgagggttcaacaggtacaagaatatttagtttgtctggacatgtaaataatcctggaaactttgaaattgaaatgggatgttcattcggtgaatttattgacacttttggaaacggcataaaagaaaacaaggctgttaaagcatatatccctggaggagcttcagcgccttggtttactggggatcagttagatataaaaatgacaattgacgatgtagccaatgctggatcgatgttaggttccggagcagtagtagtcatggatgaggatacaaatcttgttttagctgcaaaaagcattgttagtttttttgctcatgaatcttgcggtcaatgtacgccgtgtagagaaggaaccacttggttggaaatgatattagatagaatagcaagcggcagaggtagaacctcagatatagacttgcttcttgatgtatgtgacaatatatctcctggattaacctggcctcctcaaatgaccacgatttgtccactgggaccatctgctgtatctccaattacctcattaatgggaagctttcgtgaagaagtagaaagcttacttccaaagaaagtgttaattaataatgagtga

SEQ ID NO: 222519 - DNA, 1129 bp, Unknown
  Bacterial polypeptide expressing nucleotide sequence isolated from the Sargasso Sea
catgcttaaaccagaaaataagattttcaaaaatctttacaatgaatttggatgggaaatcgataatgcaattaagagagatgattggaaggaaaccaaaaatataatttctaaaggaagagaatggataattaatgaaataaaaacctctgagttaagaggaagaggaggtgcaggtttctctacggggcttaaatggtcgtttgcaccaaaagaagttggatcaagaccacattacttggttattaacgcagatgaatcagaacctggaacttgtaaagatagagatattttaagatttgaacctcaaaaattaatagagggaagtttaatagctggttatgcagtcaatgctcacgtttgttatatttacattagaggtgaatatttgaatgagggtaaaagattgcaatctgccatagatcaagcatacaagaagaactacttaggaaaaaatgcgtgtggttctggatgggattttgatattcacattcactacggtgcaggagcttatatttgtggtgaagagacagctttgttagagagtatagagggaaataaagggcaaccaagattaaaacctccttttcccgctttagtaggtttgtacggatgtcctacaattgtaaataatgttgagacaatcgctgtagttccaactattttaagaagaggtgggaaatggtttgcttcattaggtaaaccaaaaaatactggcacaaaaatattttgtatctccggtaatgttaattctccttgtaatgttgaggaagaaatgggaataccattaaaagaattaattgaaaaacatgcaggtggagttgtagggggttgggaaaatcttcaagctgtaatacctggtggttcatcgatgcctttattacctaaaaatatttgcgatacaatcacaatggactttgactctttaatagaaaataaaagtggtttaggtactgcgggtatagttgtgataaataaagatcaggatatcgtcgcttgtatggcaagaattgcaagattttataaacacgaaagctgcggtcagtgcactccttgcagagaaggggctggatggatgtggcgaatattagatagagttacaaaaagaaaagcaactttcagcgatata

SEQ ID NO: 222520 - DNA, 957 bp, Unknown
  Bacterial polypeptide expressing nucleotide sequence isolated from the Sargasso Sea
aatgcttaaagacgaaaacagaatatttagaaatttatataacgatttaggtgcagatttaatatcggcaaaaaaaagaggagattggaacaatacaaatgaaatttgtaaaaaaggacgtgaatggattattaatgaaatcaaaacttcagaattacgaggaaggggaggagcaggatttccaactggattaaaatggtcttttgcaccaaaagaagtaggttcaagaccccattatttagtaattaatgctgatgagtcagaaccaggaacttgtaaagatcgtgatatactaagattcgagcctcaaaaattaatcgaagggtgcttgatagcttcttatgctgtaaatgcacatgtttgttatatttatataagaggagagtatttcaatgagggtcaaaaacttcaacaagcaattaatgaagcatacaaggacggattaattggaaagaattcttcaaaaacaggttgggattttgatatttatattcattatggtgcgggagcatatatttgcggtgaagaaacagctttacttgaaagcttggaaggtaaaaaaggccaacctagattaaaacctccatttccagccttaattggattatatggctgcccaactataatcaataatgttgaaacaattgcagtagttccaacaattttaagaagaggagggaagtggttttcatctcttggtcgtgaaaaaaatacaggaacaaaaatttactgcatatcaggcaatgttaataatccttgtaacgttgaagaagagatgggcatacctttaaaagatttaattgagaaacatgccggcggtgttgttggtggatgggataatttaaaagcagtaattcctggtgggtcttcaatgcctttattacctaaaaaaatttgcgatacaattaaaatggactttgatgcctgtgttgaaaataaaacaggtcttggcacagc

SEQ ID NO: 222521 - DNA, 1237 bp, Unknown
  Bacterial polypeptide expressing nucleotide sequence isolated from the Sargasso Sea
gatgattggaagcttaaaggagcaatcaaacgaaatgtatggaaaaatactaaagaaatattatcaaaaggtagtgattatattatcgaagaaattaaaaaaagcgagttaagaggtaggggtggcgctggttttcctgcaggacttaaatggtcttttatgccaaaagattcagataagccttcatacttggtggtaaatgcagatgaatctgaacctgggacttgtaaagatagagaaattttaagaaatgatcctcatttgcttttagaaggatgtcttgttgctggttatgctatgagagctcatgtttgctacatatacataaggggagaatattattctgagttttctaatttgcaaaaagctattgatgaggcatacgaaaacaagttaataggtcataatgcatctggttcagaatgggattttgatatttatttacatagaggtgctggagcctacatttgcggtgaggaaacagctttattagaaagtttggaaggaaaaaaaggacagccaagacttaaacccccatttccagcaggttctggattgtatggatgtccaactacagttactaatgttgaaaccgttgctgtcactcctacaatattaagaaagggatcgtcttggttttcaaatttaggtagaccaaaaaatacaggcactaaaatttttagtatttctggacatgttaacaatccttgtaatgttgaagaagaaatgggaattcctcttaaaaaacttattgaaacatatgcaggaggcgtaattggtggatgggaaaatttattggcagtaattccaggaggtgctagcgtaccattaatacctaaatcaatatgtgataatgtaagaatggattttgatagtttaagcgaagtaaagagcggcttaggaactgcggctgtaatagttatgaataaatctactgatatagttgaagcaatatctcgtctttcgcatttttatatgcacgaaagttgtggtcaatgtactccttgtagagaaggaacaggttggatgtatagaatgatgcaaaaaatgatagaaggaaatttagcacaaagtgatattgataaactcattaacgttactaaacaagttgaaggacatactatttgtgctctcggcgatgcagctgcttggccaatccaaggtttaataagacattttagaacagaagttgaaagacgtattgaagaatataacaaaaaaagaaaagtagcttaat

SEQ ID NO: 222522 - DNA, 499 bp, Unknown
  Bacterial polypeptide expressing nucleotide sequence isolated from the Sargasso Sea
atggaaaacaaagatataaaaaaattatcaacagaaattgataataaaggtttttttgttacttctacagaggcccttataaattgggcaagaaccggttcacttcattggatgacatttggtcttgcttgttgtgcaattgagatgtttcagacaaatggcccccgttatgaccttgaaagatatggagcggctcctagaggttctcctcgtcaatcagatgtaatgatcgttgccggaacactaacaaataaaatggctccagcaattagaaaagtatatgatcaaatgcctgagccaagatatgtaatatctatgggatcatgtgctaatggaggaggttactatcactattcttactcagttgtaagaggttgcgatagaattttacctgtagacatctatgtgcctggatgtccgcctacagcagaagccttaatgtatggaatacttcaacttcaaaagaaaattagaagaacaggaacaatagaaagataga

SEQ ID NO: 222523 - DNA, 1159 bp, Unknown
  Bacterial polypeptide expressing nucleotide sequence isolated from the Sargasso Sea
catgcttaaacctgaaaataagatttttaaaaatctttacaacgatatgggttgggaaatagatgatgctataaaaagaaacgattggaaagatacaaaaaatttaatttctaaaggtcgagaatggataattaatgaaataaaatcttcagagttaagaggaagaggtggcgcaggtttctctacaggtttaaagtggtcgtttgcccctaaagaagtaggatctagacctcattatttagtaataaatgcagatgaatctgaacctggaacttgcaaagacagagatattttaaggtttgagccccaaaaattattagagggttgtctcatagcaggttatgccgttaacgctaaagtttgctatatttatattagaggagaatattttagcgaaggtaaaagacttcaagaagcaatagatcaagcttacaaaaaaaattatcttggaaaaaatgcatgtggttcaggatgggattttgatattcatatccattatggtgctggtgcctacatttgtggagaagaaaccgctttgttggaaagcattgaaggaaacaaaggtcaacctagattaaaacctcctttccctgcattagtaggtttatatggatgtccaactattgttaataacgttgaaactatagctgttgttccaaccattttaagaagaggaagcaaatggtttgcgtctctaggcaaaccaaaaaatactggaacaaaaattttttgtatttcgggaaatgtaaattcgccttgtaacgttgaggaagaaatgggaataccattaaaagaattaattgagaaacatgcggggggtgtaattggaggatgggaaaaccttcaagctgtaattcccggaggttcatcaatgcctttactctcaaaaaaaatttgtgagaccattacaatggattttgactcattaatagaaaataaaagcggtttaggtaccgctggcgtagtagtaattaacaaaaatcaagacattgttgcttgcatggcaagaatagcaagattttataagcatgaaagttgtggtcaatgtactccgtgtagagaaggagcaggatggatgtggagaatattagatagagttgtgcaaagaaaggctactttcagtgacatcgaccttttatcagatgtactaagcaaatga

SEQ ID NO: 222524 - DNA, 1021 bp, Unknown
  Bacterial polypeptide expressing nucleotide sequence isolated from the Sargasso Sea
atgcttaaagacgaagatagaatatttcaaaatttatacaatgatagtggagctgatatcgaatctgctaaattaagaaatgattggaatggaacaaaagaaatattagaaaaaggaagagagtggataatcaatgaagttaagtcctctgaacttagaggacgtggtggagctggtttcccaactggtctaaaatggtcatttgcacctaaagaggtggggtctagaccacattacttagttatcaatgctgatgaatcagaacctggaacatgcaaagatagagatatattaagatttgaacctcacaaattaatagaaggatgcttaattgcttcttatgcagttaatgcacataaatgttatatttatataagaggtgaatattttaatgaagggcaaaaacttcaaactgcaatcgacgaggcttataaaaacaatttaattggtaaaaatgctttaaattcaggatgggatttagatatttatattcattatggtgctggtgcttatatttgtggtgaagaaacggcactatttgagagtttagaaggaaaaaagggtcaaccaagattaaagccaccatttcctgcattaataggattatatggatgtcctactataattaataatgttgagactgttgcagctgttcctacaattctaagaagaggtgcaaaatggtttagttcacttggaagacctaaaaacacaggaacaaaaatttattgtatttctggaaatgtcaataacccatgtaatgttgaagaagaaatgggagttccacttaaggaattaattgaaacccacgctggaggtgtagttggtggatgggacaatctcaaagcagtaatacccggtggttcttcaatgccaatgttacctaaagaaatttgtgacaatatgaaaatggattttgatgcatgtgttgaaaataaaacaggactaggaacagctggtattgttgtgatcaataatgaccaagatattattaagtgtatggctagaatagctagatttt

SEQ ID NO: 222525 - DNA, 794 bp, Unknown
  Bacterial polypeptide expressing nucleotide sequence isolated from the Sargasso Sea
aatgcttaaagatcaagatagaatttttcaaaatttatataatgacaaaggctcagatgtatcttcatcacaagagagaggtgattgggtaaatacaaaagaaattactgacaaaggacgagactggataatcaatgaaattaaagagtctcaactaaggggtcgaggtggtgcaggatttcctactggtttaaaatggtcatttgcgccaaaagaagttggatctagaccacattacttagttattaatggcgatgagtctgaaccaggaacttgtaaagacagagatattttaagatttgaacctcacaaattaatagaaggttgtttaatagcatcttatgcagtgcaagcacatgtttgttatatttacataagaggagaatattttgttgatggtcaaaaacttcaagcagcaatagatgaggcttatgagaaaaaattgttaggtaaaaatgcagcaggcactgggtgggatttagatatttatattcattatggagctggtgcatatatttgtggagaggaaacagctttactagaaagtatcgagggtaaaaaaggacaacctagattaaaaccaccatttccagctctaattggtctatatggatgcccaacaattattaataatgttgaaactatagctgtagttccaacaattcttagaagaggtggaaaatggtttgcatctcttggaagagaaaaaaatactggaactaaaattttctgtatttcaggaaatgttaataatccatgtaacgtagaagaagaaatgaatttccttgaaagaa

SEQ ID NO: 222526 - DNA, 1543 bp, Unknown
  Bacterial polypeptide expressing nucleotide sequence isolated from the Sargasso Sea
gattctatcctggattttatttttctcatatattggagagaaagaaactcaaataattcatatttcaattggttcacatcaggtaattttattgtcgattggtctattcgattggactcactcacaaccacgatgtttgtagtggtatgtagtgtttcagcttgtgttcatctttactctattggatatatgagtgatgacccatcaaaagaaagatttatgggatatttaagtcttttcactttctttatgttgatgttagtctctagtaacaatttgctgcaaatgttttttggctgggaaggagtaggcctagcttcatatttactaataggtttttggtaccataaaccatctgctaacaatgctgctataaaagcttttcttgttaatagggtgggagattttggatatgccttggggatagcaggtgttttttatatttttgggtctattgagtttagtgttatctttgataacgttgataattataaggatcacaccatttattttataggtttaaatttcagtaccattgatttgctttgcttccttttattcattggagcaatgggtaaatctgctcaactgggtttgcatacttggttacccgatgcaatggagggcccaacacctgtttcagcacttattcatgcagcaacaatggtaacagctggtgtatttttagtagctagaatgagcccattatttgaatatgctttagttacaaatttatttattacttttattggtgcctcaactgctatttttgcagcaagcattgcacttacacaaaacgacattaaaagagttatagcttattcaacgtgtagccaattgggatatatgttttttgcagcaggtctaggcgcatacaacgcttcaattttccatttgatgacccatggtttttttaaggcattactatttttatcagctggatcagttattcatgcaatgcatcatgaacaagatatgcgtaaaatgggtggtttattcaaaaaaattccttttaccggttcaatgatgtggattgggtcacttgcaattataggcttcccatatttctcaggttactactcaaaagagagtattttacaaaatgcctactattcaagttcctcaatggcaacctttgcttatattattggaatcttaacagctcttttaacagccttttattcatggagattattatttatgacttttcatggtgagacaagatctgatttaaaaacctatgatcatgctcacgagtcaccacttgtaatgactattcctttaatattattggcttttggatcaatttttgcaggaatattattttcaaatttctatattggaaaattacaatattctttctggggagactccataattctgcatgacggtaaacattattatttgccttttattcaaactttgatagttaaaagctcagtagcaattggtgttatgttagcagcattaatctatttctacagaaatcatttatctaaaaatttagcgcataatttagatcccctttattctatttcgtaca

SEQ ID NO: 222527 - DNA, 556 bp, Unknown
  Bacterial polypeptide expressing nucleotide sequence isolated from the Sargasso Sea
aatggaaaaaaggagctttggaatgggaataaaattaggctcatcaacaattcaaaaagagatacctgaggaattcaaagatttagcaaaagattttgctgaaaaaggttttattactacttcttcagaaaacttaataaattgggcaagaacaggttcattacattggatgacttttggcttagcttgttgtgctgttgaaatgatgcaaacttcaatgccaagatacgatttagaaagattcggagccgcacctagggcctcacctagacaatcagacgttatgattgttgcaggaactttaacaaataaaatggctccagcattacgaaaagtttatgaccaaatgcctgaaccaagatatgttatatctatgggtagttgtgccaatggcggaggttattatcattactcatattctgtggttagaggctgtgatagaattgttcctgttgatgtatatgttccgggatgtccaccttcagcagaagcactattatatgggattatgcagttacaaaaaaaaataagaaacaaaggttcaatagaaagataa

SEQ ID NO: 222528 - DNA, 523 bp, Unknown
  Bacterial polypeptide expressing nucleotide sequence isolated from the Sargasso Sea
atgaatttagaagagaaaaagaaacaaataccagatgaatttaaacaactcgctaaagactttagtgataatggttttataacaacttcattagataacctcgttacttgggctagaacaggttcacttcattggatgacattcggtttagcatgttgtgcagttgaaatgatgcaaacttcaatgccacgttacgatcttgaaagatttggtgccgctccaagagcatcaccaagacaatctgatgttatgatagttgctggtacattaactaataaaatggctccagctttgagaaaagtttatgatcaaatgccagaaccgagatatgtgatatcaatgggtagttgtgcaaatggaggtggatattatcattattcatattcagttgtaagaggatgtgacaggatagttcctgttgatgtttatgtaccaggatgtccaccatctgctgaagcactcttatacggaattatgcagctacaaaaaaaaattagaaataaaggaagtctagaaagataag

SEQ ID NO: 222529 - DNA, 751 bp, Unknown
  Bacterial polypeptide expressing nucleotide sequence isolated from the Sargasso Sea
gcgatcaccggtttccgtatgcacccggcctggttccgtatcggcggtgtggcacacgatctgccgcgcggttgggacaaactgctgcgtgatttcctcgactggatgccaaaacgtctggattcttacgagaaagccgcgctgcgtaacaccatcctgaaaggccgttcgcagggtgttgccgcttacggtaagaaagaagcgctggactggggttgtaccggtgctgcgctgcgtgcgaccggtattgatttcgacgtgcgtaaagcgcgtccgtactctggctatgaaaactttgactttgaggtcccggttggcggcggtgtgtccgactgctatacccgcgtgatgctgaaagttgaagagctgcgccagagtctgcgcatccttgagcagtgcctcaataacatgccggaaggcccgttcaaagcggatcacccgctgacgacgccgccaccgaaagagcgcacgctgcaacatatcgaaacccttatcacccacttcctgcaggtttcgtggggtccggttatgccggcaaacgaatccttccagatggtggaagcgaccaagggtatcaacagttactacctgaccagcgatggcagcaccatgagttaccgtacccgtatccgtaccccgagctatgcgcacctgcagcagatcccggtagcggtacgtggcagcctggtgtccgacctgatcgtccatctgggtagtatcgattttgttatgtcagatgtggaccgctaat

SEQ ID NO: 222530 - DNA, 1300 bp, Unknown
  Bacterial polypeptide expressing nucleotide sequence isolated from the Sargasso Sea
tatgaaagaaacattattgctaacaaaacatatgaaagaaaatcctgaaaatagccatttgatagatgtttatgagaaaaacaatggatatagtgcagcaagaaaagtattaaaagaagataatcctggagacgtaattgaagaaattaaaacatcaaatattaggggaaggggtggtgcaggatttcctactggtgtgaaatggggatttttagcagaagatcaagaaagatacctagttatcaatgcagatgaatcagaaccgggaacttttaaagatagaattttacttgaaagagatccacatcaattaattgaaggaataatagttacttctttcgcttctaacatttcaaaagcctttatttacattaggggtgagtatgcaaaacctgctagaagagtacaagatgctgttgaccaggcttatgaaaagggttatttaggaaaaaatatctttgattcaggaaaagacttagatgtcgtagttcatcttggtgcaggtgcatatatttgtggtgaagaaacagctttattaaattcactagaaggtagaagaggagagccaagattaaaacctcctttcttcccagcagtaaagggcctttacaacaaaccaaccctggtaaataatgtcgagacaatttcttctgtcccttggattataaacaattccggaaaagaatatgcaaagttgggtgttgagggctcaacaggtacaagaatatttagtttgtctgggcatgtaaataatcctggaaattttgaaattgaaatgggatgttcatttggtgaatttatagatacttttgggaaaggcataaaagaaaacaaggctgttaaagcatatattcccggaggagcttcagcgccgtggtttactggggatcaattagatataaaaatgacaattgatgatgtagcgaatgctggatcgatgctaggttccggcgcagtagtggttatggatgaagatacaaatcttgttttagctgcaaaaagtattgttagtttttttgctcatgaatcttgcggtcaatgtacaccctgtagagaaggaaccacttggttagaaatgatcttagataggattgcaagtggcagaggtagaacctcagatatagacttgctacttgatgtgtgtgacaatatatctcccggattaacttggcctcctcaaatgaccacgatttgcccacttggaccgtctgctgtatctccaattacctcattaatgggaagctttcgtgaagaagtagaaagcttgcttccaaagaaagtattaattaataatgagtga

SEQ ID NO: 222531 - DNA, 433 bp, Unknown
  Bacterial polypeptide expressing nucleotide sequence isolated from the Sargasso Sea
aatggaaaaagggagctttagaatgggaataaaaatgaatttatcaaataacaaagaaaaagaaattcctgaagagtttaaaaatctagctaaagattttgcagaaaaaggttttataacaacttcatctgaaaatttaattaactgggcaagaacaggatcattacattggatgacttttggcttagcttgttgtgcagttgagatgatgcaaacgtcaatgccaagatatgatcttgaaagatttggagcagcaccaagagcatcaccaagacaatcagatgttatgattgttgctggaactttaacaaataaaatggcaccagctttaagaaaggtttacgatcaaatgcctgaacctaggtatgttatttcaatgggaagctgtgcaaatggtggagggtattatcattactcttattctgttgtaaga

SEQ ID NO: 222532 - DNA, 517 bp, Unknown
  Bacterial polypeptide expressing nucleotide sequence isolated from the Sargasso Sea
atgaacaataaattagatcaaatccctgaagaatttaaaaaattagctaaagactttagtgaaaatggttttattacaacctcactagataatttaatcaattggtctagagcgggttctttacattggatgacatttggactcgcttgttgtgctgttgagatgatgcaaacagcaatgccaagatacgatctggaaagatttggagctgcaccgagagggtcacctagacaatcagatgttatgattgttgctggaactcttactaataaaatggccccagcattaagaaaagtatacgatcaaatgcctgaaccaagatatgtaatttcaatgggcagttgtgctaatggcggtggttattatcattactcatattctgtcgttaggggatgtgatcgaatagttcctgttgatatttacgttccaggatgtccgccttcggcggaagctttattatatggaataatgcaacttcagaaaaagattagaaataaaggttcatttaatagataaa

SEQ ID NO: 222533 - DNA, 1333 bp, Unknown
  Bacterial polypeptide expressing nucleotide sequence isolated from the Sargasso Sea
catgcttaagcctgaagataaaatttttaaaaatctttataatgaactgggttgggaaattgataatgcaatcaaaagaaatgattggaaaaacactaaaaatataatttctaaaggaagggaatggattattaatgaggtaaaaacttctgagcttagaggtagagggggagcggggttttctacaggtcttaaatggtcatttgctccaaaagaagttggttcaagaccccactacttagtcattaatgcagatgagtcagaacctggaacttgcaaagatagagacatattaagatttgaacctcaaaaattaattgaaggctgtttgatagcaggttatgcggtgaacgctcatgtttgttatatttatattagaggagaatatcttaatgaaggtaaaagactacaagatgccattgatcaagcatataaaaaaaattttttaggaaaaaatgcatgtgactctggatgggattttgatattcatattcattatggagctggtgcttatatttgtggtgaggaaacagctttactagagagcatggagggaaataaaggtcaaccaagattaaaaccgccttttccagctttagtaggtttgtatggatgtccaacaatagttaataatgtagagacaatagcagttgtaccaacaattcttagaagaggaggtaaatggtttgcttcaatcggtaaaccaaaaaataccggaactaaaatattttgtatttctggaaatgtaaattctccatgtaatgttgaggaggaaatgggtattccactaaaagaattaattgaaaaatatgccggtggtgtagtaggaggctgggaaaaccttcaagcagtaattcctggtggttcatcaatgcctttattatctaaaaagatatgtgatacgattacgatggactttgactctttaattaaaaacaaaagtggattgggcacagcagggattgttgttataaataaaaatcaagacattgtttcttgtatggcaagaatagcaagattttataagcacgaaagctgtggtcagtgtacaccttgtagagaaggagcaggttggatgtggaggattctcgatagagtagttaaaagaaaagcaaccttcagtgatatagacttgttgtcagatgtaacaaaacaaattgaaggacatacaatttgtgctttcggagaaggagctgcgtggccagttcaaggtttattaagacattttagaaaagaaatagaaagtcgttgtagagaagagcctttaataaagaaaaaaatagataatccatatttagttgatcaacatttgttggaggataaaaatgcctaa

SEQ ID NO: 222534 - DNA, 559 bp, Unknown
  Bacterial polypeptide expressing nucleotide sequence isolated from the Sargasso Sea
atggaagaaaggtgcgttagaatgggaataaatttcttaaataatagaaaaaataataaagaaattccagaagaatttaaaaaaattgctaaagattttagtgaaaaaggttttattactacttcctctgacaacttaataaattgggcaagaactggatcattgcactggatgactttcggtttggcatgctgtgcagttgagatgatgcaaacttcgatgccaagatacgatcttgaaagatttggagctgcgcctagggcatcccctagacagtcagatgtaatgatagttgctggaacgttgactaataaaatggcagcacctttaagaaaagtttatgatcagatgcccgagcctagatatgtcatatctatggggagctgtgctaatgggggtggttattatcatttttcttactctgtagtacgaggttgtgacaaagtagttcccgttgatatttatgttccgggatgtccaccatccgccgaagcattattatatggaattcttcaacttcaaaagaaaattagaagagaaggaactcaaaaaagataat

SEQ ID NO: 222535 - DNA, 1050 bp, Unknown
  Bacterial polypeptide expressing nucleotide sequence isolated from the Sargasso Sea
gtgatgaatctgaacccggtacattcaaagatagaattttgcttgagagagatccacaccaactaattgaaggtgtaataattacatgctttgcttcaaacatcaaaaaagcatttatctacataagaggtgagtatgcgaagccagcaagaagagtgcaggatgcagttgagcaagcatatgaaaaaggatatttgggaaataatatattaggaacaaatttttccttggatgttgtagttcatcttggagcaggagcgtacatatgtggtgaagaaacagctcttttgaattcacttgaaggaaaaagaggagagccaagacttaaaccaccttattttcccgcagtaatgggactatacaacaaaccaacactagtaaataatgtagaaacaatatcttcagttccttggataattcaaaattcgggaaaagagtactcaaaacttggtgttgaaggatcaacgggaacaagaatttttagcttgtcaggccacgtaaataatcctggaaattttgaaattgaaatgggtcaaagctttggtgaatttatagatacatttggaaaaggaatcaaaaataacaaaaatgtcaaagcttatattcccggaggtgcttcagcgccatggttcaccggtgatcagttagatataaaaatgacaattgatgatgttgcaaatgcaggatcaatgttgggttctggtgcggtagttgtgatggatgaagatactaatttagtttatgcggcaaagagtatcgtaagtttttttgctcatgaatcatgtggtcaatgtactccctgcagagaagggacaacttggctagaaatgattttagaaagaattgcgagcggcagaggtagactttctgacattagtttgttgattgatatttgcgacaatatttcacctggattagattggccaccaaaaatgacaacaatatgtccacttggtccttcagctgtatctccaataacatcattgctaaataacttttctgaggagataacaaatatgcttccaacaaaaattccaattacacaatgac

SEQ ID NO: 222536 - DNA, 382 bp, Unknown
  Bacterial polypeptide expressing nucleotide sequence isolated from the Sargasso Sea
aatgatagaaagtaaaattaaacaaattccgccagaatttaaagatgttgctgaaaattttagcagggacggtttcgtaactatagcaagtaatactttgataaattgggctagaacaggatctctacattggatgacatttggcttagcatgttgcgctgttgaaatgatgcaaacttctatgcctagatatgatttagaaagatttggcgctgcaccccgagcatcacctagacaatcagatgtaatgattgttgctggcacattaactaacaaaatggctccggccttaagaaaagtatacgatcaaatgcctgaacctagatatgttatttcaatgggtagctgcgcaaatggaggaggttattatcattattcttat

SEQ ID NO: 222537 - DNA, 667 bp, Unknown
  Bacterial polypeptide expressing nucleotide sequence isolated from the Sargasso Sea
aatgcttaaagacgaagatagaatatttaaaaacctgtataacgatagatcaacggatataaatagtgcaatattaagaggtgattggacaaaaactaaagaaattttttcaaaaggaaaagaatggattattaatgaaattaagatttcggaactaagaggaagaggtggagcagggtttccaactggtctgaaatggtcttttgctccaaaagaagtaggctcaaggccacattatctggtaattaatgctgatgagtcagaaccaggcacttgtaaagatagagacattttaagatttgaacctcaaaaattaattgaaggatgtttgatagcctcttacgctgttaatgctcatgtttgttatgtttatatcagaggagaatatttcaacgagggccaacgattacaaaaagctatcgatgaagcttatgaaaaaaatcttataggaaaaaatgcggctggtacaggttgggatttcgacattcacatccattacggcgcaggtgcttatatatgtggggaagagacagcacttcttgaaagcttagaaggtaaaaaaggtcaaccaagactaaaacctccatttccagcattagtaggtttgtacggttgtccaacaattataaataacgttgagactattgctgttgttccactattttga

SEQ ID NO: 222538 - DNA, 982 bp, Unknown
  Bacterial polypeptide expressing nucleotide sequence isolated from the Sargasso Sea
ctcagttaatgctaataaatgttatatttatataagaggtgaatattttaacgaaggtaataaacttcaagaagctataaatgaagcctatgaaaaaaaattaattggagttaatgcttgtgatagtggatgggattttgacatatatgttcattacggtgcgggcgcctacatttgtggtgaagaaactgctttactagagagtcttgaaggaaagaggggacagcctagattaaaaccaccttttccagctttaataggtctttatggatgtccaacaataataaataatgttgaaacagtagcggtggttcctactatattgagaagaggagcaaaatggtttgcaagcatcggtaaaccaaaaaatactggaacaaaaatttattgtatttctggcaacgtcaacaacccatgtaatgttgaagaagagatgggaatttcattaaaagaattaattgaaaaacatgcgggtggcgtgataggtggatgggaaaacttacaggcagtaataccaggaggttcttctatgccactacttcctaaaaaaatttgtgagacaattaatatggactttgattcacttgttgaacagaaaagtggattaggtacagctggaattgtggttataaataatgaccaagatataattaaatgtatggcaaggatagcaaggttttacaaacatgaaagctgtggacaatgtacaccatgcagagaaggagctggatggatgtggagaatgcttgaaagaatggcaaaaggcgaagcatcaagagatgaagttgacatgttaatggatgttactaaacaaatagaagggcatacaatttgtgcgtttggagaaggatctgcttggccagtacaaggtttacttagacattttaaaaaagaagttgctaaaagaaataattttaacccattagttaatagaaataagaaaattccttatcttgtggatcagcatttgttggaaaaataa

SEQ ID NO: 222539 - DNA, 1279 bp, Unknown
  Bacterial polypeptide expressing nucleotide sequence isolated from the Sargasso Sea
gatgcttaaagaagaagataagatttttaaaaacctatatggttttgaagattggtctttaaaaggggctatgcaaagaggcgtatggtcaaatacaaaagaaattattgaaaaaggatctgattttattgttgaagaaattaaaagtagtcaattacgtggaagaggaggtgcaggctttcctgcaggattgaaatggtctttcatgccgaaagactcaggcaaacctcattacttagtagtaaacgcagatgagtcagaaccaggaacatgtaaagatagagagatcatgagaaatgatcctcacttactattagaagggtgtttagttgcgggttttgctatgcacgcaaatgcttgctatatttatataagaggagaatattatagtgaagcttcgaatttacaaaaggcaattgatgaagcttatgttaacaatctaattggaaaaaatgcttgtggaagtaattgggattatgacatttatttgcatagaggtgcaggagcatacatttgtggagaagagactgcacttcttgaaagtctagagggtaaaaaaggacaaccaagattaaaaccgccatttccagctggagctggactctatggatgcccaacaacagttacgaatgtggaaaccattgcagttgctcctactataattagaagaggtgcttcttggtttaattctcttggaagagaaaataacacaggtacaaaaatttttagtatttcaggacacgtaaataacccctgtaatgtcgaagaagaaatgggtattggattaaaagagttaatcgaaactcatgctggtggtgttataggaggatgggataatttgttagctgtaattcctggtggagctagcgtacctttaattccaaaatcaatttgcgatactgtaaaaatggactttgatagtttgaaagaagtacaaagcggtcttggtactgcagcggtaatagtcatgaataaatctacagacattgttgatgcaatttgtagattgtctcatttttataaacacgaaagctgtggtcaatgtacaccatgcagagaaggaactggatggatgtttagaatgatggagaaaatggtcaaaggtgatgctgaagtaaatgacattgataaacttttagatgttaccaagcaaatagaagggcatacaatatgcgcgctaggggatgctgctgcgtggcctattcaaggtctaatgagacattttcgaccagaagttgagagaagaattaaagaatatagaataagtagggttgcataa

SEQ ID NO: 222540 - DNA, 463 bp, Unknown
  Bacterial polypeptide expressing nucleotide sequence isolated from the Sargasso Sea
atgttttctcctgataatattttcacaacaactattgataaagccgtgcgttggtcaagaacacaatccatgtggcctgttacttttggacttgcatgttgcgctattgaaatgatggctgcaggatctgcaaaatacgatttggcaagatatggaatggaggtatttagggcatcaccgagacaggctgatttaatgatagttgctggtagagtttctcaaaaaatggcaccagtattgagacaagtttatgaccaaatggcagagccaaaatgggtaatagcaatgggtgcttgctcttctactggggggatgtttaataactatgcccttgtacaaggtgttgaccatatagttcctgtagatatatatgtacctggatgtccacctggaccacaatcattaatgcacggaatcctgacacttcatcaaaaaattatggatagagagataaatagataat

SEQ ID NO: 222541 - DNA, 1849 bp, Unknown
  Bacterial polypeptide expressing nucleotide sequence isolated from the Sargasso Sea
atgagcctcctatacctgacttttctgtttccgctgctgggatggctggtgctggccttctccatcggtcgtttcggcgagcgcactgctgcgctcatcggcgtcggcagcatagggctgtcggccctcactaccctgtgggtcggcatcgatttcctcaataccataccaacgggcggcgtctatacccagaccctgtggcagtggatctcggtgggtaaattcacccccaccttccgcctggcgctggacggtctgtcgctgaccatgctcggcgtggtcaccggggtgggtttcttcatccacctgtttgcctcctggtacatgcgcggggaagagggctattcgcgcttcttcacctacaccaacctgttcatcgccagcatggtgttcttggtgctggccgatgacctgctgttcgtctacctcggctgggaaggcgtggggctgtgcagctacctgctgatcggcttctactaccgcaacccggccaacggcgccgccgccctcaaggcattcgtggtgacccgggtcggcgacgtgttcctcgccatcggtctgttcgtcctctaccgggagctgggtaccctcaacatccacgagttgctggtacgcgcaccgctgatgtttgccgagggctcccctgccctgtcgtttgcctgtctgatgctgctcggcggcgccgtcggcaaatcggcccagctgccgctgcaaacctggctggcggatgcgatggcgggcccgaccccggtctcggcgctgatccacgcggccaccatggtgaccgccggtgtctatctcatcgcccgtacccacggcctgttcctgctggcccccgagatcctgcatctggtggcgctggtcggtgccatcactctggtgctggcaggctttgcggccctggtgcaaaccgacatcaagcggatcctggcctactccaccatgagccagatcggctacatgttcctggccctcggtgttggcgcctgggaaggggccatcttccacctgatgacccacgccttcttcaaggcgctcttgttcctctccgccggtgccgtgatcgtcgcgacccaccacgagcagaacatcttcaagatggggggcctgcgcaagagcctgccgctggtctatgcctgcttcctggtggggggctcggccctggccgcgctgccactggtgaccgccggtttctacagtaaagacgccatcctgtggcaggtgcaggccagcggccagagcgccctgctgtgggccggtctgggcggtgccttcctcacctctctctacaccttccgcctgatcttcatcgccttccacggcaaggagcagacccaggctcacgccggtcacggcctggcccatcagctgccgctgctggtcctgctggtgctctccaccggtatcggtgccttgatcgtgccgccgctggcgggggtactgccggcagggccgggggatcacatcgaagaggggcgccatgggctggagatcacctccgccgtcatcgccatcgccggcattgccctggccgccttcctgttcctgggcgagcgccgcctggccagcagcgtggccaacagcgcgccgggcaagttgctcagcactctctggttcaatgcctggggctttgactggctttacgatcagctgtgggtcaagccgtatctgctggcgacccggctgctcggcaaggatccgctggactggatgatgaacctgccggcctggctggcacagagtggccaccagctgttggcctggaccgtttccggcaagttgcgctggtatgcagcctccatggggatgggcgccgccctgatcctggccctgctgctgctcggctgat

SEQ ID NO: 222542 - DNA, 817 bp, Unknown
  Bacterial polypeptide expressing nucleotide sequence isolated from the Sargasso Sea
tttgcggagaagaacagccttacttgaaagtattgaaggaaaaaaaggtcaaccaagattaaaacctccttttccagcattgattggactttatggatgcccaacaattattaataatgttgaaacgatagctgttgttcctacaattcttagaagaggtggaaaatggttttcctcattaggaagagaaaaaaatacaggtacaaaaattttttgtatttccggtaatgtaaataatccgtgtaatgttgaggaagaaatgaatattcctttaaaagaattaattgaggtccatgctggaggagttattggtggatgggaaaatttacaagctgtaattccaggtggttcatcaatgccactaataccaaaagaaaaatgtgagacattaaccatggactttgactcactaatggctgaaaaaagtggattaggaactgccggaattgtggttattaacaaggaccaggacattatcaaatgtatggcaagaatagctagattttataaacatgaaagttgtggacaatgtacaccatgtagagagggctcagggtggatgtggagaatgctagagcgaatggcaaaaggggaggctactaaagatgaagtggatatgcttggtgatgtaacaaaccaaattgcgggccataccatttgtgcgtttggtgaaggatcatcatggcctgtacagggattgctaagacattttaaaaaagaaattgaggaaaggaacaatttagaccctattgttcagaaaaaaaataatattccttatttagttgaccaacatttattagataaaaaaaatgcctaa

SEQ ID NO: 222543 - DNA, 805 bp, Unknown
  Bacterial polypeptide expressing nucleotide sequence isolated from the Sargasso Sea
aatgcttaaagatcaggatagaatatttaaaaatttatataatgacatgggcgcagatgttgctgctgctcaatcaagaggggattgggtaaaaacttcagatttaaccgcaaaaggcagagattggataattaacgaaataaaagactctcaattaagaggtagaggtggtgcaggtttccctactggtttgaaatggtcctttgctccaaaagaagttggttctagacctcattatttagtcattaatgctgacgagtcagaaccaggcacgtgtaaagatagagatattttaagatttgaacctcataaattaattgagggatgtttgatagcctcatacgctgttcaagcacatgtttgttatatttatatcagaggtgaatattttatagaaggtcaaaaattacaagcagccattgatgaggcttatgataagaagttattaggtaaagatgctgctggaactggatgggatttagatatctacattcattatggagcaggtgcttatatttgtggagaggaaacagctttacttgaaagtatagaaggcaaaaaagggcaaccaaggttaaaacctccttttccggcattgattggactttatggatgtccaacaattattaacaatgttgaaactattgctgttgtgccaacaattcttagaagaggtggaaagtggttttcctcgttaggaagagaaaaaaatactggtacaaaaattttttgtatatcaggtaatgtaaataacccatgcaatgtagaggaagagatgaacataccactaaaagagttaatagaa

SEQ ID NO: 222544 - DNA, 931 bp, Unknown
  Bacterial polypeptide expressing nucleotide sequence isolated from the Sargasso Sea
aaaacttcaaactgcaatcgatgaggcatataaaaataatttaattggtaaaaatgcgttaaattcaggatgggatttagatatttatattcattatggtgctggtgcttacatttgcggtgaagaaacggcactattggagagtttggaaggaaaaaaagggcaaccaagattaaagccaccatttcctgcattaattgggttatatggatgtcctactataattaataacgttgaaactgttgcagctgttcctacaattttaagaagaggtgcaaaatggttcagttctcttggaagacctaaaaatacaggaacaaaaatttattgtatttctggaaatgtcaataatccatgtaatgtagaggaagaaatgggagttccacttaaagaattaattgaaacacatgctggtggtgtaattggtggatgggacaatctcaaagcagtaatacctggtggttcctcaatgccaattttacctaaagaaatttgtgacaacatgaaaatggattttgatgcatgtgttgaaaataaaacaggactaggaacagcaggtattgttgtgatcaataatgaccaagacattattaaatgtatggcaagaatagctagattttataaacatgaaagttgtggtcagtgtacaccttgtagagaaggatctggatggatgtggagaatgttggaaagaatggcagcaggtgaggcaactccagatgaagtagatatgctttttgatgtaacaaaacaaatagaaggacatacaatttgtgcttttggtgaaggctcatcctggccagttcaaggattaatcagacatttcaaagatgaaatacttgaaagaaataaatttgatcctgtagtgaaaaaacaaaaaaatattccatatttagtagatcaacatatattagaaaaggaaaatgcctaa

SEQ ID NO: 222545 - DNA, 457 bp, Unknown
  Bacterial polypeptide expressing nucleotide sequence isolated from the Sargasso Sea
atgaatttagaagaaagaaaaaaaaatattccagaagaatttaaacaactagcacaagattttagtgataatggttttataacaacttcactagataatctagttaactgggctagaactggatcattacattggatgacttttggtctagcatgttgtgcagtagaaatgatgcaaacttcaatgccaagatatgatttagaaagatttggcgctgcacctagagcttcacctagacaatcagatgttatgattgttgctggaacacttacaaacaaaatggctccagcactaagaaaagtttatgaccagatgccagaaccaagatatgttatttctatgggaagttgcgcaaatggtgggggttattatcattattcttattctgtagtaagaggatgtgatcgtattgtaccagttgatgtatatgttccgcgggtgtcctccttctgctgaa

SEQ ID NO: 222546 - DNA, 1246 bp, Unknown
  Bacterial polypeptide expressing nucleotide sequence isolated from the Sargasso Sea
aatgattgggtcaaatactaaagatttaatatctaaaggtagagattggataatagatgaagtcaagttatcagaattaagaggaagaggcggcgctggttttcctacgggtttaaagtggtcatttgcacctaaagaagtgggttctagacctcattatcttgtaataaatgcagatgagtctgaacctggaacatgtaaagatagagacatattaagatttgagccccataaattaatcgaaggatgtttattagcatcttatgcagtaaacgcccacacttgttacatttatattagaggcgaatattatttcgaaggtcaaagattacaaaaagcaattgatgaagcttataaaaaaaatttaattgggaagaatgcctctaatagtggttgggatttagatatttatattcattatggagctggagcttatatatgtggagaggaaacagcactgttagaaagtctagagggtaaaaagggtcaaccaagattaaaaccaccttttccggctttagttgggttgtatggttgtccaacaattattaataatgttgaaactattgctgtaattccaactatattaagaagaggtggaaaatggttctcttcacttggaaaagcaaaaaatacaggtactaaaattttctgtatttcaggaaatgttaataaaccatgtaatgttgaagaggaaatgggagtacctttaaaaacattaattgaaaaacatgctggtggcgttgtcggtggttgggacaatctaaaagcagttataccaggtggatcttcgatgcctttattacctaaagaaatttgtgatacaattacaatggactttgactcgttagttaaagaaaaaagtggattaggaacagctggaattgttgttattaataaagaccaagatattataaaatgtatggcacgaatagccaggttttataagcatgaaagctgtggtcaatgtacaccttgtagagaaggttctggctggatgtggagaatgttagaaagaatggctaaaggtgaggcatctaaagacgaagtaaatatgttaatggatgtaacaaaacaaattgaaggacacactatatgtgcctttggtgaaggatcgtcttggccggtgcaaggtttaattagacattttaaaaaagagattgaagaaagaaataattttaatcctttagttaagaaggacagaaatattccatatttagtggaccaacatttgcttgataaataa

SEQ ID NO: 222547 - DNA, 535 bp, Unknown
  Bacterial polypeptide expressing nucleotide sequence isolated from the Sargasso Sea
atgggaatagggttttttaataaagaaaaagaaaaacaaattccacaagaatttaaacaaatcgcaaaggattttagcgaaaaagggtttgtaacgacttcatcagagaatttaataaattgggcgagaacaggatcccttcactggatgacttttggtctagcgtgttgtgcagtggaaatgatgcaaacatctatgcctagatatgatcttgaaagatttggcgcagcaccgagagcttcaccaagacaatcagatgttatgattgttgcaggaacattaacaaacaaaatggcagcgccacttagaaaagtttatgaccaaatgccagaaccaagatatgtaatatcaatgggtagctgtgccaatggtggagggtattatcattattcttattctgttgtaagaggttgcgatagaattgttccagtcgatatttatgtacctggatgtcctccatcggcagaggcattattatatggagtacttcagcttcagaaaaaaataagaagagaaggaactcaaaatagataat

SEQ ID NO: 222548 - DNA, 991 bp, Unknown
  Bacterial polypeptide expressing nucleotide sequence isolated from the Sargasso Sea
atgcttaaagacgaagatagaatatttcaaaatttatacaatgacagtggtgctgatattgagtctgctaaattaagaaatgattggaatggaacaaaagaaattttagaaaaaggaagagagtggataatcaatgaagttaaatcttcagaacttagagggcgtggtggagctggttttccaactggtctaaaatggtcatttgcacctaaagaagtagggtctagaccacattacctagttattaatgctgatgagtcagaacctggaacatgcaaagatagagatatattaagatttgaacctcacaaattaatagagggatgtttaattgcttcttacgcagtgaacgcccataaatgttatatttatattagaggtgaatattttaatgagggacaaaaacttcaaactgcaatcgatgaggcttataaaaataatttaattggtaaaaatgctttaaattcagggtgggatttagatatttatattcattatggtgcaggtgcctatatttgtggtgaagaaactgcactacttgagagtttagaaggaaaaaaaggtcaaccaagattaaaaccaccatttcctgcattaattggactttatggatgtcctacaatcattaataatgttgaaaccgtcgcggctgtgcctactattttaagaagaggagcaaaatggtttagctcacttggaagaccaaaaaacaccgggacaaaaatatattgtatttctggaaatgtaaataatccatgtaatgtggaagaagaaatgggaattccacttaaagaattaatcgaaactcatgctgggggtgttgttggtggttgggataatcttaaagctgtaatacctggaggttcatctatgccaatgttacctaaagaaatttgtgacaacataaaaatggattttgatgcatgtgtagagaataaaacaggacttggaactgctggaattgttgtaataaataatgatcaagatatcc

SEQ ID NO: 222549 - DNA, 670 bp, Unknown
  Bacterial polypeptide expressing nucleotide sequence isolated from the Sargasso Sea
aatgcttaaagatcaagatagaatttttaaaaatttgtataatgatatgggtgcggatgttaaatctgcgcagacaagaggcgattgggtaaatacctcagaattaatagcaaaaggaagagattggattattaatgaggtaaaagactcgcaactcagaggaagaggtggtgctggatttcccacaggtttgaaatggtcttttgctcctaaagaagtcggatctagacctcattatttgataattaatgcagacgagtcagaaccaggtacctgtaaggacagggatattttaagatttgagcctcacaaattaatcgaaggatgtctaataacctcttatgcagttcaagctcatgtttgttatatttatattagaggtgaatattttatagagggtcaaaaattacaatcagctattgatgaagcttatgaaaaaaatttaattggtaaaaatgctgctggaactggatgggatttggatatctacattcactatggagcaggtgcttatatttgtggagaagaaacggctttacttgaaagtatagaaggtaaaaaaggtcaaccaagattaaaacctccttttccagcattgattggactttatggatgtccaacaattattaataatgttgaaacgatagctgttgttccaactaattcttag

SEQ ID NO: 222550 - DNA, 523 bp, Unknown
  Bacterial polypeptide expressing nucleotide sequence isolated from the Sargasso Sea
atggacttagaagaaagacaaaaaaaaattcctgaagaatttaaaaaacttgctaaagaatttagcgaaaaaggttttataacaacatctttcgacaatttaattaattggtctagatcaggatctctacattggatgacatttggtcttgcttgctgcgctgtagagatgatgcaaacttcgatgccaagatatgatttagaaagatttggtgccgctcccagagcatcacctaggcaatctgatgttatgattgttgcaggaacgctaactaataaaatggcaccagcattaagaaaagtttatgatcagatgccagaacccagatatgttatttctatgggcagttgtgctaatggtggaggatattatcactattcatactcagtagtaagaggatgtgatagaattgttcctgtggatatttacgttcctggatgtccaccaagcgcagaagctttactatacggtattttgcaattacaaaaaaaaatcagaagagaaggttctatacaaagataat

SEQ ID NO: 222551 - DNA, 523 bp, Unknown
  Bacterial polypeptide expressing nucleotide sequence isolated from the Sargasso Sea
tatgaatttacaagacagaaaaaaagatattccagatgagtttaaacagttagcacaagactttagtgataacggttttataacaacatcactagacaatcttgttaattgggcaagaactggttcattgcattggatgacgttcggactagcttgttgtgctgttgaaatgatgcaaacatctatgccaagatatgatcttgaaagatttggtgcagcaccgagagcatcgccacgtcaatcagatgtcatgatagtagcaggtacgctaacaaataaaatggctcctgcattaagaaaagtctacgaccagatgcctgaacctagatatgtaatatctatgggaagttgtgcaaatggtggaggatattatcattattcatattctgtagtgagaggatgcgatcgagtggtaccagttgatgtatatgtccctggatgccctccctcagctgaagctctactttatggaatcttacagttacagaaaaaaattagaaataaaggttctttagaaagataa

SEQ ID NO: 222552 - DNA, 265 bp, Unknown
  Bacterial polypeptide expressing nucleotide sequence isolated from the Sargasso Sea
ttgctggccattaactaacaaaatggctccggctttaagaaaagtatacgatcaaatgcctgaacctagatatgttatttcaatgggtagctgtgcaaatggaggaggttattatcattattcttattctgttgtcagaggatgtgatagaattgtgccagtagacatatatgttcctgggtgcccgcccagtgcggaagctctattgtatggaattttacaattacaaaagaaaattagaagagaaggttcattaaaaagatga

SEQ ID NO: 222553 - DNA, 1333 bp, Unknown
  Bacterial polypeptide expressing nucleotide sequence isolated from the Sargasso Sea
aatgcttaaagatcgagatagaatttttcaaaatttatataacgataaaggctctgatgtagcagcgtcgcaatcaagaggtgattggataaacactaaagaaattactgacaaaggaagagattggattattaatgaaattaaagagtctcaacttagaggtcgaggtggagcaggatttcctacaggtttaaagtggtcatttgcaccaaaagaagttggatcaagaccacattatttagttattaatggtgatgagtctgaaccaggtacttgtaaagatagagatattttaagatttgaacctcataaactaatagagggttgcttgataacatcatatgcagttcaagcacatgtctgttacatttatattagaggagaatactttgttgatggtcaaaaactccaagctgcaattgatgaagcttatgaaaaaaaactattaggaaaaaatgcagctggaactggctgggatttggatatttatatccattatggagcaggagcgtatatttgtggagaggaaacagcattacttgaaagtttagaaggtaaaaaaggacaaccaaggttaaaaccacctttcccagctttgataggtttatatggatgcccaactataattaataatgttgaaaccattgctgtggttccaactattctacgaagaggagcgaaatggtttgcctctttaggaagagaaaaaaatactggtactaaaattttctgtatttctggaaatgttaataatccgtgtaatgtagaagaggagatgagtattcctttaaaagaattaatcgaagttcacgctggcggagtgattggtggatgggataatttacaagctgtaataccaggtggatcgtctatgcctttaattccaaaagatagatgtgaaacattaaagatggattttgatgcgtgtgtcgaagaaaaaagtggattaggaacagctggaatagttgttatcaataaagatcaagacattattaaatgtatggcgagaattgcaagattttacaaacatgaaagttgtggacagtgtacaccgtgcagagagggctctggatggatgtggcgaatgctagaacgtatggcaaaaggtgatgcaacaaaagatgaagtagacatgttaggtgatgtcacaactcaaattgctggtcatacaatttgtgcatttggcgagggttcttcgtggccagttcaaggtttgttaagacattttaaaaaagaaattcaagaaagaaataatttggacccaattgttcagaaaaaaaacaatataccttatttggttgatcaacatttattagataaaaaaaatgcttaa

SEQ ID NO: 222554 - DNA, 1636 bp, Unknown
  Bacterial polypeptide expressing nucleotide sequence isolated from the Sargasso Sea
tatggcccaattaattgtttttcttcctttaataggttttctattttgttttttctttggcaaaagatttaactttaaagtttcacaaatctttacaacatctttgctattcatatctgcaattttatcctggattttattcttttcatatattggagagagagaaactcaaataattcatattttcaactggttcacatcaggtaattttattgtcgactggtctattcgattggactcacttacaaccacaatgtttatagtggtatgtagtgtttcagcttgtgttcatctttactctattggatatatgagtgatgacccatcaaaagagagatttatggggtatttaagtctttttactttctttatgttgatgttagtctctagtaacaatctgctgcaaatgttttttggctgggaaggtgtaggcctagcttcatatttactaataggtttttggtatcataaaccatctgctaacaatgctgcaataaaggcttttcttgttaatagggtaggagattttggatatgccttgggtatagcaggtgttttttatatttttggatctattgagtttagtgttatttttgataatgcagaaagttttaaagatcattcaataaaatttataggtcttaactttagtacaattgatttattgtgttttcttttgtttattggcgcaatgggtaagtcagctcaacttggtttgcatacatggttacccgatgcaatggaagggccaacacctgtttcagctctaatccatgcagccacaatggtaacagctggtgtatttttagtagctagaatgagcccattatttgagtatgctttttttacaaatttatttattacttttataggagcttctactgctatatttgcagcaagtattgcacttactcaaaatgacataaaaagagtgatcgcgtattcaacttgtagtcaacttggctatatgttttttgctgctggtttaggagcttataatgcttcaatttttcatttgatgactcatggattttttaaagcattactatttttatcagctggatcagtaattcatgcaatgcaccatcagcaagatatgcgaaaaatgggtggattgtttaaaaaaattcctttcactggcacaatgatgtggataggatcacttgccattataggttttccatatttctctggctattactctaaggaaagtattttagaaaatgcttattattcaagttcatcaatggctacatttgcttatattattggaatcttaacggctcttttgacagctttttattcatggagattattatttatgacttttcatggtgagacaagatctgatttaaaaacctatgatcatgctcacgagtcaccacttgtaatgactattcctttgatattattggcttttggatcaatttttgcaggaatattattttcaaatttctatattggaaaattacaatattctttctggggagactccataattctgcatgatggtaaacatcattatttgccttttattcaaactttgattgttaaaagctctgtcgctttaggcgttataatagctgctctaatctatttctataaaaatcatttatctaaaaaattggctcataat

SEQ ID NO: 222555 - DNA, 475 bp, Unknown
  Bacterial polypeptide expressing nucleotide sequence isolated from the Sargasso Sea
ttggctcaagattttagcgataatggatttataacaacatctttagataatctggtaaactgggcaagaacaggatctctacattggatgacatttggattggcttgctgtgctgttgaaatgatgcaaacatcaatgccaagatatgatcttgaaagatttggagccgctcctagagcctcaccaagacaatcagatgtgatgattgtggcaggcacattaacaaacaaaatggctccagctttaagaaaagtttatgatcaaatgcctgaaccgagatatgttatatctatgggaagttgtgccaatggtggaggttattatcattattcatattctgttgtaagagggtgcgatcgaatagtacctgttgatgtttatgttcctggttgtcctccatctgcggaagctcttttatacggtattctacaattacaaaagaaaattagaaccaaaggttctttagaaagataaa

SEQ ID NO: 222556 - DNA, 1193 bp, Unknown
  Bacterial polypeptide expressing nucleotide sequence isolated from the Sargasso Sea
tattttaaaattaggtcatgaaaaaataatcgaaatggtaaagcaatctggattaagaggtagaggaggagccggtttcccttctggtttgaaatggtcatttatgccaaaagaagtcaaagacagaccacattacttagttgttaatgcagatgaatcagagcctggaacatgcaaagatagagatataatccggcatgagccacataagttaattgaagggtgtttgttagctggttttgctatgagggctcatgcggcatatatatacatccgtggtgaattttataatgaagcaaacgtacttcaaaaggctattgacgaggcatatgaacaaaaattaattggtcaaaatgcatgtggaagtggctggaaatttgatgtgtttcttcacagaggagctggtgcatatatttgtggagaagaaactgccttattagaatctctagaagggaaaaaaggtcaaccaagactaaagccaccatttccagctggcgttggtttgtatggatgcccaactactgttaataatgtagaaacaatagcagtctcacctacgattttaaaaagaggatctgattggttctcaaatcttggaagagaaaataatacaggatcaaaacttttttgtatttctggtcatgtgaaccaaccatgtaatgttgaagaagaaatgggtattcctttacgagaattgattgaaaaacatgcaggtggcgtaaagggaggttgggacaatttattagctgtaatacctggtggttcttctacaccacttttgaccaagaatgtatgtgatactattttaatggactttgattcattgaaaggtgctggttctggtctaggaacagctggagttattgtaatgaataaatcaactgatgtaataaatgcaataacaaaactttctcatttttataagcatgaaagttgtggtcaatgtacaccttgcagagagggtacaggttggatgtggagaatgatggaaagattagtaaaaggcgacgctgatattgaggaaattgatgttttgcttcaagttacaaaacaagttgaaggtcatactatttgtgcgttaggtgatgctgctgcatggccaattcaaggtttaattaaaaactttagacctttaatagaagagcgtattaataagtttgatgagttaaaaaatacaaaagcagccgaataga

SEQ ID NO: 222557 - DNA, 523 bp, Unknown
  Bacterial polypeptide expressing nucleotide sequence isolated from the Sargasso Sea
aatgaatttacaagatagaaaaaaagatatcccagaagagtttaaacaattagctcaagactttagtgataacggttttataacaacatcactagacaatcttgttaattgggcaagaactggctcattacattggatgacgtttggactagcatgttgtgctgtcgaaatgatgcaaacatctatgccaagatatgatcttgaaagatttggtgcagcaccaagagcatcgccacgtcaatcagatgtgatgatagttgcaggcacgcttacaaataaaatggctcctgcattaagaaaagtttacgaccagatgcctgaacctaggtatgtaatatctatgggaagttgtgcaaatggtggaggctattatcattattcatattctgtagttagaggatgcgatcgagtggtgcctgttgatgtatatgtccctggatgccctccgtcagctgaagcattactttatggaattttacagttacagaaaaaaattagaaataaaggttctttagaaagataa

SEQ ID NO: 222558 - DNA, 520 bp, Unknown
  Bacterial polypeptide expressing nucleotide sequence isolated from the Sargasso Sea
aatgaatttaaatgaacaaaaagaaattcctgaagagtttaaaaaaatagctaaagattttagcgaaaatggtttcataacgactagctttgataatttaataaattgggctcgatctggatcactgcactggatgacttttggtcttgcatgttgtgcagttgaaatgatgcaaacatcaatgccaagatatgatttagagagatttggagctgctccaagaggatcacctagacaatctgatgtgatgatagttgctggaactttaactaataaaatggcaccagctcttaggaaggtatatgatcaaatgcctgagcctaggtatgtaatatccatgggaagctgtgccaatggaggaggttattatcattactcatattctgttgtaagaggttgtgatagaattgttccagtagatatttacgttcccggatgccctccatcagcagaagctcttctatacggaattttacagcttcaaaaaaaaataagaaaccgcggatctatagaaagataa

SEQ ID NO: 222559 - DNA, 420 bp, Unknown
  Bacterial polypeptide expressing nucleotide sequence isolated from the Sargasso Sea
aatgaatttagagcaaagaaaagataaaatacctgatgagtttaaacaattagctcaagattttagtgataatggttttattactacctcattagacaacctagttaattgggctcgaacaggttcactacattggatgacatttggactagcttgttgtgccgtagagatgatgcaaacgtcaatgcctagatatgatttagagagatttggagcagccccaagagcctcaccaagacaatcagatgtgatgatagttgcaggaactttaacaaataaaatggcaccagccttaagaaaagtttatgaccaaatgccagaaccaagatacgttatttcaatgggcagttgcgcaaatggaggaggttactatcattattcatactatgtagtacgcggttgtgataaaattgtccctgt

SEQ ID NO: 222560 - DNA, 1273 bp, Unknown
  Bacterial polypeptide expressing nucleotide sequence isolated from the Sargasso Sea
aatgcttaatgaaaaagataaagtttttcaaaaccttcatggttttcaagaacccttcttagagggagctttaaaaagaggttcctggtcaaacacaaaagaaattttgtctaaagatcaaaatgatattatagaattagttaaatccagtcagttaagaggaagaggtggagctggattttctactggtcttaaatggtcattcatgccaaagaatactggtaaacagcattatttggtcgtaaatgctgatgagtctgaacccggtacttgcaaagatagagaaattattagaaatgacccacatactcttgtagaaggttgcttgattgcttcatacgcaattcaagccactaaatgttacatatacataaggggcgaataccatcacgaatatgtccaattagaaaaggcaattgaagaggcatatgaacgaggctttatcggaaaaaatgcttgtggtagcggatttgattttgatctttatgttcatagaggtgctggagcttacatatgtggggaagagacagctcttttagagagtttagaaggaaaaaaaggacaaccaagattaaaaccaccttttcctgctggtgtaggtttgtatggtatgccgacaactattaacaatgtggagtcaattgcagtagttccaactattttaagaagaggcccagattggtttaagtcaattggtgctgaaaataatacaggcacaaaaattttttgcatatctggtaatgttaataagccatgcacaatagaagaggaaatgggaataccacttaaagaattagttgaaaagcattgtgatggagttgagggaggatgggataacttaaaggcgatagtaccaggaggttctagtaccccaatgcttccaaaaaatatttgtgagtcagttctaatgaattttgatgatctaaaagctaatggctcaggtttaggtacagcaggagtgattgttgttaacaagaataatgatattgctgaggtgattgagagatttgctcacttttacaaacatgaaagttgtggtcaatgtacaccttgtagagaaggaacaggctggatgcatagaatgatgcagagattagttagaggagagatatctcctgaacaaatagagcttttagaaaatgttacaaagcaagtagagggtcatactatctgcgctttaggagatgcagcagcttggcctatacaaggactcattaaaaattttaaatcagagttaataagtaaatataataaaaagttaaaagcttcatga

SEQ ID NO: 222561 - DNA, 568 bp, Unknown
  Bacterial polypeptide expressing nucleotide sequence isolated from the Sargasso Sea
gagcgcgcaaaaaagaggtgactggaataatacaaaatcacttatcaaaaaaggacgcgattggatcattgatgaaatgaaaaaatctgagttaagagggcgcggcggcgctggctttccaacgggattgaaatggtctttcatgcctaaagaccctgctcagaataactatcttgttgttaatgcagatgagtctgaaccagggacttgtaaagatcgtgacatgataagaaatgaacctcataagcttatcgagggatgcctgctggcttctttcgccatgaacgcacacacttgttatatttacataagaggtgaatattttaatgaagctgttgttcttcagaatgcaattgatgaggcttatgaagcaggtttagttgggaagaatgctgctaattctggttgggattttgatatatatcttcaccgaggagcaggtgcctatatatgtggagaggagacggcgcttcttgaaagtcttgaaggtaaaaagggatttcctcgacttaaaccaccattccctgcgaataagggctctatatggatctccaacaactgtcaataa

SEQ ID NO: 222562 - DNA, 441 bp, Unknown
  Bacterial polypeptide expressing nucleotide sequence isolated from the Sargasso Sea
tatgaataataaaatagaccaggtacctgatgaatttaaacaacttgctgatgactttagtaagaatggatttattacaacttctctagataatttaattaattggtctagatcaggatcattacattggatgacatttggacttgcatgctgtgcagttgaaatgatgcaaacagctatgccaagatatgatttagaacgttttggcgccgctcccaggggatcaccaagacaatcagacgttatgatagtagctggtactttaactaataaaatggctccagctttaagaaaagtttatgatcaaatgcctgaacccagatatgttatttctatgggtagctgtgcgaatggaggtggatattatcattactcatattcggttgtaagaggctgtgatagaattgtacctgtggatatttatgtgcctggatgtcctcc

SEQ ID NO: 222563 - DNA, 1333 bp, Unknown
  Bacterial polypeptide expressing nucleotide sequence isolated from the Sargasso Sea
aatgcttaaagacgaagatagaatatttaaaaacctgtataacgatttaggtgcagatttaatatcttcaaaaaaaagaggagattggatcaatacaaaagaaatatgtgaaaaaggccgtgaatggattattaatgaagtaaaaacttcagaattacggggaagaggaggagcgggatttccaactggtttaaaatggtcttttgctccaaaagaagttggatctagacctcattatctagtaattaatgctgacgagtctgaacctggaacttgtaaagatcgagatatattaagatttgaaccgcaaaaactaatagaaggttgtttgataacttcttttgctgttaatgcccatgtttgttatatttatataagaggagaatattttaacgaaggtcaaaaacttcaaaaagctatcgatgaagcttatgcagcaggattaatcggaaaaaactcttcgggaactgattgggatttagatatttacatccattatggtgcaggtgcctatatttgtggagaggaaaccgctttacttgaaagtttagaaggtaaaaaaggccaaccaagattaaaacctccattcccagcattaattggattgtatggttgtccaactattattaataatgttgaaacaatatcagtagtgccaactatacttagaagaggaggaaaatggttttcttctcttgggcgttcaaaaaatactggaacaaaaatttattgtatatctggaaatgtcaataacccatgtaatgttgaagaagagatgggtatacctctaaaagatcttattgaaaaacatgcaggtggtgttgttggaggatgggataatttaaaagctgtaataccaggtggttcttcaatgcctttattacctaaaaaaatatgcgatactatcaaaatggactttgatgcatgtgttgagaataaaacaggtcttggaactgcaggaattgttgtaattaataacgatcaagacataattaaatgcatggcaagaattgccagattttacaaacatgaaagttgtggtcaatgtactccttgtagagaaggatcaggttggatgtggagaatgttagaaagaatggcaaaaggagaagccacaagggatgaaattgatatgctaatggatgttacaaaacaaattgaaggtcatacaatctgtgcatttggtgaaggctcagcatggcctgttcaggggcttatcagacattttaaagaagaaataattgaaagaaataaatttgatcctgttataaaacaaaaaaaagacattccatacttagtagatcaacacttattagaaaaagaaaatgcttaa

SEQ ID NO: 222564 - DNA, 538 bp, Unknown
  Bacterial polypeptide expressing nucleotide sequence isolated from the Sargasso Sea
aatgggaataaaatttggtttagcttcaaataaagaaaaacaaatacctgatgagtttaaagatctagcgaaagattttgctgaaaaagggtttattacaacttcctctgcaaatttgattaattgggctagaacaggctcattacattggatgacctttggacttgcttgttgtgcagttgaaatgatgcaaacatctatgccaagatatgatttggaaagatttggtgcagcccctagagcatcaccgagacaatcagatgtaatgattgtagctgggactttgacaaataaaatggcaccagctcttagaaaagtttacgatcaaatgccagaacctaggtatgttgtatcaatgggaagttgcgctaatggtggtggttattatcactactcttactcagttgtaagaggatgcgataaaattgtgccagttgacatttatattccaggctgccctccatctgcagaagctctgctctacggtattttacaattacaaaaaaaaataagaagagagggaaacttacaaaggtag

SEQ ID NO: 222565 - DNA, 922 bp, Unknown
  Bacterial polypeptide expressing nucleotide sequence isolated from the Sargasso Sea
aaacttcaagaagcaataaatgaagcttatgaaaaaaaattaattggtactaatgcttgtgacagtggatgggattttgacatatatatacattacggagcaggagcatatatttgtggagaggaaactgctttattagaaagtcttgaaggaaagaaaggccaacctagattaaaacctccatttccagcattaataggactttatggatgtccaacaattataaataatgttgaaacaattgctgtcgttccaactatattaagaagaggagcaaaatggttttcaagtattggtaaaccaaaaaatacgggaacaaaaatttattgtatttctggaaacgtaaacaatccatgcaatgttgaagaagaaatgggaattccattaaaagaattaattgaaaaacatgcaggtggtgttattggtggttgggaaaacctccaggcagtaataccaggcggttcttccatgccattactacctaaaaaaatttgtgagacaattaatatggattttgactctctagttgaacaaaaaagtggattaggcacagcaggcattgtcgttataaataaagatcaagatataattaaatgtatggcgagaatagcaagattttataaacacgagagctgtggacaatgcacaccatgtagagaaggatcaggatggatgtggagaatgcttgagagaatggcaaaaggtgaagcatcaagagatgaagtaaatatgctaatggacgttacaaaacaaatagaaggacatacaatttgtgcatttggagaaggatccgcctggccagtacaaggtttacttagacattttaaaaaagaagtggctaaaagaaataattttaatccattaattaataaaaataaaaaaataccttatctagtggatcagcatttattggaaaaataat

SEQ ID NO: 222566 - DNA, 517 bp, Unknown
  Bacterial polypeptide expressing nucleotide sequence isolated from the Sargasso Sea
aatgaacgataaaatagaacaagttcctgaagagtttaaacaacttgctaaagattttagtaaaaatggttttataactacatcgttggataatttaattaattggtctagatctggctctttgcattggatgacttttggtcttgcttgctgcgcagttgaaatgatgcaaacagcaatgccaagatatgacttagaaagatttggagctgctccacgtgggtcaccaagacaatcagatgtaatgattgttgctggaacattaacaaacaaaatggcaccagctttgagaaaagtttatgaccaaatgccagaaccaagatatgtaatttctatgggaagctgtgctaatggtggaggttattatcattattcgtattcagttgttagaggttgtgatcgtatagtccctgttgatgtatatgttccaggatgtcctccttcggcagaagctttattgtatggaattttacaattacaaaaaaaaataagaaaaaaaggatcttttataagatag

SEQ ID NO: 222567 - DNA, 1333 bp, Unknown
  Bacterial polypeptide expressing nucleotide sequence isolated from the Sargasso Sea
atgcttaaagatcaagatagaatattcaaaaatttatataacgatatgggttctgatgttgtttcttctcaaaaaagaggcgattgggttaacactaaagaaattacagacaagggtagagattggattataaatgaaattaaagattctcaacttagaggcaggggtggtgctggatttccaactggtttaaaatggtcttttgctcctaaagaagtaggttctagaccacattatttagttataaatggtgatgagtcagaaccaggtacatgcaaagatagagatattttaagatttgagccccataaattaattgaaggttgtttaatagcttcatatgcagttcaagcacatgtttgttatatctatataagaggcgaatactttgttgatggtcaaaaacttcaagcagctattgatgaagcttatgaaaaaaaattattaggtaaaaatgcagcaggtactggttgggatctagatatttatattcattatggtgctggggcttatatttgtggagaggaaaccgcattattagaaagtatcgaaggaaaaaaagggcagcctagattgaaaccaccattcccagctttaataggtctatacggatgtccaacaataataaacaatgtggaaactatagcagtagttccaacaattcttagaaagggtggaaaatggtttgcttctcttggaagagaaaaaaatacaggcacaaaaatattttgtatatctggaaatgtaaatactccgtgtaatgttgaggaagaaatgaatattccattaaaagaattaatcgaagttcatgctggaggagttattggaggttgggataatcttcaagcagttattcctggtggttcgtcaatgccattaataccaaaagaaaaatgtgaaacattaaccatggattttgactcacttatggctgagaaaagtggcttaggaacagctggtattgttgttatcaataaagaccaagacattattaagtgcatggcaagaattgctagattttataaacacgaaagttgtggtcaatgtactccttgtagagaaggatcaggttggatgtggagaatgcttgagagaatggcaaaaggtgatgcaacaaaagatgaagttgatatgttaggcgatgttacaaatcaaatagcaggacatacaatttgtgcttttggagaaggatcttcatggccggttcaaggacttttaagacattttaaaaaagaaatcgagaagagaaataatttagatcctattgttcagaaaaaaaataatattccttatttagtggatcaacacttgttggaaaaaaaaaatgcttaaa

SEQ ID NO: 222568 - DNA, 505 bp, Unknown
  Bacterial polypeptide expressing nucleotide sequence isolated from the Sargasso Sea
ttgaaacaaattccagaagaatttaaaaagttagcaaaagattttagcgacaaaggcttcatcactacttctttagataatctgatcaactggtcaagatctggatctctacactggatgacttttggtcttgcttgttgcgccgtagaaatgatgcatacatcaatgcctagatatgatttagaaagatttggagctgcaccaagagcatcaccaagacaatctgatgtaatgattgtagcaggaactttaactaataagatggctccagctttaagaaaggtatatgatcaaatgccagagccgaggtacgtaatttctatgggaagttgcgcaaatggtgggggttactaccattactcttattctgtagtaaggggttgtgataggatcgttccagttgatgtgtatgttccaggatgtccaccttcagctgaagctttattgtatggagttttacagttacaaaaaaaaataagaaatcaaggctctctagaaagataat

SEQ ID NO: 222569 - DNA, 1059 bp, Unknown
  Bacterial polypeptide expressing nucleotide sequence isolated from the Sargasso Sea
tggtaattaatgcagatgagtcggagcctgggacatgtaaggacagggaaataatgcggcatgaccctcatcacctgattgaaggtgctctatttgctggcttcgctatgggggcccatgtgacttatatttacataagaggtgagtatgtaagagagcgagaggctcttcaatgtgctttagatgaagcgtatgatagcgggttattaggaaaaaatgcttgtaaatcgggttgggcgtttgatgtgattcttcatcatggggctggcgcttatatttgcggtgaggaaactgctttattggaaagtctagagggtaaaaaggggatgcctcgcatgaagcctcctttcccggcaggtgctggtttatatggctgcccaacaacagtaaacaatgttgaaagcatagcagtagttccgacaatattacggaggggagcaagttggttttctagtattggaagggctaacaatgtaggaacaaaggtttttgcaatatctggacatgtaaattacccttgcgtagttgaggaagctatgtcgattccgctcaaggagttaattgaaaagcattgtggtggtgtcaggggaggttggaaaaatcttaaagcgataattcctggtggagcgtcagtccctcttttaccaccttctttatgtgatactgcaatcatggattttgattggctaaaagataatcaatcgggattaggtacggctgcggtgattgttatggacaattcggcggatgtaattaaagcaatatggagattgtctaaattttataagcacgagagttgtgggcagtgtactccttgccgtgagggtacaggttggatgatgcgagtaatggagcgtttagttaaaggtgaagcaaggattgaagaaatcgatatgcttcataaggttagtaaacaggttgaagggcatacaatctgtgcacttggtgatgcagctgcgtggcctatacaaggcctcattaggcattttaggagcgacctggaacagcgtattaccgaaagaaataaagttgggattaaatatgttgctgctgagtaaa

SEQ ID NO: 222570 - DNA, 931 bp, Unknown
  Bacterial polypeptide expressing nucleotide sequence isolated from the Sargasso Sea
aatgctagatattttggtcgttttcctgcctctcatcggctccgtaatggccggcattatcgtctttgtgcaggcggctgatagagaaaagcaacacagcctcgatatgcttgcccagtgggtaacctgcttaggccttgcgctatcgatgatctgcgccatcattgtgttcaatgacgtagctttagagggcaacgcgcgtacgacggagctgttcacctggatcgactccggcgcactcgaggcctcctgggcgttgaaggtcgacaccctaaccgccgtgatgatgatcgtcgtcaccgtggtctcagccatggtgcatatctattccgtcgggtacatgcaccacgacacagcgatcccacggttcatgtgctatctgagcttgttcaccttcttcatgctgatgctgatcacctccgacaaccttgtacagcttttcttcggttgggaaggggtgggattagcgtcctatctgctgatcggcttttggtacaacaaaccaacagccaacgctgcggccatcaaggcgtttctggtcaaccgagtgggcgattttggcttcgcactaggtatattcgccgtgttcatgctgttccagacagtggaactagacaccatattcgccgctgcagaaggaaagaaagacgccaccttcgttatctttggcgccgaagtgcatgcgctcacagcatgctgtctgctgcttttcgttggtgctatgggcaaatcggctcagttgggtctgcatacgtggctaccagacgccatggagggtccaaccccggtgtccgccttgatccatgccgcgaccatggtaactgccggcgtgttcatggtcgcgcgcctatctccaatcttcgagttctcagacacagcattgacagttgtgactttggttggcgcgacaacagcgatttcgccgccaccg

SEQ ID NO: 222571 - DNA, 1027 bp, Unknown
  Bacterial polypeptide expressing nucleotide sequence isolated from the Sargasso Sea
atgcttaaagacgaagatagaatttttaaaaatttatataatgatttgggatcagatattgattcagcgcaattgagagatgattggaaaaataccaaagaaatttgtggaaaaggtcgagaatggataataaacgaaattaaaatatccgaattaagaggccgaggaggagcgggttttccaactggattaaaatggtcttttgctcctaaagaagttggttcaagacctcattacttggttataaatgcagatgagtcagaacctggaacttgtaaggatcgcgatattttgaggtttgaacctcataaattaattgaagggtgtttaattacttcttatgcagtcaatgctcacatttgttatatctatataagaggggaatattttaaagaaggtcaaaaacttcagcaagcaattgatgaagcttataaaaaaaatttaataggcattaatgcttcggatacaggatgggatttagatatttatattcattatggagcaggcgcatatatctgtggtgaagaaactgctttattggaaagtttagaaggtaacaaaggtcaacctcgattaaagcctccttttccagctttaataggcttatacggatgtccaacaataattaataatgttgaaactattgctgttgtaccaacaatattaagaagaggtggaaaatggttttcatctttaggtagagcaaaaaatacagggacaaaaatttattgtatttctggaaacgtaaataatccatgcaatgttgaagaagaaatgggtattccattaaaagatttaattgaaaaacatgcaggcggtgttgttggtggatgggataatttaaaagcagtaattcctggaggatcttccatgccattattatcaaaaaaagtttgtgatactattaaaatggattttgatgcctgtgttgagaataaaactggacttggtacagccggaatagttgtaattaacaaagatcaagacattattaaatgtatggctagaattgctagattttataaac

SEQ ID NO: 222572 - DNA, 634 bp, Unknown
  Bacterial polypeptide expressing nucleotide sequence isolated from the Sargasso Sea
ttgggccgttacatttggaaccttgggcttatttggttttgtttcaatgatggtttttctagctattctaacaattggtttcatatacgagtggaaaaaaggagcattggagtggcaataaatacaaatattgaagagacaagtccagaactagaaagacttaagaagttgtatgctgacaaggggtttgttgtcaccagtatcaataatcttattaactgggctcgaacaggctctctgcattggatgacttttggattagcttgttgtgctgtcgaaatgatgcatgttggaacaccgcgctacgacgttgagcgttttggtgcagctccaagagcatcaccaagacatgcagacgttcttatagtggcaggtacattgacaaataaaatggcagcggcattaagaaaagcttacgatcagatgccagaacctcgatatgtaatctccatgggaagttgtgcgaatggtggagggtattatcactactcatattctgttgttagaggttgcgatagaataatacctgttgatgtttacgtgccagggtgcccacccacagcagaaggcctgctttatggattattgcagttacagaaaaaaataagaagagaaggcaacatcaaaagataat

SEQ ID NO: 222573 - DNA, 1021 bp, Unknown
  Bacterial polypeptide expressing nucleotide sequence isolated from the Sargasso Sea
aatgctcaaagatcaagatagaatatttacaaatatctacggcatgcatgacagatcgctttcaggagctagagccagagggcattgggacaatacagctaaaattataaagaagggccgtgattggatcgtggacgagatgaaggcctcaggtttacgcggtcgtggcggcgcgggttttccaactggactaaagtggtcttttatgcccaaggagagtgacggccggccggcgtacttggttgtcaatgctgacgaatctgagcccggtacatgtaaggatcgagaaataatgcgtcatgatcctcattcgttagttgaaggatgtttaatagccagcttcgctatgaacgcgaacgtatgctatatttatataaggggtgagtacattcgcgagcgcgaggcgcttcaagctgctattgatgaagcatacgaagcaggtctaatcggtaaaaacgcatcaaaatccggctggaagtttgatttattccttcaccatggtgctggtgcatatatttgcggtgaggaaacggccttattggaaagtttggaaggtaaaaagggaatgcctcgaatgaagccgccatttccagctggtgctggtttgtatggctgcccaacgaccgtaaataacgttgaatctatagctgttgttccaactattcttcgccgtggtgcagattggttttcgaatttcggtcgtgagaataatgccggaacaaaattatttgctatatccggccatgtaaatcatccatgcgtcgttgaggaagagatgtctattccatttgaagaacttattgaaaagcattgtggtggtatccgtggtggatggaaaaacttaaaggctgtaattccgggaggcgcttcagttccatgtgttcggggtggagaaatgcgagaagcactcatggattttgattaccttaggggagagttgggctctggcttgggaaccgcagcagttattattatggaccagagtacggacgtgatcaaagctatttggcgcctttctaaa

SEQ ID NO: 222574 - DNA, 1219 bp, Unknown
  Bacterial polypeptide expressing nucleotide sequence isolated from the Sargasso Sea
aatgcttaaagacgaagatagaatattcacaaacttatataatgaccaaggtgcagatattgtgtcagctcaaaaaagaagtgattggaaagatactcatgaaatcattaacaaaggaaaagaatggataattagtgaagttaaattgtcagaacttagaggcaggggtggagcgggttttccaactggacttaaatggtcttttgctccaaaggagattggtccaaaaccacattatcttgttattaatgctgatgaatccgaaccaggcacttgtaaagatagagatataatgagatttgaacctcataaattaatagaaggttgtttattagcatcttatgcagtcagcgctcacaaatgttatatttatataaggggtgagtatgctaatgaaggaaaaaaattgcagaatgcaattaatgaagcgtatgaaaaaaaattaatcggtaagaattcttgtaatagtggatgggatttagatatatatattcattatggagcaggagcatatatatgtggcgaagaaacagctttacttgaaagtttagaaggaaaaaaaggcctacctagattaaaaccacctttccctgcattaattggtttatatggatgcccaacaattataaataacgttgaaacaatagccgttattcctaccattctaagaagaggtggtaaatggtttgcatcacttggaagacctaaaaatacaggttcgaaaatttattgtatttctggaaatgtaaataacccatgtaatgttgaagaggaaatgggaataccactaaaggatttaatagaaaaacatgctggtggtgttgtaggaggttgggataatttaaaagcagttataccgggtggatcttctatgccattaataccaaaacaaatttgtgaaaatataaagatggattttgatgaatgtgttgagaataaaactggattaggcaccgcaggtattgtcgttataaataaagatcaagatatcatcaaatgtatggcaagaattgcaagattttataaacatgaaagctgcggtcaatgcacaccatgtagagaagggtctggctggatgtggagaatgcttgaaagaatggctaagggtgaagcctcacgagatgaagttgatatgcttatggacgttacaaagcaaattgaaggacatacaatttgtgcttttggtgaaggatctgcttggccagttcaggggctttaa

SEQ ID NO: 222575 - DNA, 463 bp, Unknown
  Bacterial polypeptide expressing nucleotide sequence isolated from the Sargasso Sea
aatgtatacacctgacaacattcttacaacaactatcgataaagcagtaaggtggtcacgaacgcaatctatgtggccagtaaccttcggtcttgcatgttgtgcaatagaaatgatggcagctggaagcgctaaatatgatttagcaagatacggaatggaagtttttagagcatctccaaggcaagcagatttgatgattgttgctggaagagtttcacaaaaaatggcccctgttttaagacaagtatatgaccaaatggcagatccaaaatgggttattgctatgggtgcttgttcatcaacaggtggaatgtttaacaattatgcattagttcagggagtagatcatattgtaccagttgatatttatgtaccaggttgtcctcccggaccacagtctttgatgcatggaattctaactttgcatgacaagattatggatggtgagataaatcgatga

SEQ ID NO: 222576 - DNA, 523 bp, Unknown
  Bacterial polypeptide expressing nucleotide sequence isolated from the Sargasso Sea
gatgacttttaataatcgagaaaaagaaataccagatgaatttaaacaattagctaaggattttagtgaaaatggttttattacaacatcctttgataatttagttaattgggcaagaacaggatcacttcattggatgacttttggattagcttgttgtgcagttgaaatgatgcaaacatcaatgccaagatatgatctagaaagatttggggcagcaccaagaggatcaccaaggcaatcagatgtaatgatagtggctggaactttaacaaataaaatggctccagctttaagaaaggtttacgatcaaatgccagaaccaaggtatgtaatttcaatgggcagttgtgcaaacggaggtggatattatcattattcttattctgtagttagaggttgtgatagaatagtgcctgtagatgtttatgtccccgggtgccctccatcagcggaagctcttttgtatggaataatgcaattacaaaaaaaaattagaaaacatggatctttaacaagataa

SEQ ID NO: 222577 - DNA, 890 bp, Unknown
  Bacterial polypeptide expressing nucleotide sequence isolated from the Sargasso Sea
gatgcttaaagaacaagataaaatatttaaaaatttatataatgaatatggttggagcattgacgattctttaaaaagagatgattggtctaacacaaaagaaataatatccaaaggaagagattggattataaatgaagtcaaattatctgagcttagaggaagaggtggagcaggttttccaacgggagttaaatggtcatttacaccaaaaaaaattggatcaaggcctcactatttggtcattaatgctgatgagtccgaacctgggacctgtaaagacagagatatacttaggttcgaaccacaaaaattaatagaaggttgtttaatatccgctttcgcagttaatgcacacgtttgttatatttatataagaggagaatatttcaatgaaggccaaaggttacaaaaagcaatagacgaggcttatcaaaaaaactttataggaaagaatgcttgtggatctggatgggatttagatattcacattcattatggagctggggcttatatttgtggtgaggaaactgcaatgctagaaagtttagagggtaacaaaggtcaaccaagattaaaacccccgttcccagctttagttggattgtatggctgtccgactatagtaaacaatgttgaaacaattgctgtagtaccaacaattttgagaaaaggtggaaagtggtttgcatcaatcggccgcccaaaaaacactggaacaaaaatattttgtatttcaggaaacgttaacaatccctgcaatgttgaagaagaaatgggtgtcccattaaaatttttgatagagaaatatgccggaggcgtcattggaggatggaaaaatttacaggctgttattccaggtggctcatcaatgccgcttatcccaaaag

SEQ ID NO: 222578 - DNA, 782 bp, Unknown
  Bacterial polypeptide expressing nucleotide sequence isolated from the Sargasso Sea
gggcaataaaggacaaccaagactaaaacctccttttcctgctttggtaggtttatatgggtgtccaactatagttaataatgtagaaacaatagcagtagttccaacaattttaagaagaggtggtaaatggttttcttcaatagggaaaccaaagaacacaggaacaaaaatattttgtatttcaggaaatgtaaactctccttgtaatgttgaagaagaaatgggcattcctttaaaagacttaattgaaaaacatgctggaggtgtaattggcggttgggataatcttcaagcagttatacccggtggatcttcaatgcctttattgcctaaaaaaatttgcgactcgatcacaatggattttgactcattaatagaaagtaaaagtggtttaggtactgcaggaattgtagttattaataatgatcaggatattgtagagtgtatggctagaatagctaggttttataaacatgaaagttgtggtcagtgtactccgtgtcgagaaggatcagggtggatgtggagaattcttgacagagtagttaaaagaaaagcaacttataatgacgtagaattactagcagatgtaactaaacaaattgaaggacatactatttgtgctttcggcgaagggtcagcatggccagttcaaggtttattaagacattttagaaaagaagtagaaagtcgatgcagagacaagcctttaattaagaaaaaattaaacaacccttatttagtagaccagcatttactggagaataaaaatgcctaaa

SEQ ID NO: 222579 - DNA, 1324 bp, Unknown
  Bacterial polypeptide expressing nucleotide sequence isolated from the Sargasso Sea
aatgcttaagcaagaagacagaatttttaaaaatttatataacgatctaggatctagtttaaatgactcttttaaaagagatgattggtcgaatacgaaagaattaatttctaaaggcaaagagtggataattaatgaagttaaactttctgaattacggggaagaggaggcgctggttttccaaccggtgttaaatggtcatttgctccaaaaaaagtaggctcaagaccacattacctaattatcaatgccgatgaatcagaaccaggcacatgtaaggatagagatataatgaggtttgaaccacaaaaattaatcgagggttgtttaataactgcttacgcagtaaatgcacacaaatgttatatttatattcgtggcgaatatacaaaagagggagagtatttacaaaaagccatagacgaagcatatgaaaaaaatttaattggaaagaacgcgtgtaattctggttgggatttggacatttatattcattatggagccggggcatatatatgcggagaagaaacggcattgttagaaagtcttgagggaaacaagggtcaacctagacttaaaccaccttttccagctttagttgggttgtacggctgtccgacaattgtaaataatgttgagactattgctgtggttccaacaattctaaggagaggagccaaatggtttgcctctttgggaagacctaaaaatacaggcactaaaatattttgcatatcagggaatgtaaataaaccgtgcaacgttgaagaagaaatgggtatatcattaaaagatttaatcgaaaagcacgcaggtggagtgattggtggatgggaaaatttacaagctgtaattcccggaggatcttcgatgcctctaataccaaaagcatcatgcgatacgcttaaaatggattttgactcgctggttgctgaaaaaagtggattaggaacagctggtgttattgttattaataaagatcaagatattttaaaatgtatggcaaggatcgctagattttataaacatgaaagttgtggtcaatgtactccttgtagagaaggctctggttggatgtggagaattttagaaagagcagcaaaaggcgaagctacacacaaagatattgatttactatcagatgttacaaaacaaattgagggtcacactatttgtgcttttggcgaaggttctgcttggccggtacaaggtcttcttagacactttagaaaagaaatagataagagatgttattctgaaccaattattaaaaaaagaaaaaatattccgtatttagtcgatcaacatttattagaaaaataa

SEQ ID NO: 222580 - DNA, 1261 bp, Unknown
  Bacterial polypeptide expressing nucleotide sequence isolated from the Sargasso Sea
tcaaaaaagaggtgactgggtaaatacaaaagaaattactgacaaaggtagagactggatcataaatgaaatcaaagactctcaattaagaggaagagggggagcaggttttcctacaggtctaaagtggtcatttgcaccaaaagaagttggatctagacctcactaccttgttattaatggtgatgagtcagagccaggtacttgcaaagatagagatatcttaaggtttgaaccacataaactaattgaaggttgtttaatagcatcatatgctattcaagcacatgtttgttatatttatataagaggtgagtattttgttgatggacaaaaacttcaagctgcaattgacgaagcttatgaaaaaaaattaattggaaaaaatgcatccggaacaggatgggatttagatatttatatacattacggtgcaggagcttatatttgtggggaagagacagcattactcgagagcattgaaggtaataaaggtcagccaagattaaagccacctttcccagcattaattggtttgtatggatgtccaacaataataaacaatgttgagaccatagctgtagttccaacaattcttagaagaggtggtaaatggtttgcttctttgggaagagaaaaaaatactggaactaaaatattttgtatttctggaaatgtaaataaaccatgtaatgttgaagaggaaatgaacatacctctgaaagaattaatagaagttcatgcaggaggtgtcataggtggttgggataatttacaagctgtcatacctggaggatcctcaatgccacttattcctaaagaaaagtgtgagacactaactatggattttgactctttagttgctgaaaaaagtgggttaggcacagcaggagtggttgtgataaataaagatcaagacataatcaaatgtatggcaagaattgccagattttataagcatgaaagctgtggtcaatgtacaccatgtagagaaggatcagggtggatgtggagaatgctcgagagaatggcgaaaggagaggcctcaaaagatgaaattgaaatgctaggtgatgtaactaagcaaattgaaggtcacaccatatgtgcctttggtgaggggtcgtcttggcctgttcaaggtttattgagacattttaaagatgaaattaaaaaaagaaataattttgatccaatagtgaaagaaactcaaaatattccttacttagtggatcagcacttattagataagaatgcttaa

SEQ ID NO: 222581 - DNA, 1171 bp, Unknown
  Bacterial polypeptide expressing nucleotide sequence isolated from the Sargasso Sea
tatggcagtcttagtccttttttctcctctaattggtgcgataatagccggttttttttataaggtcattggggaaagtacagctaaaattatatcggtttcaagtgtttttgtcagtgccgttttgagctggttcatttttatcggatttcagtctggtaacgtggaaaaagtttatattatgaattggataaattctggttctttgaatgtgtcatgggggatacgtactgatgccttgacagtagtcatgctagtagtagtcaacaccgtatctcttcttgttcacttatactcactgggctatatgtctcacgacaagaattggaatgaagctgaaaaatatcaggcgagattttttgcttacctatcattatttacattcgctatgttggtattggtaacttcggacaatttactccaactgttttttggctgggaaggcgttggtttagcctcatacttgttgattggcttttattataaaaaaccgtcggcgaatgccgcagccattaaagcatttattgttaatagagtaggtgattttggatttgcacttggtatttttgttatatttctccatacgggatctttatattttgatgatttatttgatcaactggttgagctgaaattactagaaacaaatttccttggttttaacgtcaaagtgatagaattagccgcttttttgttatttatgggtgctatgggcaagtcagcccaatttctacttcatacctggttaccagatgctatggagggtcctacgcctgtctctgcactgatacacgcggctactatggtaacggcaggtgtctttttagtctgcaggatgtcacctttaattgaaaatgcgccttttactgcgtcttttattacaataataggcgcgattacagccttttatgctgcgtcggtgggcttggtgcagaacgatataaagagaattattgcttactcgacatgttcccagctgggctacatgttcgtagcggcaggagtgggattttaccaagccgctatgtttcacttgttcacccatgctttttttaaggctctgcttttcctaggagcgggctctgtgattcattccatgcaccatgatcaagatgttcgcaactatggaggcttatataagaaaataccctatacctgcgtttttatggtt

SEQ ID NO: 222582 - DNA, 523 bp, Unknown
  Bacterial polypeptide expressing nucleotide sequence isolated from the Sargasso Sea
aatgaatttagaagaaaaaaaaaaacaaatacctgacgaatttaaacaacttgctcaagattttagtgataatggttttataacaacttcattagataatctagttacttgggcaagaacaggatctcttcattggatgacttttggtttagcttgttgcgctgtagaaatgatgcaaacatcgatgccacgttatgatttagaaagatttggggcagcaccaagagcatcaccaagacaatcagacgttatgatagttgcaggaactctaactaataaaatggcccctgcgttaagaaaagtttacgaccaaatgcccgaacccagatatgttatatcaatgggaagttgtgcaaatggtggtggttactatcattactcatattctgttgtaagaggttgtgacaggatagttcccgtagatgtatatgtaccaggttgtccaccatctgcagaagctcttttgtatggaattctgcaattgcaaaaaaaaattagaaacaaaggaagtttggaaagataa

SEQ ID NO: 222583 - DNA, 478 bp, Unknown
  Bacterial polypeptide expressing nucleotide sequence isolated from the Sargasso Sea
taaactaaattcagaattatcttcaaaaggttttttagtcgctagctatgataaaattcttacttgggctagaactggttctttatggccaatgacattcggattagcatgttgtggagtagaaatgatacattcttatatggcaagatatgatctagatcgttatggagtcataccaagaggtagtcctagacaatctgatgtaatgattgttgctggcacactaacaaataaaatggcaccggctttaagaaaagtttatgatcaaatgccagaacctcgatgggtaatatcaatgggctcatgtgcaaatggtggtggatattatcactactcgtattcagtagttagagggtgtgataggatagttcccgttgatgtttacgtaccaggatgccccccaacagcagaagcattagtttacggtatattgcaattacagaaaaaaattagaagagaaaataaatttaaaagataa

SEQ ID NO: 222584 - DNA, 529 bp, Unknown
  Bacterial polypeptide expressing nucleotide sequence isolated from the Sargasso Sea
atggaaaaaaggtgcattggaatgggattaattgacaatgaaaatataaaaaagttgtcagcagaaattgataataaaggcttttttgttacctctacagaagctttgataaattgggcaagaacaggctcacttcattggatgacatttggtctcgcctgttgcgcaatcgaaatgtttcaaacaaatggtcctcgctatgatttagaaagatacggagcggctccgagaggttctcctcgtcaatctgatgtaatgatagttgctggaacactaacaaataaaatggctccagcaatcagaaaagtatatgaccaaatgcctgaaccaagatatgtgatttcaatggggtcatgcgctaatggcggaggttattatcattattcttattcagttgtaagaggttgtgacagaattttaccagtagatatttatgtacctggatgtccacctacagcagaagctcttatgtacggaatccttcagctacaaaagaaaatcagaagaacaggaacaatagaaagataga

SEQ ID NO: 222585 - DNA, 907 bp, Unknown
  Bacterial polypeptide expressing nucleotide sequence isolated from the Sargasso Sea
aatgcttaaagatcaagatagaatttttcaaaatttatataatgacaaaggttcggatatatcttcatcacaagaaagaggtgattgggtaaatacaaaagaaattactgataaaggaagagactggataattaatgaaattaaagaatctcaattaagaggtcgaggtggggcaggatttcctacaggtttaaaatggtcgtttgcaccaaaagaagttggatctagaccacattacttagttattaatggcgatgagtctgaaccgggaacttgcaaagatagagatattttaagatttgagcctcataagttaatagaaggttgtttaattgcatcttatgcagtgcaagcacatgtttgttatatttatataagaggagaatattttgttgatggtcaaaaacttcaggctgcaatagatgaagcttatgagaaaaaactcttaggtaaaaatgcagcaggtactggttgggacttagatatttatattcattatggtgctggtgcatatatttgtggagaggaaacagctttattagaaagtatcgaaggtaaaaaaggacaaccaagattaaaaccaccattccctgctctaattggtctttatggatgtccaacaattattaacaacgtagaaactatagctgtagtcccaacaattcttagaagaggtggaaaatggtttgcttctcttggaagagaaaaaaatacaggaacaaaaatattttgtatatctggaaatgtaaatacaccatgcaatgttgaggaagaaatgaacattcctttaaaagaattaattgaagttcatgcaggtggtgttattggaggttgggataatcttcaagcagtaattcctggtggatcatcaatgcccctaattccgaaagagaaatgtgaaacatta

SEQ ID NO: 222586 - DNA, 616 bp, Unknown
  Bacterial polypeptide expressing nucleotide sequence isolated from the Sargasso Sea
aatggctgatttatcggacataaaacacaagcttggtttaggcgatgacggacttgctggtctcggtcacaacatcatcaccgcaccggtagaagagctcgtcaaatgggctcgccggcgaagcttgatgccggccacattcgggttggcatgctgcgcaatagaaatgatggccacgggaacagctcactatgacatggcgcgatacggcatggaaaccttccgagcctcacccagacaagccgatctgatgattgtggctgggcgcgtaagccagaaaatggctcccgtcctcagacagatctatgaccagatgatggaaccgaaatgggtaatcagtatgggggtgtgtgcgtctagcggcggcatgtttaacaactatgcaattgtgcaaggtgttgaccaagtagtcccggttgatatttatgcccctggctgtccccccggtcctgaaacactgctacatgcgatcctcgcgttacacgaaaagatccgcacaggcgaactcacccaaagacgtgccgctacggggagaggagcggaaattgaattggggcacgaccaagctatagatgcccaaccagaaccggttgtgattcgaaccgggggcctatag

SEQ ID NO: 222587 - DNA, 604 bp, Unknown
  Bacterial polypeptide expressing nucleotide sequence isolated from the Sargasso Sea
aatgcttaaagacgaagatagaatttttacgaacttatataatgaccttgggtcagatatttcatcggctcaaaaaagaggagattggcaaaacactaatgaaattataaaaaaaggtaaagaatggataattaatgaaattaaatcctctgagcttagaggccgagggggagcaggttttccaaccggactcaaatggtcatttgcccccaaggaagttggctcaagaccccattatcttgttattaatgccgatgaatcagaaccaggaacttgtaaagacagagacattttaagatttgaacctcacaaattaatagaaggttgtttgctagcagcttacgcagttaatgctaataaatgttatatttatataagaggcgaatattttaacgaaggtaataaacttcaagaagctataaatgaagcttatgaaaaaaaattaatcggagttaatgcttgtgatagtggatgggattttgacatatatgtgcattacggtgcgggtgcatatatttgtggtgaagaaactgctttgttagaaagtcttgaaggaaagaaaggtcagcctagattaaaacctcctttcccagccattaatagg

SEQ ID NO: 222588 - DNA, 919 bp, Unknown
  Bacterial polypeptide expressing nucleotide sequence isolated from the Sargasso Sea
gctattgatcaagcttatgaaaaaaattttttaggaaaaaatgcctgcagttcaggttgggacttcgatattcatattcattacggagctggagcttatatttgtggagaggaaactgctttattagaaagtattgagggaaataaaggacaaccaaggttaaaacctcctttcccagctttagtagggttatatggttgcccaacaattgtaaataatgttgaaacaatagctgttgttccaacaatattaagaagaggcggtaaatggttcgcatcaattggaaaaccaaaaaatacaggaactaaaatattttgtatatctggaaatgtaaactcaccttgtaatgttgaagaggaaatgggaattcccttaaaagaattaatcgataaacatgcaggaggagtagtcggcggttgggaaaaccttcaagctgtaattcctgggggctcatcaatgcctttacttccaaaaaaaatatgcgatacaattacaatggactttgattctttaattgagaataaaagcggtttaggaacagctggaatagtagttatcaataaagatcaagacatcattgcttgcatggcgagaatagcaaggttttataaacatgaaagttgcggtcaatgtactccatgtagagagggcgcaggatggatgtggagaattcttgatagagttgttaaaagaaaagctacatttagcgatatagatctattgtctgatgtaacaaaacaaattgaaggccatacaatttgtgcatttggagagggatcagcttggcctgtgcaagggttgctaaggcatttcaggaaagagatcgatagtcgttgtagagatgaacctttaattaaaaaaagaacgaataacccctatttagtagatcaacatttattggaaaataagaatgcctaaa

SEQ ID NO: 222589 - DNA, 1339 bp, Unknown
  Bacterial polypeptide expressing nucleotide sequence isolated from the Sargasso Sea
atgcttaaagacgaagatagaatatttaaaaatttgtataatgatttaggagctgacttgagctcctcaaaaaaaagaggcgattggacaaatactagagatttatgcgacaaaggtagagaatggattattgatgaagttaaaaaatcagaattaagaggaagaggtggcgcaggttttccaacaggtttaaaatggtcatttgcacctaaagaagttggatcgaggcctcattaccttgtgattaatgcggatgagtctgaaccaggcacttgtaaggatagagatatattaagatttgaacctcacaaacttttagaaggttgtttaatttctgcttacgctgttaacgcacatgtatgctatatttacttaagaggtgagtattacaatgaaggtgtagaattacaaaaagcaattgatgaggcttacaaagataatttaattggtaaaaatgcatctggaactggttgggatttagatatttacattcattatggagctggagcatacatatgtggtgaagaaacagctttgcttgaaagtattgagggtaataaaggccaaccgagattaaaaccaccttttcctgcactagttggattatatggttgtccaacaatagtaaataatgttgaaactgtttcggttgttcccacaattcttagaaaaggttctaaatggtttgcatcattaggcaaaccaaaaaatactggtactaaaattttttgtatttcaggaaatgtaaacaaaccttgtaatgttgaagaggagatgggtattcctttaaaagatttaattgatactcacgctggtggagtaataggtggatgggaaaatttacaggcagtcatacctggtggttcttctatgcctttattaaataaagaaatttcggaaaagataactatggattttgactcattagtagaaaataaaagcggactaggaaccgcaggaatagttgttattaataaagatcaagatattattaaatgctttgcaagaatagcaagattttataaacatgaaagttgtggtcaatgcactccttgtagagaaggctcgggttggatgtggagaattttagagagaatggctaaaggcgaggcatcgagagaggaagttgaaatgttgtttgatgttacaaaacaaatagaaggtcatactatttgtgcttttggtgaaggatctgcttggccggtgcaaggacttttaagaaatttcaaaaaagagattattaaaagaaataactttgatccattaattaagtcaaataaagatatcccatacctagtagatcaacacttgttagaaaaagatatatgcccaaaataaa

SEQ ID NO: 222590 - DNA, 391 bp, Unknown
  Bacterial polypeptide expressing nucleotide sequence isolated from the Sargasso Sea
actggatgacttttggtttgcttgttgcgcagtggaaatgatgcaaacatctatgcctagatatgatcttgaaagatttggtgcggcaccaagagcttcaccaagacagtctgacgttatgattgttgcaggaacattaacaaacaaaatggcagctccacttagaaaagtttatgaccaaatgccagaaccaagatatgtaatatcaatgggtagctgtgctaatggtggaggctattatcattattcttattctgtcgtcagaggctgcgatagaattgtaccagtagatatttatgtgcctggatgtcctccatcagcagaggcattattgtatggagtgcttcagcttcagaaaaaaataagaagagaaggaactcaaaatagataa

SEQ ID NO: 222591 - DNA, 1333 bp, Unknown
  Bacterial polypeptide expressing nucleotide sequence isolated from the Sargasso Sea
aatgcttaaagatcaagatagaatatttaaaaatttatataacgatatgggttccgacgttgtttctgctcaaagtagaggtgattgggtcaatactaaagatattacagacaaaggtagagattggattataaatgaaattaaaaattctcaacttagaggcaggggtggtgctggatttccaactggtttaaaatggtcttttgctcctaaagaagtaggttctagaccacattatttagttataaatggcgatgagtcagaaccaggaacgtgcaaagatagagatattttaaggtttgagccacataaattaatagagggttgtctaattgcatcatacgcagttcaagcacacgtttgttatatttatattagaggtgaatactttgtagatggtcagaaacttcaagcagctattgatgaagcttatgaaaaaaaattattaggtaaaaatgcagcggatactggttgggatttagatatttatattcattatggtgctggagcttatatttgtggagaggaaactgccttattagaaagtatagaaggtaaaaaagggcaacctagattgaaacctccttttccagccttaattggtctatacggatgtccaacaataataaataatgtggaaactatagctgtagtaccaacaattcttagaagaggtggaaaatggtttgcttctcttgggagagaaaagaacacaggcacaaaaattttttgtatatctggaaatgtaaataccccttgcaatgttgaagaagaaatgaatattccattaaaagaattaatcgaagttcatgctgggggagttatcggaggttgggataatcttcaagcagttattccaggcggttcgtcaatgccattgattcctaaagagaaatgtgaaacattaacaatggattttgactcactgatggctgagaaaagtggcttaggaactgcaggtattgttgtaatcaataaagaccaagacattattaagtgcatggcaagaattgctagattttataaacacgaaagttgcggtcaatgtactccttgtagagaaggatcaggttggatgtggagaatgcttgagagaatggcaaaaggtgatgcaacgaaagacgaagttgatatgttaagtgatgttacaaatcaaatagcaggacatacaatttgtgcttttggagaaggatcttcatggccggttcaaggactattaaggcattttaaaaaagaaattgagaaaagaaataatttagaacctatcgttcagaaaaaaaataatattccttacttggttgatcaacacttactggataaaaaaaatgcttaa

SEQ ID NO: 222592 - DNA, 1168 bp, Unknown
  Bacterial polypeptide expressing nucleotide sequence isolated from the Sargasso Sea
atgcttaaggatcaagatagaatttttcaaaacttatacaatgatttgggacctgatcttacttcatctcaaaaaagaggtgattgggtgaatactaaagaaataacggataagggcagagactggattataaatgaaattaaagactcacaacttagaggaagaggtggcgcaggttttccaacaggtttaaaatggtcttttgcacctaaagaggtcggctctagacctcattatttagtgattaacggtgatgagtctgagccaggtacttgtaaagatagagatattttaagatttgaacctcataaattaatcgaaggttgtttgattgcatcttatgcaattcaagcacatgtttgttacatttatattagaggagaatattttgtagacggacaaaagctacaagcagcaattgatgaagcttatgaaaaaaaactactaggtaaaaacgctgcaggcactgggtgggatctagatatttatattcactatggagctggagcatatatttgtggagaagaaactgcattactcgaaagtattgaaggaaaaaaaggtcaaccaagattaaagcctccttttccagcactaattggactttatggttgcccaacaataattaataatgtggaaactatagctgttgtaccaactatattaagaagaggtgggaaatggtttgcatctttaggaagagaaaaaaatacgggtaccaaaattttttgtatatctggaaacgtaaataatccttgtaatgttgaggaagaaatgaacattccactaaaagaactaattgaagtacatgccggtggtgtcataggtggctgggataatttacaagctgtcatacctggtggatcatcaatgccattaataccaaaagaaaaatgtgagactttgactatggacttcgactcattaatggctgaaaaaagtggattaggtacagctggtgtagttgtgattaataaagatcaagacattataaaatgtatggctcgaatagcgagattttacaaacatgaaagttgtggccaatgcacaccttgtagagaaggttcgggctggatgtggagaatgcttgaaagaatggcaaaaggagaagcgtcaaaagatgagatagacatgttgggtgatgttacaaaacaaatagaaggtcata

SEQ ID NO: 222593 - DNA, 523 bp, Unknown
  Bacterial polypeptide expressing nucleotide sequence isolated from the Sargasso Sea
atgaatttacaagataaaaaaaaagatattccagatgaatttaaacaattagctcaagattttagtgataacggttttataacaacatcattagataatcttgttaattgggcaagaactggttcactgcattggatgacgttcggactagcttgttgtgctgttgaaatgatgcaaacatctatgccaagatatgatcttgaaagatttggtgcagcaccgagagcatcgccacgtcaatcagatgttatgatagtagcaggtacgctaacaaataaaatggctcctgcattaagaaaagtttacgaccagatgccagaacctagatatgtaatatctatgggaagttgtgcaaatggtggaggttattatcattattcatattccgtagtaagaggatgcgatcgagtggtacctgttgatgtttatgtccctggatgccctccctcagctgaagcattactttacggaattttacaattacagaaaaaaattagaaataaaggttctttagaaagataat

SEQ ID NO: 222594 - DNA, 538 bp, Unknown
  Bacterial polypeptide expressing nucleotide sequence isolated from the Sargasso Sea
aatgggagtaaaatttgatcttaacgcagacaaacaaaagcagatacctgaagaatttaaagatttagcaaaagattttgcggaaaagggttttataacaacctcatctgaaaatttaattaattgggctagaacaggatcgttacactggatgacatttggtttagcatgttgcgccgttgagatgatgcaaacttcaatgccaagatacgatctagaaagatttggagcagctcctagagcttcaccaagacaatccgatgtaatgattgttgctggaacattaactaataaaatggctccagctttaagaaaagtgtatgatcaaatgccagaacctagatacgtagtatcaatgggtagctgtgctaatggaggaggttattatcattactcatattctgttgttagaggatgtgataaaatcgtgccagtagatatttatatcccgggctgccctccttctgcggaggctctactctatggcatcttacaattacaaaaaaaaatcagaagagaaggaaacttacaaagataa

SEQ ID NO: 222595 - DNA, 1001 bp, Unknown
  Bacterial polypeptide expressing nucleotide sequence isolated from the Sargasso Sea
gccaaaagattctgaaaaagatcattacctagttgttaatgcagatgagtcagaaccaggtacatgcaaagatcgagaaattatgagaaatgaccctcatcttcttttagaaggttgctttgttgctggctttgcaatgcatgcacacacctgctacatttacataaggggtgaatattattctgagtcttctaatttacaaaaagcaatagatgaagcatatgcaaataatttaattggtaaaaatgcatgtggtacaggatgggattttgatatttatcttcacagaggagcaggagcatatatttgtggagaagaaactgccttacttgaaagtttagagggtaaaaaaggccagcctcgattaaagcctccatttcctgctggtgcaggtttatatggatgtcctacaacagttacaaatgttgaaacaattgctgtttctccgactattttaagacgtggttctaaatggtttgctaatttaggtagtgcaaataatacaggtacaaaaatttttagtatttctggacacgtaaataacccttgtaatgtagaagaagaaatgggcataccacttaaagatcttattgaaaagcatgcaggtggggtaattggtggttgggaaaatttattagctgtaattcctggaggcgcaagtgtacctttattacctaaatctatttgtgatactgttaaaatggattttgatagcctaaaagaagttcaaagtggactaggaactgcggctgttattgtaatgaataaatcaacagatattgttgaagcaatagctagattatcacatttttataagcatgaaagctgtggtcaatgcacaccttgcagagaaggtactggatggatgtacagaatgatggaaaaaatgattcatggaaatgttaaacatgaagatattgataaaattttagatgtgactaagcaaattgaaggccatactatttgtgccttaggcgatgctgccgcttggcctattcaag

SEQ ID NO: 222596 - DNA, 1333 bp, Unknown
  Bacterial polypeptide expressing nucleotide sequence isolated from the Sargasso Sea
atgcttaaagatcaggatagaatatttaaaaacttatataatgacatgggcgcagatgttgctgctgctcaaacaagaggggattgggtaaatacctctgatttaacctcaaaaggaagagattggataattaacgaaataaaagactctcaattaagaggtagaggaggtgcaggtttccccactggtttaaaatggtcttttgctccaaaagaagttggttctagacctcattatttagtcattaatgctgacgagtcagaaccaggcacgtgtaaagatagagatattttaagatttgaacctcataaattaattgagggatgtttgatagcctcatacgctgttcaagcacatgtttgttatatttatatcagaggtgaatattttatagagggtcaaaaattacaaacagccattgatgaggcttatgaaaagaagttattaggtaaagatgctgctggaactggatgggatttagatatctacattcactatggagcaggtgcttatatttgtggtgaagaaacagctttacttgaaagtatagaaggcaaaaaagggcaaccaaggttaaaacctccttttccggcattgattggactttatggatgtccaacaattattaataatgttgaaactatagctgttgtgccaacaattcttagaagaggtggaaagtggttttcctcattaggaagagaaaaaaatactggtacaaaaattttttgtatatcgggcaatgtaaataatccatgcaatgtagaggaagagatgaacataccattaaaagagttaatagaagttcatgctggtggagtaattggtggttgggaaaacttacaagcagtaattccaggtggatcatcaatgcctctaataccaaaagaaaaatgtgaaacgttaacaatggactttgactcgctaatggctgaaaaaagtggattaggtactgcaggaattgttgttattaacaaagatcaagacattattaaatgtatggcaagaatagccagattttacaaacacgaaagttgtggtcaatgtactccatgtagagaaggttcaggttggatgtggagaatgttagaaagaatggcaaaaggagacgctactaaagatgaggtagaaatgctaggtgatgtaacaaaccaaattgccggacatacaatttgtgcatttggagaaggatcttcttggccagtacagggattgttaagacattttaaaaaagaaattgaggaaagaaacaatttagatccaattgtacagaaaaaaaataatattccttacttagtcgaccaacatttattagataaaaaaaatgcctaaa

SEQ ID NO: 222597 - DNA, 517 bp, Unknown
  Bacterial polypeptide expressing nucleotide sequence isolated from the Sargasso Sea
atgaataataaaatagatcaggtacctgatgaatttaaacaacttgctgatgactttagtaagaatggatttattacaacttctctagataatttaattaattggtctagatcaggatcattacattggatgacatttggacttgcatgctgtgcagttgaaatgatgcaaacagctatgccaagatatgatttagaacgttttggcgccgctcccagaggatcgcctagacaatcagacgttatgatagtagctggaactttaactaataaaatggctccagctttaagaaaagtttatgatcaaatgcctgaacccagatatgttatttctatgggtagctgtgcgaatggaggtggatattatcattactcatattcggttgtaagaggctgtgatagaattgtacctgtggatatttatgtgcctggatgtcctccttccgcagaagccttactgtatggaatattacaacttcaaaaaaagattagaaacaaaggttcaattacaaggtaat

SEQ ID NO: 222598 - DNA, 302 bp, Unknown
  Bacterial polypeptide expressing nucleotide sequence isolated from the Sargasso Sea
agaagcttcacccagacaatcagatgtaatgattgttgctggaacattaacgaacaaaatggctcccgctcttagaaaagtttacgatcaaatgcccgaacctagatatgttatatcaatgggaagttgtgctaatggtggaggttattatcactattcttattcagtagttagaggatgtgatagaatagtacctgttgatgtttatgtgccaggctgcccaccttctgctgaagcgcttttatatggaataatgcaattgcaaaaaaagattagaaataaaggttctattgataggtaag

SEQ ID NO: 222599 - DNA, 523 bp, Unknown
  Bacterial polypeptide expressing nucleotide sequence isolated from the Sargasso Sea
aatgaatcttacagagaaacaaaaaaaaattccagatgagtttaaagaattagcaaaagaatttggtgaaaaaggatttattactacatctttagataatttagtaaactgggctagaacagggtctctacactggatgacttttggtttggcttgctgcgcagtagagatgatgcatacatctatgcctcgatatgatttagaaagatttggagcagcacctagagcatctccacgtcaatccgatgttatgattgttgcaggtacacttacaaacaaaatggcacctgcattaagaaaagtgtatgaccaaatgccggaacccagatatgtgatatcaatgggcagttgtgcaaatggtggtggttattatcactactcttactcagttgtaagaggttgtgatagaattgtacctgttgatgtttatgttcctggatgtccaccgtctgccgaagcattattatacggcataatgcaattgcaaaaaaaaataagaaataaaggttcaatacaaaggtag

SEQ ID NO: 222600 - DNA, 517 bp, Unknown
  Bacterial polypeptide expressing nucleotide sequence isolated from the Sargasso Sea
tttgatagacagagaaaaacaaatacctgaagaatttaaagatcttgcaaaagaatttgctgataaaggatttataaccacttcaatggataatttaattaattgggctcgttcaggttctttacattggatgacgtttggtcttgcatgttgtgctgtagaaatgatgcaaacatctatgccaagatatgatttagaaagatttggagcagcccctagagcatcacccaggcaatcagatgtaatgatagttgcgggaacattaacaaacaaaatggcaccagctttaagaaaagtttatgatcaaatgccagaacctagatatgtaatttctatgggtagctgtgcaaacggaggtggatactatcattactcttactcagttgttagaggttgtgacagaatagttccggtagatgtttatgtgcctggttgccctccttcagctgaagcattgttgtatggaatattgcagcttcaaaaaaaaataaggaatcgtggatctttgcaaagataa

SEQ ID NO: 222601 - DNA, 760 bp, Unknown
  Bacterial polypeptide expressing nucleotide sequence isolated from the Sargasso Sea
attaaaacctcctttccctgcattagtcggattgtatggatgcccaacaatagtaaacaatgttgaaacaatcgctgtagtgccgacaatccttagaagaggtggaaaatggttttcttcgattggtaaaccaaaaaataccggatcaaaaatattttgcatttcaggaaatgttaattttccttgtaatgttgaggaagagatgggcataccattgaaagaattaattgaaaaatatgccggcggagttataggcggatgggagaatcttcaagcagtaatacctggaggatcatcgatgcctttattaccaaaaaaaatatgtgatactattactatggactttgactctttagttgaaaataaaagtgggttaggaacggctggcatagtagttattaataaacaacaagatatcgtagcttgtatgactagaatagctagattttataaacacgaaagttgcggacagtgcactccttgtagagaaggtgccggatggatgtggagaattttagatagagtagtaaaaagaaaagctacttttagcgatattgatttattatctgatgttaccaaacaaatagagggacatacaatttgtgcatttggtgaaggttcagcatggccagttcaaggtttacttagacatttcagaaaagaaatagaaagtagatgtagagaagagcctttaattaagaaaaaaacaaataatccatatttaatagatcaacatttgctggagaacaaaaatgcctaa

SEQ ID NO: 222602 - DNA, 893 bp, Unknown
  Bacterial polypeptide expressing nucleotide sequence isolated from the Sargasso Sea
ttattctgaatcttctaatttacaaaaagcaatagacgaagcttacgcaaataatttaatcggtaaaaatgcctgtggtacaggttgggattttgatatttaccttcacagaggagctggagcatatatttgtggagaagaaactgctttacttgaaagcttagagggtaaaaaaggtcagcctagattaaaaccgccttttccagcaggtgcaggtttatatggatgtccaacaacagttacaaatgttgaaacaattgcagtctcgccaactattttaagacggggctcaaaatggtttgctaatttaggtagagcaaataatacaggtacaaaaatttttagtatctctggacacgttaataacccatgcaatgtagaagaagaaatgggtataccattaaaagatctgattgaaaaacatgcaggtggggtaattggtggttgggaaaatttattagctgtaattcctggaggcgcaagtgtgcctttattgcctaagtctatttgtgatacagtaaaaatggattttgatagcctaaaagaagttcaaagtggattaggaactgcagctgttattgtaatgaataaatcaacagatattgttgaggcaatagccagattatcacatttttataagcatgaaagttgtggtcaatgtacaccctgcagagaaggtactggatggatgtacagaatgatggaaaaaatgattcatggaaatgttaaatataaagatattgataaaattttagatgtaacaaagcaaattgaaggtcatactatttgcgccttaggtgatgctgctgcttggcctattcaaggtttgtttagacattttagacctgaaattgaaaaaagaattcaagaaagaaacagaagagtagcctagt

SEQ ID NO: 222603 - DNA, 1261 bp, Unknown
  Bacterial polypeptide expressing nucleotide sequence isolated from the Sargasso Sea
catgcgtgaaaatcctgaagatagccatttaatcgatagttatgaaaaaaatggtggatatgaaacagcaagaaaaactttaattaatggttcacctgaaaacgtactcgaagaaattaaggcatcaaatataagaggtaggggtggtgcaggtttccccactggagttaagtggggttttttagctgagaatgaagatagatatttagtaataaacgctgacgaatcagaacccggcactttcaaagatagaattttactcgagagagaccctcaccaactaattgaaggaataattattacttgttttgctgcaaacattaaaaatgcatttatttacattaggggagaatatgcaaaacctgcaagaagagttcaggatgcagtagatcaagcttatcaaaaaggttatttaggaaaaaatattttcaactctgaaatgaatttagatctagttgttcatttaggtgcaggtgcatatatatgtggtgaagaaactgcattacttaattcactcgaaggaagacgaggcgagccaaggttaaaacctccttattttccggcggtaaagggtctatatatgaaacctactttagttaacaatgttgagacaatttcatctgttccatggattatggaaaatactggcaaagaatataacaaattaggcgttgaaggatctactggaacaagaattttcagtctctcaggtcatgtaaataatcctgggaattacgaaattgaaatgggaagttcatttggagaatttgttgagtccttaggcaatgggataagaaataataaaaaagtcaaagcctatattcctggtggtgcatctgccccttggtttagaggtgatcaacttgatatcaaaatgacaattgatgatgtagctaataacaattctatgcttggctcgggggcagttgtgatgatggatgaggacacaaatcttgtaaacgctgcaaaaagcattgttagtttttttgctcatgaatcatgtggtcaatgtacaccatgcagagagggaacaacatggttagaaatgatattagacagagttgcttctggtagaggtcgggcatcagatatcgacctacttcttgatgtttgtgataatatttcacccggtctctcttggcctccaaaaatgacaactatttgtccattaggaccctcagctgtatcacctataacatctttaatgaacgatttcagagaagaagttgagagtttaattccaaccaaggttcttttatga

SEQ ID NO: 222604 - DNA, 1195 bp, Unknown
  Bacterial polypeptide expressing nucleotide sequence isolated from the Sargasso Sea
atgcttaaagatcaagatagaatttttcagaatttatataatgacaaaggctcagatgtatcttcatcacaagagagaggtgattgggtaaatacaaaagaaattactgacaaaggaagagactggataattaatgaaattaaagaatctcaactaagaggtcgaggtggtgcaggatttcctactggtttaaaatggtcatttgcgccaaaagaagttggatctagaccacattacttagttattaacggcgatgagtctgaaccaggaacttgcaaagatagagacattttaagatttgaacctcacaaattaatagaaggttgtttaatagcatcttatgcagtgcaagcacatgtttgttatatttacataagaggagaatattttgttgatggtcaaaaacttcaagcagcaatagatgaagcttatgaaaaaaaattgttaggtaaaaatgcagctggtacaggatgggatttagatatttatattcattacggagctggtgcatatatttgtggtgaagagactgcactgcttgaaagtttagaaggtaaaaaaggccaaccgagattaaaaccaccttttccagctttgataggtctttatgggtgtcctacaataatcaataatgttgaaacaattgcagtggttccaactattttaagaagaggagctaaatggtttgcttctcttggaagagaaaagaacacgggcacaaaaatattttgtatatctggaaatgtaaatacaccttgcaatgttgaggaagaaatgaacattcctttaaaagaattaattgaagtacatgcaggtggtgttattggaggttgggataatcttcaagcagtaattcctggtggttcatcaatgccactaattccaaaagagaaatgtgaaacattaactatggattttgactcacttatggctgagaaaagtggtttaggaaccgcaggtatagtggtcattaataaagatcaggacataattaaatgtatggcgaggatcgcaagattttacaaacatgagagctgtggacaatgtacaccttgtagagaaggatctggttggatgtggagaatgcttgagagaatggcaaaaggagatgcaacgaaggatgaagtggatatgttaggcgatgtaacaaatcaaattgcaggacatactatttgtgcttttggtgaaggttcgt

SEQ ID NO: 222605 - DNA, 1933 bp, Unknown
  Bacterial polypeptide expressing nucleotide sequence isolated from the Sargasso Sea
atgataagcttcctatcactatttatcgtattttcacctctactaggtgctttatttctacttttttatcctaataaaagtgattttatatcatctatcattgcaaatatttctgtaggaatatcttttttattttcgctatttcttttgattaaatatttttttgataatgataatcaaactctagttcatctttttacatggttaaatcttaataattttatatttgaatttgcttttatgattgatagtttaactgtaattatgtcattcatcgttacatttatatcattctttgttcatatattttctattggttatatgaaaggcgattctagctttaatagatttttgatatatacaaacttttttacattttcaatgttgttaattgtttttgcagataactttcttcaactatttattggatgggaactagtgggtttatcctcgtacctacttattggattctggtataaaaaagaatctgcgattaaggcaaatcttaaggcttttattgtgaataggattggagacataggtttgttattaggcgttattatgatttttgttttcagtaacactcttaattataatgaattttttctcacattacccaatctaagtaatattgatatttcaatttttggattttctctagatttattaccattaatagctctcttattatttataggcgcatctgcgaagtctgcgcaaataccactccacttttggttgccagattcaatggagggtcctacaccaatatctgcacttatacatgctgccactatggttacagcaggtatatttatggttgcacgattgtcgcctttgtatgatctttcttcatatgttttagatattatactgtatattggtattttgactgcttttctaatgggactcgttgccttaattcaaaatgatataaaaagaattattgcttattccactatttctcaattaggctatatgacagttgcattaggtgcatccttttattcatttgcaatttttcatctcctcacacatgcattttttaaagctctattatttttatgtgccggatctataattttaaagtgtcatcatgaacaagatattacaaaaatgggaggattaaggaaacttatgccttacacgttctacacatttgttatcgctgctctagctctaataggtttcccttttacttcaggattcttctctaaagatttaatcattgatatatttaagtatgaggaaaactacgctgtctactatattttagtatttggaatactcataacaactctatacacagcaaaaatattcttccacgtattttttggagaaaacaagatgcgtatcaaggatagtcaaaatattgagcatgatgatgtaattttgataccacttgtttcactagcgataccaagtttgttaataggtatagctttattcgataatatattattttctggattcttctctacatctattactgataactctagaatattgttgatgtacgaaaattttataaataactctatgacatttacgcttaactcatttctgagccttaattttatgtccttaattataggattagtactctcttattttatttactataaaaaacagtactctagtatcaatatttttaaaaaatctggtagaatatattcaattttatcagcagagtacggcttcaaaaacctatcagatatacatgttccaaatttatttaaaaacttatctagagtcatgtggaaaacatacgatgaattactcatagacaaactaattgttaatggtattgcgaacaagattcaatacatttcaatgcaaataagaagaattcaaactggtttcatttatcattacgcattcgtgatgatcatcagcttaatgacacttttatggattttctttggtttataat

SEQ ID NO: 222606 - DNA, 505 bp, Unknown
  Bacterial polypeptide expressing nucleotide sequence isolated from the Sargasso Sea
atgaatttagaagaaagaaaaaaaaatataccagaagaatttaaacaattagcacaagattttagtgataatggttttataacaacatcactagacaatctagttaactgggctagaacgggatcattacattggatgacttttggtcttgcatgttgtgcagttgaaatgatgcaaacatcaatgccaagatatgatttagaaagatttggtgctgctcctagagcttcacctagacaatcagatgttatgattgttgctggaactttaacaaataaaatggctccagcactaagaaaagtttatgaccagatgccagaaccaagatatgtaatttccatgggaagttgtgcaaatggtggaggatattatcattactcttattctgtagtaagaggatgtgatcgtattgtaccagttgatgtatatgttcccgggtgccctccatctgctgaagcgcttttatatgggataatgcaacttcaaaagaaaatcaggaacaaag

SEQ ID NO: 222607 - DNA, 538 bp, Unknown
  Bacterial polypeptide expressing nucleotide sequence isolated from the Sargasso Sea
atgggaataaaatttagtttagattcagaaaaagaaaataaaattccggaagagtttaaagatctagcaaaagattttgctgaaaagggtttcataacaacttcatctgaaaatttaattaattgggctagaacaggctcattacactggatgacttttggccttgcttgttgtgctgttgagatgatgcaaacttcaatgccaagatatgatcttgaaagatttggtgcagctccaagagcttcaccaagacagtcggatgtgatgatagtagcaggaacattgaccaacaaaatggctccggctttaagaaaagtttacgatcaaatgccagagccaagatatgtagtttccatgggcagctgtgcaaatggcggtggctattaccattactcttattcagttgtcagaggttgcgataaaattgttccagttgatatttatattccaggctgcccaccctcagctgaagctcttttatatggaattttacaacttcaaaaaaaaattagaagagaaggaaacttgcaaagataat

SEQ ID NO: 222608 - DNA, 517 bp, Unknown
  Bacterial polypeptide expressing nucleotide sequence isolated from the Sargasso Sea
aatgaacaataagttaaatcaagtacctgaggagtttaaacaactagctaaagattttagtgagaatggttttataactacatctttagataatctaattaattggtctcgatcaggctctttacattggatgacttttggtttggcatgttgtgcggttgaaatgatgcaaactgctatgccaagatatgacattgagagatttggcgctgctcccagaggttccccaagacaatcagatgttatgattgtagctggtactttaactaataagatggccccagcattaagaaaagtttatgatcaaatgcctgaaccaagatatgtaatatcgatgggaagttgcgcaaatggaggaggttattatcattattcatattcagttgtaagaggctgtgatcgaatagttccagtcgatgtatatgttcctggctgtcctccttcggcagaagcattactttatggaattcttcagctacaaaaaaaaatcagaaataaaggttctataaataggtag

SEQ ID NO: 222609 - DNA, 661 bp, Unknown
  Bacterial polypeptide expressing nucleotide sequence isolated from the Sargasso Sea
aatgcttaaagacgaagatagaatttttaaaaatttgtataatgatttagggtcagatattgactctgccattaaaagagacgattggaaaaatacaaaagaaatttgtgaaaaaggtagagactggataataaatgaaatcaaaacatctgaattaagaggacgaggtggagctggttttcccaccggattaaaatggtcatttgctcctaaagaagttggatcaagacctcactatctagttataaatgcagatgagtctgaacctggaacttgtaaagatcgtgatattttaagatttgaacctcataagttgatcgaaggttgtttattaagttcatatgctgtcaacgctcacgtttgctatatttatattagaggtgagtattataatgaaggtagaaaactacaacaagcaattgatgaagcttatgaaaaaggttttataggaattaatgcttctggaactggttgggatttagatatttatattcactatggtgcaggggcttatatatgtggtgaagaaactgctctattggaaagtttggaaggtaaaaaaggtcaacctagattaaaacctccttttcctgctttaataggattatatggatgtccaacaataataaataatgttgaaactatcgctgttgtaccaaca

SEQ ID NO: 222610 - DNA, 1288 bp, Unknown
  Bacterial polypeptide expressing nucleotide sequence isolated from the Sargasso Sea
atgggcgtcgagtccgtcgacgccgcgttcctgatagtcctcgcacccttccttgcattccccatcatactcgtctccggccaactctacaacggcaacagcacgtggaagcagaacctgaaggagggaggcgtgatcggtctatcggcgctcctggtctccctcaccacagcgctatgggtggtcatcgactacctcaggggcgccagggagatcgccaaggaccccagcggaaacgtcgcgacctcctggggcgactggatctccttcgacgtactcctgtccgactactcgatgagctctggtagggtgatcggcgtgggggtatgggtcgactcagtgaccctgatgctgctgttcgtcgccaccttcctgtgcttcctgatctgctggttcagcctcggatacatgaacacggaccccatcaacgaggaccggaaccaccggttctacgcggagttcgtcctcttcgcgatgggcatgttcgggatggtcctcgctgacaacttcctgtggctgttcatcttctgggagataatgggactctgctcctacctcctcataggcttctacttctggaaggagagcgccgcctacgcagccaagaaggccttcctgaccactcgagtgggggacgtcttcctgatggtgggcctgctcatactctacgacatatacggatcgctggagttctcggtgatattcgaggacccctccctcaacggaaccgtggactcggacaagctgttctgggcgctgctgatgctcttcatcggggcggtgggcaagtccgcccagttcccgctgcacgtctggctgccagacgcaatggagggcccgaccccggtctcggccctgatacacgccgcaacgatggtcaacgcagggctctacctggtcgcacgcatggtcccattcgtcgacgtgggcgcccacggggtggacgggctcagcgagctgggcctgatagtcgcctacatcggtgggataacggcgttcatggccgcctccatagcattcgtccagaacgacatcaagaaggtgctggcctactcgacgatgagccagctggcatacatcttcaccggactgggagtggcgctctggttctacaacaacggcaagaccgaggcagccaccctcgtcttcgggggagccatgttccacctgttcaaccacgccatggcgaagggcatgctcttcatggccagcggctctgtgatccacgaggtccaccacgcccacgaccacctccacgagggcgaggggcacgaccaccacgacgact

SEQ ID NO: 222611 - DNA, 1333 bp, Unknown
  Bacterial polypeptide expressing nucleotide sequence isolated from the Sargasso Sea
atgcttaaagaccaagatagaatttttcaaaatttatataatgataaaggttcagatgtatcttcatcacaagagagaggtgattgggtaaatacaaaagaaattactgacaaaggaagagactggataattaatgaaattaaagaatctcaattaagaggtcgaggtggggcaggatttcctacaggtttaaaatggtcatttgcgccaaaagaagttggatctagaccacattacttagtcattaatgctgatgagtctgaaccaggaacttgcaaagatagagatattctaagatttgagcctcataagttaatagagggttgtttaattgcatcttatgcagttcaagcgcatgtttgttatatttatataagaggagaatattttgttgatggtgaaaaacttcaagcagcaatagatgaagcttatgaaaaaaaattgttaggtaaaaatgcagctggcacaggatgggatttagatatttatattcattacggagctggagcatatatttgtggtgaagaaactgctttacttgaaagtttagagggtaaaaaaggccaacctagactaaaaccaccttttccagctttgatcggtctatatggatgtcctacaataattaataatgttgaaacaattgcagtagttccaactattttaagaagaggagccaaatggtttgcttctttaggaagagaaaaaaatactgggactaagattttctgtatttctggaaatgtaaataatccttgtaatgttgaggaggaaatgagtattcctttaaaagaattaattgagatacatgcaggtggagtaataggcggttgggaaaatttacaagctgtaatacctggaggttcttcaatgccattaataccgaaagaaagatgtgaaactttaaaaatggactttgatgcttgtgttgaggaaaaaagtggacttggtactgcaggtattgtggtaattaacaaggaccaagacataattaaatgcatggcaagaatagctagattttacaaacatgagagttgtggtcaatgtacaccttgtagagaaggttctggttggatgtggagaatgcttgagagaatggcaaaaggtgatgcaaccaaagatgaagtagacatgttaggtgatgtaacaaatcaaattgctggtcatacaatctgtgcttttggcgaaggttcatcttggccagttcaaggattgcttagacactttaaaaaagaaattgagaaaagaaacaatttggatcctattgttcaaaagaaaaacaatattccatatttagtagatcaacatttattggacaaaaaaaatgcttaaa

SEQ ID NO: 222612 - DNA, 1333 bp, Unknown
  Bacterial polypeptide expressing nucleotide sequence isolated from the Sargasso Sea
atgcttaaagacgaagatagaatatttcaaaatttgtacaatgacagtggtgtagatatcaagtctgctaaattaagaaatgattggaatggaacaaaagaaattttagaaaaaggaagagagtggataatcaatgaagttaaatcttcagagcttagaggacgtggtggggctggttttccaactggtctaaaatggtcatttgcacctaaagaagtagggtctagaccacattacttagttatcaatgctgatgagtcagaacctggaacatgcaaagatagagatatattaagatttgaacctcacaaattaatagaaggatgtttaattgcttcttacgcagttaatgcccataaatgttatatttatattagaggtgaatattttaatgaaggacaaaaacttcaaactgcaatcgatgaggcttataaaaataatttaattggtaaaaatgctttaaattcaggatgggatttagatatttatattcattatggtgctggtgcctatatttgtggtgaagaaactgcactacttgagagtttggaaggaaaaaagggtcaaccaagattaaagccaccatttcctgcattaattggattatatggatgtcctactatcataaataatgttgagactgttgcagctgtccctacaattctaagaagaggtgcaaaatggtttagttcacttggaagagctaaaaacactggaacaaaaatttattgtatttctggaaatgtcaataacccatgtaacgttgaggaagaaatgggagttccacttaaggaattaattgaaacccacgctggaggtgtagttggtggatgggacaatctcaaagcagtaatacccggtggttcttcaatgccaatgttacctaaagaaatttgtgacaatatgaaaatggattttgatgcatgtgttgaaaataaaacaggactaggaacagctggtattgttgtgatcaataatgaccaagatattattaagtgtatggcaagaatagctagattttataaacatgaaagttgtggtcagtgtacaccatgtagggaaggatctggatggatgtggagaatgttggaaagaatggcagcaggtgaggcaaccccagacgaagtggatatgctttttgatgtaacaaaacaaatagaaggtcatactatttgtgcatttggtgaaggttcctcttggccagttcaaggattaatcagacattttaaagatgaaatacttgaaagaaataaatttgaccctgttgtgaaaaaaaacaaaaatattccataccttgttgatcaacatttattagaaaaggaaaatgcctaaa

SEQ ID NO: 222613 - DNA, 523 bp, Unknown
  Bacterial polypeptide expressing nucleotide sequence isolated from the Sargasso Sea
atgaatttacaagacagaaaaaaagatattccagatgagtttaaacagttagctcaagacttcagtgataacggttttataacaacatcactagacaatcttgttaattgggcaagaacaggttcattgcattggatgacgttcggactagcttgttgtgctgttgaaatgatgcaaacatctatgccaagatatgatcttgaaagatttggtgcagcaccgagagcatcgccacgtcaatcagatgtcatgatagtagcaggtacgttaacaaataaaatggcacctgcattaagaaaagtttacgaccagatgcctgaacctaggtatgtaatatctatgggaagctgtgcaaatggtggaggctattatcattattcatactctgtagtgagaggatgtgatcgagtggtacctgttgatgtatatgtccctggatgccctccgtcagctgaagcattactttatggaattttacaattacagaaaaaaataagaaataaaggttctttagaaagataat

SEQ ID NO: 222614 - DNA, 538 bp, Unknown
  Bacterial polypeptide expressing nucleotide sequence isolated from the Sargasso Sea
aatgggattaaatttttcaaatttcaaagataaagaaaaacaaattccagaagaatttaaaaaaattgctaaagattttagcgagaaaggttttgttacaacttcttctgagaaccttattaattgggcaagaacaggatctcttcattggatgacttttggattagcttgctgtgctgtagaaatgatgcaaacatcaatgccaaggtacgacttagaaagatttggagcagcacctagagcatcaccaagacaatctgatgtaatgattgttgcaggcactttaacaaataaaatggccgcgcctttaagaaaagtatatgaccaaatgccagaaccaagatacgttatatcaatgggtagttgcgcaaacggtggtggctactatcattattcttattctgtagttagaggatgtgataagattgtgccggttgatatatacgttccaggctgcccaccttctgcagagtcattactatacggcattcttcaacttcagaaaaagatcagaagagaaggaactcagaaaagataa

SEQ ID NO: 222615 - DNA, 1345 bp, Unknown
  Bacterial polypeptide expressing nucleotide sequence isolated from the Sargasso Sea
aatgcttaaagacgaagatagaatatttaaaaacctgtataatgatttaggagctgacttaaactcttcaaaaaaaagaggtgattggacaaatactaaagatttatgtgaaaaaggtagagactggattattgatgaaattaaaaaatcagaattaagagggagaggtggcgcaggtttccctactgggttaaaatggtcatttgcacctaaggaagttggatcaaggcctcactaccttgtaattaatgcagatgagtctgaacctggaacttgcaaagatagggatattctaagatttgaacctcataaacttttagaaggttgtttaattgcggcctacgctgttaactcgcataaatgctatatttacttaagaggtgaatattgcaatgaaggtatagaattacaaaaagctattgatgaggcttataaagataatttaattggcaaaaatgcttctggaactggttgggatttagatatttacattcattatggagctggagcttacatatgcggtgaggagacagctttgcttgaaagtatcgagggtaacaaaggtcaaccaagattaaaaccaccttttcctgcgctagttggattatatggttgtccaactatagttaataatgttgaaactgtttcagttgttcctacaattttgaggaaaggttctaaatggtttgcgtcattaggcaaaccaaaaaatactggtactaaaattttttgtatttctggaaatgtaaacaaaccttgtaatgttgaagaggaaatgggagttcctttgaaagatttaattgaaacccacgcaggcggagtagtaggtggatgggaaaatttacaggcagttataccaggcggttcttcaatgcccttattaaataaagaaatttcagaaaagataactatggattttgactcattggttgaaaataaaagtgggttagggaccgcaggaatagtcgtaattaataaagatcaagatattattaaatgttttgcaagaatagcgcgattttataaacatgaaagttgtggtcaatgtactccttgtagagaaggttcaggttggatgtggagaattttagaaagaatggctaaaggagaggcatcgagagaggaagttgaaatgttatttgatgttacaaaacagattgaaggtcataccatttgtgcttttggagaaggatctgcttggccagttcaaggccttttaagaaatttcaaaaaagagattataaaaagaaataattttgatccattaattaagtcaaataaagatatcccatacctagtagatcaacacttattagaaaaagataatgcccaaaataaaagttaa

SEQ ID NO: 222616 - DNA, 517 bp, Unknown
  Bacterial polypeptide expressing nucleotide sequence isolated from the Sargasso Sea
atgaacgataaaatagaacaagttcctgaagagtttaaacaacttgctaaagattttagtaaaaatggttttataactacatcgctggataatttaattaattggtctagatctggctctttgcattggatgacttttggtcttgcttgttgtgcagttgaaatgatgcaaacagcaatgccaaggtatgacctagaaagatttggagctgctccacgtgggtcaccaagacaatcagatgtaatgattgttgctggaacattaacaaacaaaatggcaccagctttgagaaaagtttatgaccaaatgccagaacctagatatgtaatttctatgggaagctgtgctaatggtggaggttattatcattattcgtattcagttgttagaggatgtgatcgtatagttccagttgatgtatatgttccaggatgtcctccttcggcagaagctttattatatggaattttacaattacaaaaaaaaattagaaaaaaaggatcttttttaagatagt

SEQ ID NO: 222617 - DNA, 556 bp, Unknown
  Bacterial polypeptide expressing nucleotide sequence isolated from the Sargasso Sea
aatggaagaagggcgcattagaatgggagtaatgctgggcgacaacacagctggtgcggacttagagaattcgacacgagaacttaataaccagcttcaggataaaggttttcttgttacttcaactgaggatataataaattgggctaggacaggttctctgcactggatgacttttggattagcttgctgtgctgttgagatgatgcatacttcaatgccgcgatatgacttagagcgtttcggtacagcacctcgcgcatctccgcgccaatctgatttgatgattgtagctggaaccttaacgaataaaatggctcccgcgttaagaaaagtttatgatcaaatgccagagcctcgatatgttatatccatgggctcctgtgctaatggcggcggttattatcattacagctattctgtcgtgcgaggttgtgatcgaatagtgcctgttgatgtttacgttccaggctgcccgccaacagcagaggctcttttatatggtattttggcacttcagaaaaaaatccgaagaacaggaacgatcaaaagatga

SEQ ID NO: 222618 - DNA, 517 bp, Unknown
  Bacterial polypeptide expressing nucleotide sequence isolated from the Sargasso Sea
aatgaacaaaaaaatagaacaagtacctgaggaatttaagcaacttgctgaagactttagtaagaacggttttattacaacatcattagataatttaattaattggtcaagatcaggatctttacattggatgacttttggtcttgcttgctgtgcagtggagatgatgcaaactgctatgccaagatatgatgtagaaagattcggtgcagcaccaagaggttcacctcgacagtcagatgttatgattgttgcaggaacattaacaaataaaatggccccagctcttagaaaagtttatgatcaaatgccagaaccaagatatgtgatatcaatgggtagttgtgctaatggaggcggttactatcattattcatattctgtagttagaggttgtgatcgtatagttcccgttgatgtttatgtacctggatgtcccccatctgctgaagcattattatacgggatacttcaacttcaaaaaaaaattaggaataaaggttcatttattagatag

SEQ ID NO: 222619 - DNA, 433 bp, Unknown
  Bacterial polypeptide expressing nucleotide sequence isolated from the Sargasso Sea
atgaataataaaatagatcaagttcctgaggaatttaaacaacttgcagaagattttagcaagaatggttttataactacatcacttgataatttaattaactggtcaagatcaggatcacttcattggatgacttttggattagcttgttgtgctgttgaaatgatgcaaacagctatgccaagatatgatttagaaagatttggagcagctccacgaggttctccaagacaatcagatgttatgatagttgcaggaactctaacaaataaaatggcaccagctttaagaaaagtttatgatcagatgcctgaaccgagatatgtaatttcaatgggtagctgtgcaaatggaggtggatattaccattattcatattcagttgtaaggggatgcgatcgtatagttcctgtagatgtttacgtaccaggat

SEQ ID NO: 222620 - DNA, 517 bp, Unknown
  Bacterial polypeptide expressing nucleotide sequence isolated from the Sargasso Sea
aatgaataataaattagatcaagtacctgatgaatttaaaaagcttgctgaagattttagtaagaatggttttataactacttcttttgataatttgattaattggtctagatcaggttcattgcattggatgacttttggtttagcttgttgtgctgttgaaatgatgcagactgcaatgcctagatacgatttagagagatttggtgccgcaccaagagggtcaccaaggcaatcagatgtaatgattgttgcaggaacattaacaaataaaatggccccagctttaagaaaagtttacgatcaaatgccagagccaagatatgttgtatcaatgggcagctgtgctaatggaggaggctattatcattattcttattcagtggttagaggttgtgataaaatagtcccagttgatatttatattccaggatgcccaccttctgcagaagcacttttatatggtattttgcagctgcaaaaaaaaattagaagagaaggaacttcccaaaggtaa

SEQ ID NO: 222621 - DNA, 445 bp, Unknown
  Bacterial polypeptide expressing nucleotide sequence isolated from the Sargasso Sea
attacaacttcttcagaaaatttaattaattgggcaagaacaggatccttacattggatgacttttggattagcttgttgtgctgtggaaatgatgcaaactgcgatgccaagatatgatttagaaagatttggagcggctccaagagcatctccaaggcaatctgacgtaatgatagtggcaggaacattgacaaacaaaatggcagccccacttagaaaagtttacgatcaaatgccagaacccagatatgtaatatctatgggtagttgtgcaaatggaggcggctattaccattattcttattcagttgtaagaggatgtgatcgtattgtcccagtagatatttatgtaccaggttgtccaccttctgctgaggcattgctttatggaattttgcaattgcagaaaaaaattagaagagaaggcagtttagaaagataaa

SEQ ID NO: 222622 - DNA, 946 bp, Unknown
  Bacterial polypeptide expressing nucleotide sequence isolated from the Sargasso Sea
aacgtctgctatatttatatcagaggcgagtacattcgcgagcgcgaagcgcttcaagctgcaattgatgaagcatatgaagcaggtctaatcggcaaaaatgcatcaaaatctggctggaagtttgatttatttcttcaccatggtgctggtgcatatatttgtggagaagagacggccttattagaaagtttggaaggtaaaaagggaatgccacgcatgaagccaccatttccagctggcgctggtttgtatggctgccctacgaccgtaaataatgttgaatctatagctgttgttccaacaattcttcgccgtggggcagattggttttcgaaattcggtcgtgagaataatgctggaacaaaattattcactatatctggccatgtaaacaatccatgcgtcgttgaggaagagatgtctatcccgtttgaagaacttattgaaaggcattgtggtggtatccgtggtggatggaaaaacttaaaggctgtaattccgggaggcgcttcagttccatgtgttcggggtggagaaatgcgagaagcactcatggattttgattatcttcggggagagttaggctctggcttgggaactgcagccgttattgttatggaccagagtacagatgtaattaaagctatttggcgtctttccaaattttacaagcacgaaagctgcggacagtgcacaccttgcagagagggtactggatggatgatgcgggttatggaacggttagtaaatggcgatgcggaccctagtgagattgatatgcttctggacgtgaccaaacaggttgaaggtcacacgatttgtgcacttggtgatgcagcagcatggcctatacagggacttataaaaaattttcgagacgaaattgaagatcgtttaaaaaatcaaagttcaatgcaaaacagtttggtggccgcgcaatgaa

SEQ ID NO: 222623 - DNA, 790 bp, Unknown
  Bacterial polypeptide expressing nucleotide sequence isolated from the Sargasso Sea
aatgcttaaagataaagatagaatttttacaaatatttatggttggcatggctcagacttaaaaagtgcacaatctagaggcgattggcaaggaacaaaagaagtaataaagcttggtcacgacaagattatagaaataattaaagattcaggtcttagaggaagagggggcgcaggttttccatcaggattaaaatggtcttttatgcctaaagaagtcaaagaaaggccccactatttagttgtaaatgcagatgaatctgaacctggaacctgtaaggatagggatattataaggcatgaaccacataagttaattgaagggtgcttacttgctggctttgctatgagagctcactgtgcatatatttacataaggggtgaattttataatgaagcatttgttcttcaaaaagctatagacgaggcttatgataaaaaacttttaggaaataatgcatgtggaagtggttggaaatttgatgtttttcttcacagaggagctggagcctatatttgtggtgaagaaacagcccttttagagtctttagaaggtaaaaaaggccaacctcgtttaaaaccaccttttccagctggtgttggtttatatggttgccctacaactgtaaataatgtagagacaatcgccgtgtcaccaacaattttgaaacgtggagctaaatggtttgcaagccttggtagagaaaataatactgggtctaaattattttgtatctcaagtcatgtaaatcaaccgtgtaatgttgaaagaagaaatggggatttctct

SEQ ID NO: 222624 - DNA, 1228 bp, Unknown
  Bacterial polypeptide expressing nucleotide sequence isolated from the Sargasso Sea
caaggaggttacgaagcctgggaaaaaatccttaaaggtgatttatcacccgatgatgttatcgaagaagttaaatcatctggtctaagaggtagaggcggcgctggtttcccaactggtttgaaatggagctttatgccaagatctcaacctggtcagaaatatctggtgtgtaattctgacgagagtgaaccaggaacgtgccacgatagagaaacattaagaaaaaatcctcattcacttgtggaaggaatggcaatagcatcatatgcaatgggcgtaacagtagcctataactacataagaggcgaatttattgatgaacccgttcccagatttaaaaaagcggttaaagaggcatacgaaagtgggtaccttggtaaaaacataaaagactcaggtattgatttcgatcttcacacattcgtgggtgccggtgcatatatttgtggtgaagaaacagcgcttttggagtcactcgaaggaaagcagggcaaacccagatttaagccaccatttcctgcaaattacggactgtacggtaaacccactaccatcaataatacccaaagtcttgccagtgtcccctcaatcataagaaagggtgccgactggtttagagagttgggtgtggaaaattccggcggaaccgcacaattttctgtttcaggtcatgttgaaaatcctggaaattatgaattacccatggggataccatttaaagatctgctctcaatatgcggtggtatgttagggggcagaaagctaaaagcggtcatccccggcggatcatcctgtcctgtaatgccggccgaggcaatattaaattgcaccatggattacgattctctgaaagatgccggttcatcttttggtacgggtgcagttattgtgatggatgaaactacttgcatggttcaggtcttgagaagaatagctcgattttatatggccgagtcatgcggtcaatgcacaccatgtcgggagggtacaggctggctttaccgtatgttaacaagaattaccgaagggcaaggccaaatggaagacataaccaagttggtcgaagtggcaaataaaatagaaggtcacacaatatgtgcattgggtgatgccgctgcatggccggtacaaagtttccttaaacattttcatgatgaatttgaatacatggtcaagaataaaggaaaaagcattatcgataacaataatgaggctgccgcatgag

SEQ ID NO: 222625 - DNA, 887 bp, Unknown
  Bacterial polypeptide expressing nucleotide sequence isolated from the Sargasso Sea
tggaaaaaacgcctcaggtaccggttgggaatttgatatttatattcattatggtgctggagcttatatttgtggagaagaaactgcattattagaaagtttagagggaaaaaaaggacagccaagactaaagcctccatttcctgcacttattggtttatatggttgtccaactataattaacaatgttgaaactatttcagttgtacctaccattttaagaagaggagcaaaatggttttcatcaatagggagggcgaaaaatactggaacaaaaatttattgcatatcaggaaacgttaataatccttgtaatgtagaagaggagatgggcataccattaaaagatttaatcgagaaacatgctggtggtgtcgttggtggatgggataatttaaaagctgtaatacctggcgggtcttcaatgccattgttgccaaaaaaaatttgtgacactatcaaaatggattttgatgaatgtattgaaaataaaacaggcttaggtacagcaggaatagtagtcataaactgtgatcaagacattattaagtgcatggctagaatagctagattttacaaacatgaaagttgtggtcagtgtactccatgcagagaaggttctggttggatgtggagaatgcttgaaagaatggcaaaaggtgaagctacaagagatgaagtagaaatgcttatggatgttactaaacaaattgaaggtcatacaatatgtgcttttggagaaggttctgcttggccagtacaaggattaataagaaactttaaagaagaaataattaaaagaaataatataaatccaatttttgaagaaaaaaaagatataccttatttgatagatcaacacttattagaaaaagaaaatgcttaaa

SEQ ID NO: 222626 - DNA, 970 bp, Unknown
  Bacterial polypeptide expressing nucleotide sequence isolated from the Sargasso Sea
ttatgtttatataagaggagaatatatcaaagaaggcaaaagacttcaggaggctatagacgaagcatattcaaaaaatttaattggtaaaaacgcatgtaattctggatgggatttagatatttatattcactatggcgcaggagcatatatttgtggcgaggaaactgcacttctggaaagtttagagggtaataaaggtcaaccaagattaaaaccaccctttccagctttagtagggctttatggctgtccaacaattgttaataatgttgagacaattgctgtagttccaacgatattaagacgtggagctaaatggtttgcatctatgggaagacccaaaaatactggtactaaaatattttgtatttctggaaacgtaaatgcaccttgcaatgtagaagaagagatgggtatcccattaaaagaacttatagaaaaacatgctggtggagttattggtggttggaaaaatcttcaggctgtaataccaggtggatcatcaatgcctatggttccaaaggatatttgtgaaacattaagaatggattttgactccttggtagaggttaaaagcggattaggcactgctggagtggtagtaattaataaagacgaagacattgttaaatgcatggctagaattgcaagattttacaaacatgaaagttgtggtcagtgcacaccttgtagagagggtgcaggatggatgtggcgtatcctagaaagaacagcaaaaggagaagctacacataaagatatcgatttattatctgatgttacaaaacaaattgaaggtcacactatctgtgcatttggagaaggttcagcatggcctgttcagggacttttaagacattttagaaaagaaattgacaaaagatgtttttctgagccgactattaaaaagaaaagaaaaataccatatttaattgatcaacataaattagaaagtaaagatgcctaa

SEQ ID NO: 222627 - DNA, 1642 bp, Unknown
  Bacterial polypeptide expressing nucleotide sequence isolated from the Sargasso Sea
cttttttgtacatgtttactctattacttatatgcaaaaggatataagttttaaaagattctttatctatactaatttctttacattttctatgttagtaattatattctctaataattttttacaactatttattggttgggaattagtaggtctatcatcatacttattgattggtttttggcataaaaaggagagtgctatcaaggccaatctaaaagcttttgttgttaataggattggagatatcggcttattgcttggagttttattagtctttataagtactaaaagcttaagttataacattttatttaacaatctggcgctactaactgatgaagttgttatactatttaattatgattttgaaataattccgttgattgctgtgttattgtttattggtgctgctgctaaatctgcacaagtgcctttacacttttggctacctgattcaatggaaggaccgaccccaatatctgcactcattcatgctgctacaatggttacagctggtatctttatggttgcgagactatcgcctctatatgatctctctttttatgttttagatattattcttataacaggattaatcactgctttttttatgggcatagttgcgcttgtacagaacgacattaaacgtattattgcatattcaacaatctctcaattaggctatatgacagttgctctaggtgcctcattttattcttttgctatatttcatttattaacacatgcattttttaaagcacttttatttttatgtgctggctcaattattttgaaatgtcatcatgaacagaacatcaataaaatgggtggacttagattctccatgccaataacatttttaacgtttacagtcgcaggattatcattaattggttttcccggaatgtcaggatttttttcaaaagatttaataatagatatctttaagtataataataattatattatttattacatattagtagccagcatagttattactacactctatacttctaaaatattttttaaagtattttttgggactaataaacttaaggttcagaaaagtgatggtttagaacataataaaacattattagttccactaattattctagcagccccaagcgcaataattggttgggcattattcgatacattaatctttaataatttctttttggattctataactgataacagtacattaaactatttttaccaaaactacataattcattcagtcaacttcttcttacattctttttcaagcttgagctttttagctttactaataggattacttctatcttattttcattactataagaagaatactgtctcccataattttttagttaaaataccagtaataaaaaatatattattaaatgagtatggttttaatcacttatcaaatttcgtaataccaaataatataaaaaaaatatcagattttctatggaaaaaagcagatataagtttgatagataatacattcgttaatggtagcgcaaacatagtatctttaatttcaaacaaaataaggttgttacagacagggtatatatatcactatgcttttatcatgataattggtttactattttttttaataatattttatgatttctaa

SEQ ID NO: 222628 - DNA, 386 bp, Unknown
  Bacterial polypeptide expressing nucleotide sequence isolated from the Sargasso Sea
gacatttggactagcatgttgcggtgttgaaatgatgcattcttatatgagcaggtatgatttagatcgatatggcgtaataccaagaggaagtcctcgtcaatctgatgtaatgatagtagctggaacattaacaaataaaatggctccagcgttgaggaaggtttacgatcaaatgccagaacccagatgggttatttctatgggttcatgtgctaatgggggtggttattatcactattcatattcagtagtaagaggttgtgatagaattgtgccagtagatatttatgttcctggatgcccacctacagctgaagcacttgtttatggaatattacaacttcaaaaaaaaattaaacgtcaaaataaatacagtagctaag

SEQ ID NO: 222629 - DNA, 1422 bp, Unknown
  Bacterial polypeptide expressing nucleotide sequence isolated from the Sargasso Sea
atagatacgctaaccgcagttatgttggtggtggtaaacactgtttctgctgttgttcatttctattcaatcggatatatgcacgatgatccatctaggcaacgatttttttcttatctatcattattcacatttgcaatgttaatgcttgtgacatcaaataattttcttcagttattttttggatgggaaggggttggattagcttcctatctactcattggtttttggcatcacaaggaaagcgcaaataatgccgcaataaaggcttttattgtaaatagagtgggcgactttggctttgcactcggtatcttttgtattttttatttctttggctcacttgattttaatactgtattttcaaatgcatctgatctagtagataaaaagattaatatatttggtaactccattggtgccatttcctttatatgttttctgctttttataggcgcaatgggaaaatcagcacaatttcttctgcatacttggttaccagatgccatggaaggtcccacgcctgtttctgcattaatacacgccgctacaatggtaaccgccggtgtatttctagttgcaagatgctcacccctgtatgagctcgcgccatctataatgtcgttcatagtttttattggcgcaacaactgctatttttgcagcttctgttgctttggttcaaaatgatattaagaaagttatagcctattctacgtgttcacaacttggctatatgtttgttgctctcggggttggcgcttatcaggttggaatttttcatctatttacccacgctttttttaaagccctattattcttgggtgcgggttctgtaattcatgcaatgtctaatgagcaagatatgaggtatatgggtggtcttaggaagtttataccaaaaacatatatactcatgctggtaggaacattggcattgactggatttggtattcccggtctgtttggaatggcagggttttattcaaaagatgcaatcgttgaagcggcttatgtatcaagtctcggcataggctcttacgcattcaccatgcttctagtcgcagcattaatgacatcgttttattcttggaggcttatatttatgacttttcatggaacaccacgcgcatcaaaagaggtaatgtcgcatttacatgagagtccaaatattatgttaattccattaattatattagttattggatcaattttttcaggatatgtgttctatgactcattcatttatgcagggtttaaagaattttgggctagttcgatatttatcttaaaagacaactacatattaaaagagcttcatgacgtatcatatctcattaaatggtcaccaacaatcatgatgattatcggttttaccgttgcttattacctatacatcagaaatccacatattcctcaaaaa

SEQ ID NO: 222630 - DNA, 472 bp, Unknown
  Bacterial polypeptide expressing nucleotide sequence isolated from the Sargasso Sea
tgctgaagattttagtaagaatggttttattactacatcattagacaatttaataaactggtcaaggtcgggatcattacactggatgacttttggccttgcttgttgtgcagttgaaatgatgcaaactgcaatgcccagatatgatttagaaagatttggtgccgcacctcgtgggtcaccaagacaatctgatgtaatgattgttgctggcactttaactaacaaaatggcaccagctcttagaaaagtttacgatcaaatgcctgaaccaagatatgttatatcaatgggaagttgtgctaatggcggtggatattatcactactcttattctgtagtaagaggttgtgatcgtattgttccagttgacatttatgttcctggatgtcctccttctgcagaggctttattatatggaattatgcaattacaaaaaaaaataagaaataaaggatccattagtagatag

SEQ ID NO: 222631 - DNA, 1090 bp, Unknown
  Bacterial polypeptide expressing nucleotide sequence isolated from the Sargasso Sea
attaacgcggatgagtctgagcctgggacatgtaaagacagggatatattaagatttgaacctcaaaaattaattgaaggatgtttaattgcgggttacgccgtaaatgcccatatttgctatatatacattagaggcgaatactttaatgaaggaagaagacttaaagaggctattgatcaagcttatgaaaaaaattttttaggaaaaaatgcctgcggttcaggttgggacttcgatattcatattcattacggagctggagcttatatttgtggagaggaaactgctttattagaaagtattgagggaaataaaggacaaccaaggttaaaacctcctttcccagctttagtagggttatacggttgcccaactattgtaaataatgttgaaacaatagctgttgttccaacaatattaagaagaggcggtaaatggttcgcatcaattggaaaaccaaaaaatacaggaactaaaatattttgtatatctggaaatgtaaactcaccttgtaatgttgaagaggaaatgggaattcctttaaaagaattaatcgataaacatgcaggaggggtagttgggggttgggaaaaccttcaagctgtaattcctggaggctcatcaatgcctttacttccaaaaaaaatatgcgatacaattacaatggactttgattctttaattgagaataaaagtggtttaggaacagctggaatagtagtcattaataaagatcaagacatcattgcttgcatggcaagaatagcaaggttttataaacatgaaagttgcggtcaatgcactccatgtagagagggcgcaggatggatgtggagaattcttgatagagttgttaaaagaaaagctacatttagtgatataaatctattgtctgatgtaacaaaacaaatagagggacatacaatttgtgcatttggagagggatcagcttggcctgtacaagggttgctgaggcatttcaggaaagagatcgatagtcgttgtagagatgaacctttaattaaaaaaagaacgaataatccttatttagtagatcaacatttattggaaaataagaatgcctaaa

SEQ ID NO: 222632 - DNA, 868 bp, Unknown
  Bacterial polypeptide expressing nucleotide sequence isolated from the Sargasso Sea
catgtgggccggcgcgaagaatatcgttccagaatccgcgccgatgggtctcaatccgaaaaagtggatgcgtttgaagattcaagacaaggtgccgctctcgcacgattccatcctcttgcgattggcgctcgagagcgacgcgcatcagtgcggcatcccggtgggctatcacgtctatcttcgaggcgagtggaacgggaagaagattatgcgcgcgtacacgccgagctcgctcaacggtacgctcggcgcggtcgagttggtgattaagatttattactcggacgcgcacgaggcgtaccccgagggcggggcgttgacgcagtatttgcatcatctcaacgagggcgacgccatcgacgtcaagggtcccgtcggacacattcggtacctcgggaacggtgatttcaccatcgataagaaacctctcccgcgagcgacgaagatgacactcttgggcggtggtacgggcgtcgcgccgatgttacagctcctcgtcgccgcgctcgccgacgagtcggacgagacggagatatccttcatctacgccaacaagacggaggacgacgtcttgctcaagtacacgctggacagactcgagcgcgaacacccgaagcgtttccgcgtgcattacatgatatccaaggagacgtggcccgcggagaggaaaaccggggcggagtggagttcggatcgcgtcgagtacggacgcgtgagtttaccggtgattcgcgcgcgcgggtttccggcgaacgggacgtcgcacgtcgccgtcatgtgcggaccgccggcgtttgaggaggacacgtgcgtgccggcattgctcgagctcgggtacccgaaggaggcgatcattcggtattga

SEQ ID NO: 222633 - DNA, 766 bp, Unknown
  Bacterial polypeptide expressing nucleotide sequence isolated from the Sargasso Sea
tttgcttgggcatcttgcggtgcagaccgccagtgggcgtagtgtgccgttgaatcaggtggcgacactggagtccggtttcgaagaagggattatttggcaccgtgaccggctgcccactgtgaccgtattggcggatgtgaaaggcgatgtgctgcccgctacgctgatgcagcaaatcatgcctgagttgtcccaggttcaggcggacttaccgccaggctatctgctagaagtgggcggtacagtggaggaatccgcgcggggtcagaaatcggtgaatgcagggatgccgttgttcattctggtagtgattactctgttaatgttgcaactgcgcagcttcccgttgtcgctgatggtcttcatcacagcacctctggggctgatcggggtgacgttcttcttgttgctgttccagaaaccgtttgggtttgtggccatgctgggcaccatcgcgttggcggggatgatcatgcgtaatgcggtgatcctggtggatcagattgggcaggatatggagcagggtcttaccgcttgggatgcgattattgagtccacggtacgccgtttccgacctatcgtgttgacggctctgacggcagtgctggctatgataccgttgtcgcgcagtgtcttcttcggccccatggcggtggcgattatgggtgggctgattgtggccacggctctaactttattgtttctgcccgcattgtacgcggcttggttccgggtcaaggaagagcatgcggatgcacaataa

SEQ ID NO: 222634 - DNA, 394 bp, Unknown
  Bacterial polypeptide expressing nucleotide sequence isolated from the Sargasso Sea
taaagtttggtatgtagctgacgctgaaggtaaaacacttgggcgatttgcaagtgaaatagcaaaagttttacgtggtaagcacaagcctacgtttacacccaatttagatatgggagattttgttgttgttgtaaatgctgaaaaggtaaatttatctggaaagaaaaatacagataaaacatattttaaacatactggctatattggttcaaaaacatttaccaagcttgatcaaattcgaaaaatacacccggaaagaattgtagaaaaggcagtttggggtatgctaccaaaaaatcgtttaggacggtcaatcattaaaaatttaaaagtttattctggaccacaacatcctcatatggcacaacaaccaaaagaacttattacttaa

SEQ ID NO: 222635 - DNA, 684 bp, Unknown
  Bacterial polypeptide expressing nucleotide sequence isolated from the Sargasso Sea
agatcaaggtgacggatcgcgagtcgaacaacttttatcactttaacgacaatcgcgtcttgcctccgcccgtggacgccgagcgcgcgacggaggagggttggtggttcaagccagagttcatcatcaaccagctcaacattaacggcgccatcgcgtacccggcgcccgaggaaatcattccgaaatcaaaaaagacgtacgagttccgcggatacgcgtacagcggcggtggacgcaaggtcattcgcgccgaactctcgttcgatcagggattgagttggcaactcgccgacatcaacgtgcgcgagcaaccgcggtgggccgactttggctcgggcgacaaggcgcgtcactggtgttggtgccactggtccatggaggttcccgtggagaaactcctcgacccgaagtgcgtcgaggtgtgctttcgcgccgtcgatcaatcgatgaacaaaatggacgaacgtccgacgtggaacgtcatgggcatgctcaacaatccgtggtacagaattcgcgtgcaccgcgcgccgaacggcgacgcgcgcgtcgaacatccgtgcatcgccggtcccaccccgggcgggtggatgcaaaagatggcggccgagcgtcccacgggcgagctcttgtggggatggggcggcgaagggactcccgcggcgcctccggccgagtgat

SEQ ID NO: 222636 - DNA, 2359 bp, Unknown
  Bacterial polypeptide expressing nucleotide sequence isolated from the Sargasso Sea
tcttactggggaagccatgaaatcgttataaatactgtttttaacgaatatggatgtatccttgtgggcgcagctggaaattatggtgtttatgaaccccattatcctgctgcgtatgaaaatgttatttctgtaaccgcgactagtatgaataattattttaattgctggcctaattttcatgagaccgtagatattgctgctcctggggaagatatttggacaacagtacctttcacaggaaatggcatgagatatcaagaggttacaggaacttcattttcttctcctactgtagctggtgggattgcactattaaaaaccatttttccaaatgctgataatcaaatgttagtttcaaacatattgaatagtgctagttattttattggtatggatggtagctgtagcgggcaagatcttgatggattacttgggtcaggacagttaaatatttatggagccattactaatgatattgaaccgaatatattacctataaatgttgctgtattatcagaatcaggtctctgtgctcctggagatactgaccaggtggtattttcattggccaattcttatggaggtgcccctctagagaacattattgtgactttagcatcaaatgattctcttgtaacgatcattaataatgaattcagttatggtcaaatccttggatcagaaaatcattttgaagcagaatttcttatttcatcatcagagaacatgaactatggcgatattccattcatcttaacaatagatgctgaaataagtggcaatattcccagcggaataagctttgatcattaccaatcaaatatggaagtagatattccatttgggtttaatcaagatgggtatcctattgacgatataaatgtctacggttcaccaatcattactgatctatatggtaattcagcgcctcaaatatttttcactacggatagcacagtttatggtaaatggatgtctggatttgatgtgttaggatttcccattcatattagtagtaaggtatcaaccacagttgcagcaggtgacctagatggcgataatgataaagagcttgttttcggtactgaaattggcgatctctatgtactcaataaggatgcctctcaatttatggtgttcagtcagaatgaccagatcgtatcgtatccagtgttatatgattttgaagaatcaagtgaattagagatcttatttatatctaagaatgattcaatatcctccgttcatgtcattgacatattaggagaatatttgaatggttttcctatgatgattgaaggcgatctttctaatggagcagctgttacagacatggacctggatggccttggagatattattgtggttacgcttgatggcgttttatatgcaattcagaatgatggtagtattcgaccagactttccaatctttcttccttcaaatgtaaatacacctgttactttagcaaatatggatgaagacatcaatattgagatcatcgtgggtttagaagaaggaggaatccacattttgaacaatgatgggtcattaatgacaaattatgaaattgagggtgcatcagtagatggaggattatctgttgctgaccttgatcaagatggatcaatggaggttgtttttaatacagatgatcattatttacatgtatgggagccggaaagcaattcagaaattgatggatggccagtccacattggagaaatctctgtaactgagcctattataaaagacttaaataatgatttaaatctagagattataaacacaacaataacaggagatatacatatctttaatcgtgacggatctagatacgataattttccatatatatcaaatgatagcaccttatttactcctgcggttggagacctagatcaagatggtgatattgagatcattgtaggtacgaataataatttaaaggttttagatatactggatgatctaggagaacaatattcatggtcaacctatagaggaaatgcacatagagatggattttatgatgcttctcaatcttatttaaaaaatgaaaaagaaatacttcctatcaattttgaattgagagataattatccaaatcctttcaatccatcaacaaagataactgtctctatagatagagaaatgtttatgtctttgataatatacgatgtagcgggaaggtatataacaacattgttcagtgagataattaattcaggcgaaagttcagtgatatggaatggtagagatgatcatggtaaaaaagtatcaagtggaatctatttctatgaactacgttcagaaatgaatacaaaagcaaagaaaatggtactcattaaataat

SEQ ID NO: 222637 - DNA, 385 bp, Unknown
  Bacterial polypeptide expressing nucleotide sequence isolated from the Sargasso Sea
ggaggttgcacttgtcctggagatgtttcaaaaggatttggtggaggagcagattttgttatgcttggcggaatgtttgcaggtcatgacgaaggtgaaggtaaaattgtaaaatcaaatggatctaaatacatagaattttatggttctagttctgaaacagcaaataaaaaacattatggtgggctatctaattatagaagtagcgaaggaagaactgttagagttaaatatagaggaaaaataaaagacacaattcaagatattcttggtggaattagaagtagttgcacatatgtaggagctccttctttaaaacaattaagtaaatgtacgacttttgtaagagtaacaagacaatttaacgatacctttgcgcagtaaa

SEQ ID NO: 222638 - DNA, 795 bp, Unknown
  Bacterial polypeptide expressing nucleotide sequence isolated from the Sargasso Sea
tatgattgaggattttaataataatgaaaagaaggatataaattttaaaagcttaggattaaaaattttcttttctctcggattagtagtgatttgttataatttatttttctctagtactaatacatcaataaaattaattgacattgaaaaaaaagaaaaaatcataaaggaatttgggtatattttaaatgattacgaagtaaaacgtgataccattcaaaatggagactcttttggtgaaattttagaaaataataatctcttttatccaaaaatttataacatcgttcaagccactaataaagtattcaatattagaaaaattaatgttggaaggccatacacaattctttattccaaagactcgttaaaaacacctaaagtatttatctaccaacctaatcctgtggactatgttattgtttcattatctgattctatatgggcagagaaaaagcaaaagaaagttgaacttaaagaatttcaagcatcaggaacaatctacagttcactttcagaaactatggaaagcttaaaattaagcccacttttaacaaacgagctctcagaaatctatgcatggaatattgatttttttagacttgaaaagggagataattttaaaataatgtatacttcgagatatgtaaatgattcggtttacataggcttaaatagaatacacaatgcattttttgaacacaggggaaaaccattttatgctgttgaatttaagactgacagtttaagaaacatctacgaatattttgatgaaaatggaaaaaatctaag

SEQ ID NO: 222639 - DNA, 481 bp, Unknown
  Bacterial polypeptide expressing nucleotide sequence isolated from the Sargasso Sea
atgagaattgaagaagaaattaaactagattattcagatgttttatttcgacctaaaagaagtacattaaaaagtagaagtgaggttgatctaaaaagaaagtataaatttaagcactctaaattaaattgggaaggaataccaataatagcatcaaatatggatggtgttggagaaattggtgtggcatctaaactagcttcttttaatatgatgactgctctaacaaagcaacatggagacaaagaaataagaatcttacaaaaaaataaattgattcataatcatgtggctttaagttgtggaactagtaaaggtagttatttgaggttaaataatcttttaaaaaaaaatccaaaatttaaatttgtttgtatagatgtagcaaatggttattcagaaaattttagccagtttgtaagtgaagtaagaaaaaaacatcccaaaaaaactataattgctggaaatgtagttactgctg

SEQ ID NO: 222640 - DNA, 682 bp, Unknown
  Bacterial polypeptide expressing nucleotide sequence isolated from the Sargasso Sea
taagtttatttgcattgatgtcgcaaacggttatacagaacagttttctgattttataaagcaggtgcgtgctgagtttgaggaaaagattataattgcaggaaatgtctgcacgcctgagatgactgagcaattgatattgtctggtgccgatattgttaaagtagggattggtggaggttctgcatgtattacaagaaatgtggcaggcgttggaatacctcagttgagcgcggttattgattgttctgatgctgcacatgggattggaggaatggttatgtctgacggaggatgtacttgttcaggagatattagtaaggcctttggcgctaatgctgattttgtaatgttgggggggttgcttgcaggtcatgatgaaaatagtgataaagtaattgttgatgaagaaactggtgaaaaatcagtaaagttttatggcatggcaagcaataatgctttggaaaagttttacagtaataaaataaaaattgattataaagctagtgaaggaaagctggttaacattccctataaagggccacttgaagatactttactagacctactcggtggggtaaggagtacttgtacttacattggagcaaaaaaaataaaagacatttcaaaatgcacgactttcgtttgtgtaaataatcaattgaataattatttcaattag

SEQ ID NO: 222641 - DNA, 502 bp, Unknown
  Bacterial polypeptide expressing nucleotide sequence isolated from the Sargasso Sea
aatcggtccgggtagcgcatgtcttacacgaatgaagacgggtgttggtgttcctcaattatcagccatcatagaatgttctgatgcagctcatggattaggtggatttattattggtgatggtggaattacctgtccaggtgatatgtccaaggcatttggcggaggagccgattttgtaatgatgggaggtcagtttgcaggacatgacgaaaatccaggtgaagtaatagaagaaaatgggaaacaaatgaaattattttatggtatgagtagcgaacacgccatgaaaaaacactatggtaaaatggcaaattatcgttcctcagaaggaagagaaattaaaattccttacaaaggaccattggaaaatacaattttggattatttagggggcgtaagatcaacatgtacatacattaacgctaagtgtattaaacatattccaaaatgtacgacatttattttagctaaccagcaattaaacacacattttgtttaa

SEQ ID NO: 222642 - DNA, 859 bp, Unknown
  Bacterial polypeptide expressing nucleotide sequence isolated from the Sargasso Sea
tatgaaaatagaaaatgaagtgaaattagattttatcgatgtgttgatccgcccaaagcgttctacattgtcttcccgctcacaagtaaatttagttaaaacagttaattttgttaatagtggtcaaagttggaccggagtgcctatcatcacatctaatatggataccataggcacatttcaaatgtataacacgttaaaagagtataaaattattacttgtttaagcaaacattatacacttgaagatttccctgataatttagataaagagtattatatgttaagtaccggtattagtgatgctgaatatgataaacttactaccttaattgcaacattacacccgaaatttatttgtgtagatgtagcaaatggatacatgaaaaaattggtttcatttgttagaaaactgcgtgacaactaccccactatagtgattgcttgtggtaatgtagtatcccgagagatggtagaagaactaattttaaatggaggtgcagatattgtgaaagtaggcattggttccgggtcagtgtgcactacgcgtcttcaaaccggggtgggtatgcctcaattgtctgccgtgttggaatgctcagatgctgcccatggaataaatggtgccatcatctcagatggagggataacttgtcccggtgacatctctaaagcattgggtggtggagccgatttcgtcatgttagggtctatgctttcaggtcatgaggaatgtcttggtgaattgatagatgaagatggtgttaaatataaactgttttatggtatgtcatctgctaatgcgatgaataaatatcatggtggtgtagctaaatatagatcgtcagaaggaaaatgt

SEQ ID NO: 222643 - DNA, 646 bp, Unknown
  Bacterial polypeptide expressing nucleotide sequence isolated from the Sargasso Sea
tatgagaattgaagatgaaataaaattaacatttgatgatgtgttgattagacctaaaagaagtacattaatatctcgttcggaagtaaaacttgaaagagaatttaaatttagacacaataagcatacttgggaaggaattcctattttttctgccaatatggatactaccggtacttttgaaaccgctaaagcattacaaaaacataagatgctaactgctatacataaattttatactttaaatgattggaaagacaacatcgactcattagacccaaactatgtatcagtaacagttggacagtctcaagaagattatgatttaggtaaacaaatatttgaactcagtaaagatcttaagtttctttgtatcgatgttgcaaacggatatagagaagatttccttgaagctgtaaaaaaatacagagaaacatataaagataaaattattattgctggcaatgtcgccactagagaaatgactgaagcgttaatacttgcgggtgcagatatagtcaaaataggaattggtcctggttctgtctgtacaactagaagcgttgcaggtgttggttatccacaattatcatctatatcagaatgctcagatgctgcacatggcttaggagggcatgttttagcg

SEQ ID NO: 222644 - DNA, 570 bp, Unknown
  Bacterial polypeptide expressing nucleotide sequence isolated from the Sargasso Sea
tatgcgtattgaggaagatatcaagttggattatgccgatgttctatttcggccaaaaaggagcactttacatagtcgtaaagacgtaaagctccaacgtacgtataagttcaaatatagcaatcacgaatggtccggtgttcccttaatggccgccaacatggatggagttggggaacttcaaatggcagaaaaattagccgaacaccaaattatgacttgcttaactaaacagcatgatttcaaaacaataaaaaaattttcctctattaataaaatctttcctcatgttgtgctcagtaccggaacaagtgatgaggattacaaaaggctaaacgaaattttgaaagaatacagtttttttgaatttatctgtatcgatattgcaaatggttactctgatcattttagcaaatttgttagttcggttagaaagaaatatccaactaaaactataattgcgggtaatgtagtcacagcagatatgacccaagaactaattctggctggagcagatattgtaaaagtgggaattggtcctggaagtgtttgcaccacacgtattcagac

SEQ ID NO: 222645 - DNA, 350 bp, Unknown
  Bacterial polypeptide expressing nucleotide sequence isolated from the Sargasso Sea
atttggcggaggagctgactttgtaatgcttggtggtatgcttgcaggtcacgatgagggaaaaggtaagttagttaaatcaaatggatcaaaatttatagaattttatggctcgagttctgaaacagcaaacaaaaaacattatggcggtttatcagactatagaagtagtgaaggaaggactgtgagagttaaatacagaggaaaaataactgaaacaattaaagatatattaggtggtgttagaagtagctgcacttatgtcggtgccccatcgttaaaacaacttagtaaatgcacaacatttgtaagagtaacaaaacaatttaatgatacttttgtcaaataat

SEQ ID NO: 222646 - DNA, 666 bp, Unknown
  Bacterial polypeptide expressing nucleotide sequence isolated from the Sargasso Sea
catgttctttcatgatcttggtgaagatctaaaacaatttaatttcatttgtattgatgtcgcaaacggttatacagaacaattctccgatttcataaaacaggtgcgagctgagtttgataaaaagattattattgcaggtaatgtttgtacgcctgaaatgactgaacagctgatattgtctggtgccgatattgtaaaagtaggtattgggggaggttctgcttgtattaccaggaatgtggcaggagttggcataccacagttaagcgcagttatagattgttcagatgctgctcatggtataggaggtatggttatgtcagacggtggatgtacttgttctggagatataagtaaggccttcggtgcaaatgctgattttgtaatgcttggaggcttgcttgctggccatgatgaaaatagcgaaaaaataactgttgatgaagaaactggtcaaaaatcagtaaagttttatggtatggctagcagtaatgctttggaaaagtattacagtgacagtataaaaattgattataaagcaagcgaaggtaagttggtaaatattccatataaggggcgtctggaagatactttactggaccttctcggtggggtaaggagtacttgtacttatattggagcaaaaaaaataaaagacatttc

SEQ ID NO: 222647 - DNA, 385 bp, Unknown
  Bacterial polypeptide expressing nucleotide sequence isolated from the Sargasso Sea
tggtggttgcacatgccctggtgatgtttcgaaagcatttggtggaggagcggattttgtaatgcttgggggaatgcttgctggacatgatgaaggtaaaggtaaaattataaaatcaaatgggagtaagtatatagaattttatggatctagctcaattgttgccaataaaaagcactatggaggactttctgattatagaagcagtgaaggaagagctgttagagtaaaatatagaggaaaaataaaagatactatttcaaatattcttggtggtattagaagtagttgcacttatgtaggtgctccatcactaaaacaattaagtaaatgcactacattcgttagagtttcaaatcaattcaatagaacatttgtagattaa

SEQ ID NO: 222648 - DNA, 415 bp, Unknown
  Bacterial polypeptide expressing nucleotide sequence isolated from the Sargasso Sea
atggtcttgggtgctcatattatagctgatggtggttgcacttgccctggtgatgtttcgaaagcatttggtggaggagcggattttgtaatgcttgggggaatgcttgctggacatgatgaaggtaacggtaaaattataaaatcaaatggaagtaagtatatagaattttatggatctagctcaattgttgctaataaaaagcattatggaggactttctgactatagaagcagtgaaggaagagctgttagggtaaaatatagaggaaaaataaaagatactatttcaaatattcttggtggtattagaagtagttgtacttatgtgggcgctccatcattaaaacagttaagtaaatgtactacatttgttagagtttcaaatcaatttaatagaacatttgtagattaag

SEQ ID NO: 222649 - DNA, 415 bp, Unknown
  Bacterial polypeptide expressing nucleotide sequence isolated from the Sargasso Sea
catggcttggggtgcgcatataattgcagatggtgggtgcacttgtccaggtgatgttgcaaaaggttttggtggtggagcagattttgtaatgctcggtggcatgctcgcgggacatgatgaaggtaaaggtaaattagtaaaatcaaacggatcaaaatatattgagttttatggatcaagttctgatattgcaaataaaaaacattatggtggattatcagattacagaagtagtgaaggaagaactgttagagttaaatacagaggaaaaataaaagacactattttaaatattttaggtggtgttagaagtagttgcacttatgttggtgcaccatctttgaaacagttaagtaaatgtacaacatttgtaagagttagtaatcaatttaacgatactttttctaaatag

SEQ ID NO: 222650 - DNA, 400 bp, Unknown
  Bacterial polypeptide expressing nucleotide sequence isolated from the Sargasso Sea
ggcacatattattgcagatggaggctgcacttgccctggagatatagctaaagctttcggcgggggagctgattttgttatgcttggaggtatgtttgctggtcatgacgagggcggtggaaaagttgtaaaaagaaatggctcaaagttaatagagttttatggttcgagctcggaaacagcattaaataaacattatggtggtcacgcagattatagaagtagtgagggaaaaaaggttcaaataaaatatagagggaagattaaagatacaattttgaatattttaggtggattgagaagtagttgcacttatgttggcgcaccatctttaaaacaattgagcaaatgcacaacgtttgtaagagtaaatcaacaatataacgatacttttgagtaa

SEQ ID NO: 222651 - DNA, 463 bp, Unknown
  Bacterial polypeptide expressing nucleotide sequence isolated from the Sargasso Sea
agtttgtgctgaatgttccgaaattgcaaatggattaggtggacatatggtatctgacggaggttgtaaattacctggtgatattgctaaagcctttggaggaggtgcgcactttgtaatgatgggcggtatgatggctggtcatgatgaatcgggaggtgaccttgttgaagaaaatggtaaacaatataaaatgttttatggaatgtctagtgaatatgcccaagataaacataatggtggtatggccaaatatcgtagcagtgaaggtaaagtaaaaaaaatcccatataaaggtgaagtatctgtaacaatgcaagatattttaggaggtctacgttcaactggaacatatatgggtgcttcacgtattaaagattttccaaagtgttgtactttcgtaaaagttaatcgacaagttaatgaagtatatagtaatcctgaatttgatgtaaaaaattaa

SEQ ID NO: 222652 - DNA, 418 bp, Unknown
  Bacterial polypeptide expressing nucleotide sequence isolated from the Sargasso Sea
gctcatggacttggtgcacatgtaatagctgatggcggttgtacatgtccaggtgatgtttctaaagcttttggaggtggtgcagattttgtaatgttaggaggcatgcttgcaggtcatgatgagggaaaaggtaaaatagtaaaaattaatggcaataagtatattgagttttatggttctagctcagaggtagctaataaaaaacattatggtggactttcttcctatagaagcagcgaaggaagaaaagtaagagtaaagtatagaggtaaaattaatgatactattttaaatcttcttggaggtgtaagaagtagttgcacttatgtaggagcgccatcattaaaacaacttagtaaatgcacaacctttgtaagagtatcaagtcaatttaatgatagtttaattaagtaaa

SEQ ID NO: 222653 - DNA, 445 bp, Unknown
  Bacterial polypeptide expressing nucleotide sequence isolated from the Sargasso Sea
tgcggtaatggaatgtgcagatgcagctcatggttaggcgctcacataattgcagatggtggatgtacttgccctggtgatgttgcaaaaggatttggagcgggtgcagactttgtaatgcttgggggcatgttagcaggtcataaagaaggtggtggaagtgtaattgaaaaaagtggtaaaaaatttattgagttttatggatcaagttcagaagaagctaatgaaaaacattatggtggtttagcaaattatagatcttcagaaggtaaaaaagtaaaattacctctaaagacttctatagataaaactatcagagatattcttggaggagttagaagtagttgtacatatgtgggagcgccatcattaaaacaattaagtaagtgtactacatttgttagagttaatagtcagtataatgatacttttgggaaaatataat

SEQ ID NO: 222654 - DNA, 274 bp, Unknown
  Bacterial polypeptide expressing nucleotide sequence isolated from the Sargasso Sea
atggggaaaagtataaaacatttttatggtatgagttctgacacggccatgaataagcatcacggaggtgttgctagttatcgttcctcggaaggaaaaacgataagggtaaaacatcgtggacttattagaaatactgtggaaaatattcttggcggggtgcgctctacttgcacttatattggggctaaaaaaataaaagatatgcctaaatgcgccacgtttgttagggttaaccaacaatcaaacgaagtttttgggaaaaatgtatgag

SEQ ID NO: 222655 - DNA, 419 bp, Unknown
  Bacterial polypeptide expressing nucleotide sequence isolated from the Sargasso Sea
tcatggattaggagcgcatattattgctgatggaggctgtacttgtcctggtgatgttgcaaagggatttggtgctggtgcagactttgttatgcttggtggaatgttagcaggccacaaggaaggaggaggtgatataattgaagaaaatggaagtaattatatcgagttttatggatcaagttctgaagaagctaatgagaaacattatggcggtcttgcaaattatcgatcatctgaaggtaaaaaagttaaaatacgaatgaagaattcgctagatagtacaattagagatattttaggaggtgtgcgaagtagttgtacatacgtaggcgcttcatcattaaagcagctaagtaagtgcacgacatttgtaagagtaaataatcagtataatgatacttttgggaaagtgtaga

SEQ ID NO: 222656 - DNA, 571 bp, Unknown
  Bacterial polypeptide expressing nucleotide sequence isolated from the Sargasso Sea
aatgagaatagaagaagagcttaaactagattactctgatgttttatttagacctaagagaagtactcttaaaagtaggaaagatgtaaatcttttaagaacttataggtttaaatatagtaaaaatgagtggtcaggtataccaataatggcagcaaatatggatggggttggagaattaagtgttgcagaaaaattaaatgagtatggaatgattacttctttaacaaaacaacatgatgttaaaaaaattaaacaaaataaaaatataaaaaaaatatatcccaacattgcacttagtgttggtataaaaaaagaagattttcaaaatttagataaagtattaaaagaatttagtttttttaaatttatttgtatagatgttgcaaacgggtacacagaacatttcaccaattttattaaatcagtaagagataaatatccaactaaaacaataattgcaggcaatgtagtaactgctgacatgactcaagaattagttttaagtggagcagatattgtaaaagttggaattggacctgggagtgtttgcacaacaagaattcaaaca

SEQ ID NO: 222657 - DNA, 595 bp, Unknown
  Bacterial polypeptide expressing nucleotide sequence isolated from the Sargasso Sea
atgagaattgaggaagagcttaagttagattattcagatgtactgtttagacctaaaagaagtacattaaaaagtcgtaaggacgtaaatcttttaagaacctatagattcaaatatagcaagaatgaatggtcaggtattccaataatggcagcaaacatggatggtgttggagaattaggtattgctgaaaaactaaatgaatatggaatgattacatcattaacaaaacaacatgatgttaaaaaacttaaacaaaataaaaatattaaaaaaatctttcctaatatcgcacttagtgttggtataaaaagagaagattttcaaaatttagataaagttttaaaagaatttagtttttttaaatttatttgtattgatgttgcaaatgggtacacagagcattttaccaattttattaaatcagtaagagataaatacccaactaaaacaattattgcaggtaatgttgtaacagctgatatgactcaagaattagttctaagtggagcagacatcgttaaagttggaattggacctggaagtgtttgtacaacaagaattcaaaccggagttggttatccgcaattaagtg

SEQ ID NO: 222658 - DNA, 736 bp, Unknown
  Bacterial polypeptide expressing nucleotide sequence isolated from the Sargasso Sea
tatggaatatgccttccctacatttggattagacaataaaaactatattactgattacctaaaccatatatccgatagtacaggacacaccgcaaaaattattgttctagacgttccaaatggatacatagatagtttcgcttctttaatatctgatctcaaagtattaatcccagatataaccatatttgcagggaacgtagttactccagaaggtgtggaactcttagctaatgcgggtgtagatggcgtcaaattggggatcgggtctggatctgtttgcactacttcaatagaaactggagtaggttatcctcagttgtcagccatattagactgcgctgatacagccaaaaataataacgtagtactgatttctgatggaggaatcagcgaatccggcgatctgggaaaagcattcgttgcaggaacagattttattatgattggaggtattctagctgggcatacagagggaggagcgcctactattacagaaaatgacacggaatatagattgtattatggtatgagttctgaagaagcaatgaatacacactacgacggcatagcggaatacagaaccgcagaaggtatatctaaactcgtaaaagacaaaggtccggttgcaaacaccataaaacaattacttggcgggcttaggtcctcttgtacataccttaattgtcagaatatcgctgagttaacatcaaagggacaattcataaaaatttaa

SEQ ID NO: 222659 - DNA, 1024 bp, Unknown
  Bacterial polypeptide expressing nucleotide sequence isolated from the Sargasso Sea
atgagtgaagcactgacctacgacgacgttctgctggttccatcttacaaccactgggaatcccgaaaagtggtcgacactaatatcactgatcgctccggtttgctgagccttgaaataccagtaatgacttccaacatggacaccatcaccgaagtcgatatggcaaattttatcaggagcaaaggaggtgtcggggtgctccatcgtttcatgtcaattgaagaaaacgtgaagatgcttggagtctgcaactcgcccgtttttgtatctgtaggatgttcagaagaggatctccaacgggcagaagctctgcgggatgcgaatgcaggatttttctgcatcgatgtcgcccatgcccatgcgaagtatgtcggtcgtaccctgaaaaatctccgtgagatgcttggtaagggagcctgcattatggccggcaacgtggcgacttatgcaggcgcagattacctcgcttcctgcggtgctgatatcattaaagtcggtattggcggtggttccgtctgtaccacccggatcaaaaccggattcggtgttcctaatctgacggcaatcaaagattgtactagggttgatcgttcagtcgtcgcggatggtggaattcgtaatcccggtgacatcgtcaaggcccttgcctttggtgccgattttgtgatgatcggcagcatgctggcaggaacccgacccactccgggaaaagtcatcacccgcaccaccgaaagtggacaggagttgaagttcaagatgtatcgaggtatggcaagcagtgaagttcatgaagactaccacggaggattagccgattggaaaactgcggaaggtgtttcgatggaagttgaataccgagaaaccgaagaaattatcattgcagacatcgtaggcggattacgctcgggaatgacctatgccggcgccgcttcgatcagcgaactacaacgcaaactggattacgtcaggattaccaacgcggcaaggattgaaaaccttccccatcgcaccatgcactgaa

SEQ ID NO: 222660 - DNA, 829 bp, Unknown
  Bacterial polypeptide expressing nucleotide sequence isolated from the Sargasso Sea
aatgattacatgttttcataaatatattgatgttgataatatcataacaaatcattgtagtccccatttttttatgttaagcactggtattagtgataatgacctagaaagattacaagcaaatataaaaaaattatcagataacaatatcaacgttgaatttatatgtgtagacgttgcaaacggatacatgtttaaattagttgagttttgtaaaaaaattagggatttataccctaataaaactattgtagctggaaatgttgtaaccagagaaatggttgaagaacttattattaatggtaaagttgacattgtgaaagttggtattgggtctggtgctgtttgcacaactagacttcaaacaggagttggtatgccacaattttctagtataattgaatgtgcagatgcggcacatggattgggtggtcgtattattagtgatggtggtatatgttgtcctggggatatttctaaagcaattggagcaggttctgattttgttatgatgggtagtatgttttcaggacatgatgaatgtgcgggaagtcttatttcagaagatggtaaatcttataaattattttatggaatgtcttctgatacagctatgaataaatataatggaggtgttgcaaagtatagatcatctgaaggtaaaactgtgaaagttccttataaaggatgtgtaacagatactgtgcaaaatatattaggaggagttagaagcacatgcacatatgttggtgctagacgattgaaggatttaggaaaatgttgtacgtttatgagagttaatagtcaagtaaatacattttactcataa

SEQ ID NO: 222661 - DNA, 622 bp, Unknown
  Bacterial polypeptide expressing nucleotide sequence isolated from the Sargasso Sea
tctgagactgaactatctgagataattggagtatctaatacatatcccgacattgcatttgtagggttggatgttgcaaatggatacaccgttaattttgttgaatcggttaaacgactaagagaacatctgccgtctgctactattattgctggtaatgtggtgacaggagatatgactgctgagttgattctatctggtgttgatatcgttaaggttggtgttgggcctggttctgtatgtaccactcgtatcaagacaggtattgggtatccacaattaagtgcagtgatggaatgtgcagatgcagcacatggacttaatgcacatatcattgcagatggtggttgtaattcatctggtgatattgtcaaggcgtttgctggtggtgcagactttgttatgataggtggtatacttgctggacatgatgagtgtgagggtgaattagtatttgaagatgataacccagaacctataggtatgcagttctatggtatggcatctcgtactgcaatgaacaaacatggacactctaatagagagtatcgtggggaagagggtaagactgtatctgttccctatcgtggtgcggtgagggataccatagtagatattctaa

SEQ ID NO: 222662 - DNA, 633 bp, Unknown
  Bacterial polypeptide expressing nucleotide sequence isolated from the Sargasso Sea
aatgtatatcttcatttttgtgagaattgaagaagaactaaaactagattattccgacgtacttttcagacccaaaagaagcactcttaaaagtagaaaagacgttaatttaaaacgaacttatcgttttaaatatagcaataatgagtggtctggtatcccaattatggctgcaaatatggatggtgttggtgaactaggtattgctcaaaaattatcagaatatggaatgattacatgtttaacaaaacagcatgatataaaaaaaattaaacaattcaaaaaaattaaatctatttatcaaaatattgcattaagtattggaactaaaaaggaagatttcgaaaacttaaataaagttttaaaagaattcagctttattaaatttatttgtattgatgttgcaaatggttattcagaacatttcagtaaatttttaaaatctgtcagagataaatatcctacgaaaactataatagctggtaacgttgtaactgctgacatgacacaagaacttattctatcaggagcagatatagttaaggttggtattggacctgggagtgtttgtacaacaagaatacaaactggagttgggtatccacaattaagtgctgtaattgaatgtgctga

SEQ ID NO: 222663 - DNA, 592 bp, Unknown
  Bacterial polypeptide expressing nucleotide sequence isolated from the Sargasso Sea
atgctactcaatgatgaaattaagttagattattcagatgttttaattaggccaaagagatcaactatgagctctcggtctgaggtagaccttgagcgcacacataaattcttatggagtaaaagggaatggacaggaatcccgattatggcagcaaacatggataccgttggaactccggctatgcataaagtgctatcaaaacatggcttgattacctgtccagctaggcactttttggagaaagatattgaaggatttaataaaaatgatagtaacatttgttggtttgggggaatcgaagatatttccacgctttttaaaatacaagccgattttataggtcttgatgtagcgaatggatatacgattcgatttgtagatgccgtcaaaaaattgagagaaacatgccccaacgcaaccattgcagcgggcaatgtggttacagctgatatgacccaagaattaatcctagcgggtgcagacattgttaaagtgggtatagggcccggctcagtctgcactaccagggttaagaccggaattggctatcctcaattgagtgcggtcatagaatgcgcagatgcagccc

SEQ ID NO: 222664 - DNA, 569 bp, Unknown
  Bacterial polypeptide expressing nucleotide sequence isolated from the Sargasso Sea
tatgagaattgaagaagaaataaaacttgattattctgacgtgctttttagaccaaaaagaagcactttaaaaagcagaaaacaagttgatttaacaagaaaatatcagtttaggcattcaaattttgtttgggagggcgttcctattattgcttcaaatatggatggagttggggaaattgacgtagcaaaaaaactttacgagcataagttaatgactgcactaactaagcaacatgtaattaaggatttaaaagaacttgtacaaaataagagcatatataattttatttctttaagttgtggtactagcaatgaaagttataaacgattaaatcaaattattaataaatatccaagtattaagttcatatgtatagatgtggctaatggatattctgaaaactttagcagttttgtatcagacgtaagaaaaaaacatccaaaaaaaactattattgcaggaaatgttgttacagctgatatgacacaagagctagtacttagtggagcagatatagtaaaagttggaattggtcctggaagtgtatgtacaacaagaatacaaa

SEQ ID NO: 222665 - DNA, 580 bp, Unknown
  Bacterial polypeptide expressing nucleotide sequence isolated from the Sargasso Sea
gttgtataagttcaaatttgtgagaatagaagaagagctaaagctagattattcagatgtactttttagaccaaaaagaagtactctatcaagtcgtaaagacgtaaatcttaaaagaacctacaaatttaaatatagcaataatgagtggtcaggtattcctattatggctgcaaatatggatggtgttggtgaattagggatagcagaaaaattatctgagtatgggatgattacatgcttaactaaacaacatgatgttaaaaaaatcaaacaatttaaaaaaattaaatcaatatatccaaatattgcattaagtattggaataaaaaaagaagattttcaaaatttagataaagttttgaaagaatttagttttataaaatttctttgtattgatgttgcaaatggttactccgaacgttttagtgcatttttaaaatcggtaagagataaatatccaacaaaaactataattgcaggtaatgttgttacagcggatatgacacaagagttaatacttagtggagctgatattgtaaaagttggaataggccctggtagtgtttgcactacaaga

SEQ ID NO: 222666 - DNA, 492 bp, Unknown
  Bacterial polypeptide expressing nucleotide sequence isolated from the Sargasso Sea
gtgtttgtacaacaagaattcaaacaggagtagggtatccacaattaagtgctgttattgaatgtgcagatgcagcacatggtcttggtgcgcatgtaattgctgatggaggatgcacatgtcctggagatgttgcaaaaggttttggtggtggtgcagattttgtaatgttaggtggaatgttagcaggtcacgatgaaggtaaaggaaaaatagtaaaagcaaatggttctaaatatatcgaattttatggttcaagttcagaagttgctaacaaaaaacattatggtggattagcagattacagaagtagtgaaggaagaaaagttagagttaaatatagaggtaaaataaacgataccgttttaaatattcttggtggtgttagaagtagttgtacttatgtaggagcaccttcattaaaacaactgagcaaatgtacaacttttgtaagagtgtctagtcaatttaatgatacttttgttaaataaa

SEQ ID NO: 222667 - DNA, 877 bp, Unknown
  Bacterial polypeptide expressing nucleotide sequence isolated from the Sargasso Sea
ttgttaattaatgaagatataaaacttgattattcagatgttttaattagaccaaagaggtctacgatgagctccagaggagaggtaaggcttcaaagaacacatcgcttcctttggagtaagaaaaagtggactggaattccaatcatgtctgcaaatatggacacagttggaacaccatcaatgcataaagttctatcaaaacataaactcataacctgtccggcaaagcatcaccttaaaaaaaattctaatgaatttaagacaggccaaccaaatatatgttggtttggtggcatagatgacatatcaaaattatcaaaagctaactcaggctttatcggtcttgatgtcgcaaacggatataccattaaatttgtagattccgtaaaaaagctaagagataaatgtcccaatgctactattgctgcaggaaatgtagttacagcagatatgacacaggaattgatcttagcaggagcagacatagttaaagttggtattggacctggttcggtttgcacaacaagaattaagactggcataggttatccgcaactaagtgcggttattgagtgtgcagatgctgctcacggacttaatgcacatattattgctgatggtggatgcacgagttctggagatattgtaaaagcttttgctggaggtgcagattttgtaatgattggcggaatgttagcaggacatgatgaatgcgatggcgaagttgaagatggtgttatgaagttttatgggatggcttctgaatcagcaatgaccagacatagcaatcataacaattataggggaacagagggaaaaacagttgaagttgaatacagaggtaaagcgaacgatacaataaaagatatttgag

SEQ ID NO: 222668 - DNA, 637 bp, Unknown
  Bacterial polypeptide expressing nucleotide sequence isolated from the Sargasso Sea
atgagaatcgaagaggaaattaaattagattattctgatgttctttttaggccaaaaagaagtacattaaaaagtagaagggaagttaatctcaagagaaaatatagatttaagcattcaaaattgatttgggagggagtgccaattattgcatctaatatggatggtgttggtgaagttggtattgctaaaaaattagcatcatttaatatgatgacagcacttactaagcagcacgacaatatagaaattaaaaatttacaaaaagcaaaatcaatacataattatgtagcgttaagttgtggaacaagcaaagatagttttgcaagattaactaaacttttgaaaaaaaaccctaaatttaaatttatctgtattgatgtagcaaatggatattcggaaaattttagtcattttgttagtgaggttagaaaaaaatatcctaccaaaacaattatagctggaaatgtagtaacagctgatatgactcaagaattagttttaagtggagcagatattgtaaaagttggcataggccctggtagtgtttgtactacgagaattcaaactggagtaggttaccccccaattaagtgcagttctagaatgtgcagatgctgctcatgggcttggagca

SEQ ID NO: 222669 - DNA, 716 bp, Unknown
  Bacterial polypeptide expressing nucleotide sequence isolated from the Sargasso Sea
aatgagaattgaagaagagttaaaattagattattcagatgtgctttttagacctaaaagaagtacattaaaaagccgtaaagacgtaaatcttctaagaacgtacagattcaaatacagcaagaatgagtggtcaggtataccaataatggcagcaaatatggatggtgtaggggaattaagtgttgctgaaaaattaaacgaatatggaatgattacatctttaacaaaacaacatgatgttaaaaaaattaaacaaaataaaaatattaaaaaaatatatcctaatatcgcgcttagtgttggcattaaaaaagaagattttcaaaatttagataaagtattaaaagaatttagtttttttaaatttatttgtattgatgttgctaatggatatacagaacattttaccaatttcattaaatcagtaagagacaaatatcctactaaaacaatcattgctggcaacgtagtaacagctgatatgactcaagaattagttcttagtggagcggatattgttaaagttggaattggacctggaagtgtttgcacaacaagaattcaaactggtgttggctatccacagttaagtgcagtaattgaatgtgcagatgcagcacatggactgggtgcacatgtaatagcagacggtgggtgtacatgccctggcgatgttgctaaaggttttggtggtggtgctgactttgtaatgc

SEQ ID NO: 222670 - DNA, 304 bp, Unknown
  Bacterial polypeptide expressing nucleotide sequence isolated from the Sargasso Sea
aagtgacaaagactttaagaggataagtgatattttaaaagaatatagtttttttcaatttatatgtatagatatagcaaatggttattctgatcattttagtaaatttgtaaaatcagtaagagaaaaatacccaacaaaaattattattgctggaaatgtagtcacggccgatatgacccaagaattaatacttagtggtgcagacattgtgaaggtaggtattggtcctgggagtgtatgtaccacaagaattcaaacaggtgtgggttatcctcaattaagtgctgtaattgaatgtgca

SEQ ID NO: 222671 - DNA, 328 bp, Unknown
  Bacterial polypeptide expressing nucleotide sequence isolated from the Sargasso Sea
gttggaattggacctggttctgtatgtaccacaagattacaaactggcgtaggttatccacaactaagtgcagtaattgaatgttcagatgcagcccatggtttaggtgcacatataattgctgatggaggttgcacttgtccaggtgatgttgcaaaaggttttggtggtggggctgactttgtaatgttgggtggaatgttagcaggccatgatgaaggaaaaggtaaattagttaaatctaatggatcaaaatatatagagttttatggatcaagttctgaaacagcaaataaaaaacattacggtggattatcagattatagaa

SEQ ID NO: 222672 - DNA, 599 bp, Unknown
  Bacterial polypeptide expressing nucleotide sequence isolated from the Sargasso Sea
tttgttaattaatgaagatataaaacttgattattcagatgttttaattagaccaaagaggtctacgatgagctccagaggagaggtaaggcttcaaagaacacatcgcttcctttggagtaagaaaaagtggactggaattccaatcatgtctgcaaatatggacacagttggaacaccatcaatgcataaagttctatcaaaacataaactcataacctgtccggcaaagcatcaccttaaaaaaaattctaatgaatttaagacaggccaaccaaatatatgttggtttggtggcatagatgacatatcaaaattatcaaaagctaactcaggctttatcggtcttgatgtcgcaaacggatacaccattaaatttgtagattccgtaaaaaagctaagagataaatgtcccaatgctactattgctgcaggaaatgtagttacagcagatatgacacaggaattgatcttagcaggagcagacatagttaaagttggtattggacctggttcggtttgcacaacaagaattaagactggtataggttatccgcaactaagtgcggttattgaatgtgcggatgctgcccacggac

SEQ ID NO: 222673 - DNA, 640 bp, Unknown
  Bacterial polypeptide expressing nucleotide sequence isolated from the Sargasso Sea
tatgagtaaatatttaaagtattccgatgtctcactagttcctaactatagcgaagtctatagtagatcagactgcgatacatctgtagagttgtttggcaaaagatttaaactacccatcattcccgcaaatatgaagtctgttatgaatatggacttagcgaaatggatgagtcaaaatgggtatttttatattatgcatagatttgaaaacaagcttagtgaagttgtatctcagatgaacaatgaagactgggacgtaatttccgtgagcatgggagttcaaataaaagacaaaaaagacttagtggtaatttctaaagccaatcaaaaggttgactatattacaatcgacattgctcacggtcattgtgaaagaatgaaaattgcaattgaagctgtaaagaaatttctacccgatacaaaaattattgctggcaacgttgcgactccagatgctgttgccgacctatctgcttggggagctgatattgtaaaggttggaataggccaagggtctccatgcacaaccaaacacaaaacaggattcaccatgccaatgttttcttgcgtaatgaaatgctcgggcgttagtttcaataaagaaaatggattcatgatctccgaagcctccatgcaa

SEQ ID NO: 222674 - DNA, 445 bp, Unknown
  Bacterial polypeptide expressing nucleotide sequence isolated from the Sargasso Sea
tgttcagatgctgctcatggcttaggaggtcatgttttagcggatggaggttgtaaatatccaggcgatgtatcgaaggcttttggtgctggagcagattttgtaatgttaggcggtatgtttgcaggacatgaagagtctggaggtgaacttgttacaggtgaagatggtgagcagtacaaagatttttatggtatgtcttcaactaaagctcaacaaacatattatggcgacttagctttacatagagctccagaaggaaaaaaagtaagattaaaatacaaaggacctatagacaaaacagtacaatcaatcctaggtggcatgaggtcagcttgttcttatgtaggggctaaaaaacttaaagatttaccaaaaagcacaacctttattagagtcacccaaactactaatgagatatacacaggctcagaaaatctttgaa

SEQ ID NO: 222675 - DNA, 451 bp, Unknown
  Bacterial polypeptide expressing nucleotide sequence isolated from the Sargasso Sea
tcaattaagtgctgtaatagagtgtgcagatgccgcacatggacttggtgcgcacgtaatagctgatggtggttgtacatgtcctggagatgtagcaaaaggttttggaggtggtgcagattttgtaatgctaggtggcatgcttgcaggacatgatgagggaaaaggtaaaataacaaaaattaatggtgataaatatattgagttttatggttccagctcagaagtagctaataaaaaacattatggcggactgtcgtcctatagaagcagcgaaggaagaaaagtaagagtaaagtatagaggtaaaattaatgacactattttaaatcttcttggaggtgtaaggagtagttgcacatacgtaggagctccatcattaaaacaactcagtaaatgtacaacttttgtaagagtatcgagtcaatttaacgatagtttgataaagtaa

SEQ ID NO: 222676 - DNA, 892 bp, Unknown
  Bacterial polypeptide expressing nucleotide sequence isolated from the Sargasso Sea
tttgttaattaatgaagatataaaacttgattattcagatgttttaattagacccaagagatctactatgagctccaggggagaagtaagacttcaaaggacacatcgcttcctttggagtaagaaaaagtggactggaattccaatcatgtctgcaaatatggacacagttgggacaccatcaatgcataaagttttatcaaaatataaactcataacttgtccggcaaaacatcaccttaaaaaaaattccaatgaatttaagacaggccaatcaaatatatgttggttcggtggtatagatgacatatcaaaattatcaaaagccaactcaggctttattggtcttgatgtcgcaaatggatataccattaaatttgttgattccgttaagaagctaagagataaatgtccaaatgctactattgcggcaggaaatgtagttacagcagatatgacacaggaattgatcttagcaggagcagacatagttaaagttggaattggaccaggttcagtttgtacgacaagaattaaaactggtataggttatccgcaactaagtgcggttattgaatgtgcggatgctgctcatggtcttaacgcacatataattgctgacggtggatgcacgagttctggcgatattgtaaaagcttttgctggaggtgcagactttgtcatgattggtggcatgttagcaggacatgacgaatgcgatggtgaggttgaagatggtgttatgaagttttatggaatggcatctgaatcagcaatgacaagacatagcaatcacaatgattacagaggaacagagggaaaaactgttgaagttgagtacagaggtaaagcaaaaaataccataaaagatattttgagcggtattcgatca

SEQ ID NO: 222677 - DNA, 586 bp, Unknown
  Bacterial polypeptide expressing nucleotide sequence isolated from the Sargasso Sea
cttgcacaatctcggcacaatctcggcacaatctcggcacaatctcggcacaatctcggcgcaatctcgtcaaaaggtgggcatcgggccgggctcggtctgcacgacgcgcaagcagaccggcgtcggctatccgcaggcgatttcacaacccgccagccaaagagcatctgcagcccaccagcccaccagcccaccagcccgccaaaagctagctgcgcgtcagccgcgcgtcggccgcgcgcagctctccgcgattgtcgagtgcatggacgcggcgcacggcctcggggggcacatcatctccgacggcggcatcacgtgcccgggcgacgcggccaaggcgttcgccgcaggcgccgacttcatcatgtgcggcggcctgttcgcgggctgcgacgaggcggcgggcgcgctcgtcgagcgcgacggcaggaagtacaagcagttctacggcatgagcagctcgacagcgatgacgaagcacgtgggcggcgtcgccgagtaccggtcctccgagggcaagacggtcgaggtgcgagctgacgagctccgagacacaggacgaggtctagccgagatctag

SEQ ID NO: 222678 - DNA, 616 bp, Unknown
  Bacterial polypeptide expressing nucleotide sequence isolated from the Sargasso Sea
aatgagaattgaagaagaattaaagttagattattcagacgttttatttagacccaaaagaagtacattaaaaagtcgtaaagatgtaaatttgctaagaacttacagatttaaatatagtaaaaatgaatggtcaggcattccaataatggcagcaaacatggatggtgttggagagcttagtgtagctgaaaaattaaatgaatatggaatgattacatctttaacaaaacaacatgatgtaaaaaaaattaaacaaaataaaaatattaaaaaaatataccctaatattgcacttagtgttggtataaaaaaggaagattttcaaaatttagataaagtattaaaagaatttagtttttttaaatttatttgtattgatgttgctaatggatatacagagcattttaccaatttcattaaatcagtaagagataaatatccaactaaaacaataattgctggtaacgttgtaacagctgatatgacgcaagaattagttctaagtggagcagacatcgttaaagttggaattggacctggaagtgtttgcacgacaagaattcaaactggagttggctatcctcaattaagtgcagtaatcgaatgtgctgat

SEQ ID NO: 222679 - DNA, 616 bp, Unknown
  Bacterial polypeptide expressing nucleotide sequence isolated from the Sargasso Sea
atgagaattgaagaagaactaaagttagattattctgatgtattgtttaggcctaaaagaagtacattaaaaagtcgtaaagatgtaaatttactcagaacttacagattcaaatatagcaaaaatgagtggtcaggtattccaataatggcggcaaatatggatggtgtcggagagctaagcgtagctgaaaaattaaatgaattcggaatgattacatctttaaccaaacaacatgacgttaaaaaaattaagcaaaataagaatataaaaaaaatatttccaaatatcgctcttagcgttggtattaaaaaagaagattttcaaaatttggataaggtattaaaagaatttagtttttttaaatttatttgtattgatgttgctaatggatacacagagcattttacaaattttattaaatcagtacgagacaaatatccaacaaaaacaatcattgcaggaaatgtagtaacagctgatatgactcaagagttggttcttagcggagctgatattgttaaagttggaattggacctggaagtgtttgtacaacgagaattcaaacaggagttggttaccctcaattaagtgcggtaatcgaatgtgctgacg

SEQ ID NO: 222680 - DNA, 506 bp, Unknown
  Bacterial polypeptide expressing nucleotide sequence isolated from the Sargasso Sea
aggtataggatcgggtagtgtctgtactactcgcctacaaacaggagtaggaatgccacagctttctgctgttatggaatgtgctgatgcagcccatggtgttagaggtcatataatttcagatggtggaatagttcatcctggggatatatcgaaggcatttggagggggagctgattttgttatgatgggttctatatttgctggccatacagaatgtgctggagatctaatagaagaagatgggaagcaatataaactgttctatggtatgtcaagtgatacagctatgaataaatatcatggcggagtggcaaaacatagatcgagtgaaggaaaaactgttaaaatcccatatagaggagatgttaacaaaacaatacaaaattttttagggggagtacgatcatcttgtacatatgttggggcaaaaagattaaaagatttacctaaatgttgttcttttattagggtaaataacatagttaatacagtttataattaga

SEQ ID NO: 222681 - DNA, 604 bp, Unknown
  Bacterial polypeptide expressing nucleotide sequence isolated from the Sargasso Sea
atgcgcatcgaagaagatatcaagctggattacgccgacgttttatttcggcctaagcgtagcacattatcaagccgtaaagacgtagaactcaaacgtacctataaattcaaatatagcaatcatcaatggtccggtattcccattatagctgctaacatggatggtgttggagaagtagaggttgcaaaaaatttagctaaatttggaataatgacatgtttaacaaaacaacatgacctaaaaacaattaaacgtaattcgtctgtaaaaggtattcattcacatctaattcttagcacaggaacaagcaatgaagactacaagcggctaaatgaaataatgaaggaatgtagtttttttgaatttatatgtatcgatattgcaaatggatattctgatcatttcagtaaatttgtcagttctgtaagagaaaagtatcctactaaaactataatcgcaggaaatgttgttacagcagatatgacgcaagaattagttatgaatggagctgatatcgtgaaagttggcataggcccaggaagtgtttgtacaactcgtatccaaacaggggtaggttacccacagttaagtgctgttattg

SEQ ID NO: 222682 - DNA, 430 bp, Unknown
  Bacterial polypeptide expressing nucleotide sequence isolated from the Sargasso Sea
atgtgctgatgctgcccatggtttaggggcacatataattgctgatggaggttgtacttgtccgggtgatgtcgcaaaagctttcggtggaggtgcagattttgtgatgcttggaggaatgtttgctggtcacgatgaaggtgaaggtaagttaataaaatcaaatggtcataaatttatagaattttacggatcaagttctgacatagcaaataagaaacattatgggggtttgtctgactatagaagtagtgagggcagaacagtgagaattaaatatcgaggaaaaattaaagatacgataaataatattcttggtggtgtcagaagtagctgtacttatgtgggagccccttctcttaaacaacttagtaaatgtactacttttgtaagagtagctaaacaatttaacgacacttttgctaagtaa

SEQ ID NO: 222683 - DNA, 1048 bp, Unknown
  Bacterial polypeptide expressing nucleotide sequence isolated from the Sargasso Sea
atgagaattgaagatgagattaaattaacttttgatgatgtacttattaggccaaaaagaagtacattagtttcaagatcagaagttattttagagagagattttaaatttaaacatactgatgtgacttggacgggtgtaccaattttctctgcaaatatggatacaacaggtacattcgaaacagcaataactttacagaaacataaaatgttaacagctatccacaaattctattctttagaagaatgggaaaacaatatcgaaaaattagacccagaatttatttctgtaacagtcggtcaatcagatgatgatttaaatctaggaaaaaaaatatttgagttaaacaatgacataaaatatttatgtattgatgttgcaaatggatacagagaagattttattgattcagtaaaaaattatagagaaacatttcctaacaaaattattattgcaggcaatgttgcaactcgagagatgacagaggcattaattcttgctggtgcagatattgtaaaaattggaataggtccaggttctgtatgtaccactagaagtgttgccggtgtgggttaccctcaactatcttcaatttcagaatgttctgatgctgctcatggtttaggaggtcatgtaatggctgatggaggttgtaaatatccaggcgatatttcaaaagcttttggtgcaggagctgattatgtaatgttaggcggaatgtttgccggacataaagaatcggggggagagctggttacaggtgatgatgggattcaatataaagatttttacggaatgtcttcgacaaaagctcaacaaacttattatggtgatctagctgaacacagagctgctgagggtaagaaagtaaggcttaaatataaaggagacttaaataacactgttcaaaaaatattaggcggaatgcgttcagcctgttcttacgttggtgcgaaaaaacttaaagacctacccaaaagcactacatttataagggttactcaaactacgaatgaaatttatacaggaagcgaaaacaattgaa

SEQ ID NO: 222684 - DNA, 1048 bp, Unknown
  Bacterial polypeptide expressing nucleotide sequence isolated from the Sargasso Sea
atgagaattgaagacgatattaaattaacttttgatgatgtacttattcggccaaaaagaagcacattagtttcaagatctgaagtggtccttgagagagattttaaatttaaacatactaccgcaacatggacgggtgttcctattttttctgcaaacatggacactactggaacatttgagactgcagttactcttcagaagcacaaaatgctcactgcaattcataaattttatactttagaagagtggaaaaagaatatagataatttagatccagaatatatttcagtaactgttggtcaatctcaagaagatttacagcttggtaaggaaatttttgagttaaataatgatattaaatatttgtgtattgatgtggcaaatggatatagagaagattttgtaaattcagttaaaaactatagagcaacttttccagaaaaaattattattgcaggcaatgttgcaactcgtgaaatgactgaagcattgatactagctggggctgatatcgtaaagattggaatcggacctggttctgtgtgtaccactagaagtgtggcaggcgttgggtatcctcaattatcttctatatcagaatgttcagatgctgcacacggattaggtggccatgtaatggcagatggtggttgtaaatatcctggtgacgtatcaaaagcttttggtgctggagctgattatgtaatgttaggcgggatgtttgctggacataaggagtctggaggagaattagtaacagatgatgatggtgaacagtacaaagatttttatggcatgtcgtctactaaagcacaacaaacttattatggcgatcttgcagagcatcgtgcagcagaaggaaaaaaagtaaggcttaaatacaaaggtgatttgattggaactgtgcaaggaattttaggtggcatgagatcagcatgttcttatgtcggagctaaaaaacttaaagacctgccaaaaagtactacttttattcgtgttacacaaacaactaatgaaatatatacgggaagtgaaaataattgaa

SEQ ID NO: 222685 - DNA, 818 bp, Unknown
  Bacterial polypeptide expressing nucleotide sequence isolated from the Sargasso Sea
cctgtataaattcggatttgtgagaattgaagaagaattaaaactagattattcagacgtcctttttagacctaaaagaagtacgctacaaagtcgtaaagatgtaaatcttttaagaacatacagatttaaatatagtaaaaatgagtggtcaggtattccaataatggctgcaaatatggacggggtcggagagcttggagtagctgagaaattatctgaatatggcatgattacatgtttaactaaacaacatgatgtaaaaaaaataaagcaatttaaaaaaattaaatctatttataaaaatatagctattagcattggtactaaaaaagaagattttgaaaatttaaacaaagttttaagagaatttggatttataaagttcatttgtattgatgttgccaatggttattctgaatactttagtaaatttcttaaatctgtaagagataaatatcctacaaaaactattatagctggaaatgtagttactgcagacatgacgcaagaacttattttatctggtgcagatattgtaaaagtcgggattggtccaggaagtgtttgtacaacaagaattcaaacaggagttggctaccctcaattaagtgctgtaattgaatgtgctgatgcagcccatggtttaggagctcatataattgcagatggcggatgtacatgtcctggagatgttgcaaaaggttttggaggtggtgcagattttgtaatgttaggtggaatgtttgcaggtcacgacgaaggcaaagggaaaatagttaaatcaaacggctcaaaatatatgaattctacggctc

SEQ ID NO: 222686 - DNA, 877 bp, Unknown
  Bacterial polypeptide expressing nucleotide sequence isolated from the Sargasso Sea
atgagaattgaagaagaattaaaactagactactctgacgtattatttaggcctaagagaagcacccttaaaagtagaaaagatgtaaaccttcttaggacatatagatttaagcacagtaaaaatgaatggtcaggaataccgatcatggcagcaaacatggatggtgtgggtgaacttggtattgccgaaaaattaaatgaattcaaaatgattacttgtttaacaaaacagcatgacgttaaaaagttaaaacaatttaaaaaaattaaatctatgtatcaaaacattgcacttagtattggtattaaaaaagaggattttgacaatctagataaaataatgaaagaattcagtttttttaaattcatttgtatagatgttgcaaatggatattcagagcattttaccagttttattaaatcagtcagagataaattcccaactaaaacaattatcgcaggtaatgttgttacagcagatatgactcaagaattggttttaagtggagcagatatagtaaaagtaggtattggtccagggagtgtttgtacaacaagaattcaaacaggtgtaggctacccacaattaagtgctgtgattgaatgtgctgatgccgctcatggattaggagcacatataattgcagatggcggatgtacatgcccaggtgatgtagcaaaaggttttggtggtggagcagattttgttatgcttggtggaatgttggcaggtcatgatgaaggtaaaggcaaattggtaaaatctaatggatcaaaatttatagagttttatggttcaagttctgatgttgctaacaaaaaacattatggtggattatcagattatagaagcagcgaaggaagaacggttagag

SEQ ID NO: 222687 - DNA, 774 bp, Unknown
  Bacterial polypeptide expressing nucleotide sequence isolated from the Sargasso Sea
ataatagcagttttcataattttgttgctcttagttgtggaactagtccagatagttttaatagattaaattcaattttaaagaagtatccaaaattccaatttatatgtattgatgtagcaaatggttattcagaaaattttagtaattttgtttctaacgtcagaaaaaaatatccaaaaaaaactattattgctgggaatgttgttacagcagatatgactcaggagcttgttttgagtggagcagatattgttaaagttggaattggacctggcagtgtctgcactactagaattcaaactggtgttggttatcctcaattaagtgctgtaatggaatgtgcagatgcagcccatggcttaggtgctcacataattgcagacggtggatgtacttgccctggtgatgttgcaaaaggatttggagcaggtgctgattttgtaatgcttggaggcatgttagcaggccataaagagggcggcggaaccgttattgaaaaaaatggtaagaaatttattgagttttatggatcaagttcagaagaagctaatgaaaaacattatggtggtttagcaaattatagatcttcagagggtaaaaaagtaaaattacctctaaagacttctatagataaaactatcagagatattcttggaggagttagaagtagttgtacatatgttggagcgccatcattaaaacaattaagtaagtgcaccacatttgtcagagttaatagtcagtataatgatacatttggtaagatataat

SEQ ID NO: 222688 - DNA, 935 bp, Unknown
  Bacterial polypeptide expressing nucleotide sequence isolated from the Sargasso Sea
attggactactcggatgtcctattcagacccaaaagaagtacactaaaatgtcgtaaggatgtaaaccttctaagaacctatcgttttaaatatagtaaaaatgaatggtcaggaattcctattatggcagcgaatatggatggtgtaggagaattaagtattgctgaaaaactaaatgaatatggaatgattacatgtttaacaaaacaacatgatgttaaaaagataaagcagagcaaaaatataaagaagatttatcccaatattgctttaagtgtaggcattaaaaaagaggattttcaaaatttagataaagttttaaaagaatatagttttttcaaatttatttgtattgatgttgcaaatggttattcagaacattttactaatttcgttaaatcagtcagagacaaatatccaacaaaaacaattattgctggaaacgtagtgactgctgatatgacacaagaattagttttgagcggagctgatatagtgaaagttggcattggaccagggagtgtatgcaccacaagaattcaaactggtgttggctaccctcaactaagcgctgttatagaatgtgctgatgcagcacatggattaggagcgcatataattgctgatggtggatgtacatgtccaggagatgttgcaaaaggttttggtggaggtgcagattttgtaatgcttggaggaatgttagcaggccacgatgaaggcaaaggtaaattaattaaagtaaatggatcaaaatatatagaattttatgggtcaagttctgaagttgcaaataaaaaacattatggtggattgtcagattatagaagcagtgaaggtagagcagtaagagttaaatatagaggcaaaataaatgatacaattttaaatattcttggcggtgtaagaagtagttgtacttatgttggtgcac

SEQ ID NO: 222689 - DNA, 826 bp, Unknown
  Bacterial polypeptide expressing nucleotide sequence isolated from the Sargasso Sea
atgagaattgaagaagaattaaagctcgattattcagatgttttgtttagacctaaaagaagtactcttaaaagtcgtaaagatgttaatttattaagaacttatcgctttaaatatagtaaaaacgaatggtcgggtattccaataatggcagcaaatatggatggagttggcgaactaagtgttgctgaaaaattaaatgaatacggaatgataacatctttaacaaaacaacacgatgtaaaaaaaattaaaaaaaacaaaaatattaaaaaaatatattctaatatcgctcttagtgtcggtataaagaaagaagattttttaaatttagataaagtattaaaagaatttagtttttttaaatttatttgtattgatgttgctaatggatacacagaacatttcaccaattttattaaatcagtaagagataaatatcctactaaaacaatcattgctggtaacgtagtaacagctgatatgactcaagaattagtattaagtggtgcagatattgttaaagttggaattggacccggtagtgtttgtacaacaagaattcaaactggtgttggatatcctcaattaagtgcagtgatagaatgtgctgatgcagcacatggacttggtgcacatgtaatagcagatggtggatgcacatgtccaggagatgttgccaaaggttttggaggtggtgcagattttgtaatgcttggaggtatgcttgctggacatgatgagggaaatggtaaaattgtaaaagttaatggtgataggtttattgaattttatggttctagttcagaggtgcaaataaaaaaca

SEQ ID NO: 222690 - DNA, 578 bp, Unknown
  Bacterial polypeptide expressing nucleotide sequence isolated from the Sargasso Sea
gggtaatgtagtaactgcagatatgacacaagaattagtgttaagtggggcagatatagttaaagttggaattggaccaggcagtgtttgtactacgcgaattcaaactggtgttggataccctcaattaagtgctgtgattgagtgtgcggatgcagctcatggtttgggagcacatattattgcagatggaggatgtacgtgtcctggtgatatagcaaaagcttttggtggtggagcagattttgttatgcttggaggaatgttggcgggacacaaagaaggcggaggtgaagtaataaaacttaatggaaaacaatatattgaattttatggatcaagttctgaagaagcaaatgaaaagcattatggcggtttagctgattatagatcttcagaaggaaaaaaagttaaaattccttttcgtaaaagtcttgatgcaacattaagagacattttaggaggaataagaagtagttgtacttacgtaggagctccatcacttaagcaattaagtaaatgtacaacatttgttagagttaataaccaatacaatgatacattcggtaagatttaat

SEQ ID NO: 222691 - DNA, 870 bp, Unknown
  Bacterial polypeptide expressing nucleotide sequence isolated from the Sargasso Sea
gggaaggtgtacctagttgtagcagctaatatggacacgactggtacttttgaaatggctaaggcacttcaaagaaacaatatgctgacatgtctgcaaaagttttattccgttaaagaaatcaaagaatctattgagaatggaatgagtcctggtaatattgcagtaacttcagggtcaactgaagaaagtttagaattattaaaaagaaaaatggctattgataaaaacctaaagtttatttgtcttgacgttgcaaatggatatagggaagactttctccaatttgttagaagaacgcgcaaacatttcactgataaaattattattgctggaaatgtggctaccagagaaatgactgaggctttgattctagcaggggctgatattgtaaaagtagggattggccctggatcagtctgtactactcgaaaagtagccggagtaggttatcctcaattgtctgcaatatctgaatgctctgacgctgcacacggtttagcagggcatgtgatgtctgatggaggatgcacatctcctggtgatgtagctaaagcctttgcagctggagccgattttgttatgcttggaggtatgcttgctggacacgatgaatctgggggggaattgaaaacaaagaatgatggtaaaaaatacaaatctttctatggaatgagctcggcaaaggcaatggaaacctattttggagaagttgctaaacacagagcacctgagggtaaagaagtagaagtaccataccgagggcctgttgaagtgacaattcaatctatattgggtggtatgagatctgcctgttcatatgttggtgcaagaagaatcaaagacttaccaaaatgcaccactttcgtt

SEQ ID NO: 222692 - DNA, 672 bp, Unknown
  Bacterial polypeptide expressing nucleotide sequence isolated from the Sargasso Sea
aatttatctgtattgatgttgctaatggatatacagaacattttactaatttcattaaatcagtaagggataaatatcctaccaaaacaattattgctggaaatgtagtgactgcagatatgacacaagaattagtattaagtggagcagatatcgttaaagttggaattggacctggaagtgtttgtacaacaagaattcaaactggagttggatatcctcaattaagtgcagttatagaatgtgctgatgcagcacatggacttggagcgcatgtaattgcagatggaggatgcacatgtcctggtgatgttgctaaaggttttggaggtggtgcagattttgtaatgttaggaggcatgcttgcaggacatgatgagggtaatggtaaaattgttaaagttaatggagaaaaatatatagagttctacggatctagttctgaagttgctaataaaaaacactatggtggactttcagattatcgaagtagtgaaggacgtaaagtgagagtaaaatatagaggtaaaattaacgatacaattttaaatattcttggtggtgtgagaagtagctgcacttacgttggggcaccgtcacttaaacaattaagtaaatgtacaacatttgttagagtttcaaatcagtttaatgatagtttaattaaataac

SEQ ID NO: 222693 - DNA, 776 bp, Unknown
  Bacterial polypeptide expressing nucleotide sequence isolated from the Sargasso Sea
catgataacttgcttaactaaacaacatgatgtgaaaaaaattaaacaaaacaaaaatataaaaaaaatgtattcaaatattgctttaagtgtgggaattaaaaaagaggattttgataatttagataaagttttaaaagaatttagtttttttaaatttatatgtatagatgtagcaaatggatactcagaacatttcactaattttgtaaaatcagtaagagacaaatatccgactaaaacaattattgcagggaatgttgtgacagcagatatgacacaagaattggttttaagtggagctgatattgttaaagttggtattggaccaggaagtgtttgtacaacaagaattcaaacaggtgttgggtatcctcaacttagtgcagttatagagtgtgctgatgctgcccatggacttggtgcacatgtaatagctgatggtggttgtacatgtccaggtgatgttgctaaaggttttggaggaggtgcagattttgtaatgttaggaggaatgcttgctggacatgatgaaggaaaagggaaaatagtaaaaattaacggtaataaatatattgagttttatggttctagctcagaggtcgctaataaaaaacattatggtggactgtcttcctatagaagtagcgaaggaagaaaagtaagagtaaaatacagaggtaaaattaatgacactgttttaaatcttcttggaggtgtaagaagtagttgtacatacgtaggagcaccatcattaaaacaacttagtaaatgca

SEQ ID NO: 222694 - DNA, 796 bp, Unknown
  Bacterial polypeptide expressing nucleotide sequence isolated from the Sargasso Sea
ttaaaaaaaattaaaaaatttaaaaaaattaaatcaatttataaaaatattgctttaagtattggtataaaagatgaggattttaagagattagacgatgtacttaaagaatatagttttataaattttatttgtatcgatgtagctaacggatattcagaacattttagcaaatatctaaaattagttagagaaaaatacccaacaaaaacaataatcgcaggcaatgttgtgactgctgacatgacacaagagttagttttaagtggagctgatattgttaaagtgggaataggaccgggaagtgtttgtacaactcgtatacaaactggtgtgggctatcctcaactaagcgctgtaatagagtgtgctgatgccgcgcatggattaggagcgcacattattgctgatggtggctgcacatgtcctggagatgttgccaaaggttttggagcaggtgctgactttgttatgttgggtggaatgtttgcgggtcatgatgaaggaggcggaaaggttaccaaatctaatggtagtaaatatatagaattttatggatcaagctcagatacggctaataaaaaacattatggaggtttgtctgattatagaagcagtgaaggaaaatcagttagaataaaatatagaggacaaataaagaatacaatttcaaatattctgggtggtgttagaagtagctgcacttatgttggggctccatcattaaaacaattaagcaaatgcacaacatttgtgagagtatcaaatcaatttaacgatacttttcaagattaaa

SEQ ID NO: 222695 - DNA, 965 bp, Unknown
  Bacterial polypeptide expressing nucleotide sequence isolated from the Sargasso Sea
ggaaggactaaattggcgaattattgaagaaataaaattagattttagtgatgtactaatcaaaccaaagagatctactctgatctcccgcaaagaagcctggttggctagaaaattcaaattcagacattcaaaacatacatgggagggtgttcctataattgcatctaacatggatcatacaggaacgattgccatgaatcatgccctgttagaatataaaatgcttacggcattatgtaaatttgttgagtctactgagtggagttggaataagaacataatacaaacgattggactagataaaaatttagatgattcagatgtgtataatgaatcacattgggtctgtcttgatgtagcaaatggatataccgaaagatttaatgattatgtttcaaaaatgagaggacatgaagcaactaaaaataaaataatcatagcaggaaatgtatgtacaccagaagcaacggaacagataataatggcgggagccgatattgtaaaaattgggatcggccctggatcagtctgcaccactcgcaagatgacgggcgtaggatatccacaactgagtgcaacgatggagtgtgccgatgcggctcacggtctaggaggacatatcatcacagacggaggttgtacagtagtgggggatatagcaaagagctttggggctggtgcagactttgtaatgttaggtggcatgttggcaggtcataaagaatgtgaaggggaagtattaggtaatcataaaggaaaagtaatggaattttatggtatgtcttcagaagaagcacaactcaagtattatggtgaaaagaagtctcatagagcctctgagggaaagaaagttcaaattccatataaaggtaacgtcgctaatactgtagaagaaattttaggaggattaagaagtgcatgtacttatgctggtgctagaaccataaaagcattaccaaaat

SEQ ID NO: 222696 - DNA, 679 bp, Unknown
  Bacterial polypeptide expressing nucleotide sequence isolated from the Sargasso Sea
tttttcaaatttatttgtattgatgttgctaatggttactcagagcatttcacaaattttatcaaatcagtaagagacaaatacccaaccaaaaccattattgctggtaacgttgtaactgcagatatgacccaagaactagttctaagtggtgcagatatcgtaaaagttggaataggacccggaagtgtttgtacaactagaattcaaactggagtagggtatccacaattgagtgctgttatcgaatgtgctgatgcagctcatggtcttggtgcacatgtgattgctgacggaggatgcacatgtcctggtgatgttgcaaaaggttttggtggtggtgcagactttgtgatgcttggaggaatgttagcaggtcatgatgagggaaaaggaaaaatagtaaaagtaaatggtactaaatatattgaattttatggatcaagttctgaagttgctaacaaaaaacattatggtggattagcagattacagaagtagtgaaggaagaaaagttagagttaaatacagaggtaaaataaacgataccgttttaaatattcttggtggtgttagaagtagttgtacttatgtaggagcaccttcattaaaacaactaagtaaatgtacaacttttgtaagagtgtctagtcaatttaatgatacttttgttaaataaa

SEQ ID NO: 222697 - DNA, 853 bp, Unknown
  Bacterial polypeptide expressing nucleotide sequence isolated from the Sargasso Sea
aatgagagtagatagagattttaaacttgatttcgatgatgtgctgataaggcctaaaagaagtactttatcatcaagaaggcttgttgatttaaatcgtaaatttgaatttagacattcaaatgaaacttgggaaggtattcctgtaatagcagcaaacatggatacaaccggaacatttgaaatagctgagtcattaaaaaaagaaaaaatgttaactgctattcataaattttattctttagatcaatgggcaaaagctataaattcaaaccaaatagatttagaacattgtgctgttacatttggagttgaagaagcagagaatgcagaagaattttttgattatttagaaaagaataatttaaataaacctaaatttatttgccttgatgttgcgaatggctatacagaattgtttctagatttagtaaaaaaaataaggagtaaattcgataatcctttaatagctggaaatgttgttaccggtgaaatgactgaagcattgatattggctggtgcggacattgtaaaaattggaattgggcctgggtctgtatgtacaactaggacagttacaggggtcggatatcctcagctatcagcaataattgaatgtgccgatgccgcacatggattaagagggcatgttatatctgacggtggatgctctaaacctggagatgtagcaaaagcctttggggcaggggcagatttcgttatgcttggaggaatgtttgcaggacacgaagaatctggtggagagcttattgaaaaagatggaaaaaaatataaacaattttatggaatgagctcagacactgccatggaaagatattatggtgatatcaaa

SEQ ID NO: 222698 - DNA, 640 bp, Unknown
  Bacterial polypeptide expressing nucleotide sequence isolated from the Sargasso Sea
gtggctaatggttatacagagagattttgcacatttataggaaaatttagagacaccttcccaaatattataattatagcaggaaatgtttgcaccgctgaccaaacgcaagaacttattttaaaaggtgcggacataattaaatgtggtataggacctggttctgtttgtacaacaagagtaaaaacaggtgtaggttatccacaactctcaacaataattgaatgttctgatgcggctcacggcctaggaggccatattatatcagatggtggttgtactgttgcaggtgatatcgcgaaagcttttggtggtggtgcggattttgtgatgcttggtggaatgcttgcaggtcatgatgaaggaggtggagagatcgtcgataataaagttcaattttacggtatgagttcaaggacagcgaatgaaaagcattttggtggcttgagagattacagagctgctgagggcaagacagttgaaattccatacaggggaaaaataattaatactgttcaagatatactcggtggattgcgttcagcttgcacttattcaggtgcaaggaggcttaaagatttatgcaagtgcactacatttattcgaacgactgtccaagaaaataaagtttacagctaga

SEQ ID NO: 222699 - DNA, 883 bp, Unknown
  Bacterial polypeptide expressing nucleotide sequence isolated from the Sargasso Sea
ggcagccaacatggatggtgtgggggaacttgttatggccgaaaatttagccactcatcaaattatgacctgtttaactaaacagcacaattcaaaaataataaaaaaatttaaatcaattaaaaaaatatttcctcaagttattttaagtactggaacaagtgatcaagattacaagagactaaatgacatattaaaagaaaatagtttttttgagtttatatgtattgatatcgctaatggttattctgaccacttcagtaagtttgtcagttcagttcggaaaaaatatcctactaaaactattattgcaggaaatgttgttacagctgatatgactcaagaattaatacttgctggcgcagatattgtaaaagttggaattggacctggaagtgtatgtacaactcgtattcaaacaggtgttggttatcctcaattaagtgctgttatcgaatgtgctgatgcagctcatggtttaggcgcgcacattatagctgatggaggatgtacatgtccgggcgatgtcgcaaaagcattcggtggaggtgcagattttgtaatgcttggtggaatgtttgcaggccatgatgaaggtggaggaaaaataataaaaaaaaatggatcaaaagttattgagttttatggctcaagttctgagacagctttaaataaacattatggtggtcacgctgattacagaagcagcgaaggtaaaaaagttcaattaaaatatagaggaaaaattaatgatacggttttaaatattttaggtggcttaagaagtagttgcacttatgttggggcaccttctttaaaacaattgagtaaatgcacaacttttgttagggttaatcaacagtataacgatacttttgagtaa

SEQ ID NO: 222700 - DNA, 703 bp, Unknown
  Bacterial polypeptide expressing nucleotide sequence isolated from the Sargasso Sea
atgagaatagaagaagaaattaaacttgactactcagatgtcctttttagacccaagagaagtactttaaaaagcaggaaagatgttgatttgaatagaaaatatactttcaagcattcaaaatcatcatggaatggaattccaataatagcctctaatatggatggtgttggtgaaatagatgttgcaaaaaaactaacttctcacaaactaatgactgctctaacaaaacaacatgatattaatcaaattggaagtatttataaaaaaaatattttcttcgattcaattgctcttagttgcggtacaagtaaagacagttacaataggttaaattcaattttaaaaaaatatccaaaatttaaatttatctgtattgatgtggcaaatggatattcagaaaattttagtaattttgtatcagaagtaagaaaaaaatatccaaaaaaaactattattgcaggtaatgttgtaactgcagatatgactcaggaattagtattaagtggggcggacattgttaaagttggtatcgggcctggaagtgtatgtacgactagaatacaaacaggagtagggtatccacaactaagtgcagtaatagaatgtgctgacgcagcacatggattaggagcacatattattgctgatggtgggtgtacttgtcctggagatgttgcaaagggatttggcgctggtgcag

SEQ ID NO: 222701 - DNA, 942 bp, Unknown
  Bacterial polypeptide expressing nucleotide sequence isolated from the Sargasso Sea
gttgatttaaaaagaacttataaatttaaatatagcacgaatgaatggtcaggaatacctgtaatggcagctaacatggatggagttggtgagctagaagttgcagaaaccttatcagattttgagatgatcacatgtttaacaaaacaacatgatgtgaataaattaaaaaaatataaaaagttaaagtcaatttacaaaaatatatctttaagcataggaattaaaaaagaagattttgaaaaattagataaaacattaaaagaattttcatttataaagtttatttgtgtagatgtagcaaatggttattcagagcattttacaagttttattaaatccgtaagagataaatacccaacaaaaactattatagcaggtaatgttgtgacagctgatatggcacaagagttagtacttagtggagccgacatagttaaagttggaattggtccaggaagtgtatgtaccacaagaattcaaacaggtgtcggatacccccaactaagtgcggttatagaatgtgccgatgctgcccatggtttgggtgctcatataattgcagatggtggatgtacttgtcctggagatgttgctaaagggtttggtggtggagctgattttgttatgcttggaggaatgtttgctggtcataatgaaggtggaggaaaagttataaaatcaaatggaagtaaatatattgaattttatggttcaagttcagaaacagcaaataaaaaacattatggtggattatctgattatagaagtagcgaaggtagatctgtaaaaattaaatatagaggaaaaataaaagatactattttaaatatattaggtggagtgagaagcagttgcacctatgttggcgctccatcattaaaacaattaagcaaatgtactacatttgtaagagttagtaatcaatataacgatacattt

SEQ ID NO: 222702 - DNA, 466 bp, Unknown
  Bacterial polypeptide expressing nucleotide sequence isolated from the Sargasso Sea
tggagttggatatccacagttaagtgcggtaatagaatgtgctgatgctgctcatggattaggtgcacatatcattgcagatggtggatgcacttgtccaggtgatgttgctaaagcatttggtggaggagctgattttgttatgcttggaggaatgtttgcaggtcatgatgaaggtaaaggaaaattggtaaaatctaatggttctaaatatgtcgaattttatggatcgagttctgaaacagctaacaataaacattacggcggactatcagactacagaagtagcgaaggaagaacagtcagagtgaagtaccgtggtaaaattaatgataccattttaaatattttaggtggtgtaagaagtagttgtacatatgttggtgcaccctctttaaaacaattaagtaagtgtacaacttttgtcagagttactaagcaatttaacgatacattcaccaaataa

SEQ ID NO: 222703 - DNA, 706 bp, Unknown
  Bacterial polypeptide expressing nucleotide sequence isolated from the Sargasso Sea
cttgatgaaatattaaaagaatttagtttttttaagtttatttgtattgatgtagcaaatggatattcagaacatttcagtaaatttattaaatcagttagagaaaaatatcctactaaaacaattatagcaggcaatgttgttactgcggatatgacgcaagagttaattcttagtggagcggatatagtaaaagttggtataggtccgggaagtgtctgtactacaagaatccaaactggcgttggttacccacaactcagcgctgttatagaatgtgcagatgctgctcatggtttaggtgcccatattattgcagatggtggatgtacttgtccaggagatgtggccaaaggttttggaggaggagctgattttgttatgcttggtggaatgcttgctggtcacgatgagggcaaaggtaaaataattaaaaataatggaactaaatatatagaattttatggatcaagttctgatatagcaaataaaaaacattatggtggacttgctgattacagaagtagcgaaggtagaaatgtgagagtaaaatacagaggtaaaattaaagataccttggcaaatatacttgggggaataagaagtagttgtacctacgttggagccccatctttaaaacagttaagcaaatgtacaacttttgtcagagttgctaggcaatttaatgacacttttactaaataat

SEQ ID NO: 222704 - DNA, 959 bp, Unknown
  Bacterial polypeptide expressing nucleotide sequence isolated from the Sargasso Sea
taaagacgtaaatttattaagaacttatagatttaaatatagtaaaaatgaatggtctggaattcctataatggcagctaatatggatggtgttggagaattaagtatagctgaaaaattaaatgattatgaaatgatcacatgtttaactaaacaacatgatattaagaaaattaagcaaaataaaaacataaaaaagatctatccaaatattgcattaagtgtaggaattaaaaaagaagattttcaaaatttagataaagtgctcaaagaatacaatttttttaagtttatatgtattgatgtagctaatggttattccgagcattttactaattttgtaaaatcagtgagagataaatatcctactaaaactattatagctggtaatgtagtaacagctgacatgacacaagagttagttttaagtggagcagatattgtaaaagttggtataggtccaggaagtgtttgtacaactagaattcaaactggggttggttatcctcaattaagcgccgttatagaatgtgctgatgcagctcatgggctaggagcacatattattgcagatggcggttgtacttgtcctggagacgttgcaaaaggttttggaggtggagctgattttgttatgttaggtggtatgctcgcaggacatgatgaaggtaaaggaaaaatagttaaaattaatggttctaaatatattgaattttatggctcaagttctgaaattgcaaataaaaagcattatggtggattagctgattacagaagcagtgagggaagaactgtgagagtaaaatacagaggtaaaattaacgatactattttaaatatacttggtggtgttagaagtagttgtacttatgttggtgcaccttcgttaaaacaattgagtaagtgcacaacctttgtaagagtaaccaatcagtttaacgatacttttacaaaataaa

SEQ ID NO: 222705 - DNA, 505 bp, Unknown
  Bacterial polypeptide expressing nucleotide sequence isolated from the Sargasso Sea
ggcgccgacgccaccaaggtgggcgtgggcccgggcaaggtgtgcatcaccaagctcaagacaggttttggcacgggcggctggcagctgagcgcgctgaagtggtgtgcccgcgtggccaccaagcccatcattgccgacggcggcatccgcagccatggcgacattgccaagagcatccgctttggcgctagcatggtgatgatcggctcgctgtttgcaggccacgaggaatcaccgggcaagacggtggaagtggacggcgcgctgtttaaggagtactacggctcggccagcgatttcaacaagggcgaatacaagcatgtcgaaggcaagcgcatcctggagcccatcaagggcaagctggccgaaacactcatcgagatggagcaggacgtgcaaagctccatcagctatgcgggtggcaccaagctgatggatgtgcgcaaggtcaactacgtgatcctgggcggcgacaacgcaggcgagcacctgctgatgtaac

SEQ ID NO: 222706 - DNA, 892 bp, Unknown
  Bacterial polypeptide expressing nucleotide sequence isolated from the Sargasso Sea
atgaaagaagaaataaagctagactattccgacgttcttttcaggccaaaaagaagtaccctaaaaagtagaaaagaagttgatctttcaagaacatatcaattcaaatattcaaaccgtgaatggacaggcatacctataatggcatctaatatggatggcgttggtgaacttgaagttgctaaaagtttatcaaagtttgatattcttaccgcattaactaaacaacatgatcttgaatctattaatgcattttcagagattaaggaaatttttaattatatatctttaagttgtggaacaagtgaaaaaagttatgaaagattaaacacaattattagtcaacacacttatattcaattcatatgcatagacgtagcaaatggatattctgaaaattttagtaaatttgtttcttctgtaagagataaatatccatctaaaactattattgctggaaatgttgtaactgcagatatgacacaagaattaattcttagtggcgcagatatcgttaaagtaggcatagggcctggaagtgtttgtacgacacgaatacaaactggagtaggttaccctcaattaagtgctgtaattgaatgtgctgatgcagcgcatggacttggagcacatatgatcgcagatggagggtgcacatgtccaggagatgttgcaaaagcttttggaggaggagctgattttgtgatgcttggagggatgcttgcaggacatcaagaaggaggaggcaaagtaattagtaagaatggacaaaattttatagaattttacggttcaagctcagaagaagcaaatactaaacattatggtggcctagcagattatagatcctctgaaggtaaaaaggtttctatacctctaagagaaagtttag

SEQ ID NO: 222707 - DNA, 917 bp, Unknown
  Bacterial polypeptide expressing nucleotide sequence isolated from the Sargasso Sea
aaaagatgttaatcttctaaggacatatagatttaaatacagcaaaaatgaatggtcaggcacaccaattatggcagcaaatatggatggtgttggagagttaggtgttgcggaaaagcttaacgaatatggaatgattacatgcttaacaaaacagcatgatgttaaaaaaattaagcaatataaaaaaattaaatcaatgtaccagaatattgcaatcagtataggaattaaaaaagaagactttcaaaatttagataaaatgatgaaagaatttagtttttttaagtttatatgcatagatgttgcgaatggttattcggagcattttacaagttttataaagtctgtaagagataaatacccaacaaaaacaataattgctggaaatgttgtgacagcagatatgacccaagagctagtgttaagtggagcagatatagttaaagttggaataggaccaggaagtgtttgtacaacaagaattcaaactggcgttggataccctcaattaagtgctgtgatagaatgtgctgatgctgctcatggattaggtgcacatataattgcagatggtggatgtacttgtcccggagatgttgcaaaaggatttggaggaggagcagattttgttatgcttggaggaatgcttgccggtcatgatgaaggtaaaggtaaattggtaaaatctaatggatccaaatatattgaattttatggatcaagttctgatattgcaaataaaaaacattatggcggattatctgattatagaagtagcgaaggtagaacagttagagttaaatatagaggaaaaataaaagatactattttaaatatattgggtggagttagaagtagctgcacatacgttggagctccatcactaaaacaattaagcaaatgtacaacatttg

SEQ ID NO: 222708 - DNA, 541 bp, Unknown
  Bacterial polypeptide expressing nucleotide sequence isolated from the Sargasso Sea
aattttaagtggtgctgatattgttaaagtaggaattggtccaggaagtgtttgtactacaagaattcaaactggagttggatatccacaattgagtgctgtaatggaatgtgcagatgcagctcacggtttaggtgcgcatataatcgctgatggcggatgcacttgtcctggtgatgttgctaagggttttggagctggtgcagactttgttatgttaggtggaatgttagcaggtcataaggagggtggaggagatattattgataaggatgggaaaaaatatatagagttttatggatcaagttctgaagaggcaaacgagaaacattatggagggttggcagattatcgttcatcagaaggtaaaaaagttgtaattccattaaaaaattccttagataaatcaataagagatatacttggaggtattagaagtagctgtacatatgttggagctccatcattaaaacaactcagtaaatgtacaacttttgtaagggtgaataatcaatataatgacacttttggaaaagtataa

SEQ ID NO: 222709 - DNA, 730 bp, Unknown
  Bacterial polypeptide expressing nucleotide sequence isolated from the Sargasso Sea
gtttcgatctgcttcaaggaaagtgaacacaaatcatgacataaagatgatttgcattgacgttgccaacggatacagagaggttttcctagattttgtgaaaagagtcagggagtctttttccgaccatataatcatagccggaaacgttgcaaccagagagatgactgaagccctaatattggctggtgcggatgtagtgaaggtggggattgggccgggttctgtttgtacaaccagaaaggttgcaggagtaggttatcctcaactttcagccatttcagaatgtgctgatgctgctcatggactcaatggacatgtaatgtcggacggaggatgtgcgtccccaggagatgtagccaaggcattcgctgctggagcagatttcgtgatgctaggggggatgctagcagggcatgatgaatctggaggggaaataattgaagaaagtggaaggacctacaagtcattctatgggatgtcttcttcaaaggcaatggaggagcactatggtattgtagcgaagcacagggctccggaaggcaaggaggttagggtgccatatcggggtcctcttgagggtacggttcaatccatacttggagggttaaggtcagcatgctcatatgtgggggcaaggaggataaaggacctccccaaatgcaccacattcgtcaaggtgagcatgaccacaaacgaggtatatcggaagttcaatgtggatgaatag

SEQ ID NO: 222710 - DNA, 667 bp, Unknown
  Bacterial polypeptide expressing nucleotide sequence isolated from the Sargasso Sea
tatatgcattgatgttgcaaacggttattcagagcattttagtaaatttttaaaatctgttagggataaatatccaacaaaaacaatcatagcaggtaatgttgttactgctgatatgactcaagaattaattttatcaggtgcagatattgttaaagttggaattggaccaggtagtgtttgtacgacacgaatacaaactggagttggatatccacagttaagcgcagtgatagagtgcgctgatgcagctcacggattaggtgcacatataattgcagatggcggatgtacatgtcctggtgatgttgctaaagcatttggtggaggagctgattttgttatgcttggaggaatgtttgcaggtcatgatgaaggtaaaggaaaattagtaaaatctaatggttctaaatatgtcgaattttatggatcgagttctgaaacagctaacaataaacattatggcggactatcagactacagaagtagcgaaggaagaacagtcagagtgaagtaccgtggtaaaattaatgataccattttaaatattttaggtggtgtaagaagtagttgtacatatgttggtgcaccctctttaaaacaattaagtaagtgcacaacttttgtcagagttactaagcaatttaacgatacattcactaaataa

SEQ ID NO: 222711 - DNA, 484 bp, Unknown
  Bacterial polypeptide expressing nucleotide sequence isolated from the Sargasso Sea
gtacgactcgcatacaaacagggtggtcgggtatccacaattaagcgctgttattgagtgcgcggatgctgctcatggattgggcgcacatattattgctgatggaggctgtacatgccctggtgatgtagcaaaagcattcggtggaggtgctgactttgtaatgttaggaggaatgtttgctggacatgaagaaggtgggggagaaattgtaaaaaaaaatggctcaaaatttatagaattttatggttctagttctgacactgctttaaataaacactatggaggactttctgattacagaagtagcgaaggaaagaaagttcagttaaaatttcgtggaaaaataaaagacacaattttgaatattttaggtggattaagaagcagttgtacttatgtaggcgccccttcactaaaacaactaagtaagtgcacgacttttgtaagagtcaatcaacagtataacgatacttttaaataa

SEQ ID NO: 222712 - DNA, 760 bp, Unknown
  Bacterial polypeptide expressing nucleotide sequence isolated from the Sargasso Sea
gaagatctaaagttagattattcagatgtattatttagaccaaaaagaagtactctttcaagtaggaaagatgttaatttaaaaagaacgtatcggtttaaatatagcaataatcaatggtcaggtatacctataatggctgctaacatggatggtgttggtgaactagaaattgcagaaaaactatcagagtacggaatgataacttgtcttacaaaacagcatgatgttaaaaaaattactaaatttaaaaaaataaaaaatatttataataatatttctttaagtataggaattaagaaagaagattttgatagactagataaaatcttaaaagaatttagttttttcaaatttatttgtatagatgtagctaacggctattcagaacattttagtaattttataaaatcagtaagagataagtatccaacgaaaactattattgctggcaatgtagttacagctgatatgacacaagaattaattttaagtggcgcagatatcgtgaaagttgggattggtcctggtagtgtttgtacaacaagaatacagactggtgtaggttatcctcaattaagtgctgtaatggaatgtgcagatgctgctcatggtttaggatctcatataattgctgatggtggatgtacttgtccaggtgacgtgtctaaaggatttggaggcggtgcagattttgtaatgctgggaggaatgtttgctggacacgatgaaggcaaaggaaaaatagtaaaatcaaatg

SEQ ID NO: 222713 - DNA, 840 bp, Unknown
  Bacterial polypeptide expressing nucleotide sequence isolated from the Sargasso Sea
tatgagaatagaagaagaaattaagcttgattattcagatgtcctttttagacctaaaagaagtactttaaaaagtaggaaagatgttgatctaaatagaaaatatatctttaaatattcaaaattatcttggaaaggcaccccaattattgcttctaatatggacggtgttggtgaaattgatgttgctaaaaaattaacttatcacaaagttatgactgcgcttacaaagcaacatacaattgatcaaataagtttaatatataaaaattcagattttcataaaacagttgctcttagctgtggaacaaatactgagagttatgataggctcaataaaattttacgtaaatttccaaaatttgaatttatatgtattgatgttgcaaatggttattcagaaaattttagccattttgtttcaagtgtaaggaagaaatacccaaataaaacaataattgccggcaatgttgtaacagccgatatgactcaagaactaatattaagtggagcagatattgtaaaagttgggataggaccaggtagtgtttgtactactagaatacagacaggagttggttatcctcaattaagtgcagttatggaatgtgcagatgcagcccatggattaggtgcacatataattgctgatggtggatgcacatgtcctggagatgttgctaaaggatttggtgcaggagctgattttgttatgttgggtggtatgttagctggtcataaagagggaggtggtgaaattattgaaagaaatggaaaaaaatatattgaattttatggatctagttcagaggaggcgaatgaaaaacattatggtggatt

SEQ ID NO: 222714 - DNA, 752 bp, Unknown
  Bacterial polypeptide expressing nucleotide sequence isolated from the Sargasso Sea
aaatattgcattaagtattggtattaaaaaagaagactttgataatttagataagattttaaaagaatatagtttttttaagtttatttgtattgatgttgctaatggctactcggagcactttagtagtttccttaaaaaggtaagagataaatatccaacaaaaacacttatagcagggaatgttgttacagctgacatgacacaagaattaatactaagtggtgctgatattgttaaagtaggtattggacctggtagtgtttgcacaacaagaattcaaacaggagtgggttatccacaattaagtgcagtaatagaatgtgcagatgccgcacatggtttaggagctcatatcattgctgatggaggttgtacttgtccaggtgatgtcgcaaaggcttttggaggtggtgcagattttgtaatgcttggaggaatgtttgctggacacgatgaaggaagtggaaaaattgtaaagtctaacgggtcaaaatacattgaattttatggttctagctccgatactgcaaataaaaaacattatggtggtttatctagttatagaagtagcgagggtagaacagtaagagtaaagtatagaggtaaaattaaagatacaattttaaatattcttggtggtttaagaagtagctgtacttatgttggagcgccatcactaaaacaattaagcaaatgcacaacttttgtaagagttacaaaacaatttaacgatacttttgttaaataat

SEQ ID NO: 222715 - DNA, 726 bp, Unknown
  Bacterial polypeptide expressing nucleotide sequence isolated from the Sargasso Sea
aaaaagaagattttgaaaatttgaatgaagttcttaaagaatttaattttataaaatttatatgtattgatgttgctaatggttattcagaacattttagcaaatttgttaaatctgtaagagataagtatccaacaaaaacaattattgctggtaatgttgttacagcagatatgactcaagaattaattctttcaggagcagatatagtgaaagttggaattgggcctggaagtgtttgcaccactagaattcaaactggagtaggatatcctcaattaagtgctgttatagaatgtgccgatgctgcacatggattaggagcgcatataattgcagatgggggatgtacttgcgcaggagatgttgcaaaaggatttggcggaggtgcagattttgttatgttgggaggtatgttcgcaggccatgatgaaggtaaaggaaaaatagttaaatcaaatggaaaaaagtttattgaattttatggttcaagttcagatcaggccaacaaaaaacattatggtggattatcagattatagaagtagcgaaggtagaatggttagattgaaatatagaggaaaaataaaagatacaattttaaatattcttggtggtgtgagaagtagttgtacatatgtcggagccccctcgttaaaacaattaagtaagtgtacaacttttgtaagagtttctaaccaatataatgatacttttgtagaatgat

SEQ ID NO: 222716 - DNA, 804 bp, Unknown
  Bacterial polypeptide expressing nucleotide sequence isolated from the Sargasso Sea
aacagcacgactccaaaataatcaaaaaattcaaatcaattaaaaaaatatttcctcaggttattttaagcactggaacaagtgatgaggattacaaaagactaaatgatatattaaaagagaacagtttttttgagtttatttgtattgatattgcaaatggttattctgatcactttagcaagtttgtaagttctgtaagaaaaaaatatccaactaaaactattattgctggaaatgtagttacagcagatatgactcaggaattgatactcgcaggagctgatatagtaaaagttggtattggtccaggtagcgtatgcactacacgtatccaaacaggcgttggatatcctcaattaagtgcagttattgaatgtgccgacgcggcacacggcttgggtgcccacattatagctgatggtggatgtacttgcccaggcgatgtggcaaaagcttttggtggaggcgcagattttgtgatgcttgggggaatgtttgctggtcacgatgagggtggtggaaaaataataaaaaaaaatggatcaaaagttatcgagttttatggctcaagctcagagacagctttaaacaaacattatggtggtcatgctgattatagaagcagcgaaggtaaaaaagtccaattacaatacaggggaaaaattaaggatacagttttaaatattttaggtggattgagaagcagttgcacgtatgtcggtgcgccttctttgaaacagttaagtaagtgcacaacgtttgtaagagttaatcaacaatataacgatacttttgagtaaa

SEQ ID NO: 222717 - DNA, 676 bp, Unknown
  Bacterial polypeptide expressing nucleotide sequence isolated from the Sargasso Sea
atgcgaattgaagaggaaattaaactagactactcagatgtactttttagacctaaaagaagtactttaaaaagtagaagagaagttaatcttaatagaaaatataagttcaaacactcaaaattaagttgggaaggtgtaccaataatagcatctaatatggatggagtaggagaagttggtattgcaaaaaaattatcatccttcaaaatgatgacagcattaacgaaacaacatggtagtaaagaaattaaaaatttagaaactagtaaatttatacataattatgtagccttaagttgtgggacaggtaaagatagttatgcaagattaaaaaatctattaaaaaaaaatcctaagtttaaatttatttgtattgatgtagcaaatggatattcagaaaactttagttattttgtaagtgaagttagaaaaaaatatcccaataaaactattatagctggaaatgtagtaacagcagatatgactcaagaattggttcttagtggagctgatatcgttaaggttggaataggacctggaagtgtttgcacaacaagaattcaaacaggagtaggttatcctcaactaagtgcagttcttgaatgtgccgatgctgctcatggtcttggagcacatataattgctgatggtggttgtacaagtcacaggtgat

SEQ ID NO: 222718 - DNA, 904 bp, Unknown
  Bacterial polypeptide expressing nucleotide sequence isolated from the Sargasso Sea
tcaggaattccaataatagctgccaatatggatggtgttggagaacttagtatagctgaaaagttaaatgagcatggaatgattacatgtctaactaaacaacacgatgttaaaaaaattaaacaaaataaaaatataaagaaaatttatcaaaacatagctttaagtgttggaattaagaaagaggattttcgtaatttagataaagtattgaaagaatttagtttttttaaatttatatgtatagacgtagctaatggatatacagaacattttaccaatttcataaaatctgtaagagataaatatccaacaaagacaattattgcgggtaacgttgttacagcagatatgacacaagaattagtcttgagtggtgctgatattataaaagtaggtattggacctggaagcgtgtgcaccacaagaatacaaacaggagttggttatcctcaattaagtgctgtaattgagtgtgcagatgcagctcatggtttaggagcacatattattgctgatggaggttgtacttgtcctggcgatgttgcaaaaggttttggtggaggtgctgattttgttatgttgggtggaatgttagcaggacatgacgaaggaggtggaaaaataatcaaaaaaaatggctcaaaatatatcgaattttatggctctagttctgaagttgctaatataaaacattatggaggtctttccaattacaggagcagtgagggaagatctgtgaagattaattaccgaggaaaaattaatgatactattttaaatattcttggtggtgtaagaagcagctgtacttacgtaggtgcaccatctttaaaacaactaagtaagtgtacgacttttgtaagagttagcaatcagtttaatgaaacttttacgaaataaa

SEQ ID NO: 222719 - DNA, 804 bp, Unknown
  Bacterial polypeptide expressing nucleotide sequence isolated from the Sargasso Sea
aatgagaattgaagacgaaataaaattaacatttgatgatgttttaataagacctaaaagaagtaccttagtatccagatctgaagtacagcttgacagagacttaaagtttagacatacatctttaacatggtccggtgtacctatagtctccgcaaatatggacacaacaggaacttttgaaactgccatatctttacaaaaacataaaatgattacagcagtccataagttttacactgttgaagattggaaacaatcaattgacaaattagatcctaactttattgcagtcacagtgggccagtctgatgaagacatgcaacttgcaaaagatatttttaaattaaatgataatataaaattcctttgcatagacgttgctaatggatatagagaagattttataaatgctgttaaaagatatagagaaacttttaaagataaaataataattgcaggtaacgttgctacaagagaaatgacagaagctttaattcttgctggagcagatattgtaaagattggtataggtccaggttcagtctgcacaactagaagtgttgctggagtgggatatccacaactttcatctatctctgaatgctcagatgccgcacacggtctaggtggtcacgttatggctgatggagggtgtaaatttccaggagatgtttcaaaagcttttggtgctggagcagattttgtaatgttaggtggaatgtttgctggacatgaagaatcaggaggtgagttggttgaggatgatgatggtgttaaatacaaagatttttatggaatgtc

SEQ ID NO: 222720 - DNA, 719 bp, Unknown
  Bacterial polypeptide expressing nucleotide sequence isolated from the Sargasso Sea
tatgcgtattgaagaagatatcaaactggattatgccgatgtcctatttcggcctaaaagaagcaccttacatagtcgtaaagacgtaaagttagaacgtacctacaaatttaaatatagcaatcacgaatggtccggcatccctttaatggctgccaacatggatggtgtgggtgaacttgttatggctgaaaatttagcttcccatcaaattatgacctgtttaactaaacagcataattcaaaaataatcaaaaaatttaaatcaattaaaaaaatatttcctcaagttatattaagcactggaacaagtgatcaagattacaagaggctaaatgacatattaaaagaaaatagtttttttgagtttatatgtattgatatcgcaaatggttattctgaccacttcagtaagtttgtcagttcagttcgaaaaaaatatccaacaaaaactattatcgctggaaatgtcgttacagcagatatgactcaggaattaatacttgctggagcagatattgtaaaagttggaattggacctggaagtgtatgtacaactcgtattcaaacaggcgttggttatcctcaattaagtgcagttatcgaatgtgctgatgcggctcatggtttaggcgcgcacattatagctgatggaggttgtacatgtccgggtgatgtagcaaaagcatttggtggaggtgcagattttgtaatgcttg

SEQ ID NO: 222721 - DNA, 787 bp, Unknown
  Bacterial polypeptide expressing nucleotide sequence isolated from the Sargasso Sea
aataaagcaatttaaaaaaattaaatctatttataaaaatatagctattagtataggcactaaaaaagaagattttgagaatttaaacaaagttttaagagaatttggatttataaaatttatttgtatagacgttgctaatggttactctgaatacttcagtaaatttcttaaatctgtaagagataaatatccaacaaaaactataatagctggaaatgttgttactgcagatatgactcaagaattaattttatctggtgcagatatagttaaagttggaattggtcctggaagtgtttgcacaacaagaattcaaacaggagttggttatcctcaattaagtgctgtaattgaatgtgctgatgcggctcatggtttaggagctcacataattgcagatggaggatgcacatgccctggagatgttgcgaagggttttggtggtggtgcagattttgtaatgttaggaggaatgtttgcaggccacgatgaaggtaagggaaaaatcgttaaatcaaatggatcaaaatatattgaattctatggttcaagttcagaaacagcaaataaaaagcattatggaggattatcaaattacagaagtagtgagggaagaacagtaagaattaaatatagaggaaaaataaaagatacaattcaagatattttaggcggtgttagaagcagttgtacatacgtaggcgcaccttcattaaaacaattaagtaagtgtactacttttgtaagagttgcaaaacaatttaacgatactttcacaaaataa

SEQ ID NO: 222722 - DNA, 799 bp, Unknown
  Bacterial polypeptide expressing nucleotide sequence isolated from the Sargasso Sea
atgcgtattgaagaagatatcaaactggattatgccgatgttctatttcggcctaaaagaagcactttacatagtcgtaaagacgtaaagttagagcgtacctacaaatttaaatatagcaatcacgaatggtccggtatccctttaatggcagccaacatggatggtgtaggcgaacttgttatggctgaaaatttagcttcccatcaaattatgacctgcttaactaaacaacataattcaaaaataataaaaaaatttaaatcaattaaaaaaatatttcctcaagttattttaagcactggaacaagtgatcaagattacaagagactaaatgatatattaaaagaaaatagtttttttgagtttatatgcattgatattgcaaatggttattctgaccacttcagtaagtttgtcagttcagttcggaaaaaatatccaaccaaaactattatcgcaggaaatgttgttacagcagatatgactcaagaattaatcctagctggtgcagatattgtaaaagttggaattggacctggaagtgtatgtacaactcgtattcaaacaggcgttggttatcctcagctaagtgctgttatcgaatgtgctgatgcagctcatggtttaggcgcgcacattatagctgatggaggatgtacgtgtccgggcgatgtagcaaaagcgtttggtggaggtgcagattttgtaatgcttggtggaatgtttgcgggtcatgatgaaggaggaggaaaaataataaaaaaaaatggattaaaagttatcgaattttatggtt

SEQ ID NO: 222723 - DNA, 560 bp, Unknown
  Bacterial polypeptide expressing nucleotide sequence isolated from the Sargasso Sea
tgatatgactcaagaacttgtattaagtggtgcagatattgtaaaagtggggattggccctggaagtgtttgtacaacaagaatacaaactggtgttggttaccctcaattaagtgcggtgctagaatgtgctgacgcggcacatggacttggagcacatataattgctgatggaggttgcacaagtccaggagatgtagctaaaggatttggtgcaggtgcagattttgtaatgttaggtggaatgcttgccggacacaaagagggtggtggaaatataattaagcataacggtaaaagttatatcgaattttatggctccagttcagaggaagctaatgaaaaacactatggaggccttgcaaattatagatcatcagaaggtaaaaaagtaagaattctttttagatcatctttagaaaaaactgtcaaagatattttaggaggtattagaagtagttgtacttatgtaggtgcaccaactttaaaacaacttagtaaatgcactacttttgttagagtaaataatcaatataatgatgtttttggcaaagtttaat

SEQ ID NO: 222724 - DNA, 757 bp, Unknown
  Bacterial polypeptide expressing nucleotide sequence isolated from the Sargasso Sea
attcacccacatttaattcttagcaccggaacaagtaatgaggactacaagcgattaaatgaaataatgaaagagtgtagtttttttgaatttatatgtattgatattgcaaatggatattctgatcattttagcaaatttgtagcttcggtaagagaaaaatatcctaccaaaactataattgctggaaatgtcgtcacagcagacatgacacaagaattagttatgaatggagccgatattgttaaagttggaattggtccaggtagtgtttgtacaacacgcattcaaacaggtgtgggctatcctcaactgagtgcagttattgagtgtgctgatgctgctcacggacttggtgctcatattattgctgatggtggttgcacatgtccaggtgatatagcaaaagcatttggtggaggtggagactttgtaatgttgggaggtatgtttgcgggccacgaagaaggtggtggaaaaaaagttaaaaaaaatggatctcaatttattgaattctatgggtcaagttcagatacagcaattacaaaacattacggaggcctttcagattatagaagcagtgaaggaaaaaaagttcaattaaaatatcgtggtaaaataaaagacaccgtccaaaatatattgggtggtttaagaagtagttgcacttatgttggggccccttctcttaaacagcttagcaagtgcacaacttttgtaagagttaaccaacagtataacgatacttttgaataag

SEQ ID NO: 222725 - DNA, 706 bp, Unknown
  Bacterial polypeptide expressing nucleotide sequence isolated from the Sargasso Sea
atgagaattgaagaagaaattaagttagattactcagatgtccttttcaggccaaaaagaagtactttaaaaagtagaagagaagttaatcttaaaagaaaatataaatttaaacattccaaattaagttgggaaggtattcctattatcgcctctaatatggatggcgtaggagaagttggaattgctaagaaattagcttcctttaatatgatgactgcacttactaagcagcatgacaataaagaaatcaatagcttacaaaaaactaaattaattcataattttgttgctttaagttgcggtactagtaaagatagttacacacgattaaacaagattctaaaaaaataccctaaatttaaatttatttgcatagatgtagcaaacggatactctgaaaattttagtcactttgttagtgaggtacgaaaaaaatatcctactaaaaccattatagctggaaatgtggttactgcagatatgactcaggaattggttttaagtggtgcagatattgttaaggttggcataggtcctggcagtgtttgcacaacaagaattcaaactggagttggctatccgcaattaagtgctgtgcttgagtgtgctgatgcagctcatggtcttggtgcacatattattgctgatggtggatgcacaagtcctggtgatgtagcaaaaggattggagcaggtgcagattt

SEQ ID NO: 222726 - DNA, 975 bp, Unknown
  Bacterial polypeptide expressing nucleotide sequence isolated from the Sargasso Sea
tccagatcagatgttgatctcgaaagggaattcagtttcagacataccaacgagactttgactggtgtaccaattgttgcggccaacatggatactactggtctcttctcaatagcaaaggtactccaagaacaccgaatgctgacttgtacacacaaattctactcaactaaagacttctcggaggcttgggaaaatggggtcgagccagagtttgtttcagtgacttgtggctcgacagaggaaagctttgatctccttaagaggaaagttggaactagcacaaaaacaaagatgatctgcatagatgttgccaacggatatagggaggttttcctagaatttgtcaaaagggtgagagaggagttttctgacaatattatcattgcaggaaatgtagcaactagggaaatgacagaggcactaattcttgcaggggcagatgtagtcaaagtggggattggccccggatcagtttgtactacaaggaaagtagcaggggtgggttacccgcaattatcagcaatttcagagtgctctgatgccgctcatggcctgaatggccacgttatgtcagatggtggttgctcatcaccgggcgatgtggcaaaggcatttgcggcaggagctgattttgtgatgctcggagggatgcttgcagggcatgacgagtcgggaggtgaggttatcgaggtgactggaaggaagtacaaatcattctacgggatgtcctcgtcaaaggcaatggaagagcactatggaagcgtggcaaagcatagagctccggagggcaaggaagttagagttccttacagaggtcctttggaaggaacggtgcaatctattctcggagggctaagatctgcatgttcgtatgtcggtgcgagaaggataaaggatctgccgaaatgcacaaccttcgtaaaggtcagtaggacaacaaatgaagtttacagacagttcaatgttgatgaa

SEQ ID NO: 222727 - DNA, 670 bp, Unknown
  Bacterial polypeptide expressing nucleotide sequence isolated from the Sargasso Sea
atgagaatagaagaagaagtaaaactagattactctgatgtcttattcagaccaaaaagaagcactctaaaaagcagaaaagatgtaaatcttcttagaacatacaaatttaaatatagtaataatgaatggtcaggtattccaatcatgggtgcaaatatggatggtgtaggtgaattaggtattgctgaaaagctaagcgaatttaaaatgattacatgtttaacaaagcaacacgatgttaaaaaattaaaacaaaacaaaaatataaaaaaaatttacccaaatattgcattaagtgcaggaattaaaaaagatgattttaataatttagataaagttttaagagaatttagttttattaaatttatttgtattgacgttgcaaatggatattcagaacattttactaatttcgttaagtcaataagagataaatatcctacaaaaacaattattgcagggaatgttgtaactgctgatatgacccaagaattagttttaagtggagcagatattgtaaaagttggaataggtcctgggagtgtttgtacaactagaattcaaactggtgttggttatccacaactaagtgcagtaatagaatgtgcagatgctgctcatggtttaggtgcccatataattgcagacgggggatgtacatgtcctg

SEQ ID NO: 222728 - DNA, 652 bp, Unknown
  Bacterial polypeptide expressing nucleotide sequence isolated from the Sargasso Sea
ggtcttgatgtggcaaatggatatactattaaatttgttgactccgtaaagaagctcagagataaatgtcccaatgctactattgcagcaggaaatgtagttacagcagatatgacacaggaattgatcttagcaggagcagacatagttaaagttggtattggaccaggttcggtttgcacaacaagaattaagactggtattggttatccgcaactaagtgcggttattgaatgtgcggatgctgctcacggacttaacgcacatataattgctgatggtggatgcgcaagttctggcgatattgtaaaagcttttgctggaggtgcagattttgtaatgattggcggaatgttagcaggacatgacgagtgtgatggtgaagtagaagatggcgttatgaagttttatggaatggcatcagaatcagcaatgactagacacagtaatcataatgattataggggaacagaaggaaaaacagttgaagttgaatacagaggtaaagtgaacgatacaattaaagatattttgagtggtgtccggtcagcatgcacttatgttggagcaaataaattaaaagacctttcaaaatgtacaacatttgtgagagttaacaatactcataatactgtttttgggaacgagtaag

SEQ ID NO: 222729 - DNA, 784 bp, Unknown
  Bacterial polypeptide expressing nucleotide sequence isolated from the Sargasso Sea
gcacgatgtaaaaaaaattaaaaaatttaaaaaaattaaatcaatttatcaaaatgttgcaataagtattggaattaaaaaagaagattttgataatttagataaagttttaaaagaatttagttttattaaatttatttgtattgatgttgcaaatggttactcagaaagattcagcgcttttataaagaaagttagagaaaaatatccaactaaaacaataattgctggtaatgtagtgactgctgacatgactcaagaactaatattaaatggggccgatatagtaaaagttggaattggacctggtagtgtttgtactacaagaattcaaactggtgttggttatcctcaattaagtgcagttatagaatgcgctgatgcagctcacggtttaggagctcacattattgcagatggaggctgtacttgtcctggtgatgtagctaaaggttttggagctggagctgactttgttatgttgggagggatgtttgctggacacgatgaaggtaaaggtaaaattgttaaatcaaatggatcaaaatttatagaattttatggttctagttctgacaccgcaaataacaaacactacggtggtttatcaaattatagaagtagtgaaggtagaactgtaagagttaaatatagaggaaaaataaaagactcgatctctaatattttaggtggtgtaagaagtagctgcacatatgttggcgcaccttcattaaaacaactcagtaaatgtactacattcgtaagagttagtaatcaattcaat

SEQ ID NO: 222730 - DNA, 775 bp, Unknown
  Bacterial polypeptide expressing nucleotide sequence isolated from the Sargasso Sea
aaaaaaaaaggtattgagaaatttatttctttaagctgtggtacaagccaagaaagttataagcgtttaaacaaaattttatcaaaatttccaaattttcagtttatttgtattgatgttgcaaatggttattcagagaattttagtaagtttgtatctcaagtcagatcaaagcatccaaaaaaaactatagtagcagggaatgtggttactgcagatatgactcaagaactgattctaagtggagcagatattgtaaaggttggtataggtccaggaagtgtatgtactactagaatccaaaccggagttggttacccacaactaagtgctgtaatggaatgtgcagacgctgctcatggtttaggtgctcacatcattgctgatggagggtgcacttgtcctggagatgttgctaaagcttttggaggaggcgctgattttgttatgttaggaggaatgttagcaggtcacaaagagggtggcggaaagataattgagtctcaaaataaaaagtttattgaattctatggttcaagctcagaagaagctaatcacaaacattatggtggtttagctgattacagatcttctgaaggtaaaaaagttcgaataccatttagaaatagtttagatgaaactataagagatatactcggaggcattagaagtagttgtacatatgttggagcgccaactttaaaacaactaagtaaatgtactacttttataagggtcaacaaccaatataatgatacttttggcaaaatataat

SEQ ID NO: 222731 - DNA, 927 bp, Unknown
  Bacterial polypeptide expressing nucleotide sequence isolated from the Sargasso Sea
gaagaagaagttaaattagattattcagatgtgttgtttcgcccaaaaagaagcacactgaaaagtagaagtgaagtagatcttaaaagaaaatataaatttaagcactctaaaatgatttgggagggcatacctataatagcttctaatatggatggagttggagaagtcggtgtagcaaagaaattgacagcatttcaaatgatgacagcgttaacaaagcagcatggagataaagatattaaaaatttgcaaaaaaataaatttatacacaactatgtcactttaagctgtggaactagtaaggatagttactcaagactaaacaatctcttaaaaacaaatccaaaatttaaatttatttgcattgatgttgctaatggatattcagaaaattttagcaattttgtaagtgaagttagaaaaaaacatccttcaaaaacaataattgctggaaatgtagtaactgctgatatgacgcaagaattagttttaagtggagcagatattgtaaaagttggaattggcccgggaagtgtttgcacaactagaattcagacaggagttggttatccacaattaagtgcagtattagagtgtgcagatgcggcccatggattaggcgctcacataattgccgatggaggatgcacaagtccaggagacgttgcaaaaggatttggagcaggtgcagattttgttatgcttggaggaatgcttgctggccataaagagggaggaggagatattatcaaagataataataaaaaatatattgaattttatggttctagttctgaggaagcaaatgaaaagcactatggcggattagctgattatagatcttctgaaggaaaaaaagttagaatagaatatagatcatctttagataaaaccgtaagagatattttaggtggtattcgtagt

SEQ ID NO: 222732 - DNA, 590 bp, Unknown
  Bacterial polypeptide expressing nucleotide sequence isolated from the Sargasso Sea
taaaacaattattgctggaaatgttgtgacagctgatatgacacaagaattagttctaagtggagcagacattgtaaaagttggaattgggcctggaagtgtttgtacaacaagaatccaaacaggtgtaggatatcctcagcttagtgcagttatagaatgcgctgatgctgctcacggacttggtgcacatgtaatagctgacggtggttgtacgtgcccaggtgatgttgctaaagcttttggaggtggcgcagactttgtaatgctaggagggatgctagcaggacatgatgaaggaaaaggtaaaataataaaaattaatggtaacaaatatattgaattttatggttctagctcagaagttgctaataaaaaacattatggtggactgtcttcctatagaagcagcgaaggaagaaaagtaagagtaaagtacagaggtaaaattaatgatactattttaaatatcctgggaggtgtaagaagtagctgtacatatgtaggagcaccttcattaaaacaactcagcaaatgtacaacctttgtaagggtctcaagtcaatttaatgatagtttaattaagtgat

SEQ ID NO: 222733 - DNA, 754 bp, Unknown
  Bacterial polypeptide expressing nucleotide sequence isolated from the Sargasso Sea
caccaacacttaattcttagtaccggcacaagcaatgaagactacaagcgattaaatgaaataatgaaagaatgtagtttttttgaatttatatgtatcgatattgcaaatggatactctgaccattttagtaaatttgttgcgtcagtaagagaaaaatatcctaccaaaaccataattgctggaaatgtagttactgcagatatgactcaagaattagttatgaatggagctgatattgtaaaggttggtattggaccaggtagtgtttgtacaacacgtatccaaacaggcgttggttaccctcaacttagtgcagttatagaatgtgctgatgcagctcacgggttaggtgctcatataattgctgatggtggctgcacatgtccaggcgatgtagcaaaagcatttggaggaggtggagattttgtaatgttgggaggtatgtttgctggccatgaagaaggtggtggaaaaaaagtaaaaaaaaatggatctcaatttatcgaattctacggatcaagttcagatacagcacttgaaaaacattatggaggactttcagattatagaagcagcgaaggaaagaaagttcaattgaaatatcgcggcaaaataaaagatactgtgcaaaatatattgggtggtttgagaagtagttgtacttatgttggggccccttctcttaaacagcttagcaagtgcacaacttttgtaagagttaaccaacaatttaacgatacttttgaataag

SEQ ID NO: 222734 - DNA, 703 bp, Unknown
  Bacterial polypeptide expressing nucleotide sequence isolated from the Sargasso Sea
aaaatattaaaaaagtacccaaaatttcaatttatatgtattgatgttgctaatggttattcagaaaactttagccattttgtatctagtatcagaaaaaaatatccaaaaaaaacgataatagctggaaatgttgttacggctgatatgacccaagaactagtactaagcggagcagatattgtaaaagtaggaattggcccaggtagtgtttgtacaacaagaatacaaacaggggttggatatcctcaacttagtgcagtaatggaatgcgctgacgccgcacatggtttaggagcacatataattgctgacggaggatgtacttgtccaggagatgtcgcaaaaggatttggagcaggagctgattttgtaatgcttggcggtatgttagctggccataaagaaggtggagggagaattattgagcaaaacggacaaaaatatattgaattttatggatcaagttccgaagaggcaaatgagaagcattatggcggtttagcagattacagatcttcagaaggaaaaaaagtaaagttacttttaaaaaattctctagataaaactattagagatattttaggaggagtcagaagcagttgcacctatgttggtgcaccttcattaaaacaattaagtaagtgcactacttttgtcagagtaaataatcaatacaatgatacgtttggtaaagtttaat

SEQ ID NO: 222735 - DNA, 464 bp, Unknown
  Bacterial polypeptide expressing nucleotide sequence isolated from the Sargasso Sea
tggtgttggctatccacaattaagtgcggttatagaatgcgccgacgccgctcatgggttaggggcccacataatagctgatggtggttgtacttgtcctggagatgtagcaaaggcatttggtgggggcgctgattttgtaatgcttggtggaatgtttgctggccatgatgaaggtggcggaaaaataataaaaaaaaacggatctaaagttattgaattttacggctcaagttcagaaaccgcactaaataaacattatggtggtcatgctgattatagaagtagtgaaggaaaaaaagttcaactaaaatatagaggaaagattaaggatactgttttaaatattttgggtggattgagaagtagttgcacttatgttggtgccccgtctttaaagcaattaagtaaatgcacgacatttgtaagagtaaatcaacaatacaatgacacttttgagtaaa

SEQ ID NO: 222736 - DNA, 931 bp, Unknown
  Bacterial polypeptide expressing nucleotide sequence isolated from the Sargasso Sea
catgagctctagggggggaagtgaaactaagagcgaacacataaatttcttgtggagcaaaaaaaaatggacaggcattccaattatgtcagccaatatggatactgttgggacaccagcgatgcacaaggtgctctcaaaatacaatctaattacttgtccagccagacatcatctcaaaaaaaaatctgatcaattcaaaaaaggacaacgaaatatttgttggtttggcggtattgatgacattccaaaattatcaaaaatagcagatggcttcataggccttgatgttgccaatggctacaccatcaagttcgtagatgcggtcaaaaagttaagagaaaagtgccccaatgcaaccattgcagcaggcaatgttgtaaccgcagatatgacacaagaattaattctagcaggggctgatattgtcaaagttggcattggccctggatcggtctgtacaacaaggatcaaaacagggattggttatccacaattaagcgcagtcattgaatgtgcagatgcagcacatggactggatgcacacattattgcagatggtggttgtgtaagctctggagatattgttaaagcattcgctgggggtgcggattttgtcatgattggtggaatgctagccggacatgacgagtgcgatggcacagtcgaagatggggtaatgaaattttacggaatggcttcggaatcggccatgagtaagcacggtaatcacaatgaatacagaggaacagaaggcaaaactgttgaagttaagtatcgcggcaaagccgatgatactgttaaggacatactgagcggcattcgatctgcctgcacttatgttggagcaaatagattgaaaacactttctaaatgcacaacatttgttcgtgtgaataacactcacaataccgtttatggaaatgagtga

SEQ ID NO: 222737 - DNA, 531 bp, Unknown
  Bacterial polypeptide expressing nucleotide sequence isolated from the Sargasso Sea
gtggagccgatatagttaaagtgggaatggtcctgggaagcgtttgtacaacaagaattcaaactggtgtcggttaccctcaattaagtgcagtaatagaatgtgcagatgccgcacatggattaggtgctcacattattgcagacggcggatgtacctgcccaggtgacgtagcaaaaggttttggtgggggagctgattttgtaatgttaggaggaatgttagctggtcatgatgaaggtaaaggtaaggtggtaaaaattaatggttctaaatatatagaattttatggatccagttcagatgtagcaaataaaaaacattacgggggattatcagattatagaagcagcgaaggaagaacggtaagagtaaaatacagaggaaacattaaagatacagttttaaatattttaggtggtgtgagaagtagttgtacatatgtaggagctccatcgttaaaacaactgagcaaatgtacaacgtttgtaagagttgctaaacaatttaatgatacatttaccaagtagt

SEQ ID NO: 222738 - DNA, 730 bp, Unknown
  Bacterial polypeptide expressing nucleotide sequence isolated from the Sargasso Sea
aagatggcccagaaaaatttgttggtttggtggcattgatgatatatctaatttatcaaaagcttcctcagcatttattgggctagatgttgcaaatggttacacaataaagtttgtggatgcggtgaaacaattaagagaaaaatgcccaaaagcaactattgctgcaggtaatgtcgttacagctgatatgactcaagaattaattctagctggagctgatattgtcaaagttggtattgggccaggatcagtttgtactacaagaatcaaaacgggaattggttatccacaattaagtgctgtaattgaatgtgctgatgctgctcatggtttgggcgctcatatcatagcagatggaggttgtacaagttctggagatattgttaaagcatttgcaggtggtgcagactttgtgatgatcggtggaatgcttgcaggacatgatgaatgtgatggaacagttgaagatggagttatgaaattttatgggatggcatcagaatctgctatgagtcgccatggtaaccataatgactatagaggaacagaaggtaagctggttgaagtaaattatcgaggaaaagcagacgatacaatcaaagatattttaagtggcattcgttcagcttgtacctatgttggtgcaaatagacttaaaacactgtcaaaatgtacaacttttgttagagtgaataatactcataacaccatttttgggaactcataa

SEQ ID NO: 222739 - DNA, 898 bp, Unknown
  Bacterial polypeptide expressing nucleotide sequence isolated from the Sargasso Sea
tttaggccaaaaagaagtactttgaagagtagaaaagatgttgatttaaatagaacttataagtttaaacattcaaataaagaatggtcaggagtgccaattatagcctctaatatggatggagtcggagaattaaatgtttcaaaaactttatcaaattacaaaatgattactactttaacaaaacaacataattcaaatgatataaatgattataaattaattaaagatatatataattatatatccttaagttgtggtactagtgaagaaagttatgataggcttaacaatatactaagagaacatagctatttccaatttatttgtattgatgtagcaaatggatattcagaaaattttacaaaattcgtttcttctgtcagagaaaaacatccttctaaaacaattattgcaggaaatgttgtgactgctgatatgactcaagaattaatattaagcggagcagatattattaaagtaggtattggtccaggaagtgtttgtacaacaaggattcaaacaggtgtaggctatcctcaattaagtgctgtaattgaatgtgcggatgcagcccatggtttaggtgctcacattattgctgatggaggttgtacatgtcctggcgatgttgcaaaagcttttggtggaggtgctgattttgtaatgttgggcggtatgcttgcaggtcataaagagggtggaggaaaaattcttaaagaaaatggaaaagaatttatagaattttatggatcaagttctgaagaagctaatgataaacattatggtggtttatctgactatagatctagtgaaggaaagaaggtaagtataccttataggggtaaacttgatgacacaattaaagatattttaggtggtgtaagaagtagtgtac

SEQ ID NO: 222740 - DNA, 668 bp, Unknown
  Bacterial polypeptide expressing nucleotide sequence isolated from the Sargasso Sea
ctcctcaggattcattggcttggatgttgctaatggatacacaataaagtttgtcgatgctgtgaagaaactcagggacaaatgtccagatgcaacaattgctgcgggtaatgttgtaactgcggatatgactcaagagctaattttagccggtgcagatattgtaaaggtaggcataggaccaggatctgtttgcacgaccagaattaaaactggtattggctatcctcaattaagtgccgtaatagagtgtgcagatgctgctcacggacttgacgcacatatcatagctgacggaggctgtgtaaattctggagatattgttaaagcttttgctgcaggagctgattttgtaatgcttggaggtatgcttgcggggcatgatgaatgtgatggagaagttgaaaatggtgttatgaaattttatggcatggcttctgaatctgccatgagtagacatggtaatcataatgcttacagaggagtggaaggtaagaccgtggaagtggaatatcgcggaaaggcagatgacacaattaaagatattctgagtggaataagatctgcttgtacttatgttggagcaacaagactaaaaactctctctaaatgtacaacttttgtgcgtgtcaacaatactcataatacaatattcggtatagagtaaa

SEQ ID NO: 222741 - DNA, 646 bp, Unknown
  Bacterial polypeptide expressing nucleotide sequence isolated from the Sargasso Sea
ggttattctgaacactttagtaaatttttaaaatctgtgagagataaatatccgactaaaactattattgctggtaacgtggtaacagctgatatggcacaagaattagtattatcaggagcagatattgtaaaagttggaattggaccaggtagtgtttgtactacaagaattcaaacaggtgttggttatcctcagttaagtgctgtcattgaatgtgctgatgctgcccatggtttaggggcacatataattgctgatggaggttgtacttgtccaggtgatgtcgcaaaagctttcggtggtggtgcagattttgtgatgcttggaggaatgtttgctggtcacgatgaaggtgaaggtaagctaataaaatcgaatggtcataaatttatagaattttacggatcaagttctgacatagcaaataagaaacattacgggggtttgtctgactatagaagtagtgagggtagaacagtgagaattaaatatcgaggaaaaataaaagatacaataaataatattcttggtggtgttagaagtagctgtacttatgtaggagccccttctcttaaacaacttagtaaatgtactacttttgtaagagtagctaaacaatttaacgatacttttactaagtaag

SEQ ID NO: 222742 - DNA, 517 bp, Unknown
  Bacterial polypeptide expressing nucleotide sequence isolated from the Sargasso Sea
tgttaaggttggaattggacctggtagtgtttgcacaacaagaattcaaactggagtaggttacccacaattaagtgcagtaatcgaatgtgctgatgctgcacatggacttggtgcacatgttatagctgatggtggatgtacctgccctggtgatgttgcaaaaggatttggaggtggtgctgattttgtaatgctgggaggaatgttagcaggtcatgatgaaggtaatggaaaaattgttaaagttaatggcgataagtttattgagttttatggttcaagttctgaggttgcaaataaaaaacattatggtgggctttcatcgtatagaagtagtgaaggaagaaaagtaagagtgaaatatagaggaaagataaatgatactattttaaatattcttggtggagtaagaagtagctgtacttatgttggagcaccttcactaaaacaattaagtaaatgtacaacgttcgttagagtatccaatcaatttaatgatagtttaattaaataa

SEQ ID NO: 222743 - DNA, 826 bp, Unknown
  Bacterial polypeptide expressing nucleotide sequence isolated from the Sargasso Sea
ttattaagaacatatagatttaaatatagtaaaaatgaatggtcaggtattcctattatggcagctaatatggatggtgttggggagcttagtattgctgaaaaattaaatgttcatgaaatgataacttgtttaacaaaacaacatgacgtgaaaagaatcaaacaaaacaaaaatataaaaaaaatgtattctaatattgctttgagtgtaggtataaaaaaagaggattttgataatttagataaagtattaaaggaatttagttttttcaaatttatatgcatagatgtagcaaacggttactcagaacatttcactaactttgtaaaatcagttagagacaaatatccaacaaaaacaattattgcaggaaatgttgtaacagctgatatgacacaagagttagttcttagtggagcagatattgttaaagttggcatagggcctggcagtgtttgtacaacaagaatacaaacaggggttggttatcctcaactcagtgcagttattgaatgcgctgacgctgctcatggacttggggcccacgtaatagctgatggaggttgtacatgtcctggcgatgttgcaaaggcttttggtggaggtgcagattttgttatgctaggaggaatgcttgcagggcatgacgaggggaaaggcaaaatagttaaatttaatggaaataagtatattgagttttatggatcaagctctgaagtagcaaataagaagcattatggtggattatcctcctatagaagcagtgaaggtagaaaagtaagggtgaaatatagaggaaaaattaatgatactattttaaatc

SEQ ID NO: 222744 - DNA, 582 bp, Unknown
  Bacterial polypeptide expressing nucleotide sequence isolated from the Sargasso Sea
taattgcaggtaatgttgtaacagctgatatgactcaagaattagttcttagtggagcagatattgtaaaagttggaataggaccgggaagtgtttgtactacaagaattcaaactggagttggttatccacaattaagtgcagtaatcgaatgtgctgatgcagctcatggacttggtgcacatgtaatagcagacggtggatgcacttgtccaggtgatgtggctaaaggttttggaggtggtgcagactttgtaatgcttggaggtatgcttgcaggacatgatgaaggtaatggtaaaatagttaaagttaatggagaaaaatatatagagttttatggatctagctctgaagttgctaataaaaaacactatggtggactttcaaattatcgaagtagtgaaggacgtaaagtaagggtcaaatatagaggtaaaattaacgatacgattttaaatatccttggtggtgtaagaagtagctgtacttatgttggtgccccttcacttaagcaattaagtaaatgtacaacgttcgttagagtatccagtcagtttaatgatagtttaattaaataag

SEQ ID NO: 222745 - DNA, 589 bp, Unknown
  Bacterial polypeptide expressing nucleotide sequence isolated from the Sargasso Sea
aaaacaatcatagcaggtaacgttgttactgctgatatgactcaagaattgattttatcaggagcagatattgtaaaagttggaattggaccaggaagtgtctgtactacacgtatacaaactggagttggctatcctcagttaagtgcggtaatagaatgtgctgatgcagctcatggattaggtgcacatatcattgcagatggcggatgtacatgtccaggtgatgttgctaaagcatttggtggtggagctgattttgttatgcttggaggaatgtttgcgggtcacgatgaaggtaaaggaaaattagtaaaatctaatggttcaaaatatatagaattttatggatcaagttctgaaacagctaataaaaaacattatggtggtttatctgattatagaagcagtgagggtagaacagtaagagttaagtatcgtggtaaaattaatgatacaattttaaatattttaggtggtgtaagaagtagttgcacatatgttggagcaccctcattaaaacaattaagtaaatgtacgacttttgtaagagttacaaagcaatttaacgatacatttgtaaaataaa

SEQ ID NO: 222746 - DNA, 549 bp, Unknown
  Bacterial polypeptide expressing nucleotide sequence isolated from the Sargasso Sea
aagagttaatattaagtggggcagatatagtcaaagtaggtatcggacctggtagcgtgtgcactacaagaatacaaactggtgtcggctatcctcaacttagtgcagttatggaatgcgctgatgccgcacatggattaggcgcccacattattgctgatggtggttgtacatgtcctggagacgtcgctaaaggttttggtgctggggcagattttgtgatgttaggaggaatgctggcaggccataaagaaggtggaggagaaattattgagagaaaaggaaaaaaatttattgaattttatggatctagttcagaagaggctaacgaaaagcattatggtggcttggcaaattatagatcatctgaaggtaaaaaagttgttatacctcttaaaaattcattagataaaacaatcagagatatattaggaggtattagaagtagttgtacctacgtaggagctccttcattaaaacaattaagtaaatgtacaacttttgtaagagtaaataatcaatataatgatacttttgggaaaatataat

SEQ ID NO: 222747 - DNA, 655 bp, Unknown
  Bacterial polypeptide expressing nucleotide sequence isolated from the Sargasso Sea
gcaaatggatattctgaaaactttagtcattttgttagtgaggtaagaaaaaaatatcctacaaaaacaattatagctggaaatgttgttactgcagatatgacccaggaattggttttaagtggtgcggatattgttaaggttggaataggtccgggaagtgtctgtacaacgagaattcaaactggagttggatacccccaactaagtgctgtgcttgaatgcgctgatgctgctcatggccttggggcgcatattattgctgatggaggatgcacaagtcctggcgatgtagctaaaggatttggcgcaggtgcagatttcgtgatgttaggtggcatgcttgcgggacacaaagagggtggtggtgaaataatcagggatcatgaaaaaagttatattgaattttatggatcaagttcagaagaagccaatgaaaaacattatggtggattggccagttacaggtcttctgaaggaaaaaaagtaagaattaaatatagatcttcattagataagactgttaaagatattttgggaggtattaggagcagttgcacatatgttggtgcaccaactttaaaacagctaagtaaatgtactacttttgttagagtcaataatcaatacaatgatgtttttggcaaagtataat

SEQ ID NO: 222748 - DNA, 775 bp, Unknown
  Bacterial polypeptide expressing nucleotide sequence isolated from the Sargasso Sea
atgagaattgaagatgaaataaaattaacatttgatgatgtgttgattagacctaaaagaagtacattaatatctcgttctgaagtaaaacttgaaagagaatttaaatttagacataataaacatacttgggaaggaattcctattttttctgccaatatggatactaccggtacttttgaaaccgctaaagcattacaaaaacataagatgctaactgctatacataaattttatactttagaggattggaaagacaacatcgactcattagacccaaactatgtatcagtaacagttggacagtctcaagaagattatgatttaggtaaacaaatatttgaactcagtaaagatcttaagtttctttgtatcgatgttgcaaacggatatagagaagatttccttgaagctgtaaaaaaatacagagaaacatataaagataaaattattattgctggcaatgttgccactagagaaatgaccgaagcgttaatacttgcgggtgcagatatagtcaaaataggaattggtcctggttctgtctgtacaactagaagcgttgcaggtgttggttatccacaattatcatctatatcagaatgctcagatgctgctcatggcttaggagggcatgttttagcggatggaggttgtaaatacccaggcgatgtatcgaaggcttttggtgctggagcagattttgtaatgttaggaggtatgtttgcaggacatgaagagtcaggaggtgaacttgttacaggtgaagatggtg

SEQ ID NO: 222749 - DNA, 517 bp, Unknown
  Bacterial polypeptide expressing nucleotide sequence isolated from the Sargasso Sea
tgtaaaagttggaattggaccaggaagtgtctgtactacacgtatacaaactggagttggctatcctcagttaagtgcggtaatagaatgtgctgatgcagctcatggattaggtgcacatatcattgcagatggcggatgtacatgtccaggtgatgttgctaaagcatttggtggtggagctgattttgttatgcttggaggaatgtttgcgggtcacgatgaaggtaaaggaaaattagtaaaatctaatggttcaaaatatatagaattttatggatcaagttctgaaacagctaataaaaaacattatggtggtttatctgattatagaagcagtgagggtagaacagtaagagttaagtatcgtggtaaaattaatgatacaattttaaatattttaggtggtgtaagaagtagttgcacatatgttggagcaccctcattaaaacaattaagtaaatgtacgacttttgtaagagttacaaagcaatttaacgatacatttgtaaaataa

SEQ ID NO: 222750 - DNA, 620 bp, Unknown
  Bacterial polypeptide expressing nucleotide sequence isolated from the Sargasso Sea
tttcttaaaatctgtaagagataaatatccaacaaaaactataatagctggaaatgttgttactgcagatatgacgcaagaattaattttatctggtgcagatatagttaaagttggaattggtcctggaagtgtttgcacaacaagaattcaaacaggagttggctatcctcaattaagtgccgtaattgaatgtgctgatgcagcccacggattaggagctcacataattgcagatggaggatgcacatgccctggagatgttgcgaagggttttggtggtggtgcagattttgtaatgttaggaggaatgtttgcaggccacgatgaaggtaagggaaaaatcgttaaatctaatggatcaaaatatattgaattctatggttcaagttcagaaacagcaaataaaaagcattatggaggattatcaaattacagaagtagtgaaggaagaactgtaagaattaaatatagaggaaaaataaaagatacaattcaagatattttaggtggtgttagaagtagttgtacatacgtgggcgcaccttcattaaaacaattaagtaaatgtactacttttgtaagggttgcaaaacaatttaacgatactttcacaaaat

SEQ ID NO: 222751 - DNA, 778 bp, Unknown
  Bacterial polypeptide expressing nucleotide sequence isolated from the Sargasso Sea
gcctcaaatatggatggtgttggtgaacttggtgtagctgaaaagctttctgaatacggaatgatcacttgtttaactaaacagcataacattcaaaaaataaaaaaattcaaaaaaataaaatctattcatccaaatattgctttaagtataggaataaaaaaagaagattttgaaaatttagataaaattttaaaagaatatagtttcataaaatttatctgcattgatgttgctaatggttattctgaacactttagtaaatttttaaaatctgtgagagataaatatccgactaaaactattattgctggtaacgtggtaacagctgatatggcacaagaattagtattatctggagcagatattgtaaaagttggaattggaccaggtagtgtttgtactacaagaattcaaacaggtgttggttatcctcagttaagtgctgtcattgaatgtgctgatgctgcccatggtttaggggcacatataattgctgatggaggttgtacttgtccgggtgatgtcgcaaaagctttcggtggaggtgcagattttgtgatgcttggaggaatgtttgctggtcacgatgaaggtgaaggaaagctaataaaatcaaatggtcataaatttatagaattttacggatcaagttctgacatagcaaataagaaacattacgggggtttgtctgactatagaagtagtgagggtagaacagtgagaattaaatatcgaggaaaaaaaaaagatacgataaataatattcttggtggtg

SEQ ID NO: 222752 - DNA, 688 bp, Unknown
  Bacterial polypeptide expressing nucleotide sequence isolated from the Sargasso Sea
tctgtataaattcggatttgtgagaattgaagaagacctaaaactggattactccgatgtgctttttagaccaaaaagaagcactctctctagtcgtaaagatgtaaatcttaaaagaacatataaatttaaatacagtaacaacgagtggtcaggaattccaattatggctgctaatatggatggtgttggagaattgggcattgcagaaaaattatctaattatggaatgattacatgtttaacaaaacagcatgatgtaaaaaagataaaacaatttaaaaaaattaaatcaatatacccaaatgttgctttaagtattggtataaaaaaagaagattttcaaaatttagataaagttttaaaagagtatagttttattaaatttctatgcatagatgttgcaaatggttattccgaaaggtttagtgcatttttaaaatctgtaagagataaatatccaaccaaaactataattgcaggtaatgttgtaacagctgatatgacacaagaattaattcttagtggagctgatattgtaaaagtaggtattggtcctggtagtgtttgtacaaccagaattcaaactggagttggctatcctcaactaagtgcagttatagagtgtgctgatgctgctcatggattaggtgcccacatgatgcagatggtggctgtactgcccagg

SEQ ID NO: 222753 - DNA, 856 bp, Unknown
  Bacterial polypeptide expressing nucleotide sequence isolated from the Sargasso Sea
tatgagaattgaagaagaattaaaactcgattattcagatgttttgtttagacctaaaagaagtactcttcgaagtcgtaaagatgtcaatttattaagaacttatcgcttcaaatatagtaaaaacgaatggtcgggtattccaataatggcagcaaatatggatggagttggagagttaagtgttgctgaaaaattaaatgaatacggaatgataacatctttaacaaaacaacacgatgttaaaaaaattaaacaaaataaaaatattaaaaaaatatattctaatattgcacttagtgtcggtataaagaaagaagattttttaaatttagataaagtattaaaagaatttagtttttttaaatttatttgtattgatgttgctaatggatacacagaacatttcaccaatttcattaaatcagtaagagataaatatcctaccaaaacaatcattgctggtaacgtagtaacagctgatatgactcaagaattagttttaagtggtgcagatattgttaaggtcggaattggacctggaagcgtttgcacaacaagaattcaaaccggggtaggttatcctcaactaagtgctgtaattgaatgtgctgatgcagcacacggacttggtgcacatgtaatagcagatggtggatgcacatgtcctggtgatgttgcaaaaggtttcggaggcggtgcagattttgtcatgcttggcggtatgcttgctggacatgatgaaggaaacggtaaaattgttaaagttaacggagaaaaatatatcgaattctatggatctagttctgaagttgccaataaaaaacactacggcggactgtcagattatcgaagt

SEQ ID NO: 222754 - DNA, 682 bp, Unknown
  Bacterial polypeptide expressing nucleotide sequence isolated from the Sargasso Sea
aaaattatcaaagactacttcaggctttataggtcttgatgtagccaatggctatactattaaatttgttgattctgtgaagaagctcagagataaatgtcctgacgcaactattgcagctggaaatgtagttacagcagatatgacgcaagagttgattttagcaggagccgatattgtaaaagttggtatcggtccaggatcagtttgcactacaagaattaagactggtattgggtatcctcaattaagtgctgttattgagtgtgcagatgctgcacatggccttaatgcacatattattgctgatggtggctgtacaaattcaggtgatattgtgaaagcttttgctggaggtgcagattttgtaatgattggtggcatgttagcaggtcatgatgagtgtgacggagtattagaggatggagttatgaagttttatggaatggcttcagaatcagcaatgaccagacatagtaatcataatgattatagaggaactgagggaaaaacagttgaagttgagtaccgaggtaaagctgatgacacaattaaggatattttaagtggcattcggtccgcatgtacttacgttggagcaaataaattaaaagacctttcaaaatgtacgacatttgtgagagttaataatactcataatactgtctttggaaacgagtaa

SEQ ID NO: 222755 - DNA, 697 bp, Unknown
  Bacterial polypeptide expressing nucleotide sequence isolated from the Sargasso Sea
tttgaaagatatagtttttttcaatttatatgcatagatatagcaaatggttattctgatcattttagtaaatttgtaaaatcggtaagagaaaaatatccaacaaaaactattattgctggaaatgttgttacggccgatatgacccaagaattaatacttagtggtgctgatgttgttaaagttggtattggtcctggaagtgtgtgtactacaagaattcaaacaggtgttggttatcctcaattaagtgctgtaattgaatgcgcagatgctgcgcatggccttggcgcccatattattgcagatggaggatgtacttgtcctggagatgttgcaaaagcttttggtgctggtgcagattttgttatgcttggaggaatgtttgcaggtcatgatgaaggtagcggaaaagttgttaaaaaaaatggatcaaaatacatagagttttatggttcaagttcagatacagctgttgaaaaacattatggtggcctagcagattatagaagcagtgaaggaaaaacggtaagaattgagtatagaggaaaaataaaagatacagtattaaatatattaggaggagttagaagtagttgtacatatgtaggcgcaccttctcttaaacagctaagcaaatgcactacttttgttagagtaaataatcaattcaatgacacgtttaagaacaaataat

SEQ ID NO: 222756 - DNA, 878 bp, Unknown
  Bacterial polypeptide expressing nucleotide sequence isolated from the Sargasso Sea
tcccaatcatggctgcaacatggatggtgtaggagagttaggtgttgcggataaaatgtctgaatttgacatgattacatgtcttacaaaacaacatgatgttaaaaaattaaagcaatataaaaaaattaagtcaatttataaaaatattgccttaagtattgggattaaaaaggaagactttattcggcttgataaattattaaaagaatttaattttattaaatttatttgcatagatgttgctaatggatactcggaacgatttagtaaatttataaaatcagttagagacaaatatccaactaaaaccataatagctggaaatgttgttacagctgatatgacacaagaattaatactaagtggtgctgacattgtaaaagttgggattgggccagggagtgtttgtacaacaaggattcaaaccggcgttggttacccacagttaagtgctgtgatggagtgtgctgatgcagcacacggattgggagcacatatcattgcagatggtggttgtacttgcccaggagatgtagctaaaggttttggtggtggtgcagattttgtaatgctcggtggaatgctcgcaggtcatgatgagggcaaaggtaaaattgttagaagtaatggtcataaatatatagaattttatggatcaagttcacttacggcaaacaaaaaacattacggtggcttatcagactatagaagtagcgaaggaagaaatgtaagagttaagtatagaggaaaaataaaagacacgatctcaaatattcttggagggatcagaagcagttgtacttatgtcggagctccctccctaaaacaattaagcaaatgcactacctttgtcagagtttctaatcaatttaatg

SEQ ID NO: 222757 - DNA, 697 bp, Unknown
  Bacterial polypeptide expressing nucleotide sequence isolated from the Sargasso Sea
ttaaaaaaatatccaaaatttaaatttatctgtattgatgtagcaaatggatattcagaaaactttagtaattttgtttctgaagtaagaaaaaaatatcctaagaaaactattattgcaggtaatgttgtaactgcagatatgactcaggaattagtattaagtggagcggacattgttaaagttggtataggtcctggtagtgtctgtaccactagaatacaaacaggagtagggtatccacaactaagtgcagtaatggaatgtgctgatgcagcacatggattaggagcacatattattgctgacggtgggtgtacttgtcctggtgatgttgcaaaaggatttggtgctggcgcagactttgttatgcttggcggaatgttagcaggacatatagagggtggaggcgacataattgaagagaaaggaagtaaatatattgaattttatggatcgagctctgaagaagctaatgagaaacattatggaggtctggcaaattatcgatcatctgaaggaaaaaaagttaaaatacaaatgaagaattcgttagatagtacaatcagagatattctaggaggagtaagaagtagttgcacatatgttggagcctcatcactaaaacagcttagtaagtgtaccacatttgtaagagtaaatagtcagtataatgacacttttgggaaagtataga

SEQ ID NO: 222758 - DNA, 754 bp, Unknown
  Bacterial polypeptide expressing nucleotide sequence isolated from the Sargasso Sea
agatttaaatacagcaaaaatgaatggtcaggtattccaatcatggctgcaaacatggatggtgttggagagcttagtattgcagaaaaattgagtgaacatggcatgatcacatgtttaaccaagcaacacgatgtaaaaaagcttaaaaaaaataaaaacattaaaaaaatttatccaaatatagctttaagtgtaggaattaagaaagaggattttgcaaatttagataaagtattaaaagagtttagtttttttaagtttatatgcatagatgttgctaatggttattctgagcattttacaaattttgttaaatcagtgagagataaatatccaacaaaaacaattatagcaggaaatgttgtaacagctgacatgacacaagaattagttttaagtggcgctgatatagtaaaagtaggaatcggtccaggaagtgtgtgtacaactagaatacaaactggggttggatatccacaattaagtgctgtaatagaatgtgctgatgctgcacatggtctaggagctcatattattgccgatggaggatgtacttgcccaggtgatgttgcaaagggctttggaggaggagcagattttgtaatgttgggaggaatgctcgcgggtcatgatgaaggtaatggtaaaatagttaaaataaatggttctaaatatatagaattttatggatcaagttctgaagttgctaataaaaaacactatggaggattagctgattacagaagtagtg

SEQ ID NO: 222759 - DNA, 793 bp, Unknown
  Bacterial polypeptide expressing nucleotide sequence isolated from the Sargasso Sea
ggtgtacctatcatgtcatccaacatggatacggttggaacatttgagatgcatgaagaattatctcaatatgacatggtaacgtgcattgcaagacagcataacaccaagggagagctctggaatcatgcagagaaaaaaaataaactctgtgtcatgtctggtatttctgatactgaactatctgagataattggtgtatctaatacatatcccgacattgcatttgtaggtttggatgttgcaaacggatacacagttaattttgtagatgcagtaaaacgattaagagaacatttaccgcactctacgatcattgctggtaatgtggtgacaggagacatgactgctgagttgattctatctggtgttgatatcgttaaggttggtgttgggcctggttctgtatgtactactcgtatcaagacaggtattgggtatccacaattaagtgcagtcatggaatgtgcagatgcagcacatggactcaatgcacatatcattgcagatggtggttgtaattcatctggtgatattgtcaaggcgttttctggtggtgccgactttgttatgataggtggtatacttgctggtcatgatgaatgtgagggtgaattagtatttgaagatgataacccagaacccataggtatgcagttttatggtatggcatctcgtactgcaatggacaaacatggacactctaatagagagtatcgtggagaagagggtaagactgtatctgttccttatcgtggtgcggtaagggataccatagtagatattctaagtg

SEQ ID NO: 222760 - DNA, 811 bp, Unknown
  Bacterial polypeptide expressing nucleotide sequence isolated from the Sargasso Sea
aacaaaacagcatgatgtaaaaaaaattaaacaaagtaaaaatattaaaaagatatatcctaatattgctttaagtgtaggaattaaaaaagaagattttcaaaatttagataaagttttgaaagaattcagtttttttaaatttatctgcattgatgttgcaaatggatattcagagcattttacaaatttcgttaaatctgtaagagataaataccccacaaaaacaatcattgctggaaatgtagtgacagctgatatgacacaagagcttgttttgagcggtgcagacatagtaaaggttggaataggacctggtagtgtatgtactactagaatacaaactggtgttggatatccacaattaagtgcagttatagaatgtgcagatgctgcgcatggacttggtgcacatattattgctgatgggggatgtacttgtcctggagatgttgcaaaaggttttggtggtggtgcagattttgttatgttaggaggaatgcttgctggacatgacgaaggtaaaggtaaaattgttaaagtaaatggcactaaatttattgaattttatggttcaagctcagaggttgctaacaaaaaacattatggtggactggcaaattacaggagtagcgaaggtagaaatgtaagagttaaatatagaggaaaaattaatgatactattctaaatattcttggtggagtaagaagtagttgtacttatgttggagcaccctctttaaaacaattaagcaaatgtacgacttttgtaagagttagtagtcaatataatgatacttttacgaagtga

SEQ ID NO: 222761 - DNA, 781 bp, Unknown
  Bacterial polypeptide expressing nucleotide sequence isolated from the Sargasso Sea
aaaagatgttaatttaaagagaacctatcgttttaaatacagtaaaaacgaatggtctggaattcctataatggcagctaacatggatggtgtaggcgtccttggtgttgctgaaaaattatctgattatggaatgattacatgtttaacaaaacaacatgatgtaaagaaaattaaacaatttaaaaaaataaaatcaatatatccaaatgtagctttaagtattggaacaaaaaaagaagactttcaaaatttagataaagttttaaaagaatttagtttcattaaatttatttgtattgatgttgcaaacggttactcagagcattttagtaaatttttaaaatctgttagagataaatatccaactaaaacaatcatagcaggtaacgttgttactgctgatatgactcaagaattaattttatcaggtgcagatattgttaaagttggaattggaccaggtagtgtttgtacgacacgaatacaaactggagttggatatccacagttaagtgcagtaatagaatgtgccgatgcagctcatggattaggtgcacatatcattgcagatggtggatgtacatgtccaggtgatgttgctaaagcatttggtggaggagctgattttgttatgcttggaggaatgtttgcaggtcatgatgaaggtaaaggaaaattagtaaaatctaatggctcaaagtatgttgaattttacggatcaagttctgaaacagctaacaaaaaacattatggtggtttatctgattatagaagcagt

SEQ ID NO: 222762 - DNA, 634 bp, Unknown
  Bacterial polypeptide expressing nucleotide sequence isolated from the Sargasso Sea
tttggatgttgcaaatgggtataccgaattattcctggatctagttaagagaatcagagaaaattttagtaatcctttaattgctggaaatgttgtaacaggtgaaatgacagaagcattgatattggctggtgcagatatagttaaaataggaattggccctggttcggtatgtacaactagaactgtgacaggagtaggatatcctcagctgtctgcaattattgaatgcgcagatgctgcacatggattaaggggacatgtgatatcagatgggggttgttctacgccaggtgatgttgcaaaagcctttggtgcaggagctgactttgtaatgttaggcggtatgtttgccggccatgaagaatctggaggaaaattaattgaaaaagatggcaaaaaatataaacagttttatgggatgagctcagatactgcaatggaaagatattatggagatatcaagaattatcgtgcaagtgaaggtgaaaccatatctttagagtataaaggccctatagataagactatacagcagatacttggtgggcttaggtcagcggcaacctatgttggagccaaagacattaaaaatttacctaagtgcaccacattcatactcaaatataagtag

SEQ ID NO: 222763 - DNA, 737 bp, Unknown
  Bacterial polypeptide expressing nucleotide sequence isolated from the Sargasso Sea
tatgcgtattgaagaagatatcaagttggactatgccgatgtcctatttcggccaaaaagaagcaccttgcatagccgtaaggacgtaaaacttaagcgtacatacaaatttaaatatagtaatcacgaatggtcaggaattcctttaatggcagccaacatggatggtgttggggaacttcaaattgcagaaaaattagctgaacacgaaattgcaacttgccttactaaacagcacgactctaaagcgattaaaaaattttcttccattaagaaaatctttcctcacgttattcttagtactggaacaagcgatgaagattacaaaagacttaacgaaatattaaaagaatatagtttttttgaatttatatgtattgatattgcaaatggttactcagatcatttcagcaaatttgttagttctgttagaaaaaaatatccaacgaaaactattattgctggcaatgttgttacagccgatatgactcaggaactagtcttagccggtgctgatattgtaaaggtaggaattggcccaggtagtgtatgcactacacgtatccagacaggtgtgggatatccacaattgagtgctgttattgagtgtgctgatgctgctcatggattgggagcccacattattgcggatggaggttgcacttgtcccggtgacgtagctaaagcgttcggtggaggtgctgattttgtgatgttaggaagtatgtttgcgggac

SEQ ID NO: 222764 - DNA, 761 bp, Unknown
  Bacterial polypeptide expressing nucleotide sequence isolated from the Sargasso Sea
atataaatttaaacattctaaattaacttgggaaggtgtgccaattattgcatctaatatggatggagtaggtgaagttggtattgcaagtaaattagcatcattcaatatgatgacagcgctaactaaacagcatgataataaagaaattaaatctcttcaaaaaacaaaatcaattcatgattttgttgctttaagttgtgggacaagcaaagatagttatagtagattgaataatctttttaaaaaaaaccctaaatttaaatttatttgcatagatgttgcaaatggatactctgagaattttagtcattttgttagtgaggtaagaaaaaaatatccctctaaaacaataatagctggaaatgtcgttactgcagatatgacacaggaattagtcttaagtggagcagatattgtaaaagttggaattggtcctggaagtgtttgtactactagaattcaaactggagttggttatcctcaactaagtgcagttcttgaatgtgctgacgcagcgcatggacttggggctcatataattgctgacggaggttgcactagcccaggtgatgtagctaaaggatttggtgccggtgctgattttgtcatgttgggaggtatgcttgcaggtcataaagaaggtggtggaacaattatttcagacaatggaaaaagttatattgaattttatggttcaagttcagaagaagctaatgaaaaacattatggagggctagctcactatagatcttcagaag

SEQ ID NO: 222765 - DNA, 896 bp, Unknown
  Bacterial polypeptide expressing nucleotide sequence isolated from the Sargasso Sea
cgatttaaataccagtgataatcaatggtcaggtatacctattatggctgctaatatggatggtgttggtgaactagcaattgctgaaaaattgtctgaatatgggatgattacctgtcttacaaagcaacatgatgttaaaaaaattaataaatttaaaaaaataaaaaaaatttataataatattgcactaagcataggtataaaaaaagaagattttgaaagacttgataagatcttaaaacaatttagttttttcaaatttatttgcatcgatgttgctaatggatattctgagcgctttagtaattttattaagtctgtaagagataaatacccaactaagactattattgctggtaatgtagtaacggctgatatgactcaagaattaattttaagtggagctgacattgtaaaagttggtattggtccaggaagtgtttgcacaacaagaatacaaactggagtgggttatccccagttaagtgcagtaatggaatgcgctgatgctgctcacggcttaggttcacacatcattgctgatggtggatgtacttgcccgggtgatgttgcaaaaggatttggtggaggcgcagattttgtaatgctaggtggaatgtttgcaggacacgacgaaggtaaagggaaagtagttaaatctaatggctcgaaatatgtagaattttatggatctagttcagacacagcaaataaaaaacactatggtggattatcagattacagaagtagtgaaggtagaacagttagagtcaagtacagaggaaaaataaaagatactttatctaatattttaggtggtattcgaagtagctgtacttatgtaggtgcgccgtcattaaaacaattaagtaaatgcactacatttgtgagag

SEQ ID NO: 222766 - DNA, 611 bp, Unknown
  Bacterial polypeptide expressing nucleotide sequence isolated from the Sargasso Sea
ttccgtaaaaaagctaagagataaatgtcccaatgctactatcgctgcaggaaatgtagttacagcagatatgacacaggaattgatcttagcaggagcagacatagttaaagttggtattggacctggttcggtttgcacaacaagaattaaaactggcataggttatccacaactaagtgcggttattgaatgtgcggatgctgcccacggactaaatgcacatattattgctgatggtggatgtacgaactctggcgatattgtaaaagcttttgctggaggtgcagattttgtaatgattggcggaatgttagcaggacatgatgaatgcgatggtgaagttgaagatggtgttatgaaattttatggaatggcatctgaatcagcaatgactagacacagtaatcataatgattataggggaacagaggggaaaacagttgaagttgaatacagaggtaaagctgacgattcaataaaagatattttgagcggtattcgatcagcatgcacttatgttggagcaaataaattaaaagatctttcaaaatgtacaacctttgttagagtcaacaatactcacaatacaatttttgggaacgaataaa

SEQ ID NO: 222767 - DNA, 668 bp, Unknown
  Bacterial polypeptide expressing nucleotide sequence isolated from the Sargasso Sea
tgcaaacggatatagggaagatttccttgaagccgtaataaattatagagaaacatataaagataaaataattattgctggcaatgtagcaactagagaaatgaccgaagcattaattcttgcaggtgcagatatagtcaaaataggaattggtcctgggtctgtttgcaccactagaagcgttgcaggtgttggatatccacaattatcatctatatcagaatgctcagacgctgctcatggcttagggggccatgttttagccgatggaggatgtaaatacccaggagatgtatccaaggcttttggtgctggcgccgattttgtaatgttaggtggtatgtttgcaggccatgaagaatcaggaggagagcttgttacaggtgaagatggtgagcaatacaaagatttttatggtatgtcttcaactaaagctcaacaaacatattatggcgacttagctctacatagagctccagaaggaaagaaagtaagattaaaatacaaagggcctatagaccaaacagtacaatcaattctgggtggtatgagatcagcctgttcttatgtaggggctaaaaaacttaaagacttaccaaaaagcacaaccttcattagagttactcaaacaactaatgagatatatacagggtctgaaaatctttgaa

SEQ ID NO: 222768 - DNA, 776 bp, Unknown
  Bacterial polypeptide expressing nucleotide sequence isolated from the Sargasso Sea
ctgtccggcaaaacatcaccttaaaaaaaattccaatgaatttagacagggccaatcaaatatatgttggtttggcggcatagatgacatctcaaaattatcaaaagctaactcaggctttatcggtcttgatgtagcaaatggatataccattaaatttgttgattccgttaagaagttaagagataaatgtccaaatgctactattgctgcaggaaatgtagttacagcagatatgacacaggaattgatcttagcaggggcagacattgttaaagttggtattggaccaggttcggtttgtacgacaagaattaaaactggtataggctatcctcaactaagtgcagtaattgaatgtgcggatgccgctcacggacttaacgcacatataattgctgacggtggatgcacgagttctggcgatattgtaaaagcttttgctggaggtgcagattttgtaatgattggcggtatgttagcaggacatgacgaatgcgatggtgaagtagaagatggaattatgaagttttatggaatggcatctgaatcagcaatgactagacacagtaaccataataattacagaggaacagagggaaaaacagttgaagttgaataccgaggtaaagcaaataacacaataaaggatgttttgagcggaattcgatctgcatgtacttacgttggagcaaataaattaaaagacctttcaaaatgcacgacttttgtaagagtcaacaatacccataacaccgtttttggaagcgagtaag

SEQ ID NO: 222769 - DNA, 896 bp, Unknown
  Bacterial polypeptide expressing nucleotide sequence isolated from the Sargasso Sea
tcctataatggcagctaacatggatggtgtaggtgtgcttggtgttgctgaaaaattatctgattatggaatgattacatgtttgacaaaacaacatgatgtaaagaaaattaaacaatttaaaaaaataaaatcaatatatccaaatgtagctttaagtattggaacaaaaaaagaagattttcaaaatttagataaagttttaaaagaatttagtttcattaaattcatttgtattgatgttgcaaacggatattcagaacattttagtaaatttttaaaatctgttagagataaatatccaacgaaaacaataattgcaggtaacgttgttactgctgatatgactcaagaattaattttatccggtgcagatattgttaaagttgggattggaccaggaagtgtttgtacgacgcgtatacaaactggagttggctatcctcaattaagtgcagtaatagaatgcgcagatgcagctcatggattaggtgcgcatataattgcagatggcggatgcacatgtccaggtgatgttgctaaagcatttggaggaggagctgattttgttatgcttggaggaatgtttgcaggccatgatgaaggtaaaggaaaattagtaaaatctaatggttctaaatatgtcgaattttatggatcgagttctgaaacagctaacaataaacattacggcggactatcagactacagaagtagcgaaggaagaacagtcagagtgaagtaccgtggtaaaattaatgataccattttaaatattttaggtggtgtgagaagtagttgtacgtatgttggtgcaccctctttaaaacaattaagtaagtgcacaacttttgtcagagttactaagcaatttaacgatacattcactaaataaa

SEQ ID NO: 222770 - DNA, 874 bp, Unknown
  Bacterial polypeptide expressing nucleotide sequence isolated from the Sargasso Sea
tatggatggagtcggggaaatagaaattgctaaaaacttagctaaatttgaaatgttgacctgcttaacaaaacaacacgatcttaaaacaattaaacgtaattcttccataaaaggaattcatccgcatttaattcttagcaccggaacaagtaatgaagattacaagagattaaatgaaataatgaaagaatgtagtttttttgaatttatatgtattgatatagcaaatggatactctgaccactttagcaagtttgttagttctgttagagaaaaataccccactaaaactataattgcaggaaacgtcgttacagcagatatgactcaagaattagttatgaatggtgcggatattgttaaagttggcattggcccaggtagtgtttgtacaacacgtattcaaacaggcgtaggttacccgcaacttagtgcggtcattgaatgtgctgatgcagctcacggactaggcgctcatattattgctgatggtggttgcacatgtccaggtgatgtagctaaagcatttggtggtggtggtgattttgtaatgctgggaggtatgtttgctggtcatgaagaaggtggtggtaaaaaagttaaaaaaaatggttctcaatttattgaattttacggatcaagttcagatacagcaattacaaaacattatggagggctcgcagattatagaagcagcgaggggaaaaaagttcaattaaaatatcgtggcaaaataaaagatacagttcaaaatatattaggaggtttgagaagtagctgtacttatgttggagctccttctcttaaacaacttagtaagtgcacaacttttgtaagagttaaccaacaatataatgatacttttgaataa

SEQ ID NO: 222771 - DNA, 538 bp, Unknown
  Bacterial polypeptide expressing nucleotide sequence isolated from the Sargasso Sea
aaaaaaacaataattgctggcaatgtagtaactgctgacatgacacaagaacttgtactaagtggagctgatatagttaaggttggaataggcccaggcagtgtttgcactactagaattcaaactggagttggatatccccaactcagcgctgtaatggaatgtgctgatgcagctcatggattaggtgcacacattattgctgatggaggttgtacttgcccaggggatgttgcaaaaggttttggtgccggcgctgattttgtaatgctaggaggtatgttagctggtcataaagaaggtggtggaaatattattgaatataatggtaaagagtttattgaattttatggttcaagttctgaagaagcaaatgaaaaacattacggtggtctagcaaattatagatcttctgaaggtaaaaaggtaaagttacctcttaaaagttcaatagataaaactataagagatattcttggaggtgtaagaagtagctgtacatacgttggcgcaccatctttaaaacaatttaagtaaa

SEQ ID NO: 222772 - DNA, 912 bp, Unknown
  Bacterial polypeptide expressing nucleotide sequence isolated from the Sargasso Sea
aaagatctacgcttaaaagccgtaaagacgtaaatttattaagaacatacagattcaaatatagtaaaaatgaatggtcaggtatacccattatggcagctaatatggatggtgttggagaacttagtattgctgaaaaactgaatgatcaccgcatgattacttgtttaactaaacagcatgacgttaaaaaaattaaacaaagcaaaaatattaaaaaaatgtattcaaatattgctttaagtgttggtattaaaaaagaggattttgaaaatctggataaagttttaaaggaatttagtttttttaaatttatatgtatagatgtagctaacggctactcagaacattttactaactttgtaaaatccgttagagacaaatatccaacaaaaacaataattgcaggaaatgttgtaactgctgatatgacacaggaattagttctaagtggtgctgacattgttaaagttggtattggccctggaagtgtttgtacaacaagaattcaaacaggtgttggttatcctcaactcagtgcagttatagaatgcgctgacgctgctcatggacttggcgcacacgtaattgcagacggtgggtgtacatgtccaggtgatgtcgctaaggcttttggaggtggtgcggattttgtaatgttaggaggaatgcttgcaggacatgatgaaggaaaaggcaaagtagtaaaaattaatggaaataaatttattgaattttatggttcaagttctgaagttgctaataaaaagcactatggtggactgtcctcttatagaagcagcgaaggtagaaaagtgagagttaagtatagaggaaaaattaatgatactattttaaaccttcttggaggtgtaagaagtagttgtacatacgtaggtgctccatcataaa

SEQ ID NO: 222773 - DNA, 739 bp, Unknown
  Bacterial polypeptide expressing nucleotide sequence isolated from the Sargasso Sea
atgagaattgaagaagaacttaagctagattactctgatgtcttattcagacctaagagaagcacattgaaaagtcgaaaagatgtaaatcttcttagaacttacagatttaaatacagtaaaaatgaatggtcaggcattccaattatggcagccaatatggatggtgttggtgaattaagtattgctgaaaaattaaatgaatatcaaatgatcacatgtttaacaaaacaacatgatgtaaaaaaaataaaggaaaataaaaatataaaaaaaatctatcctaatattgcactaagtgttggtattaaaaaagaggactttcaaaacttagataaggttttaaaagaatttagttttttcaaatttatttgtattgatgttgctaatggttattcagagcatttcactaattttataaagtcagtaagagataaatacccaaccaaaactattattgcaggaaatgttgtaactgcagatatgacacaagaattagttttaagtggtgcagatatcgtaaaagtaggaattggacctggaagtgtttgtactactagaattcaaactggagtagggtacccacaattgagtgctgttattgaatgtgctgatgcagctcatggtctaggcgcacatgtaattgctgatggaggatgcacatgtcctggtgatgttgcaaaaggttttggaggtggtgcagactttgtaatgcttggtggaatgttagcaggtcacg

SEQ ID NO: 222774 - DNA, 773 bp, Unknown
  Bacterial polypeptide expressing nucleotide sequence isolated from the Sargasso Sea
aattaaacaaaataaacatataaaaaaaatgtattcaaatattgctttaagcgttggaataaaaaaagaagattttgaaaatttagataaagtattaaaagaatttagtttttttaagtttatttgtatagatgttgcaaacggatactcagaacattttaccaattttgtaaaatcagtcagagataaatatccaacaaaaactattattgctggaaatgttgtaactgctgatatgactcaagaactagttctaagtggagctgatattgttaaagttggaataggcccaggtagtgtttgtacaactcgaattcaaaccggagttggatatccacaacttagtgcagtgatagaatgtgctgatgcagctcatggacttggagcacatgtaatagcggatggtggatgtacttgtccaggtgatgttgcgaaaggctttggtggtggtgctgattttgtaatgttaggaggaatgttagcaggtcacgatgaaggaaagggtaaaattgtaaaagttaatggtgataagtttattgagttttatggttcaagctcagaagttgccaacaaaaagcattatggtggactttcttcctatagaagtagcgaaggaagaaaagtgagagtaaagtacagaggtaaaattaatgatactattttaaatattcttggtggcgtaagaagtagttgtacttatgttggtgcaccttcactgaaacaattaagcaaatgtacaacatttgttagagtatccaatcagtttaatgata

SEQ ID NO: 222775 - DNA, 865 bp, Unknown
  Bacterial polypeptide expressing nucleotide sequence isolated from the Sargasso Sea
tggaatggggtgcctataattgctgctaatatggatggtgttggagaaattgaagtagcaaaaaaactagcatctttcaaacttatgaccgcactaactaaacagcatgaatctaaagatatcaacaaaatatacaaaaataaaatgaatcatagtttggttgctttaagttgtggaacaagcaaagagagttttaatcgattaacaaaattaatagtaaaatacccaaattttcagtttatatgtatagatgtggcaaatggttattctgaaaattttagtcaattcgtttataatgttagaaaaaaatacccaaaaaaaacaataatagctggtaatgttgtaacagctgatatgacacaggaattagttttaagtggtgctgatatagttaaagttggtataggtccaggaagtgtatgcacaacgcgtattcaaacaggtgttggttatcctcaattaagcgctgtaattgagtgtgctgacgctgctcatggtttaggtgcacatataatagctgacggtggttgtacatgtgctggagatgtagcaaagggttttggagctggagctgattttgtgatgcttggcggcatgttagcaggacactcggaaggtggtggtaatcttatagaagagaatggaaacaaatatattgaattttatggatctagttcagaagaggctaatacaaaacattacggcggattagcagattatagatcttctgaaggtaaaaaagtaaaaataacttatagaccatctcttgagaaaacaataagggatatattgggaggtattaggagtagttgtacttatgtaggagcgccaacattaaagcaattaagtaaatgcacaactttat

SEQ ID NO: 222776 - DNA, 753 bp, Unknown
  Bacterial polypeptide expressing nucleotide sequence isolated from the Sargasso Sea
ttccgcatgttgttcttagcactggaacgagcgatgaagattacaaaaggttaaatgagattttaaaagaatatagtttttttgaatttatctgtgtcgatattgcaaacggttactctgatcatttcagtaagtttgttagttcggttagaaagaaatacccaacaaaaactataattgcaggaaatgtcgttacagcagacatgactcaagaactgattttggcaggcgcagacattgtaaaagtaggaatcggtccaggaagtgtttgcactacacgtattcaaacaggcgtaggctacccacaattgagtgctgttattgagtgtgcagatgctgcacacggattaggtgctcatattatcgctgatggaggctgtacgtgcccaggtgatgtagctaaagcatttggtggaggagctgattttgtgatgctaggaggtatgttcgccggtcatgatgagggtggtggaaaagttttaaaaaaaaatggatcaaaattaatagaattttatggttcaagttctgaaacagctctaaacaaacattacggaggtcatgcagattatagaagtagcgaaggaaagaaagtacaattaaaatatcgaggaaaaataaaagatacagttttagatattttaggtggattgagaagcagttgcacttatgtgggcgctccatccttaaagcagttaagcaagtgcacaacttttgtaagagttaatcaacagtacaacgatacttttgaataaa

SEQ ID NO: 222777 - DNA, 490 bp, Unknown
  Bacterial polypeptide expressing nucleotide sequence isolated from the Sargasso Sea
tgtatgtactacaagaattcaaactggcgtaggatatcctcagctaagcgctgttattgaatgtgctgatgctgctcatggtttaggtgctcacatgattgcagatggaggatgtacctgcccaggagatgttgcgaaagcttttggaggaggtgcagattttgtaatgttgggtggaatgtttgcgggacatgatgaaggtggtggaaaaatagtaaaatctaatggaaataaatatatagaattttatggatcaagctcagacacagctaacaaaaaacattatggtggtttatcaaattatagaagtagtgagggaagaacagttagtgttaaatatagaggaagtataaaggacacaatacaaaatattttaggaggcttaagaagtagttgcacatatgtaggggcaccctctttaaaacaattaagcaaatgtactacatttgtaagagttgcaagacagtttaacgatacattttctaaataa

SEQ ID NO: 222778 - DNA, 831 bp, Unknown
  Bacterial polypeptide expressing nucleotide sequence isolated from the Sargasso Sea
gatgagaattgaagaagatcttaaacttgattattcagacgttttatttagaccaaaaagaagtaccctatcaagccgtaaagaagttaatttaaaaagaacttataagtttaaatacagcaaccatgaatggactggcatccctattatggcagcaaacatggatggggtcggtgaaatgggtgttgctgaaagtctttcagaatttggaatggttacatgtttaacaaaacaacatgatgttactaaattaaaaaaattcaaaaaattaaaatctatatatcaaaatatagctttaagtattggtattaaaaaagaagactttcaaagattagatgaaacattaaaagaattttcctttattaaatttatatgtgttgatgtagcaaatggttattctgaacatttttctgcttttataaaatctgttagagataaatatccaacaaaaacaataatagctggaaatgtagtaacagcagatatggcacaagaattagttttaagtggtgccgatatagttaaagtaggcattggtccaggaagtgtttgtacaacaagaattcaaactggagttggctatccacaattaagtgcagtaatcgaatgcgctgatgcagctcatggattaggcgcacatattattgctgatggcggttgtacttgcccaggcgatgtagcaaaaggttttggcggaggagcagactttgttatgcttggaggaatgcttgcaggtcatgatgagggaagtggaaaaattgtaaaatcaaatggttcaaagtatatagaattttatggctcaagttcagaaacagctaacaaaaaacatta

SEQ ID NO: 222779 - DNA, 1045 bp, Unknown
  Bacterial polypeptide expressing nucleotide sequence isolated from the Sargasso Sea
atgcgtatcgaagaagacttgaagctcggtttcaaggatgtcctgttccgccccaagcgctctactctcaagagccgttcccaagtcagcctgacccgtcagttcaccttcaagcacacccagacccaatggcaaggggtgcccgtcatcgccgccaacatggataccgtcggcagcttcgccatggcgcgtaccctggccaacttcgagatgatgactgcagtacacaagcactacagccttgcgcagtggcaaaccttcgtcaatgagaccgacccggcgctgctgggtcatgtgatggtctctaccggcacctccgaggatgacttcaccaagacccgccagatcctggccatgtccagcgccctgcgcttcatctgcgtcgatgtggccaacggctactcccagcacttcgtcgagtttctgcgcaagatccgcgaggcctgcccgaaccacgtcatcctggcgggcaacgtggtcaccggcgagatggtggaggagctgatcctctccggcgccgacatcgtcaaggtcggcataggcccgggctcggtctgcaccacccgggtcaagaccggcgtcggctacccgcagctctccgccatcatcgagtgtgccgatgcggcccacggcctgggcggccagatcgtcggtgacggcggctgcacctgcccgggggatgtggccaaggcgtttggcggcggcgccgacttcgtgatgctgggtggcatgctggcagcccacgaggagtgtggcggcgaaatcgtcgacgtggatggcgaacccttcatgaagttctacggcatgagctcatcgagtgccatggacaagcacgccggcggcgtcgccgaataccgcgcctccgagggaaaaaccgtgctgctgccctatcgcggcccggtcgaaaacacggtgcgtgacatcctgggcggggtgcgctccacctgcacctacgtcggtgccagccagctgaaagaactgaccaaacgcaccacctttatccgggtacgcgagcaagagaacaacgtctacggcaaggagtaac

SEQ ID NO: 222780 - DNA, 571 bp, Unknown
  Bacterial polypeptide expressing nucleotide sequence isolated from the Sargasso Sea
catgttgtaacggctgatatgacccaagaattaattcttagtggggctgatatcgtaaaagttggcattggtccgggtagtgtctgtactactcgaattcaaacaggtgttggatacccacaattaagtgcagtaatagagtgtgctgatgctgctcatggattaggagcccacatgattgctgatggaggatgtacatgtccaggtgatgtagctaaaggttttggaggtggagctgattttgtaatgctaggaggaatgtttgctgggcatgatgaaggaaaaggtaaaatagtaaaatctaatggttcaaaatatattgaattttacggctcaagttcagataccgcaaacaataaacattatggtggcttgtcttcttacagaagtagcgaaggaagaacagtgagagttaaatacagaggcaagattgaaaacacaattcaaaatatacttggtggaataagaagtagctgcacctatgttggagcaccatctttaaaacaacttagcaaatgtactacatttgtaagagtagcaaaacaatttaacgatacatttactaaataga

SEQ ID NO: 222781 - DNA, 640 bp, Unknown
  Bacterial polypeptide expressing nucleotide sequence isolated from the Sargasso Sea
atgagaatagaagaagaaataaaacttgattattcagatgttctttttagaccaaaaagaagcacattaaaaagtaggaaagatgtcgatttaaataggacttataattttaaacactctaaattaaaatggaaaggtactcctataattgcctcaaatatggatggagtaggtgaaatcaatatagcgaaaaaactcttatctcataaattaatgacagcattaacaaaacaacattctattaaacaaattgggtcgataaataataatagtagttttcataattttgttgctcttagttgcggtacaagtcctgatagttttaacagactaaattcaattttaaagaagtactcaaaattccaatttatatgtattgatgtagcaaatggttattcagaaaattttagtcattttgtctctaatgtcagaaaaaaatatccaaaaaaaactattattgctgggaatgtagttacagcggatatgactcaggagctggttttaagtggtgcagatattgttaaagttggaattggacctggtagtgtctgtactactagaatccaaactggtgttggttatcctcaattaagtgcagtaatggaatgtgcagatgcagcccatggtttaggagctcaca

SEQ ID NO: 222782 - DNA, 496 bp, Unknown
  Bacterial polypeptide expressing nucleotide sequence isolated from the Sargasso Sea
ccaggtattgtatgcactacacgtatccaaacaggcgttggatatcctcaattaagtgcagttattgaatgtgccgacgcggcacacggtttgggtgcccacattatagctgatggtggatgtacttgcccaggcgatgtagcaaaagcttttggtggaggcgcagattttgtgatgcttgggggaatgtttgctggtcatgatgagggtggtggaaaaataataaaaaaaaatggatcaaaagttatcgaattttatggctcaagttcagagacagctttaaacaaacattatggtggtcatgctgattacagaagcagcgaaggtaaaaaagtccaattacaatacaggggaaaaattaaggatacagttttaaatattttaggtggattgagaagcagttgcacgtatgttggtgcaccctctttgaaacaattaagcaagtgcacaacatttgtaagagtaaatcaacaatataacgatacatttgagtaaa

SEQ ID NO: 222783 - DNA, 994 bp, Unknown
  Bacterial polypeptide expressing nucleotide sequence isolated from the Sargasso Sea
tttgctagttaatgaagatataaagttagattattctgatgtcttaataagacctaaaagatctacaatgagttctagaggagaagtaaatcttgaaagaacacatactttcctctggagtaaaaaaaaatggactgggattcctattatgtcggccaacatggacactgtaggaactcctgcaatgcataatgttttatctaaatataatttagttacatgcccagctaggcattatcttaaaaaaaattcagaaaaatttaaaaaaagacagacaaatatttgctggcttggtggaattgatgatatttctaaattgtcaaaaacctcaggtggtttcgtaggacttgatgttgcaaatggatatactattaagtttgttgatgctgtaaaaaaattaaggcaaaagtgtccaaatgcaactattgttgctgggaatgttgttactgctgacatgacacaagagttaatcctcgctggtgccgatatagtaaaagttggtattggtcctggctctgtctgcacaactagaatcaaaaccggaatcggctatcctcaattaagcgctgtaattgaatgtgcagacgcagcgcatggtcttgatgcgcatattattgctgatggtggttgtactagttctggagacattgttaaagcatttgctggcggtgccgattttgtgatgataggcggaatgcttgctggacacgatgaatgtaagggtaaggttgaggatggatttatgaaattctatggcatggcttccgaatctgccatgaataagcatgggaatcataattcctatagaggcacagaaggtaaaacagttgtagtaaaatatcgaggaaaggcagatgatacagtaaaagatattttaagtggaattcgatctgcatgtacctatgttggagcgaataaacttaaaacactatctaaatgcacaacttttgtaagagtaaataatacacataacaaaatttttggggaagaatag

SEQ ID NO: 222784 - DNA, 922 bp, Unknown
  Bacterial polypeptide expressing nucleotide sequence isolated from the Sargasso Sea
ctgtataaattcggatttgtgagaattgaagaagaattaaaactagattattcagacgtcctttttagacctaaaagaagtactctacaaagtcgtaaagatgtaaatcttctaagaacatacagatttaaatatagtaaaaatgagtggtcgggtattcctataatggctgcaaatatggatggggtcggagagcttggaatagctgagaaattatctgaatatggcatgattacatgtttaactaaacaacatgatgtaaaaaaaataaaacaatttaaaaaaattaaatctatttacaaaaatatagctattagcattggtactaaaaaagaagattttgaaaatttaaacaaagttttaagagagtttggatttataaagttcatttgtattgatgttgctaatggttattctgaatactttagtaaatttcttaaatctgtaagagataaatatcctacaaaaactattatagctggaaatgtagttactgcagatatgacgcaagaacttattttatctggtgcagatattgtaaaagttgggattggtccaggaagtgtttgtacaacaagaattcaaactggagttggctaccctcaattaagtgctgtaattgaatgtgctgatgcagcacatggtttaggagctcatataattgcagacggtggatgtacatgtcctggagatgttgcaaaaggttttggtggtggtgcggattttgtaatgttaggtggaatgtttgcaggtcacgacgaaggtaaagggaaaatagttaaatcaaacggttcaaaatatattgaattttatggttcaagctctgaaacagcaaataaaaagcattatggaggattatcaaattacaaaagtagtgaaggaagaactgtaagaattaaatatagaggaaaaataaaagata

SEQ ID NO: 222785 - DNA, 994 bp, Unknown
  Bacterial polypeptide expressing nucleotide sequence isolated from the Sargasso Sea
atgttagtaaatgaagagataaaattagattattcggatgttctaattagaccaaaaaggtcaaccatgagctctagaggggaagtcaaattagagcgaacgcatagatttctttggagcaaaaaaaaatggactggcattccaattatgtcagccaatatggataccgttgggacaccggcaatgcacaaggtgctctcaaaatacaatctaattacttgtccagccagacatcatctcaaaagaaaatctgatcaattcaaaaaagcgcaccgaaatatttgttggtttggtggcattgatgacattccaaaattatcaaaaatatctgatggcttcataggtcttgatgttgccaatggctacaccatcaagtttgtcgatgcggtcaaaaagttaagagacaagtgccccaatgcaaccattgcagcaggcaatgttgtaactgctgatatgacacaagaattaattctagcaggggctgatattgtcaaagttggcattggccccggatcggtctgtacaacaaggatcaaaacagggattggttatccacaattaagcgcagtcattgaatgtgcagatgcagcacatggactggatgcacacattattgcagatggtggttgtgtaagctctggagatattgttaaagcatttgctgggggtgcagattttgtaatgattggtggaatgttagccggacatgacgagtgcgatggcatagttgaagatggggtaatgaaattttacggaatggcttcggaatcggccatgagtaagcacggtaatcacaatgaatacagagggacagaaggcaaaactgttgaggtcaaatatcgcggtaaagccgatgatactgttaaggacatactgagcggtattcgatctgcctgcacttatgttggagcaaatagattgaaaacactttctaaatgcacaacatttgttcgtgtgaataacacccacaataccgtttatggaaatgagtgaa

SEQ ID NO: 222786 - DNA, 1039 bp, Unknown
  Bacterial polypeptide expressing nucleotide sequence isolated from the Sargasso Sea
tatgcgcattgaagaagatattaagctcgattacgccgatgttctctttcggccaaagcgcagtacgctatcaagtcgtaaagacgtagaacttaaacgtacctacaaatttaaatacagcaatcatcaatggtcaggtattccgcttatggcagccaatatggatggcgttggagaaatagaggttgcaaaaaacttggctaaatttgaaataatgacatgtttgacaaaacaacatgatctaagaacaattaaacgtaattcgtctgtaaaaggaattcatcagcacctaattctcagcaccgggacaagtgctgaagactacaagcgattaaatgaaataatgaaagaatgtagtttttttgaatttatatgtattgatattgcaaatggatactctgatcactttagtaaatttgtaagttctgtaagagaaaaatatcctactaaaactataatagcaggaaacgttgttacagcagacatgactcaagaattggttatgaatggcgctgatatcgtaaaagtcggcataggacctggtagtgtttgcacaacacgaatccaaacaggagtgggttatccgcagcttagtgcagttatagaatgtgctgatgctgcacatgggttaggtgctcatataattgctgatggtggatgcacatgtcctggcgatgtagcaaaagcatttggtggtggtggtgattttgtaatgcttggaggaatgtttgctggtcacgaagaaggtggaggtaaaaaagtaaaaaagaatggatcccagcttattgaattttatggttcaagttcaaacacagcaataacaaaacattatggcggtctatcagattatagaagtagtgaagggaaaaaagttcaacttaaatatcgtggtaaaataaaagatactgttcaaaatatattaggtggcttaagaagtagttgtacttatgtaggagcaccttcactcaaacaacttagtaagtgcacaactttcgtcagagttaaccaacaatataacgatacctttgggcaagattaa

SEQ ID NO: 222787 - DNA, 601 bp, Unknown
  Bacterial polypeptide expressing nucleotide sequence isolated from the Sargasso Sea
aaatatcctacgaaaacaattattgctgggaatgttgttacagcagatatgactcaagaattagtactaagtggagctgatataattaaagttggcattggtccaggaagtgtttgtacaacaagaattcaaactggagtaggctacccacaattaagtgctgtcatggagtgcgctgatgcagctcatggattaggtgcacatataattgctgatggtggatgcacatgccctggtgatgttgcaaaaggttttggtggaggtgctgattttgtaatgctgggtggaatgttagctggacatgatgaagggagaggcaaggtagtaaaagtaaatggttctaaatatattgaattttatggttccagttcagatgtagcaaataaaaaacattatggtggtttgtcagattataggagcagtgaaggaagaaatgttagagtaaaatatagaggtaaaattaaagatacaattttaaatattttaggtggagtaagaagtagctgtacatatgttggagctccatcattaaagcaactaagcaaatgtactacgtttgtgagagtcagtaagcaatttaatgatacatttactaaataag

SEQ ID NO: 222788 - DNA, 548 bp, Unknown
  Bacterial polypeptide expressing nucleotide sequence isolated from the Sargasso Sea
gacacaagaattggttttggctggtgcagatattgtaaaagtaggaataggacctggtagcgtttgcactactcgtattcaaactggtgtagggtatcctcagttaagtgctgttattgaatgtgcagatgcagctcatggattaggagctcatattatagccgatggaggttgtacatgtcctggtgatgtagctaaagcatttggtgggggagctgattttgttatgttaggaggcatgtttgctggtcatgatgaaggtggtggaaaagttgtaaaaaaaaatggttctaaattaatcgaattttatggttcaagctctgaaacagcgctaaacaaacattatggtggtcacgcagactacagaagcagcgaagggaaaaaagttcaattaaaatatcggggaaaaataaaagatacaattcttaatattctaggtggtttaagaagtagttgcacctatgttggcgcaccgtcattaaagcagttaagcaagtgcacgacttttgtaagagttaatcaacaatataacgatacttttgaataaa

SEQ ID NO: 222789 - DNA, 946 bp, Unknown
  Bacterial polypeptide expressing nucleotide sequence isolated from the Sargasso Sea
tttgttaagaacatacagattcaaatacagtaagaatgaatggtcaggtattccaataatggcagcaaatatggatggtgttggggagttaagtattgctgaaaaattaaatgaatatggaatgattacatctttaacaaaacaacatgatgtgaaaaaaatcaaacaaaatagaaatataaaaaaaatttatcctaatatcgcgcttagcgttggtattaaaaaagaggatttccaaaatttagataaagttttaaaagaatttagtttttttaaatttatttgtattgatgttgctaacggatacactgaacattttacaaactttattaaatcagtaagagataaataccctactaaaacaataattgctggtaatgtggtaacggcagatatgactcaagaattagttctaagtggtgcagatattgttaagattggaatagggcctggtagtgtttgtacaactagaattcaaactggagttggttatcctcaactaagtgcagtaatagaatgtgctgatgcagcacatggacttggtgcacatgtaattgcagatggtggatgcacatgtcctggtgatgttgccaaaggtttcggaggtggtgcagattttgtaatgcttggaggtatgctagctggacatgatgaaggtaatggtaaaattgttaaagttaatggtgaaaaatatatagagttctatggatctagttctgaagttgctaataaaaaacactatggtggactatctgattatcgaagtagtgaaggacgtaaagtacgagtaaaatatagaggtaaaattaacgatacaattttaaatattcttggtggtgtaagaagtagctgtacttatgttggtgcaccttcgcttaaacaattaagtaaatgcacaacatttgtaagagtgtcaaatcagtttaatgatagtttaattaaataa

SEQ ID NO: 222790 - DNA, 958 bp, Unknown
  Bacterial polypeptide expressing nucleotide sequence isolated from the Sargasso Sea
gatgtatttaatcaggccaaaaagatccagaatgagttctaggggtgaagtaagacttcatagaacgcaccgctttctttggagtaagaaaaaatggacaggaattccaattatgtcagctaacatggatacagttggcacaccagcaatgcacaatgttctttcaaaacataaacttataacttgtcccgctaagcactaccttaagaatgattcaaataaatttaagacaggtaaatctaatatctgttggtttggtggaatagatgatatttcaaaattatctaaagctacttctggtttcatcggtcttgatgttgcaaatggctacaccataaaatttgtcgactctgttaagaaacttagagataaatgtcctaatgcaactattgctgcaggaaatgtagttactgcagatatgacacaggaattaatcttagctggagcagatattgttaaagttggtataggtccaggctcagtttgcacaacaagaatcaaaacaggtatcggctatcctcaattaagtgctgttattgaatgtgcagatgcagcacatggcttaaatgcccatattattgctgatggaggttgtactagttccggagacatcgttaaagcttttgccggaggtgcagactttgtaatgattggtggcatgttggcaggacatgatgaatgtgacggcacaatcgaagatggagttatgaaattttatggcatggcctctgaatcagctatgactagacacagtaatcataataactacagaggaactgaaggaaaaacagttgaaattgaatatcgaggtaaagcagatgacacaattaaagatattctgagtggcattaggtctgcatgtacctatgtcggcgcaaataaattaaaagatctatctaaatgcacaacttttttaagagtcaataatacacacaatactgtttttggaaacgaataa

SEQ ID NO: 222791 - DNA, 994 bp, Unknown
  Bacterial polypeptide expressing nucleotide sequence isolated from the Sargasso Sea
tttgttaattaatgaagatataaaacttgattattcagatgttttaattagaccaaagagatctaggatgagctctagaggagaggtaaggcttcaaagaacacatcgcttcctttggagtaagaaaaagtggactggaattccaatcatgtctgcaaatatggacacagttggaacaccatcaatgcataaagttctatcaaaacataaactcataacctgtccggcaaagcatcaccttaaaaaaaattctaatgaatttaagacaggccaaccaaatatatgttggtttggtggcatagatgacatatcaaaattatcaaaagctaactcaggctttatcggtcttgatgtcgcaaacggatataccattaaatttgtagattccgtaaaaaagcttagagataaatgtcccaacgctactattgctgcaggaaatgtagttacagcagatatgacacaggaattgatcttagcaggagcagacatagttaaagttggtattggacctggttcggtttgcacaacaagaattaagactggtataggttatccgcaactaagtgcggttattgaatgcgcggatgctgcccacggactaaatgcacatattattgctgatggtggatgtacgaactctggcgatattgtaaaagcttttgctggaggtgcagattttgtaatgattggcggaatgttagcaggacatgatgaatgcgatggtgaagttgaagatggtgttatgaaattttatggaatggcatctgaatcagcaatgactagacacagtaatcataatgattataggggaacagaggggaaaacagttgaagttgaatacagaggtaaagctgacgattcaataaaagatattttgagcggtattcgatcagcatgcacttatgttggagcaaataaattaaaagatctttcaaaatgtacaacctttgttagagtcaacaatactcacaatacaatttttgggaacgaataa

SEQ ID NO: 222792 - DNA, 994 bp, Unknown
  Bacterial polypeptide expressing nucleotide sequence isolated from the Sargasso Sea
ttgttaattaatgaagatataaaacttgattattcagatgttttaatcagacccaagagatcaacgatgagctctagaggagaggtaaagcttcaaagaacgcatcggtttctctggagtaaaaaaaagtggactggaattccaatcatgtctgcaaatatggacacagttggcacgccatcaatgcataaagttttatcaaaatataaactcataacttgccctgcaaaacatcatcttaaaaaaaattcaaatgaatttaagacaggtcaatcaaatatatgttggtttggtggtatagatgacatatcaaaattatctaaagctaactctggctttatcggtcttgatgtggcaaatggatatactattaaatttgttgactccgtaaagaagctcagagataaatgccctaatgctactattgcggcaggaaatgtagttacagcagatatgacacaagaattgatcttagcaggagcagatattgttaaagttggtattggaccaggttcagtgtgtacaactagaattaagactggcataggttatcctcaattaagtgcggttattgaatgtgcggatgctgctcacggacttaatgcacacattattgctgatggtggatgtgcgagctctggcgatattgtaaaagcttttgctgggggtgcagattttgtaatgattggcggtatgttagcaggacacgacgaatgtgatggtgaagtagaagatggcgttatgaagttttatggaatggcatcagaatcagcaatgactagacacagtaatcataatgattataggggaacagaaggaaaaacagttgaagttgagtacagaggcaaagtgaacgatacaattaaagatattttgagtggtgtccggtcagcatgcacttatgttggggcaaataaattaaaagatctttcaaaatgcacgacctttgtgagagttaataatactcataatactgtttttggaaacgagtaag

SEQ ID NO: 222793 - DNA, 1039 bp, Unknown
  Bacterial polypeptide expressing nucleotide sequence isolated from the Sargasso Sea
tatgagaatcgaagaagaaattaaacttgactactcagatgtcctttttagaccaaagagaagtactttaaaaagtaggaaagatgttgatttaagtagaaaatatacttttaaacactcaagatcatcatggaaaggaattccaataatagcctctaatatggatggtgttggtgaaatagatgttgcaaaaaaactaagttctcacaaactaatgactgctttaacaaaacagcatgacattaatcaaataggaactatttataaaaaaaatattttctttgattcaattgctcttagttgcggtacaagtaaagacagttacaataggttaaattcaattctaaaaaaatatccaaaatttaaatttatctgtattgatgttgcaaatggttattcagaaaattttagcaattttgtttcagaagtaagaaaaaaatatccaaaaaaaactattattgcaggtaatgttgttactgcagatatgactcaggaattagtattaagtggggcagatattgttaaagttggtatcggtcctggaagtgtatgtaccactagaatacaaacaggagtagggtatccacaacttagtgctgtaatggaatgtgctgatgcagcacatggattaggagcgcatattatcgctgatggaggatgtacttgtcctggtgatgttgcaaaaggatttggtgctggtgcagactttgttatgcttggcggaatgttagcaggtcataaggaaggtggtggtgatataattgaggaaaatggaaataaatttatagagttttatggatcaagttctgaagaagcaaatgagaaacattatggtggtcttgcaaattatagatcatctgaaggtaaaaaagttaaaatacaaatgaagaattcgctagatagtacaattagagatattcttggaggtgtacgaagtagttgtacatacgttggcgcttcatcattgaagcagcttagtaagtgtactacatttgtaagagtaaataatcagtataatgacacttttgggaaagtgtag

SEQ ID NO: 222794 - DNA, 700 bp, Unknown
  Bacterial polypeptide expressing nucleotide sequence isolated from the Sargasso Sea
atgcgaattgaagaagaaataaaacttgattattctgatgtactttttaggcccaaaagaagcactctcaaaagcagaaaagaagtagatttaaatcgaacatataaatttaaacactcaaatagagaatggtcaggcattcctataattgcttcaaatatggatggtgtaggggagttagaagttgctaaaaacttatcaaaatttagtattttaacagctttaacaaaacaacatgatcttaattctataaattcttttttaccaataaaagagatatttaactatgtttcattgagttgcggaactagtgatcatagttttgaaagattgaattcaataattagtcagcacacttatattcaatttatatgtatagatgtagcaaatggttattcagaaaattttagtaaatttgtatcttcgataagagataaatatccatctaaaactattatagcaggtaatgttgttactgctgacatgactcaagagttaattttaagtggagcagatatagttaaagttggtataggtcctggtagtgtttgtacaacaagaattcaaacgggagtagggtacccacaattaagtgcagttattgagtgtgctgatgcagctcatggattaggagcccatatgattgctgatggtggatgcacatgcccaggagatgtagcaaaagcatttggtggaggtg

SEQ ID NO: 222795 - DNA, 1036 bp, Unknown
  Bacterial polypeptide expressing nucleotide sequence isolated from the Sargasso Sea
aatgagaattgaagaagatattaaactagattattcagacgtactttttagacctaaaagaagcacgctatcaagtagaaaaaatgttaatttaaatagaacatacaaatttagatatagtaatcatgaatggtcgggaattcctgttatggcagcaaacatggatggtgttggcgaattaagattagcagaaaaactaaatgagcatggaatgattacttgtttaacaaaacaacatgatattaaaaagttaaaacaatacaaaaaaattaaatccatttataaaaatattgctttaagtataggaataaaaacagaagattttgaaagacttgatatagttttaaaagaatttaattttataaattttatttgtatcgatgtagcaaatggttactctgaacattttagtaagtttataaaatctgttagagaaaaatatcccacaaaaacaataatagctggaaatgttgtaacagcagacatgacacaagaattggttttaagcggtgccgatatagttaaagtaggcattggaccaggaagtgtttgtactacgagaattcagacaggtgttggttatcctcagctaagtgcggttatagaatgtgcagatgctgctcatggtttaggtgcacatataattgcagatggaggctgcacttgtcccggggatgtagcaaaagcttttggaggtggtgcagattttgttatgttgggtggaatgtttgcaggacacgatgaaggaagtggaaaaattataaaaacaaatggtaaaaaatttatagaattttacggatctagttcaacagttgctaataaaaaacactacggaggtttatcagattacagaagtagtgaaggaagaactgtaagagtaaaatatagaggaaaaataaatgacacaatttctaatattcttggtggaataagaagtagttgtacttatgtcggagctccatctttaaaacaattaagtaaatgcacgacgtttgtaagagtatctaaccaattcaatgatactttcgtaaaataa

SEQ ID NO: 222796 - DNA, 1036 bp, Unknown
  Bacterial polypeptide expressing nucleotide sequence isolated from the Sargasso Sea
gatgagaattgaagaagatctaaaactcgattattcagatgttctatttagaccgaaaagaagtactttatcaagtcgtaaagatgtcgatttagaaagaacttataaatttaaatatagcaagaatgaatggtcaggaattccagtaatggctgcaaatatggatggcgttggtgaattagaaattgcagaaaccttatcagattttggcatgattacatgtttaacaaagcaacatgatgttagtaaattaaaaaaatataaaaaattaaagtcaatttacaaaaatatatccctaagcattggaatcaaaaaagaagattttgaaagattagataagacattaaaagaattttcttttataaaatttatttgtgtagatgttgcaaatggttattctgaacattttagtgcatttataaaatctgtaagagacaaatatccaacaaaaacaataattgctggtaatgtcgttactgccgatatggctcaagaacttgtattaagtggagctgatatagttaaagttggaattggtcctggaagtgtatgcactacaagaattcaaacaggtgtaggatatcctcaactaagtgccgtaatagagtgcgctgatgctgctcatggtttaggtgctcatattattgctgatggtggatgtacatgcccgggtgacgttgctaaaggatttggtggtggagcagatttcgttatgcttggaggaatgtttgctggccatgacgaaggcggtggaaaaattataaaatcaaatggaagtaaatatattgaattttatggttcaagttccgaaacagccaataaaaaacattatggtggattatctgattatagaagtagcgaaggaagatctgtgagaattaaatatagaggaaaaataaaaaatactattttaaatatattaggcggtgttagaagtagttgtacttacgttggcgctccatcattaaaacaattaagcaaatgtacaacttttgtaagagttagcaatcaatttaacgatacgttcactaaatag

SEQ ID NO: 222797 - DNA, 630 bp, Unknown
  Bacterial polypeptide expressing nucleotide sequence isolated from the Sargasso Sea
ttacatcatttgttaaatctgtaagagataagtatccaacaaagacaattatagcgggaaatgttgtaacagcagacatgacacaggaactagttttaagtggagctgatatagttaaagttggaattggtcctggaagcgtttgcacaacaagaattcaaactggtgtcggttaccctcaattaagtgcagtaatagaatgtgcagatgctgcacatggattaggtgctcacattattgcagacggcggatgtacttgcccaggtgacgtagcaaaaggttttggtgggggagctgattttgtaatgttaggaggaatgttagctggtcatgatgaaggtaaaggtaaggtggtaaaaattaatggttctaaatatatagaattttatggatccagttcagatgtagcaaataaaaaacattatgggggattatcagattatagaagcagcgaaggaagaacggtaagagtaaaatacagaggaaacattaaagatacagttttaaatattttaggtggtgtgagaagtagttgtacatatgtaggtgctccatcgttaaaacaactgagcaaatgtacaacttttgtaagagttgctaaacaatttaatgatacgtttaccaagtagt

SEQ ID NO: 222798 - DNA, 1048 bp, Unknown
  Bacterial polypeptide expressing nucleotide sequence isolated from the Sargasso Sea
atgagaattgaagatgaaataaaattaacatttgatgatgtattgattagacctaaaagaagtacattaatatctcgctctgaggtaaaacttgaaagagagtttaaatttagacataataaacatacttgggaaggaattcctattttttctgccaatatggacacaactggtacttttgaaaccgctaaagcattacaaaaacataagatgctaactgctatacataaattttatactttggaggattggaaagacaacatcgactcattagacccaaactatgtatcagtaacagttggacagtctgaagaagattatgatttaagtaaacaaatatttgaactcagtaaagatcttaagttcctttgtatcgatgttgcaaacggatatagagaagatttcattgaagctgtaataaaatatagagaaacatataaagataaaattattattgctggcaatgtcgccactagagaaatgacagaagcattaatacttgcaggtgcggatatagtcaaaataggaattggtcctggttctgtctgtacaacgagaagcgtggcaggtgttggttatccacaattatcatctatatcagagtgttcagatgctgctcatggcttaggaggtcatgttttagcggatggaggatgtaaatacccaggcgatgtatcgaaggcttttggtgctggagcagattttgtaatgttaggtggtatgtttgcaggacatgaagaatcaggaggtgagcttgttacaggtgaagatggtgaacagtacaaagatttttatggcatgtcttcaactaaagctcaacaaacatattatggtgacttagctctacatagagcaccagaaggaaaaaaagtaagattaaaatataaaggacctatagatcaaacagtgcaatcaatcctgggtggtatgaggtcagcttgttcttatgtaggggctaaaaaacttaaagatttaccaaaaagcacaactttcattagagttacccaaactactaatgagatatacacaggatctgaaaatctttgaa

SEQ ID NO: 222799 - DNA, 885 bp, Unknown
  Bacterial polypeptide expressing nucleotide sequence isolated from the Sargasso Sea
cagcaaacatggatggtgttggagaattaggtattgctgaaaaactaaatgaatatggaatgattacatcattaacaaaacaacatgatgttaaaaaacttaaacaaaataaaaatattaaaaaaatctttcctaatatcgcacttagtgttggtataaaaagagaagattttcaaaatttagataaagttttaaaagaatttagtttttttaaatttatttgtattgatgttgcaaatgggtacacagagcattttaccaattttattaaatcagtaagagataaatacccaactaaaacaattattgcaggtaatgttgtaacagctgatatgactcaagaattagttctaagtggagcagacatcgttaaagttggaattggacctggaagtgtttgtacaacaagaattcaaaccggagttggttatccgcaattaagtgcagtaatcgaatgtgctgatgctgctcatggacttggtgcgcatgtcatagctgatggtggttgcacatgtcctggagatgttgctaaaggttttggaggtggagcagattttgtaatgcttggcggtatgttagctggacatgatgagggaaatggtaaaattgttaaagttaatggagaaaaatatatagagttttatggatctagctctgaagttgctaataaaaaacactatggtggtctatcagattatcgaagtagtgaaggaagaaaagtaagagtaaaatacagaggtaaaataaacgatactattttaaatattcttggtggtgtaagaagtagttgtacttatgttggtgctccttcgctaaaacaattaagtaaatgcacaacgtttgttagagtatcaaatcagttcaatgatagtttaattaaataat

SEQ ID NO: 222800 - DNA, 581 bp, Unknown
  Bacterial polypeptide expressing nucleotide sequence isolated from the Sargasso Sea
tatagcgggaaatgttgtaacagcagacatgacacaggaactagttttaagtggggctgatatagttaaagttggaattggtcctggaagcgtttgcacaacaagaattcaaactggtgtgggttaccctcaattaagtgcagtaatagaatgtgcagatgctgcacatggattaggtgcgcacatcattgcggacggcggatgtacttgcccaggtgacgtagcaaaaggatttggtgggggagctgattttgtaatgttaggaggaatgttggctggtcatgatgaaggtaatggtaaggttgtaaaaattaatggttctaaatatatagaattttatggatccagttcagatgtagcaaataaaaaacattatgggggattatcagattatagaagcagcgaaggaagaacagtaagagtaaaatacagaggaaacattaaagatacagttttaaatattttaggtggtgtgagaagtagttgtacatatgtaggtgctccatcgttaaaacaattgagcaaatgtacaacttttgtaagagttgctaaacaatttaatgatacgtttaccaagtagt

SEQ ID NO: 222801 - DNA, 792 bp, Unknown
  Bacterial polypeptide expressing nucleotide sequence isolated from the Sargasso Sea
gatgtataccttagtttttgtgagaattgaagaagagctaaaactagattattccgacgtactttttagacctaaaagaagcactcttaaaagtagaaaagatgttaatttaaagagaacctatcgttttaaatacagtaaaaacgaatggtctggaattcctataatggcagctaacatggatggtgtgggcgtgctcggtgttgctgaaaaattatctgattatggaatgattacatgtttaacaaaacaacatgatgtaaagaaaattaaacaatttaaaaaaataaaatcaatatatccaaatgtagctttaagtattggaacaaaaaaagaagattttcaaaatttagataaggttttaaaagaatttagtttcattaaatttatatgtattgatgttgctaacggttattcagagcattttagtaaatttttaaaatctgttagagataaatatccaactaaaacaatcatagcaggtaacgttgttactgctgatatgactcaagaattgattttatcaggagcagatattgtaaaagttggaattggaccaggaagtgtctgtactacacgtatacaaactggagttggctatcctcagttaagtgcggtaatagaatgtgctgatgcagctcatggattaggtgcacatatcattgcagatggtggatgtacgtgtccaggtgacgttgctaaggcatttggtggaggagctgattttgtcatgctaggaggaatgtttgcgggtcacgatgaaggtaaaggaaaattagtaaaatctaatgg

SEQ ID NO: 222802 - DNA, 1021 bp, Unknown
  Bacterial polypeptide expressing nucleotide sequence isolated from the Sargasso Sea
tatgagagtaaacagagactttaaacttgactttgatgacgtattgataagacctaaaagaagcacattatcttcaagaagactagtagatttaaatagaaaatttacttttaggcattcagaagatgtgtgggaggggataccagtcattgccgctaatatggatacaactggaacttttgagattgcagattcattgaaaaaagaaaaaatgttaactgcaatacacaagttttattcattagatgattgggctaaagccattaaatccaatcaaattgagttagagcattgtgcagtaacatttggtgttgaagaagcagaaagtgcagaagaattttttaactttttgaaaaaaaataatctcgataagccaaaatttatttgtttggatgttgcaaatggatataccgaattattcttagatctagtaaagagaattagggaaaattttaataatcctttaattgctggaaatgttgtaacaggtgaaatgacagaagcattgatattggctggtgcagatattgtaaaaataggaattggtcctggttcagtttgtacaactagaactgtaacaggggtaggatatcctcaattatctgcgattattgaatgtgcagatgctgcacatggattaagaggacatgttatatcagacggaggttgttctacgccgggtgatgtagcaaaagctttcggtgcaggagcagactttgtgatgcttggtggtatgtttgccggacatgaagaatctgggggtgaattaattgaaaaagatggcaaaaaatataagcagttttatggcatgagttcagacactgcaatggaaagatattatggagatattaaaaattatcgtgcaagtgagggtgagaccatatctttagagtataaaggcccaattgataaaactgtacagcaaatacttggtgggcttagatcagcggcaacctatgttggagccaaagacattaaaaatttacccaagtgcaccacattcatacttaaatataaatag

SEQ ID NO: 222803 - DNA, 994 bp, Unknown
  Bacterial polypeptide expressing nucleotide sequence isolated from the Sargasso Sea
ttgttaattaatgaagatataaaacttgattattcagatgttttaatcagacccaagagatcaacaatgagctccagaggagaggtaaggcttcaaagaacacatcgcttcctttggagtaagaaaaaatggactggaattccaatcatgtctgcaaatatggacacagttggaacgccatcaatgcataaagttttattgaaatataaactcataacttgtccggcaaaacatcaccttaaagaaaattccaataaatttaagacaggccaatcaaatatttgttggtttggtggtatagatgacatatcaaaattatcaaaagctaactcaggctttatcggtcttgatgtcgcaaatggatacaccattaaatttgttgattccgtgaagaagctcagagataaatgtcccaatgctactattgcagcaggaaatgtagttacagcagatatgacacaggaattgatcttagcaggagcagatattgtaaaagtaggtattggaccaggctcagtatgcacaacaagaattaagactggtataggctatcctcaattaagtgctgttattgaatgtgcggatgctgcccacggactaaatgcacacatcattgctgatggtggatgtacaagttctggcgatattgtaaaagcttttgctggaggtgcagattttgtaatgattggtggtatgttagcaggacacgacgaatgcgatggtgaagtagaagatggcgttatgaagttttatggaatggcatcagaatcagcaatgaccagacacagtaatcataatgattatagaggaactgaaggtaaaacggttgaagttgaatacagaggtaaagtgaacgatacaattaaagatattttgagtggtgtccggtcagcatgcacttatgttggagcaaataaattaaaagacctttcaaaatgtacaacatttgtgagagttaataatactcataatactgtttttgggaacgagtaag

SEQ ID NO: 222804 - DNA, 994 bp, Unknown
  Bacterial polypeptide expressing nucleotide sequence isolated from the Sargasso Sea
ttgcttttaaatgaagaaattaaactagattattctgatgttttaattagaccaaaaagatcaacaatgagctccaggggtgaagtttatcttggaagaactcataagtttttatggagcaaaaaagaatggacaggtattccaattatgtctgcaaatatggacacagtaggaacgccagcaatgcataaagttctggctaagcatgggatgataacttgtccagctaaacatcacctaaaaaaaaatataaataaatttatcagcggtaagaaaaacatatgttggtttggtggaatagacgatatttcgagattatcaaaaatttcatccggttttataggtctggatgtagcaaatggctatacaatacgttttgtagatgctgttaagaaattacgaaataaatgtccaaaagctacaattgtagcaggaaatgttgttacggcagatatgacacaagaacttattcttgctggggctgatattgttaaagttggtataggacctggatcagtttgtactacaagagttaaaacgggtattggttaccctcaattgagcgctgtaatagaatgtgcagatgcggctcacgggttaaatgcacatataattgcagatggtggttgcgttagttctggagatattgttaaagcatttgctggaggagcagattttgtgatgattggtggaatgcttgcaggtcatgatgaatgtgagggtgaattggtaaatggagaaatgaagttttatggtatggcttctaaatcagctatgaacaaacataacaataataatcattaccgaggagttgaggggaaaacagtttctgtaccttataaaggtaaagttgatgatactataaaagatattttaagcggtattcgttcagcatgcacttatgttggcgctaatagattaaaaaccctgtcaaaatgcactacatttgttcgtgtaaacaacacacataatacaatttacggaaatgaataaa

SEQ ID NO: 222805 - DNA, 1054 bp, Unknown
  Bacterial polypeptide expressing nucleotide sequence isolated from the Sargasso Sea
atgtatatcttcatttttgtgagaattgaagaagagctaaaactagattattccgacgtactttttagacctaaaagaagcactcttaaaagtagaaaagatgttaatttaaagagaacctatcgttttaaatacagtaaaaacgaatggtctggaattcctataatggcagctaacatggatggtgtaggcgtacttggtgttgctgaaaaattatctgattatggaatgattacatgtttaacaaaacaacatgatgtaaagaaaattaaacaatttaaaaaaataaaatcaatatatccaaatgtagctttaagtattggaacaaaaaaagaagattttcaaaatttagataaagttttaaaagaatttagtttcattaaatttatttgtattgatgttgcaaacggttactcagagcattttagtaaatttttaaaatctgttagagataaatatccaactaaaacaatcatagcaggtaatgttgttactgctgatatgactcaagaattaattttatcaggtgcagatattgttaaagttggaattggaccaggtagtgtttgtacgacacgaatacaaactggagttggatatccacagttaagtgcagtaatagaatgcgctgatgctgctcatggattaggtgcacatatcattgcagatggcggatgcacatgtccaggtgatgttgctaaagcatttggtggaggagctgattttgttatgcttggaggaatgtttgcaggtcatgatgaaggtaaaggaaaattagtaaaatctaatggttctaaatatgtcgaattttatggatcaagttctgaaacagcaaataacaaacattatggtggactatcagactacagaagtagcgaaggaagaacagtaagagttaagtaccgtggtaaaattaatgataccattttaaatattttaggtggtgtaagaagtagttgtacatatgttggggcaccctctttaaaacaattaagcaagtgcacaacttttgtcagagttactaagcaatttaacgacacattcgctaaataga

SEQ ID NO: 222806 - DNA, 1054 bp, Unknown
  Bacterial polypeptide expressing nucleotide sequence isolated from the Sargasso Sea
tctgtataagttcgaatttgtgagaattgaagaagatctaaaacttgattattccgacgtgctttttagacctaaaagaagcactttgtctagccgtaaagatgtaaatcttaaaagaacttataagtttaaatatagcaataatgaatggtctggaatcccaataatggctgcgaatatggatggtgttggagaactgggtattgctgaaaaattatcagaatatggaatgattacatgtttaactaaacagcatgatattaaaaaaataaaacaatttaaaaaaattaaatcaatatatccaaatattgctttgagtattggaataaaaaaagaagattttcaaaatttagataaagttttgaaagaatatagttttattaaatttatttgtattgatgttgcaaatggatattcagaacgttttagtgcatttttaaaatcagtaagagataaatacccaactaaaactattatagcgggtaacgttgtgactgcagatatgacacaagagttaattcttagtggagctgatgttgtaaaagtgggaataggacctggtagcgtttgtactactagaattcaaacaggtgttggttatcctcaattaagtgcggttatagaatgtgccgatgcggcccatggactaggagcgcatatgattgctgatggtggttgcacttgtcctggagatgtagctaaaggttttggtggtggtgctgactttgttatgcttggcggaatgtttgctggacatgatgaaggaaaaggtaaaattgttaagtcaaatggtactaaatatattgaattttatggttcaagttctgacactgcaaacaacaaacattatggtggtttgtcatcttacagaagtagtgaaggtagaacggtaagagttaaatatagaggaaaaattgaaaatacaattcaaaatatacttggtggaataagaagtagttgcacttatgtaggcgcaccttctttaaaacaactaagcaagtgtacaacttttgtaagagtagcaaaacagtttaacgatacttttgtaaaataa

SEQ ID NO: 222807 - DNA, 727 bp, Unknown
  Bacterial polypeptide expressing nucleotide sequence isolated from the Sargasso Sea
tatgagaattgaagaagaaattaaactagattattcagatgttttatttagacccaagagaagtactcttaaaagccgaaaagaagtagatcttaaaagaaaatatcaatttaagtactctcgtttaacatggcagggggtgcctattatagctgccaatatggatggggtaggagagattgaggtcgctaaaaaactatcatcttataaattaatgacggctctaacaaaacaacaccaaataagtgacataaataaaataaataataataatatgcataatttagtagcttttagttgtggaacgagcaaagatagttattctagattgaataaactattatccaaatttcctaaatttcaatttatctgtattgatgttgcaaatggttattctgaaaatttcagtaaatttgtatacgaggtgagaaaaaaacatccaaaaaaaactataattgcaggaaatgtagtaacagctgatatgacacaagagttagtcttaagtggagctgatattgtaaaagtaggaatcggtcctggtagtgtatgtacaacaagaattcaaacaggagtaggctatccgcagttaagtgctgttttagaatgtgcagatgctgcacatggtttgggggctcatattattgcagacggaggctgtacttgtccaggtgatgttgcaaaaggttttggtgctggagcagattttgtaatgcttggaggaatgtta

SEQ ID NO: 222808 - DNA, 1048 bp, Unknown
  Bacterial polypeptide expressing nucleotide sequence isolated from the Sargasso Sea
atgcgaatcgagcgtgatctaaagcttacatttgatgatgtattaattcggccgaagaggagtaccttgatttcgaggtctgatgtaaacctggtaagagagttcactttcaggcataccgaagaaacctgggatggagtgccaatagtcgctgcaaacatggatacaactgggctgttttcaattgcagaaattctacagggacacaaaatgctgacctgcacccagaagttctactctaccaaagagttctccgatgcttgggagaatggagttaattctgagttcgttgcagtgacttgtggatccacggatgagagtttcgaattattgaagcggaaaatggccaccaataagggcctgaagatgatatgcatagatgtagcaaatggatatcgagaagtcttccttaacttcgtgaagaaggttaggggagcatttccagaaaagataatcattgctggtaacgttgctactagagagatgacagaagctctgattctagctggtgcagatattgtcaaggttggaatcgggcctggctcggtttgtacgactagaaaggtcgctggagtaggatacccgcaactttctgctatatcggagtgtgctgatgctgctcacggtctgaatggtcacgtcatgtcagatggaggttgctcttcaccgggagacgttgcaaaggctttcgctgcaggggccgattttgtcatgctcggagggatgttagcgggtcacgatgagtcagggggggaattgatcgaagatagtgggggctcgtacaagtcgttctacgggatgtcctcggcaaaggcaatggagacacactatggggagatagcagaccacagagctcctgaggggaaagaggtcagagtcccctaccgaggaccgttggaggtaactgttcaatcgatcctaggagggttgaggtcggcttgttcctatgttggtgctaggaggataaaggatctaccaaagtgtacaaccttcatcagagtgagtatgactacgaatgaggtctttcagaagttcaacgtagactagt

SEQ ID NO: 222809 - DNA, 667 bp, Unknown
  Bacterial polypeptide expressing nucleotide sequence isolated from the Sargasso Sea
ttgtattgatgtagcaaatggatattcagaaaattttagtcattttgtaagtgaagttagaaaaaaattccccaataaaactattatagctggaaatgtagtaactgcagatatgactcaagaactagttcttagtggagcagatattgttaaggttggaataggacccggaagtgtttgcacaacaagaattcaaacaggagtaggatatcctcaactaagtgcagttcttgaatgtgcagatgctgctcatggacttggagcacatattattgctgatggtggttgtacaagtccaggagatgtagctaaaggttttggagcaggtgcagattttgttatgttaggaggaatgttagctggtcataaagaaggtggtggaaatattattaaagataatagtaaagattacattgaattttatgggtcaagttctgaagaagcaaatgaaaaacattacggtggtttagctagctacagatcctcagaaggaaaaaaagttagaattgagtataggtcatctttagaaaaaacagtgaaagatattttgggtggaattcgaagtagttgtacttatgttggtgccccaactttaaaacagcttagtaaatgtacaacatttgttagagttaacaatcaatataatgatgtttttggtaaagtgtaa

SEQ ID NO: 222810 - DNA, 1024 bp, Unknown
  Bacterial polypeptide expressing nucleotide sequence isolated from the Sargasso Sea
gaagaattaaaacttgattattcagatgttttatttagaccaaaaagaagcactttatcaagtcgtaaagatgtagatttaaaaaggacttataaattcaaatatagcaaaaatgaatggtcaggaattccagtaatggctgctaatatggatggtgttggtgagttagaagttgcagaaaccttatcagattttggtatgattacgtgtttaacaaagcagcatgatgttaataaattaaaaaagtataaaaaattaaagtcaatatataaaaacatatctctaagcattggaattaaaaaagaagattttgaaagattagataaaacattaaaagaattttcatttataaaatttatttgtgtagatgttgcaaatggttattcagaacattttacaagttttattaaatctgtaagagataagtacccaacaaaaacgattatagccggtaatgttgtaacagctgatatgacacaagaattagtactaagtggagctgatatagttaaagttggaattggtcctggaagtgtgtgtacaacaagaattcaaactggagttggatatcctcagctaagtgctgtaattgagtgtgcggatgcagcccacggactaggcgctcatataattgcagatggtggatgtacctgtccaggagatgttgcaaaaggttttggtggtggtgcagatttcgttatgcttggaggaatgttcgcgggtcatgacgagggtggaggaaaagttacaaaatctaatggaagtaaatatattgagttttatggttcaagttctgaaacagctaataaaaaacattatggtggattatctgattatagaagtagtgaaggaagatctgtaagaattaaatatagaggaaaaataaaagattctattttaaatatattaggtggagtgagaagtagttgtacctatgttggtgctccatcattaaaacaattaagcaaatgtacaacatttgtaagggtcagcaaccaatttaacgatacattttctaaatagc

SEQ ID NO: 222811 - DNA, 658 bp, Unknown
  Bacterial polypeptide expressing nucleotide sequence isolated from the Sargasso Sea
atgtttgcaaacggatattcagaacattttactagttttataaaatcagtaagggataaatatcctacaaaaactattattgctggaaatgtagtaacagctgatatggctcaagagttagttttaagtggtgctgatattattaaaattggaattgggccaggaagtgtttgtacaactagaatacaaacaggtgttgggtatccacagttaagtgctgttatcgaatgtgcagatgctgctcatggtttaggtgcacatgtaattgcagatggaggatgtacttgtccaggagatgtagctaaaggttttggaggtggtgctgattttgttatgcttggaggtatgcttgcaggacacgatgaaggtaaaggaaaattagtaaaaacaaatggctcaaaattcattgaattttatggatcaagttctgatgaagcaaataaaaaacattacggcggcttatcagattatagaagtagtgaaggtagaaaagttagagtgaaatacagaggaaaaataagagatacaatactaaatattttaggaggagttagaagcagttgtacctatgtaggagcgccatctttgaaacaactaagcaaatgtactacttttgtaagagttagtaatcaatttaacgatacattttcaaaataaa

SEQ ID NO: 222812 - DNA, 940 bp, Unknown
  Bacterial polypeptide expressing nucleotide sequence isolated from the Sargasso Sea
aatgagaattgaagaagagcttaagttagattattcagatgtactatttagacctaaaagaagtacattaaaaagccgtaaagacgtaaatcttctaagaacttatagatttaaatatagtaagaatgaatggtcaggtattccaataatggcagcaaacatggatggggttggtgaattaagtgttgctgaaatattaaacgattatggaatgattacatctttgacaaaacaacacgatgttaaaaaaattaaacaaaacaaaaatattaaaaaaatctattctaatattgcacttagtgtaggtataaaaaaagaagattttaaaaatttagataaagttttaaaagaatttagtttttttaaatttatttgtattgatgttgctaacgggtatacagagcattttactaatttcattaaatcagtaagagataaatacccaactaaaacaatcattgctggtaacgtagtaacagctgatatgactcaagaattagttttaagtggagcagatattgtcaaagttggaattggacctggaagcgtttgtacaacaagaatacaaaccggagttggttatccgcaattaagtgcagtaattgagtgtgctgatgcagcgcacggacttggagcgcatgtaatagcagatggtggatgcacatgtccaggagatgttgctaaaggttttggtgggggtgcagattttgtaatgcttggtggtatgcttgctggacatgatgaaggaaatggtaaaattgttaaaattaacggagaaaaatatattgaattttatggatctagttccgaagttgctaataaaaagcactatggtggactatcggattatcgaagtagtgaaggtagaaaagttcgagttaaatatagagggaaaataaacgatacaattttaaatattcttggtggtgtaagaaagtag

SEQ ID NO: 222813 - DNA, 628 bp, Unknown
  Bacterial polypeptide expressing nucleotide sequence isolated from the Sargasso Sea
actaattttattaaatcagtaagagataaatatccaacaaaaactatcatcgcaggaaacgttgttactgcagatatgacgcaagaattagttttaagtggagctgatattgttaaagttggcataggacctggaagtgtttgtacaactagaattcaaacaggagtaggttatccacaattgagtgcagtaattgaatgtgcagatgcagcacatggacttggtgcgcacgtgatagcagacggtggatgcacttgtccaggtgatgttgctaaaggttttggaggtggtgcagactttgtgatgcttggaggtatgttagcaggacatgatgagggaaatggtaaaattgttaaagttaatggagaaaaatatattgagttttatggatctagctctgaagttgctaataaaaaacactatggtggactttcagattatcgaagtagtgaaggaagaaaagtaagagtaaaatacagaggtaaattaaacgatactattctgaatattcttggtggtgtaagaagtagttgtacttatgttggagcaccttcacttaaacaattaagtaaatgtacaacgttcgttagagtatccaatcagtttaatgacagcttaattaaataaa

SEQ ID NO: 222814 - DNA, 1033 bp, Unknown
  Bacterial polypeptide expressing nucleotide sequence isolated from the Sargasso Sea
atgcgtattgaagaagatatcaagctcgactatgccgatgtcctgtttcggccaaagcgcagtacgctatctagtcgcaaggacgtagaattagaacgtacctacaaatttaaatacagcaatcatcaatggaagggtgttcctattatggccgccaatatggatggtgttggtgaaatagaagttgctaaaaatttagcttcattcgaaataatgacatgtttaacaaaacagcatgatcttaaaacaattaaacgtaattcatctgtaaaaggaattcacaagcatttaattttaagcaccggaacaagcaatgaagactacaaaagacttaatgaaataatgaaagaatgtagcttttttgaatttatatgtatcgatattgcaaatggttattctgatcattttagtaaattcgtaagttctgttcgagaaaaatatcctactaaaactataattgctggaaatgtagtcacagcagacatgacacaagaattagttatgaacggagctgacatagttaaagttggtattggcccaggaagtgtttgtacaactcgaattcaaacaggagttggttaccctcagcttagcgctgttatagaatgcgctgatgcagctcatggtttaggtgcccatataattgctgatggtggctgcacatgcccaggtgatgttgcaaaagcatttggtggtggagctgactttgttatgcttggtggaatgtttgctggtcatgaagaaggtggtggaaaaaaagtaaaaaaaaatggatctcaatttattgagttttatggatcaagttcagatacagcgcttgaaaaacattatggaggactttcagattatagaagcagcgaaggaaagaaagttcaattgaaatatcgtggtaaaataaaagataccgtacaaaatatattaggtggtttaagaagtagttgcacttatgttggcgccccttctcttaaacaacttagcaagtgcacaacttttgtaagagttaaccaacagtttaacgacacttttgaataag

SEQ ID NO: 222815 - DNA, 853 bp, Unknown
  Bacterial polypeptide expressing nucleotide sequence isolated from the Sargasso Sea
tgttgcagaaaaattatctgaatacggaatgattacatgcttaacaaaacagcatgatgttaaaaaaataaaacaatttaaaaaaattaaatctatatatccaaatgtagctttaagtattggaacaaaaaaagaagattttcaaaatttagataaagttttaaaagaatttagtttcattaaatttatatgtattgatgttgcaaacggatattcagaacattttagtaaattcttaaaatctgttagagataaatatccaacgaaaacaatcatagcaggtaacgttgtaactgctgatatgactcaagaattaattttatcaggtgcagatattgttaaagttggaattggaccaggtagtgtctgtactactcgaatacaaactggggttggctatccacagttaagtgcagtgatagaatgcgctgatgctgctcatggattaggtgcacatatcattgcagatggtggatgtacatgtccaggtgatgttgctaaagcatttggtggaggagctgattttgttatgcttggaggaatgtttgcaggtcatgatgaaggtaaaggaaaattagtaaaatctaatggttccaaatatgtcgaattttatggatcgagttctgaaacagctaacaataaacattacggtggattatcagactacagaagtagtgaaggtagaacagtaagagtaaagtaccgtggtaaaattaatgataccattttaaatattttaggtggtgtaagaagcagttgtacgtatgttggtgcaccctctttaaaacaattaagtaagtgcacaacttttgtcagagttactaaacaatttaacgatacattcactaaataa

SEQ ID NO: 222816 - DNA, 1033 bp, Unknown
  Bacterial polypeptide expressing nucleotide sequence isolated from the Sargasso Sea
tatgcgtattgaagaagatattaaactcgactatgccgatgttctgttccggccaaaacgcagcaccctatctagtcgtaaagacgtagaactacaacgtacctacaaatttaaatacagcaatcatcaatggaaagggattccaattatggctgccaatatggatggagttggagaaatagatgttgccaaaaacttggctacattcgaaataatgacatgtttaacaaaacaacatgatcttaaaataattaaacgtaattcatctgtaaaaggaattcacaagcatttaattttaagcactggaacaagtaatgaagattacaaacgacttaatgaaataatgaaagaatgtagcttttttgaatttatatgtatcgatattgctaatggttactctgatcattttagtaaatttgtaagttcagtaagggaaaaatatcctaccaaaactataattgcaggaaatgtagttacggcagatatgacacaagaattagttatgaatggagctgatattgttaaagttggtattggcccaggaagtgtttgtacaactcgaattcaaacaggagttggttaccctcagcttagtgctgttatagagtgtgctgatgcagctcatggattaggtgctcatataattgctgatggtggatgcacgtgcccaggagatgttgcaaaagcatttggtggtggcgctgattttgttatgttgggaggaatgtttgctggccatgaagaaggtggtggaaaaaaggtaaaaaaaaatggatcccaatttattgagttttatggatcaagttcagatacagcgcttgaaaaacattatggaggactttcgagttatagaagcagtgaaggaaaaaaagttcaattaaaatatcgtggcaaaataaaagataccgtgcaaaatatattgggtggtttaaggagtagttgtacatatgttggggccccttctctcaaacaactaagtaagtgcacaacttttgtaagagttaaccaacaatataatgatacttttgagtaa

SEQ ID NO: 222817 - DNA, 937 bp, Unknown
  Bacterial polypeptide expressing nucleotide sequence isolated from the Sargasso Sea
acatacagatttaaatatagtaaaaatgagtggtcaggtattccaataatggctgcaaatatggacggggtcggagagcttggagtagctgagaaattatctgaatatggcatgattacatgtttaactaaacaacatgatgtaaaaaaaataaagcaatttaaaaaaattaaatctatttataaaaatatagctattagcattggtactaaaaaagaagattttgaaaatttaaacaaagttttaagagaatttggatttataaagttcatttgtattgatgttgctaatggttattctgaatactttagtaaatttcttaaatctgtaagagataaatatcctacaaaaactattatagctggaaatgtagttactgcagacatgacgcaagaacttattttatctggtgcagatattgtaaaagttgggattggtccaggaagtgtctgtacaacaagaattcaaacaggagttggctaccctcaattaagtgctgtaattgaatgtgctgatgcagcccatggtttaggagctcatataattgcagatggtggatgtacatgtcctggagatgtcgcaaaaggttttggaggtggtgcagattttgtaatgttaggtggaatgtttgcaggtcacgacgaaggcaaagggaaaatagttaaatcaaacggctcaaaatatattgaattctacggctcaagttctgaaacagcaaataaaaagcattatggaggattatcaaattacagaagcagtgaaggaagaactgtaagagtaaaatatagaggaaaaataaaagatacaattcaagatatccttggtggtgttagaagcagttgcacttatgtaggtgctccttcattaaaacaactaagtaaatgtactacttttgtaagagttgcaaaacaatttaacgatactttcacaaaataaa

SEQ ID NO: 222818 - DNA, 724 bp, Unknown
  Bacterial polypeptide expressing nucleotide sequence isolated from the Sargasso Sea
actgtataagttcgaatttgtgagaattgaagaagagctaaagttagattattcagacgtacttttcagaccaaaaagaagtactctatcgagtcgtaaagatgtaaatcttaaaagaacctataaatttaaatacagcaataatgaatggtcaggtattcctattatggctgcaaatatggatggagtaggtgaattaggaattgccgaaaaattatctgaatatggaatgattacatgcttaactaaacagcatgatgtaaaaaaaataaaacaatttaaaaaaattaaatcaatttatccaaatattgctctaagcattggaataaaaaaagaagattttcaaaatttagataaagttttgaaagaatttagttttataaaatttctttgtattgatgttgcaaatggttactctgaacgttttagcgcttttttaaaatcagtaagagacaagtacccgacaaaaacaattatagcaggtaatgttgttacagctgacatgacacaggaattaatacttagtggggctgatattgtaaaagtaggcataggacctggaagtgtttgtactactagaattcaaacaggagttggttatcctcaactaagcgctgttattgaatgtgctgatgcagctcatggactaggtgctcacatgattgcagatggtggctgcacttgtccaggagatgtagctaagggttttggtggtggagctgac

SEQ ID NO: 222819 - DNA, 553 bp, Unknown
  Bacterial polypeptide expressing nucleotide sequence isolated from the Sargasso Sea
tatggcacaagaattagtattatcaggagcagatattgtaaaagttggaattggaccaggtagtgtttgtactacaagaattcaaacaggtgttggttatcctcagttaagtgctgtcattgaatgtgctgatgctgcccatggtttaggggcacatataattgctgatggaggttgtacttgtccaggtgatgtcgcaaaagctttcggtggtggtgcagattttgtgatgcttggaggaatgtttgctggtcacgatgaaggtgaaggtaagctaataaaatcaaatggtcataaatttatagaattttatggatcaagttctgacatagcaaataagaaacattacgggggtttgtccgactatagaagtagtgagggtagaactgtaagaattaaatatcgaggaaaaattaaagatacaataaataatattcttggtggtgttagaagtagctgtacttatgtaggagctccttctcttaaacaacttagtaaatgtactacttttgtaagagtagctaaacaatttaacgatacttttacaaagtaa

SEQ ID NO: 222820 - DNA, 1054 bp, Unknown
  Bacterial polypeptide expressing nucleotide sequence isolated from the Sargasso Sea
cctgtataaattcggactcgtgagaattgaagaagaactaaaattagactactcagatgtactttttagacctaaaagaagtactcttcaaagtcgtaaagatgtaaatctaaaaagaacttatagatttaagtatagtaataatgaatggtctggaattcctatcatggcctcaaatatggatggtgttggtgaacttggtgtagctgaaaagctttctgaatacggaatgatcacttgtttaactaaacagcataacattcaaaaaataaaaaaattcaaaaaaataaaatctattcatccaaatattgctttaagtataggaataaaaaaagaagattttgaaaatttagataaaattttaaaagaatatagtttcataaaatttatctgcattgatgttgctaatggttattctgaacactttagtaaatttttaaaatctgtgagagataaatatcctactaaaactattattgctggtaacgtggtaacggcagatatggcacaagaattagtattatcaggagcagatattgtaaaagttggaattggaccaggtagtgtttgtactacaagaattcaaacaggtgttggttatcctcagttaagtgctgtcattgaatgtgctgatgctgcccatggtttaggggcacatataattgctgatgggggttgtacttgtccgggtgatgtcgcaaaagctttcggtggtggtgcagattttgtgatgcttggaggaatgtttgctggtcacgatgaaggtgaaggtaagctaataaaatcaaatggtcataaatttatagaattttatggatcaagttctgacatagcaaataagaaacattacgggggtttgtctgactatagaagtagtgagggtagaacagtgagaattaaatatcgtggaaaaattaaagatacgataaataatattcttggtggtgtcagaagtagctgtacttatgtgggagccccttctcttaaacaacttagtaaatgtactacttttgtaagagtagctaaacaatttaacgatacctttactaagtaa

SEQ ID NO: 222821 - DNA, 946 bp, Unknown
  Bacterial polypeptide expressing nucleotide sequence isolated from the Sargasso Sea
ttgttaagaacttacagatttaaatatagtaataatgagtggtcaggtattcctataatggcagcaaatatggacggtgttggagagttaagtattgccgaaaaattaaatgattatggtatgataacttgtttgacaaaacaacatgatataaaaaaaataaaacaaaataggaatatcaaaaaaatttatcctaatatagctctgagtgtaggtataaaaaaagaagactttcaaaatttagataaagttttaaaagagtttaatttttttaaatttatttgtattgatgtagcaaatggttactcggaacatttcactaattttattaagtctgtaagagataaatatccaactaaaacaattattgctggaaatgtcgttacggctgacatgactcaagaattagttcttagtggagcagatattgtaaaagttggaataggtcctggaagtgtatgcacaactagaattcaaactggagttggatatccacaattaagtgcagtaatagaatgtgcagatgctgctcatggacttggagctcatataattgcagatggtggatgtacttgtccaggtgatgttgctaaaggttttggtggtggggcagattttgtaatgttaggaggaatgttggctggtcatgatgaaggaaaaggcaaattagttaaaagtaatggatctagatttattgaattttatggatctagttctgaagttgcaaataaaaaacattatggagggttgtcagattatcgtagtagcgaaggtagaactgtaagagttaaatacaggggtaaaataaatgatacagttttaaatattcttggaggggtaagaagtagttgcacatatgttggtgcaccttctttaaaacaactgagtaaatgtaccacttttgttagagtatcaagtcaatataatgatacttttgtaaaatgac

SEQ ID NO: 222822 - DNA, 988 bp, Unknown
  Bacterial polypeptide expressing nucleotide sequence isolated from the Sargasso Sea
attgttagtaaatgaggaaataaagctagattactctgatgttttaattcgccctaaaagatcaaccatgagttctaggggtgaggttaatttggaacgtactcataattttttatggagtaagaataagtggactggtatacctatcatgtcgtctaatatggacacagttggtacaccagctatgcacaaagttttatccaaatataagttaataacttgtcctgctaaacatcatctaaagaaagatcaaggtaaattcaaaaagggcaaagccaacatatgttggtttggtgggattgacgatattaacaacttggctaagacctcctcaggatttattggcttggatgttgctaatggatacacaataaagtttgttgatgctgtgaagaaactcagggacaaatgtccagatgcaacaattgctgcgggtaatgttgtaactgcggatatgactcaagagctaattttagccggtgcagatattgtaaaggtaggcataggaccaggatctgtttgcacgaccagaattaaaactggtattggctatcctcaacttagtgccgtaatagagtgtgcagatgctgctcacggacttgacgcacatatcatagctgacggaggctgtgtaaattctggagatattgttaaagcttttgctgcaggagctgattttgtaatgcttggaggtatgcttgcggggcatgatgaatgtgatggagaagttgaaaatggtgttatgaaattttatggcatggcttctgaatctgccatgagtagacatggtaatcataatgcttataggggagtggaaggtaagacggtagaagtggaataccgcggaaaggcagatgacacaattaaagatattcttagtggaataagatctgcttgtacttatgttggagcaacaagactaaaaactctctctaaatgtacaacttttgtacgtgtcaataatactcataatacatattcggaatag

SEQ ID NO: 222823 - DNA, 618 bp, Unknown
  Bacterial polypeptide expressing nucleotide sequence isolated from the Sargasso Sea
caagataccctaatcatattattgttgcgggtaatgtcgctacacgagaaatggttgaaactttacttattgaaggcgatgttgacgttgttaaagttggtattggacccgggagcgtctgcactacccgcaaaaaaaccggtgttggtatgccacaactcagctgcgttcttgaatgcgctgacgccgcgcacggagtcggtaaatttattgtaagcgacggaggcatcacctgccccggtgatttatctaaggccttgtgcgctggagctgatttcgttatgatgggcggcgcattcgccggacacgacgaaaaccccggcgagatgatcgttaaaaccgccgccgacggaaccgagaaaaaatacaagattttctacggaatgagctcggagcacgccatgcttcagttttatggaaaaaaaaatgattaccgctccagtgaaggcaaggtcgttcaagttccctacaaaggacccgtagaaaatactatcttagactacctcggcggtgttagaagcacttgcacatacatcggcgctaaatgcgttaaacatatgccaaaatgcaccacttttgttctcgtttccaggcaattgaatcaggtttatagttaaa

SEQ ID NO: 222824 - DNA, 808 bp, Unknown
  Bacterial polypeptide expressing nucleotide sequence isolated from the Sargasso Sea
gttgaatactatttcgagaagaaagacgatcgcaaaggcttcgtaaaattcccgtgggattcaggtactactgttgaacaaatggaaacttactacgatgctatcgagttctctgactggactcatgcgctgtctaagacaccaatgctgaaggcacaacaccctggttatgaaacttggaaactgggcgtacacggtaagaacgatgtgagctgtgttgactgtcacatgcctaaagtgactaacgacaaaggtcgtaagtacacagatcataaagtgggtaacccattcgatcgcttcgacgaaacctgtgcaacttgccatagccaaagcaaagagttcttagaaggcatcactaaagagcgttatgccaaagtgaaagagctgaaagctcgcgctgaaggtcaattagtgaaagcacacttcgaagccgctaaggcgtgggaagtgggtgccactgaagccgaaatgaagccaatcctgactgacatccgtcacgctcaatggcgctgggacttcgcgattgcttctcacggtgttgcggctcacgcgccagaagaagcactgcgtatcctaggtactgcggttgataaagcggctgatgcccgtgtgaaattagcccaattactggcgaagaaaggcgtgactgacgcggttgctatccctgatatctctaccaaagcgaaagctcaagctgcactgggtatggacatggacaagatgaatgcagagaaagaagcattcaagaaagacgtgttacctaagtgggatgaagaagcgaaaaaacgcgaagcaacttacaagtaaa

SEQ ID NO: 222825 - DNA, 538 bp, Unknown
  Bacterial polypeptide expressing nucleotide sequence isolated from the Sargasso Sea
cacaaggtaggcaaccccttcgatcgcttcgaccagacctgccgcaactgccacacccagagcaaggagatgctgcaaggggtggtcaagcagcgcaaagatgccgtcaccgagatcaagctcaaagtcgagaagcagctggtgcacgcccactttgaagccaaggccgcctgggatgccggcgccaccgaggccgagatgaaggacattctgcaggacatccgtcacgcccaatggcgctgggacttctccatcgcctcccacggggtgcagatgcacgctccggaagtggcgctgcgcatgctgggaaccgccctggacaaggccgccgacgcccgcaccaagctggcacgcctgctggccgccaaggggatcagccacgagatcgccattcctgacatctccagcaaggagaaggcccaggccgctcttggcatggacatgaagcagatgaacagcgacaaggcccagttcctcaagaccacagtccccgcctgggatgccgaggccaaagcggccggacggctcgcacaatgac

SEQ ID NO: 222826 - DNA, 691 bp, Unknown
  Bacterial polypeptide expressing nucleotide sequence isolated from the Sargasso Sea
ctggatgagacccctatggcaaggataaaatcacgcgtacgccgtttcttcagcctgttagtacctttattatttatcactgcagttcacgctgaacaaacccccgtacccgcaaaaaccgtcaccgttgaagcgaagaatgaagtcttcgcccctcagcatcccgatcaatatctctcctggaaagccacgtctgagcaatcagcccgtgaagatgcgctggcagaagatcctcgtctggtgatcctgtgggcgggatatcccttctcgcgcgattacaacaaaccgcgcgggcacgcgtatgcagtgaccgatgttcgtgaaaccttacgtactggcgcacccaaaacggcagaagatggtccattgccgatggcctgctggagctgtaaaagcccggatgtggcgcgtctgatccagaaagacggtgaagatggctacttccacggtaaatgggcgcgcggcggtcctgaaattgttaataatcttggctgcggcgattgccataacaccgcgtcaccagactttgccaaaggcaagccagaactgacgctgtcgcgtccttatgctgaacgcgcgatggaaaccatcggcaaaccgtttgagaaagccggtcgctttgaccagcaatccatggtctgcggccagtgccacgtggaatattacttcgacggtaaaaacaaagccgtta

SEQ ID NO: 222827 - DNA, 1096 bp, Unknown
  Bacterial polypeptide expressing nucleotide sequence isolated from the Sargasso Sea
catggatataattttaataattattttagcttcaatattaatagcgactttatctatcctttatttaaatattaaatcaaatataaaaaaagaggatgaaaacaaagctgatgagatagctaatctaaatgctgaaataattaaattaaaagatagtttaaatactactataaatacatctttaagttcgatgtcttcatcttttaacaatctttcaactggtgttacgaaagatatgactgcagctctgacaaaagttgatgagaaagttgcagcttttaattcccaagttgaaaatttaaatgaaagtcagaaaggcattaataaaattttagctggagttaaaaagtatggaactttagctgagttcagcctgggctcacttattaaggatttactaccttcttcacagtacctttcaaatgttaaaatgaaggaggaaactagcgaaaatgttgaatttgctattaaacttcaagagggtgtattggttccggttgatagccattttcctgttgagagatttaaagctattcaagatgctcatcaagaagacgataaaaaagctattgcggatgcaagaactaaacttgcaaaagctttcaaagaaaaagccaagagtataaatgaaaaatatattgtcccacctaaaaccactgattttgcaattgtgtatgcgccaacagagagtttgtttttagagttagctaattatcaagatccaaatactaaagaattattgagccaagaattaatgaaaaaatataaagtaactgttatgggaccaaataatttatctgggtatctacaatcattacacatgggttttcaaacattaaaagttcaaaaacacgcaacagaaatatatgatcatttaaaaacaataagtactagatttacaaaacactttgatggaattgttaatctcagaaaaaaattagaagaggcaatgacagctgttgataaatttggaacagatgcaagatctattaaaagaacattagaaaatataaaagatcccgagcaaattgaaaaagctattgaaacagaaaatgtcgagaaatttgaggatattccaagacaagcaaaaaattaa

SEQ ID NO: 222828 - DNA, 849 bp, Unknown
  Bacterial polypeptide expressing nucleotide sequence isolated from the Sargasso Sea
taacatcagttaatgaaaaagtttctgcttttaatacccaagtcgaaaatttaaataaaagtcaggaaggtattaataagattttagcaggggttaaaaaatacggaactctagctgaatttagtttggcatctttattaaaagatttattacctgcttcacaatttatctcaaatgttaagatgaaagaggatacatcagaaaacgttgaatttgctattaagcttcaaggagatattttagttccagtagacagtcattttccagtagaaaggtttaaagcaatagacgatgcacatcaatcagatgataaaaaagcaatggcagatgctagaacaaaattagctagagcttttaaagataaggctaaaagtgttaatgaaaaatatatagttccaccaaaaactacagattttggaattgtctacgcacctactgagagtttatataaagaattaacagattaccaagatcctagtaccaaagaattgttaactcaagaattgatgaaaaaatacaaaattgtaatcatgggacctaatactctttcagcatatttacaatctttgcatatgggatttcaatcattaaaagttcaaaagggtgcaacagaaatttacaatcaattaaaaacaataagcacaagatttacaaagcattttgataatgtaattgtacttagaaaaaaactagaagaagcaatgaaagttgtagatacatttggtacggatgctagatcaattactagaaccttagaaaatataaaagatcccgaacaagttgaaatggcttctaaagcagaaaatgttgaaaaatttgctgaccactctaaacagcttaaaaattaat

SEQ ID NO: 222829 - DNA, 872 bp, Unknown
  Bacterial polypeptide expressing nucleotide sequence isolated from the Sargasso Sea
aggcaccccaaaactacgcatttcacgtccattcgctgagcgcgcaatggaaactatcggcacaccattcgacaaagcttcgaagaaagacaagcaatctatggtttgcggtcagtgccacgttgaatactatttcgagaagaaagacgatcgcaaaggcttcgtaaaattcccatgggattcaggtaccactgttgaacaaatggaagcttactacgatgctatcgagttctctgactggactcatgcgctgtctaagacaccaatgctgaaggcacaacatcctggttatgaaacttggaaactgggcgtacacggtaagaacgatgtgagctgtgttgactgtcacatgcctaaagtgactaacgacaaaggtcgtaagtacacagatcataaagtgggtaacccattcgatcgcttcgacgaaacctgtgcaacttgccatagccaaagcaaagagttcttagaaggcatcactaaagagcgttatgccaaggtgaaagagctgaaagctcgcgctgaaggtcaattagtgaaagcacacttcgaagccgctaaagcgtgggaagtgggtgccaccgaagctgaaatgaagccaatcctgactgatatccgtcacgctcaatggcgctgggacttcgcgattgcttctcacggtgttgcggctcacgctccagaagaagcactgcgtatcctaggtactgcggttgataaagcggctgatgcccgtgtgaaattagcccaattactggcgaagaaaggcgtgactgacgcggttgctatccctgatatctctaccaaagcgaaagctcaagcggcactgggtatggacatggacaagatgaatgcagagaaagaagcattcaagaaaa

SEQ ID NO: 222830 - DNA, 1402 bp, Unknown
  Bacterial polypeptide expressing nucleotide sequence isolated from the Sargasso Sea
atgaagaagatgataggtaagtcctttgcactcagtgcattggttgccgcgagcttcatggcggcgggtgcgatggcgagcgataagaccgagccacgcaacgaagtatacaaagataagtttgctaatcaatacaatagctggcatgacaccgcaaaaagtgaagagatcaccgacgcattagcgggcgatcctagcttagtaattctgtgggccggttatggtttcgcaaaagactacaacgcacctcgcggccacatgtatgccgtgactgacgtacgtaacaccctacgtacaggcgcaccagccaatgctgaagacggtccaatgccaatggcctgttggagctgtaagagccctgacgtacctcgcctgatcgaagaacaaggcgaagatggttacttcaaaggcaagtgggctaaaggtggtccagaagtcgttaacactattggttgtagcgactgccacgaaaaaggcaccccaaaactacgcatttcacgtccattcgctgagcgcgcaatggaaactatcggcacaccattcgacaaagcttcgaagaaagacaagcaatctatggtttgcggtcagtgccacgttgaatactatttcgagaagaaagacgatcgcaaaggcttcgtaaaattcccatgggattcaggtaccactgttgaacaaatggaagcttactacgatgctatcgagttctctgactggactcatgcgctgtctaagacaccaatgctgaaggcacaacatcctggttatgaaacttggaaactgggcgtacacggtaagaacgatgtgagctgtgttgactgtcacatgcctaaagtgactaacgacaaaggtcgtaagtacacagatcataaagtgggtaacccattcgatcgcttcgacgaaacctgtgcaacttgccatagccaaagcaaagagttcttagaaggcatcactaaagagcgttatgccaaggtgaaagagctgaaagctcgcgctgaaggtcaattagtgaaagcacacttcgaagccgctaaagcgtgggaagtgggtgccaccgaagctgaaatgaagccaatcctgactgatatccgtcacgctcaatggcgctgggacttcgcgattgcttctcacggtgttgcggctcacgctccagaagaagcactgcgtatcctaggtactgcggttgataaagcggctgatgcccgtgtgaaattagcccaattactggcgaagaaaggcgtgactgacgcggttgctatccctgatatctctaccaaagcgaaagctcaagcggcactgggtatggacatggacaagatgaatgcagagaaagaagcattcaagaaaaacgtgttacctaagtgggatgaagaagcgaaaaaacgcgaagcaacttacaagtaaa

SEQ ID NO: 222831 - DNA, 1402 bp, Unknown
  Bacterial polypeptide expressing nucleotide sequence isolated from the Sargasso Sea
gatgaagaagatgactggtaagtcctttgcactgagtgcattggttgccgccagcttcatggcggcgggtgcgatggcaagcgataagaccgagcctcgcaacgaagtttataaagataaatttaaaaatcaatataatagctggcatgacactgcaaagagtgaagagcttgttgatgcattagcacaggatcctaatatggttattctgtgggctggttatagttttgctaaagattacaacgcgcctcgcggccatatgtatgccgtgactgatgtgcgtaatactctgcgtactggcgcccctgccaacgcggaagacggcccaatgccaatggcttgttggagctgtaagagccctgacgtacctcgcctgatcgaagaacaaggtgaagacggttacttcaaaggcaagtgggctaaaggtggcccggaagtgaccaatactattggctgtggcgattgccatgaaaaaggttcgccaaaactgcggatctctcgtccttatgtagaccgcgcaatggatgctatcggtacgccatttgataaagcctcgaagaaagacaagcaatcaatggtttgcggtcaatgtcacgttgaatactatttcgagaagaaagaagacagaaagaacttcgtaaaattcccttgggatatgggcatcactgttgaccagatggaagtttattacgatggtatcgagttctcagattggactcacgcgttatctaagacgccaatgttaaaagcacagcaccctgagtacgaaacttggaagatgggtattcatggtaaaaataatgtcagttgtgttgactgccatatgcctaaagtgactagccctgaaggtaagaagttcactgaccataaagtcggtaacccgttcgatcgtttcgaagaaacctgtgcaacttgccatagccaaacgaaagaattcttagttggcgttactaatgagcgcaaagctaaagttaaagaaatgaaacttaaagcggaagagcaattagtgaaggcgcacttcgaagctgctaaagcatgggaattaggtgctactgaagctgaaatgaagccaattttgactgacatccgccacgctcaatggcgctgggatttagccattgcttcgcacggtgttgcggctcacgctcctgaagaagcactacgagtgttgggtacatctgttaataaagccgccgatgctcgtgttaagttagcacagttgttagcgaaaaaaggtttaacagatcctgtcgctatccctgatatttcgactaaagcgaaagctcaggcggtactgggtatggacatggaaaaactgaatgcagagaaagaagcattcaaaaaagacatgttacctaagtgggatgccgaagcgaaaaaacgcgaagcgacttacaagtaa

SEQ ID NO: 222832 - DNA, 1174 bp, Unknown
  Bacterial polypeptide expressing nucleotide sequence isolated from the Sargasso Sea
caacaagccgcgcggccacttctatgcgctgaccgacgtgcgggaaaccctgcgtaccggcgcccccaagaccgccgaagacggtccgttgcccatggcctgctggagctgcaaaggcccggacgtggcccgcgtcatcgacgagaagggtgaggatggctacttcaaggggatgtgggcaaaaggcggccccgagatcgtcaacaccatcggctgcgccgactgtcacgacaccgcctcgaaagagttcaaggaggggaaacccgccctgcacctctcccgtccctatgccgaccgggccatgaccgccatcggcaagccgttcaaggagcaggggcgcttcgatcagcagtcccaggtgtgcggccagtgccacgtggagtactacttcagcggtcccaccaaggcggtgaaattcccctgggacaagggcaccaccgtggagcagatggagcagtattacgatgaaataggctttgccgactggacccatgccctctccaagacccccatgctcaaagcccagcaccccgagtacgagacctggcgcgccggcattcacggccagaacaacgtcgcctgcgtcgactgccacatgcccaaggtgcagaacgagcaaggcaaggtctacaccgatcacaaggtaggcaaccccttcgatcgcttcgaccagacctgccgcaactgccacacccagagcaaggagatgctgcaaggggtggtcaagcagcgcaaggatgccgtcaccgagatcaagctcaaagtcgagaagcagctggtgcacgcccactttgaagccaaggccgcctgggatgccggcgccaccgaggccgagatgaaggacattctgcaggacatccgtcacgcccaatggcgctgggacttctccatcgcctcccacggggtgcagatgcacgccccggaagtggcgctgcgcatgctggggaccgccctggacaaggccgccgatgcccgcaccaagctggcacgcctgctggccgccaaggggatcagccacgagatcgccattcctgacatctccagcaaggagaaggcccaggccgctcttggtatggacatgaagcagatgaacagcgacaaggcccagttcctcaagaccacagtccccgcctgggatgccgaggccaaagcggccggacggctcgcacaatga

SEQ ID NO: 222833 - DNA, 286 bp, Unknown
  Bacterial polypeptide expressing nucleotide sequence isolated from the Sargasso Sea
atgccgtatgtcttaggttcaaccgaagtgtatgcccaaggcacctcttggccgctgatttcagaaaacagcaacactatcgtgctgtggtcaaacgatccttacaaaaacctgcaagtgggttggaacgccgaaacccatgaggccttcgcttacctcgcgcagctaaaagagaaggtcaaacagggaaagatccgcgtgatcagtatcgaccctgtggtcaccaaaactcaggcttaccttggctgtgagcagttgtatgtgaacccacagactgacgtgacgc

SEQ ID NO: 222834 - DNA, 962 bp, Unknown
  Bacterial polypeptide expressing nucleotide sequence isolated from the Sargasso Sea
ccgccgcactcttatcaacgtgggtctatcggttcagcgcgccgaccacggagagcagtcttattggacggccacggctctcgcatgcgctctgggtcagatcgggctgccgggaggcggaatagctttcccgttcggagcgcaaggcaatgtaggcgctggtcaggttcggaaacgagtgccagggatacccatcccgccacgacctgaaggcccaccgattatttcagtgtctcgttttcgcgagttgttggataacccaggcgcgatttataacttcaatggtcaaaccggccggtaccccgaaatcaagatgatctggtgggcagggggtaacccgtttcaccaccaccaagatttgaatgaactctcgtcagcctgggagcgccccgacacggtaatcgtgcaagagcctttctggaccccaacggcgcggcgagcggacatcgtgttgccgtctacaacaccgctggaacgaaatgaccttggtggtgctgagaacatgctgatttctcatgggaaagcggtggaagcgcctggggatgcgctcgatgactaccaaattctcgagatggtcgcagagcgactcgggataaaggaccagttcactgaaggtcgtaccgcggaccaatgggttgaagttttgtacgaaatttttcgagctgagaatgactgggctcccaatttcgaacaatttagggaagcgggttatttgcgtcaccccgaaatgagcgaaatgggagagaacgaacaggtctttctcgctgaataccgagatgatcccaccgtccacccattaggcactccgagtggccgaattgaactgtggtctgaaaccattgcggaattcgactatgacgattgcccgccacatccaacatggatcgaaccattcgaacggctaggaggaaagggttctgaacactggccgctacacctgggttcgaatcaaccaacgagtc

SEQ ID NO: 222835 - DNA, 941 bp, Unknown
  Bacterial polypeptide expressing nucleotide sequence isolated from the Sargasso Sea
gctggggcagattggtactcccggcggcggttttggcctttcctaccactttgccaacggcggtaacccgacccgtcgggcggcggtactggcttcgatgcaaggctgtgtggcgggcggtaccgaggcggtcgaaaaaataccggtggcgcgcattgtggaagcgctggaaaatcccggtgcgccgtatcaacacaacggaatggaccggcattttccggatattcgcttcgtctggtggtgtggcggcgcgaactttacccatcatcaggataccaaccgcttgattcgggcctggcagaagccggagcttatcgtcatttcggagtgcttctggaccgctgccgcccgccatgccgatattgtcctgccggcgacaacttcgtttgaacgtcacgatatgaccatgaccggcgattacagtaaccagcacctggtgccgatgaagcgcgtggtcgcgccgcgcgatgaagcccgggatgattttgacgtctttgccgatctcagcgagcgctgggaagagggagggcgcgcgcgttttaccgaagggaaaaccgatctacagtggctggagaccttctatcagattgccgcgcaacgcggggcgagccagcaggtgacgctgccgccatttgaccagttctggcaggctaaccagctgatagaaatgccggaaaacccggaaaatgcccgttttgcccgcttcgcggcatttcgtgccgatccgcaggccaatccgctgaaaaccgcgagcggcaaaattgaaattcactctccaacgattggccggttttgcctactccgactgtccaccgcaccaaatgtggctggaaaccggacgaatggcacggcaatgcccggcctggcagctgcaggtgctgtccgctcatccggcgcatcgtctgcacagccagctgaaacacacgtcgctgcgcgaaaag

SEQ ID NO: 222836 - DNA, 874 bp, Unknown
  Bacterial polypeptide expressing nucleotide sequence isolated from the Sargasso Sea
caggtcaccctgaagaacagctggaacatgccggatcacgagggtcaggccggtttcaaggcgctcaaggagaagggcacccgcatcatcagcatcgacccggtctacaacgaaaccgccaagctagcgggggccgagtggattgcgccgaacgcctacaccgacgtggccatgatgctgggggtagcccacaccctctacagcgagcagaagcacgatcaggccttcctcgaccgctacaccaccggcttcgacaagttcctcgcttatctgctcggccaggaagacggccagccgaagagcgccgagtgggcgagcaccatctgcggcgtcgatgccaaggtgatccgccagctggccctcgacatggcgtccaagcgcaccatgatcatggcgggctggggcatgcagcggcagcaacacggcgaacagcccaactggatgctggtcaccctggccgccatgctgggccagatcggcctgccgggcggcggttacggcttcagctaccactactcttccggtggcagccccaccgccaagggcggcatcctggcgggcatctccgccggcaatgcgccaaagaacgggccggcgccgatcccggtggcccgcatcgcagactgtctggccaaccccggcaagaccatcgacttcaacggccgcaaggtgacctacccggacatcaagctggtctacgtggcgggcggcaaccccttccaccaccaccaggacaccaacaacctggtcaaggcctggcgcaaaccgcagaccgtgatcgtgcacgagccctactggaccgccaccgccaagcacgccgacatcgtcctgccggccaccaccagctacgagcgcaacgatctggagatgggcg

SEQ ID NO: 222837 - DNA, 728 bp, Unknown
  Bacterial polypeptide expressing nucleotide sequence isolated from the Sargasso Sea
catgaaactcacaagacgtgactttatcaagacggctggcgcggcaaccgggacaatggcgatttcttcggtgatcccaatgccggcctgggccgaaggccagaatggcggggcaatcctgacggcagcacgttggggtgcggtatacgtggaagtaaaagacggcaaagtggtttcctcaaaaggtgcgttgccgaaaacggtgccgaactcattacagcaaaccgcgccggatcaggttcataccaatatccgcgttaagtatccgatggtgcgcaaaagctatctggaaaacccgggtaaagcggatggtaaacgtggtaacgatcctttcgtgcgtgtgagttgggaacaagcgctgaagctcattcacgagcagcatagccggatccgtagcagctatggcccgtcctcaatatttgccggttcctatggctggcgctccagcggcgttctgcataaggcgcaaaccctactgcaacgctatatgagcatggccggtggctacgccggtcataccggagattattcaaccggggcagcgcaggtgatcatgccttacgttgtgggatcggtcgaagtctatgagcagcaaaccacctggccgatggtgctagagcacagtcaggtcgtggtgctgtgggggatgaacccgctcaataccctcaaaattgcctggagcagcacggatgaacaggggattgaatactttaatctgctgaaaaaat

SEQ ID NO: 222838 - DNA, 616 bp, Unknown
  Bacterial polypeptide expressing nucleotide sequence isolated from the Sargasso Sea
gatgatcaatatttcccgtcgtggttttctgggtggcttgctggccagcggtgcctctgccctgatcggcccctccctgctcggtcgcgccgtgatggccaccgagtccggcgacaagctggtgcagtccggctcccactggggcgccttccgtgcccgggtggtcgatggccgctgggtcgagaccctgccgttcgagcatgacaagcatccgaccgagatgctcaaggccctgagtgaagtggtctacaacccctcccgcatccgctaccccatggtgcgactggactggctgcgcaagggccaccagtccgacaccagcgaacgcggccagaaccgctttgttcgggtcacctggtcacaggcgctcgattttttctatcacgagctggagcgggtgcagaagacctatggtccgagcgccctctatgccggtcactctggctggcagtcagtgggcaaactgcactcagctggtgccatgctgggacgcgccatgaacctgcacggcacctatctggccaaggccggtgactactccaccggtgccgcccaggtgatcctgccccacgtggcgggcgccatggaggtgtatgagcagcaagacctcttggcc

SEQ ID NO: 222839 - DNA, 1671 bp, Unknown
  Bacterial polypeptide expressing nucleotide sequence isolated from the Sargasso Sea
tgaatccgcagaccgatgtgccgctgatgctgggcatcgcccacaccctctacagcgagaagcgccacgacgaggcgtgcctgaaagactacaccaccggctttgacaagttcttgccctacctgctgggcaccagcgatggtcaggtgaagaatgccgagtgggcgtccgccatctgtggcgtacctgccgagatcatccgcgagctggcccgcgccatgagcagcggccgtacccagcttatcggcggctggtgtgtgcagcgcatgcaccacggcgagcagtacgcctggatgctggtagtactggcctcgatgattggccagatcggcctgccgggcggcggttacggctttggctggcactacaacggggcgggcaccatcacctccagcggccccatcatgtccggtttcagttcggtcattcccggggtcaaaccgcgccatgacggcgactggaagggctactccaaattcattccggtggcccgtttcatcgactgcatcctcaatccgggcaagcagatcgccttcaacggccagaccatcacctacccccacatgaagatggcggtgttctgcggcaacaacccgttccaccaccagcaggatcgcaacaagatggtcgccgcctggcgcaagctggaaaccgtggtcagcatcgatcaccagtggactgccagctgccgcttcgccgacatcgtgctgcccgccaccaccacctatgagcgcgatgacatcgagcagtggggctcccactccaacgcgggcattctggccatgtacaaggtagtggagccgctgttcgaggcgcgcgatgactacgacatctttgccgatctctgccgtcgcttcggtcgcgaggccgagttcaccggtggcaagagcaagctggagtggatccagagcatctatgacgacgcccgcctgcagggccgcggcatcggcattcgtctgccccgtttcagccagttctggcacggggaaggcttcgtcaccttcccggcgggccaaccctgggtacgccacgagtcgttccgtcaggagccggatctagaaccgctcggcaccccgtccggccttatcgagatctactccaagaccatcgctgactacggctatggggattgtccgggtcacccggtctggatcgagccctacgagcgctctcacggcgggccgggcagcaaacagtatccgctgcacctgcaatcctgccacccggacaagcggctgcacagccagctctgctcctccgacaactaccgcgccacctacacggtacagggtcgcgagccagtctatatgaatccacaggatgccaaatcccgtggcctcaaggacggcgatctggtgcgggtattcaacggccgcggtcaggtattggctggtctggtggtaagcgatgattacgcccccggcgtggtacgcattcaggaaggtgcctggtatggtccgcaagaaggcggcaaagtaggtacgctctgtacctacggcgatcccaacgtgctgactgccgacatcggctcctccagcctggcgcaggccaccacggcccataccgcgctggtggagatcgagaagttccgcggacaggctcccgccgtcactgccttcggcgcgccggaatctgccaagggcatcgaccccatgttcccggcactctgac

SEQ ID NO: 222840 - DNA, 940 bp, Unknown
  Bacterial polypeptide expressing nucleotide sequence isolated from the Sargasso Sea
atgaacagaagagactttttaaaaggcttagcctcaacctctttcgttgctttaggtggcagctcagtgttagcgcccttaaacgcgctggccagcacgggcttaaatgaagacgaatggctgaccacgggctcgcacttcggcgcctttaaaatcaaacgtaaaaacggtgtgattgccgaggtcaaagccttcgacttagataaatatccaacggatatgattaacggtatccgcggcatggtctacaacccatctcgcgtgcgttaccctatggttcgcttagactttttacttaaaggccataagagcaatacccagcaacggggggatttccgcttcgttcgcgtgacctgggataaagcattaaaactgtttaaacactcacttgatgaaatccaaaccaagtacggtccatcgggcttacacgctgggcaaaccggctggcgcgccacggggcaactgcattccagcaccagccatatgcagcgtgcggtgggaatgcacggcaactatgtgaagaaaatcggtgactactccaccggtgcaggccaaaccattctgccctatgtgttaggttcaaccgaagtgtatgcccaaggcacctcttggccgctgatcttggaaaacagcaacactatcgtgctgtggtcaaacgatccttacaaaaacctgcaagtgggttggaatgccgaaacccatgaggccttcgcttacctcgcgcagctaaaagagaaggtcaaacagggcaagatccgcgtgatcagtatcgaccctgtggtcaccaaaacccaggcttaccttggctgtgaacatttatatgtgaacccacagactgacgtaacgctgatgctggccatcgcccatgagatgatcacccaaaagctttacgatgataaattcatccaaggttacagcttaggcttcgaagagtttgtgc

SEQ ID NO: 222841 - DNA, 916 bp, Unknown
  Bacterial polypeptide expressing nucleotide sequence isolated from the Sargasso Sea
ctggccagcacaggtctaaatgaagatgaatggctgaccacgggttcgcacttcggcgcctttaaaatcaaacgtaaaaacggtgtgattgccgaggtcaaagccttcgacttagataaatatccaacggatatgattaacggtatccgcggcatggtctataacccatctcgcgtgcgttaccctatggttcgcttagactttttactgaaaggccataagagcaatactcagcaacggggagatttccgcttcgttcgcgtgacctgggataaagcattaaagctgtttaagcactcactcgatgaaatccaaaccaagtacggtccatcgggcttacacgcggggcaaaccggttggcgcgcaaccgggcaactgcattccagcaccagccatatgcagcgtgcggtggggatgcacggcaactatgtgaagaaaatcggtgactactccaccggagccggccaaaccattctgccctatgtcttaggttcaaccgaagtgtatgcccaaggcacctcttggccgctgattttagaaaacagcaacactatcgtgctgtggtcaaacgatccttacaaaaacctgcaagtgggttggaacgccgaaacccatgaggccttcgcttacctcgcgcagctaaaagagaaggtcaaacagggaaagatccgcgtgatcagtatcgaccctgtggtcaccaaaactcaggcttaccttggctgtgagcagttgtatgtgaacccacagactgacgtgacgctgatgctggccatcgcccatgagatgatcacccaaaagctttacgatgataaattcatccaaggctacagcttaggcttcgaagagtttgtgccctacgtgatgggcactaaaaaaggtatcgccaaaaccccagagtgggcagcgccaatctgtg

SEQ ID NO: 222842 - DNA, 801 bp, Unknown
  Bacterial polypeptide expressing nucleotide sequence isolated from the Sargasso Sea
tgtgattgccgaggtcaagccttcgacttagataaatatccaacggatatgattaacggtatccgcggcatggtctataacccatctcgcgtgcgttaccctatggttcgcttagactttttactgaaaggccataagagcaatactcagcaacggggagatttccgcttcgttcgcgtgacctgggataaagcattaaagctgtttaagcactcactcgatgaaatccaaaccaagtacggtccatcgggcttacacgcggggcaaaccggttggcgcgcaaccgggcaactgcattccagcaccagccatatgcagcgtgcggtggggatgcacggcaactatgtgaagaaaatcggtgactactccaccggagccggccaaaccattctgccctatgtcttaggttcaaccgaagtgtatgcccaaggcacctcttggccgctgattttagaaaacagcaacactgtcgtgctgtggtcaaacgatccttacaaaaacctgcaagtgggttggaacgccgaaacccatgaggccttcgcttacctcgcgcagctaaaagagaaggtcaaacagggaaagatccgcgtgatcagtatcgaccctgtggtcaccaaaactcaggcttaccttggctgtgagcagttgtatgtgaacccacagactgacgtgacgctgatgctggccatcgcccatgagatgatcacccaaaagctttacgatgataaattcatccaaggctacagcttaggcttcgaagagtttgtgccctacgtgatgggcactaaagatggtatcgcc

SEQ ID NO: 222843 - DNA, 823 bp, Unknown
  Bacterial polypeptide expressing nucleotide sequence isolated from the Sargasso Sea
tcgctttgccgcgctgatgggtaaagagaaagaatacacccgcaatatgagcgaaatggagtggatagaaaccctctataacgagtgtaaagccgcgaacgcgggtaaatatgagatgccagattttgccaccttctggaagcaaggttatgtgcactttggtgatggcgagctgtggacacgccacgccgactttagaaacgatcctgaaatcaatccactaggtacgccttctggcttaattgaaatcttcagccgtaagattgaacagttcggttatgacgactgccaaggccatccaatttggatggaaaaagccgagcgtagccatggtggcccaggttcagacaaatatcctgtgtggctacagtcttgccatccggataagcgtctgcactcacagatgtgtgagtcgaaggaataccgcgaaacttacacagtcaacggccgcgaacccatctatatcagccctgtggatgccaaagcgcgcggcattaaagatggtgatttagtgcgggtctttaacgaccgtggccaactgttagcgggcgccgtggtatcggatcgcttccctaaaggtgtcgtgcgaattcatgaaggcgcatggtatggcccagtgggtaaagatggcagcgtcgaaggtggcgccgaaatcggagcattatgcagctatggcgacccgaatactctgaccttagacattggcacctcgaagttggcgcaagcctgctcagcctatacttgtctggtcgagtttgagaaataccaaggcaaagtccctaaggtcagctccttcgatggtcctatcgaagtcgaaatctaa

SEQ ID NO: 222844 - DNA, 2491 bp, Unknown
  Bacterial polypeptide expressing nucleotide sequence isolated from the Sargasso Sea
catgaacagaagagactttttaaaaggcttagcctcaacctctttcgttgctttaggtggcagctcagtgttagcgcccttaaatgcgctggccagcacaggtctaaatgaagatgaatggctgaccacgggttcgcacttcggcgcctttaaaatcaaacgtaaaaacggtgtgattgccgaggtcaaagccttcgacttagataaatatccaacggatatgattaacggtatccgcggcatggtctataacccatctcgcgtgcgttaccctatggttcgcttagactttttactgaaaggccataagagcaatactcagcaacggggagatttccgcttcgttcgcgtgacctgggataaagcattaaagctgtttaagcactcactcgatgaaatccaaaccaagtacggtccatcgggcttacacgcggggcaaaccggttggcgcgcaaccgggcaactgcattccagcaccagccatatgcagcgtgcggtggggatgcacggcaactatgtgaagaaaatcggtgactactccaccggagccggccaaaccattctgccctatgtcttaggttcaaccgaagtgtatgcccaaggcacctcttggccgctgattttagaaaacagcaacactatcgtgctgtggtcaaacgatccttacaaaaacctgcaagtgggttggaacgccgaaacccatgaggccttcgcttacctcgcgcagctaaaagagaaggtcaaacagggaaagatccgcgtgatcagtatcgaccctgtggtcaccaaaactcaggcttaccttggctgtgagcagttgtatgtgaacccacagactgacgtgacgctgatgctggccatcgcccatgagatgatcacccaaaagctttacgatgataaattcatccaaggctacagcttaggcttcgaagagtttgtgccctacgtgatgggcactaaagatggtatcgccaaaaccccagagtgggcagcgccaatctgtggggttgagccacacatcatccgcgatctggcgaaaaccttagttaagggccgcacccaaatcatgatgggttggtgtattcagcgccaacaacacggtgagcaaccttactggatggccgcagtcctcgcgaccatgataggtcaaatcggcttacccggcggtggcatcagctatggtcaccactactctagcattggtgtgcctgcgacaaatgcggcggcgcccggcgccttcccgcgtaacttagacgagaaccaaaaacccctgttcgacagcaccgactttaaaggcgcgagcagcaccattcccgtcgcccgttggattgatgcgattctcgaacccggcaaaaccattgatgccaacggttcgaaagtggtgtatcccgatattaagatgatgattttctcgggcaataacccatggaaccaccatcaagaccgtaaccgcatgaagcaagccttccataagttggaatgcgtggtcactatcgatgtgaactggacggcgacgtgccgcttctccgacatagtgctgcccgcctgtaccacctatgagcgcaacgatatcgacgtatacggcgcctatgctaaccgcggtattttggcgatgcagaagatggtggagccactgtttgagagtttgtcagactttgaaatcttcactcgctttgccgcactgatgggtaaagagaaagaatacacccgcaatatgagcgaaatggagtggatagaaaccctctataacgagtgtaaagccgcgaacgcgggtaaatatgagatgccagattttgccaccttctggaagcaaggttatgtgcactttggcgatggcgagctgtggacacgccatgccgactttagaaacgatcctgaaatcaatccattaggtacgccttctggcttgattgaaatcttcagccgtaagattgaacagttcggttatgacgactgccaaggccatccaatttggatggaaaaagccgagcgtagtcatggtggcccgggttcggacaaatatcctgtgtggttacagtcttgccatccggataagcgtctgcactcacagatgtgtgagtcgaaggaataccgcgaaacctacacagtcaacggccgcgaacccatctacatcagtcctgaggatgccaaagcgcgcggcattaaagatggtgatttagtgcgggtctttaacgaccggggccaactgttagcgggcgccgtggtatcggatcgcttccctaaaggtgtagtgcgaattcatgaaggcgcatggtatggcccagtgggtaaagatggcagcgtcgaaggcggcgccgaaatcggtgccctgtgcagctatggtgacccaaatactctgaccttagacattggcacctctaagttggctcaagcctgctcagcctatacttgtctggtcgagtttgagaaataccaaggtagagtccctaaggtcagctccttcgatggtcctatcgaagtcgaaatctaa

SEQ ID NO: 222845 - DNA, 2491 bp, Unknown
  Bacterial polypeptide expressing nucleotide sequence isolated from the Sargasso Sea
catgaacagaagagactttttaaaaggcttagcctcaacctctttcgttgctttaggtggcagctcagtgttagcgcccttaaatgcgctcgccagcacaggcttaaatgaagacgaatggctgaccacaggctcacactttggcgcctttaaaatcaaacgtaaaaacggcatgattgccgaagtcaaagccttcgatttagataaatatccgacggatatgattaacggtatccgcggtatggtctataacccatcccgcgtgcgctaccctatggttcgcttagactttttactaaaaggccataagagtaataccctgcagcggggggatttccgctttgttcgtgtgacctgggataaagcattaaagctgtttaaacactcactcgatgaggtccaaaccaagtacggtccatcgggcttacacgcaggacaaactggttggcgcgccacggggcaactgcattctagcaccagccatatgcagcgcgcggtggggatgcacggcaactttgtgaagaaaatcggcgactactccaccggtgcaggccaaaccattctgccctatgtattaggctcaaccgaagtctatgcccaaggcacctcttggccgctgatcttagaaaacagcaacacgattgtgctctggtcaaacgatccttacaaaaacctacaagtgggctggaacgctgaaacccatgaggccttcgcgtacctcgcgcaattaaaagagaaggtcaaacagggtaaaatccgcgtgatcagtatcgaccctgtggtcaccaaaacccaggcttaccttggctgtgagcagttatatgtcaacccacagactgacgtaaccctgatgctggcgatcgcccatgagatgatcacccaaaagctacacgatgaaaaattcatccaaggttacagcttaggtttcgaagagtttgtaccttacgtgatgggcactaaagatggtatcgccaaaacccctgagtgggcggcgcctatctgcggtgttgaaccacacattatccgcgatctggcaaaaaccttagttaagggccgtacccaaatcatgatgggttggtgtattcagcgccaacaacacggtgagcaaccttactggatggccgcggtactcgcgaccatgataggccaaatcggcttacccggcggtggtattagctatggtcaccactactccagtattggtgtgccggcgaccacagctgcagctccgggggctttcccacgtaacttagacgagaatcaaaaaccgctgtttgacagcacagactttaaaggcgcaagcagcacgattcccgttgcccgctggattgatgcgattctcgaacccggcaaagccattgatgccaacggttcgaaagtagtgtatcccgatattaagatgatgattttctcgggtaataacccatggaatcaccatcaagatcgtaaccgcatgaagcaagccttccaaaagcttgaatgcgtggtcactatcgatgtgaactggacggcgacttgccgcttctccgacatagtgctgcccgcctgcaccacctatgagcgcaacgatatcgatgtatacggcgcctatgctaaccgcggtattttggcgatgcagaagatggtcgagccgctgtttgaaagtttgtcagactttgaaatcttcactcgctttgccgcgctgatgggtaaagagaaagaatacacccgcaatatgagcgaaatggagtggatagaaaccctctataacgagtgtaaagccgcgaacgcaggtaagtatgagatgccagattttgccaccttctggaagcaaggttatgtgcactttggcgatggcgagctgtggacacgccacgccgactttagaaacgatcctgaaatcaatccactaggcacgccttctggcttgattgaaatcttcagccgtaagattgaacagttcggttatgaggactgccaaggccatcccatttggatggaaaaagccgagcgtagccatggtggcccaggttcggacaaatatcctatgtggctacaatcttgccatccggataaacgtctgcactcgcaaatgtgtgagtcgaaggaataccgcgaaacctacacagtcaacggccgcgaacccatctatatcagccctgtggatgctaaagcgcgtggcattaaagatggcgatatagtgcgggtctttaacgaccgtggccaactgttagcgggcgccgtggtatcggatcgcttccctaaaggcgtagtgcgaattcatgaaggcgcatggtatggcccagtgggtaaagatggcagcgtcgaaggtggcgccgaaatcggtgccctgtgtagctatggcgatccaaatactctgaccttagacattggcacctcgaagttggcgcaagcctgctcagcctatacttgtctggtcgagtttgagaaataccaaggcaaagtccctaaggtcagctccttcgatggacctatcgaagtcgaaatctaa

SEQ ID NO: 222846 - DNA, 2482 bp, Unknown
  Bacterial polypeptide expressing nucleotide sequence isolated from the Sargasso Sea
tatgagcattagccgccgcgagtttctcaaggctaacgcagcggttgccgctgccacggccgttggcgtcacgcttcccgtgaaaatggtcgaagccgccgagtcagatagcattaagtgggataaagccccctgccgtttttgcggtgtgggttgtagcgtattagtcggaaccaaagccggtaaagtcgtcgccactaagggcgatcccgaaagcccagttaaccgtggtttgaactgtattaagggttacttcctgtcgaaaatcatgtacggcaaggacagattaaccacgccgctgctgcggatgaaagacggcaaataccataaagaaggtgagtttaccccagtaagctgggatgttgccttcgatactatggccgctaagtggaaacacagcatcgccactaagggaccaacctcagtcggtatgttcggctcgggccaatggaccatttgggaaggttatgccgcctctaaattacataaggcaggattcttaaccaacaatatcgaccctaacgcccgccactgtatggcatcggccgtaggtggctttatgcgtaccttcggtatcgacgagccaatgggctgttacgatgacttagaagccgccgaccaatttgtgctctggggcgctaacatggccgagatgcacccgatcctgtgggctcgcttatccgaccgccgtttaagtcacaaagactgccgcgtacatgtgctatcgaccttcgagaaccgcagcttcgacttagcggacaaccctatggtgttccgcccacagtcagatctggtgatcctcaactttatcgctaactacatcattcaacacaaagccgtgaataccgactttgtgactaaacatactaagtttgccctcggtgtggatgatatcggttatggtctgcgtccagatcatccgctagagaagaaagccaaaaacccaggcaatggtaaatctagccctatcagcttcgatgaatacgctaagttcgtcagcacttacacgctggaatatgcggcgaaaataagtggtgtagagcctgaaaaattagaaaccttagctaaggcctatgccgatcctaaggtcaaagtcatgagtctgtggaccatggggatcaaccaacacgttcgtggcgtgtgggcaaacaacatgctctacaacatccacttactcacaggtaaaatagccaccccaggcaacagcccattctcattaacgggtcaaccttcggcctgtggtaccgcccgtgaagtcggcaccttcgcccaccgcttacctgcggatatggaagtggctaacgataaacaccgcgccattacagaaaaagtgtggcaggtaccagaaggcactattccgccaaaacctggcttccatgccgtgctgcaaagccgtatgctcaaagacggcaagctcaactgctattggaccatgtgtaccaacaatatgcaggcgggcccgaatatcaacgatgaaatttaccccggtttccgtaacccagaaaactttatcgtggtatccgatccatacccaaccgtcaccgccatggctgccgacttaattctgcccactgccatgtgggttgagaaagaaggtgcctacggtaacgccgagcgccgcacccatatgtggcatcaacaggtcaaagcgcctgaaggggctaagtcggatctgtggcaattagtcgaattctcaaaacgctttaaagtgtctgaagtatggcctgctgagcttattgccaaacaaccagaatatgctgacaaaacgctttatgaagtgctattcgccaacggcgttatcaacaagttcccaaccacagattgtaagggcgacttaaacgatgaaagcgcgcactttggtttctatctacaaaaaggcattttcgaagaatacgccgccttcggtcgcggccatggccatgacttagccgattttgaccgttatcacgaaacccgcggcctacgctggccagtggtcgaaggtaaagaaaccctgcgccgcttcgttgaaggtagcgatccttatgtgaaggcaggtgaaggctacaagttctacggtaaacccgatggcaaagcggtgattttcgccctgccctacgagcctgcggcagaagagccaaatgaagaatacgatctgtggatgtctaccggccgtgtactcgaacactggcatacaggttcgatgaccgcccgtgtacctgagctgtaccgcgcttaccccgatgcacaaatctttatgcatcctgaagacgctaaggcccgaggtctgcaacgtggtgatgaagtgctagtcgcatccccccgtggtgaggtcaaaacccgtgtcgaaaccaaaggccgtaacaaaccgccacgaggcgtggtgtttatgcccttcttcgatgcgcgtcagttagttaacaagttgattctggatgcgaccgatccactgtcaaaagaaactgactttaaaaagtgtcccgtaaaagtgatgaaggcctaa

SEQ ID NO: 222847 - DNA, 2482 bp, Unknown
  Bacterial polypeptide expressing nucleotide sequence isolated from the Sargasso Sea
atgagcattagccgccgcgagtttctcaaggctaacgcagcggttgccgctgccacggccgttggcgtcacgcttcccgtgaaaatggtcgaagccgccgagtcagatagcattaagtgggataaagccccctgccgtttttgcggtgtgggttgtagcgtattagtcggtaccaaagccggtaaagtcgtcgctactaagggcgatcccgaaagccctgttaaccgtggtttgaactgtattaagggttacttcctgtcgaaaatcatgtacggcaaggacagattaactacgccgctgctgcggatgaaagacggcaaataccacaaagaaggcgagtttaccccagtaagctgggatgttgccttcgatactatggccgcaaagtggaaaaacagcatcgccactaaggggccaacctcagtcggtatgttcggctcgggccagtggaccatttgggaaggttatgccgcctctaaattacataaggccggattcttaaccaacaatatcgaccctaacgcgcgccactgtatggcatcggccgtaggtggctttatgcgcaccttcggtatcgacgagcctatgggttgttacgatgacttagaagccgccgaccaatttgtgctctggggcgctaacatggccgagatgcaccctattctgtgggcacgcttatccgaccgtcgtttaagccacaaagactgccgcgtacatgtgctatccaccttcgagaaccgcagtttcgacttagcggacaaccctatggtgttccgtccacagtcagacttagtgatcctcaactttatcgcgaactacatcattcaaaacaaagccgtgaatacagactttgtgactaaacatactaagtttgcccttggtgtggatgatatcggttatggcctgcgtccagatcatccgttagagaagaaagccaaaaacccaggcaatggtaaatccagccctatcagcttcgaagaatacgctaagttcgtcagcacttatacactggaatatgcggcgaaaatgagtggtgtagagcctgaaaaattagaaaccttagctaaggcctatgccgatcctaaggtcaaagtcatgagtctgtggaccatggggatcaaccagcacgttcgtggcgtgtgggcaaacaacatgctctacaacatccacttactgacaggtaaaatcgccaccccaggcaacagcccattctcattaacgggtcaaccttcggcctgtggtactgcccgtgaagtcggcaccttcgcccaccgcttacctgcggatatggaagtggccaacgataaacaccgcgccatcacagaaaaagtgtggcaggtaccagaaggcaccattccgccaaaacccggcttccatgccgtgctgcaaagccgcatgctcaaagacggtaaactcaactgctattggaccatgtgtaccaacaatatgcaggcgggtccgaatatcaacgatgaaatctaccccggtttccgtaaccctgaaaactttatcgtggtctccgatccatacccaaccgtcaccgccatggccgccgacttaattctgcccaccgccatgtgggttgagaaagaaggtgcctacggtaacgccgagcgccgcacccatatgtggcatcaacaggtcaaagcgccagaaggggctaagtcggatctgtggcaattagtcgagttctcaaaacgctttaaagtgtctgaagtatggcccgctgagcttatcgctaaacagccagaatatgctgacaaaacgctttatgaagtgctgtttgccaacggcgtcatcaacaagttcccaaccacagattgtaagggcgacttaaacgatgaaagcgcgcactttggcttctatctacaaaaaggcattttcgaagaatacgctgccttcggtcgcggccatggccatgacttagccgacttcgaccgttaccacgaaacccgcggcctacgctggcctgtggttgagggcaaagaaaccctgcgccgcttcgttgaaggtagcgatccttatgtgaagtcaggtgaaggctacaagttctacggtaaacccgatggcaaagcggtgattttcgccctgccctacgagcctgcggcagaagagccaaatgaagaatacgatctgtggatgtctaccggccgtgtactcgaacactggcatacaggttcgatgaccgcccgtgtacctgagctgtaccgcgcttaccccgatgcacaaatctttatgcatccagaagacgctaaggcccgtggtctacaacgtggtgatgaagtgctagtcgcatccccccgtggtgaggtcaaaacccgtgtcgaaaccaaaggtcgtaacaaaccgccacgcggcgtggtgtttatgcccttcttcgatgcgcgtcagttagttaacaagttgattctggatgcgaccgatccactgtcaaaagaaactgactttaagaagtgtcccgtaaaagtgatgaaggcctaag

SEQ ID NO: 222848 - DNA, 2482 bp, Unknown
  Bacterial polypeptide expressing nucleotide sequence isolated from the Sargasso Sea
tatgagcattagccgccgcgagtttctcaaggctaacgcagcggttgccgctgcgacggccgttggcgtcacgcttcccgtgaaaatggttgaagccgccgagtcagataatatcaagtgggacaaagccccctgccgtttttgcggtgtgggttgtagcgtattagtcggtaccaaagcgggtaaagtggttgccaccaaaggcgatccagaaagcccagttaaccgcgggctaaactgtattaaaggctacttcctgtcgaaaatcatgtacggcaaggacagattaaccacgccattactacgcatgaaagacggcaaataccacaaagaaggcgagtttaccccagtaagttgggatgttgccttcgatactatggccgctaagtggaaacacagcatcgccactaaaggcccaacctcagtcggtatgttcggttctggtcagtggacgatttgggaaggttacgctgcatctaaactgcataaagctggattcttaaccaacaacatcgaccctaacgcccgccactgtatggcctcagcggtcgttgggtttatgcgtaccttcggtattgatgaaccgatgggctgttacgacgacttagaagccgccgatcactttgtgctctggggcgccaacatggccgagatgcatccgatcctgtgggcacgtttatctgatcgccgtttaagcagtaaagactgtcgcgtgcatgtactatccaccttcgagaaccgtagcttcgatcttgcggataacccgatggttttccatccgcaatcagatctggtgatcctcaactatatcgccaactacatcattcaaaacaaagcggtaaatactgactttgtgactaaacacactaagtttgccctcggtgtagatgatatcggctatggcctgcgtccagatcatccgttagagaagaaagccaaaaatcctggcaatggtaaatctagccctattagcttcgaagaatacgctaagttcgtcagcacttatacgctggaatacgcagcaaaaatgagtggtgtagagcctgaaaaattagaaaccttagccaaggcctatgccgatcctaaagtgaaggttatgagcctgtggaccatggggattaaccaacacgttcgtggagtgtgggcaaacaacatgctctataacattcacttactgacgggcaaaatcgccacacctggcaacagcccattctcactgacaggccaaccttcagcctgtggtaccgcccgtgaagtcggcaccttcgcccaccgcttacctgctgatatggtggtggataacgataagcatcgcgcgatcaccgaaaaaatgtggcaagtgcctgaaggcacgattccacctaaacctggctaccatgccgtgctgcaaagccggatgctcaaagacggtaagctaaactgttattggactatgtgtaccaataacatgcaagccggcccgaatatcaacgatgaaatttacccgggattccgtaatccagagaactttatcgtggtatccgatccttacccaaccgtcaccgccatggcagcagaccttattctaccgaccgccatgtgggtcgagaaagaaggcgcctacggtaacgccgagcgccgcacccatatgtggcatcaacaggttaaagcgcctgagggagctaaatcggatctgtggcaattagtcgagttttcaaaacgctttaaagtgtctgaagtgtggcccgcagagcttatcgctaaaaagcctgaatacgctgacaagaccctttatgaagtactgtttgccaatggtgtcatcaacaagttcccgactaccgattgtaagggcgacctaaacgacgaaagtgaacactttggcttctatctacaaaaaggcatcttcgaagaatacgccgccttcggtcgcggccatggccatgacttagccgactttgaccgttaccacgaaacccgcggtctacgctggccagtggttgagggtaaagaaaccctgcgtcgcttcgttgaaggtagcgatccttatgttaaggcaggtgaaggctttaagttctacggtaaacccgatggtaaagcggtaattttcgccctgccttacgaaccagcagcggaagagcctaactcagaatacgatctgtggatgtctaccggccgcgtgctcgaacactggcatacaggttcgatgaccgcccgtgtacctgagctctatcgcgcctatcctgatgcacaaatctttatgcatcctgaagacgctaaggcccgaggtctgcaacgtggtgatgaagtgatagtggcatctccccgtggtgaggtcaaaacccgtgtcgaaaccaaaggccgtaacaaaccgccacgcggcgtggtgtttatgcccttcttcgatgcgcgtcagttagttaacaagttgattctggatgcgaccgatccactgtcaaaagaaactgattttaagaagtgcccagtaaaagtgatgaaggcctaa

SEQ ID NO: 222849 - DNA, 829 bp, Unknown
  Bacterial polypeptide expressing nucleotide sequence isolated from the Sargasso Sea
gccaacccggatctgccggaaatcgacgactattacgagccgttcgatttcgattatgaccacctgaaatccgccccggaaatgaaagcctttccaaccgcgcgtccgcgttcgcgcatctccggcgaacggatggaaaaaatcgaaaagggccctaactgggaagaaattctgggcggggaattttcgaagcgctcggaagattataacttcgaaggtatccagaaagacatctacggcgaatacgaaaatacattcatgatgtatttgccgcgtttgtgcgaacactgcctgaacccggcatgtgcagctagttgtccttccggtgcgatctataagcgcgaagaagacggtattgtcctgattgatcaggaaaaatgccgtggttggcgcatgtgcgtttcgggctgcccgtacaagaaggtttattataactggtcaacgggcaagtcggaaaaatgcacgctttgctatccccgtattgaatcgggtaacccaaccgtctgttcggaaacctgtgtcgggcgcatccgctatattggtgtgatgctttacgatgcagacaagatcgaagcagcggccaatgctgaggaaaccaccgatctttatgacgcccagcttggcgtattccttgatccgaaagacccggaagtgattgccgctgcgcgtgctgatggtgttcccgaagattggatcaaggcggcacaggaaagcccgatctggaaaatggccatggagtggaaggttgccttcccgctacatccggaataccgcacgcttccgatggtgtggtacatcccgcctctttccccaatccagaatgcggcag

SEQ ID NO: 222850 - DNA, 883 bp, Unknown
  Bacterial polypeptide expressing nucleotide sequence isolated from the Sargasso Sea
ctgccgcagatcgacgactactacgagcccttcacgttcgactacgaccacctgcagtcggcgcctgaaagcaaggccgcgcccaccgcgcgcccacgcagcctcatcaccggcaagcgcatggagaagatcgagtggggcccgaactgggaagaaatcctgggcggcgagttcagcaagcgcagcaaggacaagaacttcgacgatgtccaaaaggacatctacggccaattcgaaaacaccttcatgatgtacctgcctcgcctgtgcgagcactgcctgaaccctgcctgtgtggcatcgtgccccagcggctcgatctacaagcgcgaggaagacggcattgtgctgatcgaccaggacaagtgccgtggctggcgcatgtgcgtgagcggttgcccctacaagaagatttactacaactggcagtcgggcaaggccgagaagtgcatcttctgctacccccgcattgaggcgggccagcccaccgtgtgctccgaaacctgcgtgggccgcatccggtatctcggcgtgctgctgtacgacgcagaccgcatccaggaagctgccagcgtggaacgcgaccgcgatctgtaccaggcccagctcgacatcttcctggaccccaacgatccagacgtcatcaagcaggcccgcattgacggcattcccgacagctggatggaagccgcccgcaacagcccggtctacaagatggccgtgcagtggaaggtggccctgccgctgcaccccgagtaccgcacgctgcccatggtctggtacgtgccaccgctctcgcccatcacggccgcagccaacgcgggccatgtgggtgtgaatggcgacattccagacgtctcgcaactgcgcattcctgtgcagt

SEQ ID NO: 222851 - DNA, 832 bp, Unknown
  Bacterial polypeptide expressing nucleotide sequence isolated from the Sargasso Sea
tttgatttcgattaccagcatctgcacaccgcgcccatttccgagcatcagccggtagcacggccgcgttcggtgatctcagggaagcgcatggagaagatcgagtgggggcccaactgggaggaaattctcggtaccgagtttgccaagcggcgcaaggacaagaacttcgaccagatccaggcagacatctacggtgagtacgaaaacaccttcatgatgtacctgccgcggctgtgtgagcactgcctcaatccggcctgtgctgcgtcctgcccgagcggtgccatctacaagcgtgaagaagatggcatcgtgctgattgatcaggagaagtgtcggggctggcgcatgtgcatcagtggttgcccgtacaagaagatctactttaactggaagagcggcaaatccgagaaatgcatcttctgctatccgcgcatcgaggcgggcatgccgactgtgtgttcggaaacctgcgtcgggcgtatccgctatctgggcgtgttgctctacgacgccgaccgtatccaggaagtggctagcgcgccgagcgagcaggacctgtaccagaagcagctggagattttcctcgatcccaatgatcccgaggtgattgcccaggcgctgagcgatggcgtgccgatgtcggtgatcgaggcggcccagcagtcgccggtctacaagctggcggtggactggcagctggcgctaccgctgcaccctgagtaccgcaccctgccgatggtctggtatgtcccgccgctgtcgccgatccagaacgcggccagcaatggcagcgtcagcatggacggtgtactgcccgatgtcgaca

SEQ ID NO: 222852 - DNA, 2308 bp, Unknown
  Bacterial polypeptide expressing nucleotide sequence isolated from the Sargasso Sea
catgaatagacgtgactttatcaaagccaatgcggtgattgcagcagcgggcgcagcgggcttagcgctgccggcatcggcgagcaacttaatcaccagctcagaacaaaccaaattagagtggaacaaagccccatgccgcttctgtggtacgggctgctctgtgattgtcgcgacccgcgagggcaaagtggttgccacccacggcgatgcaaacagcgaagtgaaccgcggccttaactgtattaaaggttacttcctgtcgaaaattatgtacggcagcgatcgtttaacgacgccaatgctgagaatgaccgacggcaagtacgacaagcacggtgaatttactcccatcagctgggatagcgccttcgatatcatggcgcagaaatggaaggaaactttaaaagccaaaggcccgaccgcagttgggatgtttggctcgggccagtggaccgtttgggaaggctatgccgcggttaagctgatgaaggcgggctttggctctaataacatcgacccgaatgcgcgccactgtatggcgtcagccgttgtcggatttatgcgtaccttcggtatcgatgagcctatgggctgttatgatgatatggaagcggccgatgcctttgtgctttggggctccaacatggctgaaatgcacccgattttatggactcgggtcaccgatcgccgtttaagtgcatcccatgtgaaggtcgcagttttatcgacgtttgagcatcgctccttcgacttggcagatttaccgattgtatttacaccgcaaaccgacttagccatcctgaactttatcgccaactacatcattcaaaacgataaagtaaactgggactttgtgaagaagcacgtgaacttccgccaaggtaccacggatatcggctacggtttacgtccaacccatccgctggagcagaaagccaaaaacgtgaaaacagcaggggattcgactccgattgatttcgatacctttaaggcctttgtcgccgaatatacggtggagaaggtcagtaagatgtcgggcgtgcctgaggctaaactcatcgaattggccaaactctatgccgatcccgagactaaagtcacttccttctggaccatgggctttaaccaacatacccgtggtgtgtggtgtaacaacctgatttataacattcacttactgacaggtaagatttcaacgccgggtaacagcccgttctcgttaaccggtcagccttctgcctgtggtacggctcgtgaagtgggaaccttctcccatcgtttacccgccgacatggtggtaacaaaccctgagcatagaaaacacgccgaagaaatttggaagatccccagtggcattattccgccaaaacccggttatcacgccgtcgaacaaaaccgccgcttaaaagatggcgacttgaactgctattgggtgcaagtgaacaacaatatgcaggcagggccgaacatcaacgaggaaggcttacctggctatcgcaatcctgccaactttattgtggtgtccgatgcgtatcccacagtcacgacccaagctgcggacttaattctgccaaccgccatgtgggttgagaaagagggcgcctatggtaatgctgagcgtcgtactcaattttggcatcaaatggtgcaggcgccgggtgagtcccactcggatctgtggcagttgatggagttctctaagcgctttacgactgatgaagtctggtcgaaggaagtcttagccgctaacccacaatttaagggcaaaaccttatttgaagtgctgtacaaaaacggcaacgtagataagttcccgctggccgataccgatcctaagtatctgaacaacgaagcgaaacattttggcttctatgtccaaaaaggcctgtttgaagaatacgccacctttggccgtggccatggtcacgatttagcacctttcgatgcctatcacgaagcccatggtattcgctggccggtggttaatggtaaagaaaccaaatggcgtttccgtgagggcagcgatccttatgttaaaccgggttcaggctttgagttctacggtaaacccgatggccgcgcagtgatttatgccttgcccttcgagccgcccgcagagtcgccagacactgaatacgatatgtggttatccaccggacgggtgctcgagcattggcattcaggttcgatgacgcaacgcgtgccagagctttatcgtgccttccccgacgccgtgtgttttatgcacccagaagatgcgaaaaaacgcggtttacgccgtggggatgaagtgcgcgtggtgtct

SEQ ID NO: 222853 - DNA, 875 bp, Unknown
  Bacterial polypeptide expressing nucleotide sequence isolated from the Sargasso Sea
aatgaaaattcgctcccaggtcggtatggtgctcaatctcgacaagtgcattggctgtcatacctgttccgtcacttgcaaaaacgtatggaccagccgggaaggtgtggaatacgcctggttcaataatgtggaaacaaaaccgggcattggctacccgaaagaatgggaaaatcaaaaaaaatggaacggtggatggatgcggcggcgtggcgatgggaaaatcgagcctcgtatcggcggcaagtggcgagtgttggccaacctatttgccaacccggatttaccggaaattgatgactattacgagccattcgattttgactatcagcacctgcatacggccaaggccggcaagcatcaacccgttgcacggccccgatcgctaattactggcaaacgtataaaaaaaatagaatggggtcccaactgggaagaaatcctcggcaccgagtttgccaaacgccgcaaagacatcaacttcgaacaagttcaggcagacatctacggccagtttgaaaacaccttcatgatgtatctgccacggctatgcgagcactgcctaaaccctacctgtgttgcctcctgtcccagtggcgctatctacaagcgagaagaagatggcatcgtattgattgaccaggacaagtgccgcggctggcgcatgtgcgtatcgggctgtccctacaagaaaatttactacaactggaaaagcggaaaatcagagaaatgcatcttctgctacccacgtatcgaagcaggggagcccactgtctgttcggaaacctgtgttggccgcattcgttatctaggcatactgctctacgatgccgaccggattttcgaggtagcgagcaccgccgacgaacgcgacc

SEQ ID NO: 222854 - DNA, 1087 bp, Unknown
  Bacterial polypeptide expressing nucleotide sequence isolated from the Sargasso Sea
catgctcaaagacggcaagctcaacgcctactgggtgatgtgcaacaacaacatgcaagccggcccgaacatgaacgaagaggggctgcccggttatcgcaacccggccaacttcatcgtggtgtccgacccttatccgaccgtgaccgcccaggcggccgacctcatcctgcccaccgccatgtgggtggagaaagagggggcctacggcaacgccgagcgccgtacccagttctggcaccagcaggtcaagccgccggaaggggccaagtccgacctgtggcagctgatggagttctccaagcgcttcaaggtggaagaggtgtggccggcggaactcatcgccaagatgccggaagtgaagggcaagaccctgttcgacgtgctctatgccaacggccaggtcaaccagttcccgaaagagcagagcaagggagcactgaacgacgaggccgagcactttggtttctatgtccagaaggggctgttcgaagagtacgccaccttcggtcgcggccatggccacgatctggcgccgttcgatcagtatcacgaagcccgcggcctgcgctggccggtggtggacggcaaggagaccctgtggcgctatcgcgaagggttcgacccttacgtgaaagcgggcgaaggggtgcgcttctacggcaagccggacggcaaggcggtgatcttcgcgctgccctatgagccggctgccgaagcaccggacaaagagtacgacatgtggctctccaccggtcgcgtgctggagcactggcacaccggcaccatgacccgtcgggtgcccgagctctatcgcgccttcccggatgcggtgctgttcatgcacccggaagatgccaaggcccgtggcgtgcgccgtggtgaagaggtgatcgtctcctcccgccggggcgaggtgaagacccgggtcgagacccgcggccgcaaccgtccgcccaagggactggtgttcatgcccttcttcgacgcgagccagctggtcaacaagctgaccctggatgccaccgatccgctctccaaagagacggattacaagaagtgcgccgtcaaggtcgtcaaggcataa

SEQ ID NO: 222855 - DNA, 2491 bp, Unknown
  Bacterial polypeptide expressing nucleotide sequence isolated from the Sargasso Sea
catgaatagacgtgactttattaaagccaatgcggtgattgcagcagcgggcgccgcaggcttagcgctgccggcatcagccagcaatttaattactagctcagagcaaaccaaattagagtggaacaaagcgccttgccgtttctgtggtacgggctgctctgtgattgttgcgacacgtgatggcaaagtggttgcgacccacggcgatgcaaacagcgaagtgaaccgcggccttaactgtattaaaggttacttcctatcgaaaattatgtatggcagcgatcgtttgaccacgccaatgctcagaatgaccgatggcaagtacgacaagcatggtgaatttactcccattagctgggacagcgcttttgatatcatggcgcaaaaatggaaagaaaccctcaaggccaaaggccctaccgcagttggaatgtttggctcgggccagtggaccgtctgggaaggctatgccgcggttaaactaatgaaggcgggctttggctctaacaacattgatccgaatgcgcgtcactgtatggcgtcagccgtggtcggctttatgcgtaccttcggtatcgatgagcctatgggctgttacgatgatatggaagcggccgatgcctttgtgctgtggggctccaacatggctgaaatgcacccgatcctatggactcgagtgactgaccgccgtttaagcgcatcccatgtgaaggttgcggtactctcgacgtttgagcatcgctccttcgacttggcggatttaccgatagtatttacgccacaaaccgacttagccatcctgaactttatcgccaactacatcattcaaaacgataaagtaaactgggactttgtgaagaagcacgttaacttccgccaaggtaccacggatatcggctatggtttacgtccaacccatccgctggagcagaaagccaaaaacgtgaaaacggcaggggattcgactccgattgatttcgatacctttaaggcctttgtcgccgaatatacggtggagaaggtcagcaagatgtcgggtgtgccagaggctaaacttatcgagttagctaaactctatgccgatcccgagactaaagtcacgtccttctggaccatgggctttaaccaacatacccgcggcgtatggtgtaacaacctgatttataacatccacttactgacaggtaagatttcaacgcccggtaacagcccgttctcgttaaccggtcagccttctgcctgtggtacggctcgcgaagtgggaaccttctcccaccgtttacccgccgacatggtggtaacaaaccctgagcatagaaaacacgccgaagaaatttggaagatccccagtggcattattccgccaaaacctggttatcacgccgtcgagcaaaaccgccgcttaaaagatggcgacttgaactgctattgggtgcaagtgaacaacaatatgcaggcggggccaaacatcaacgaggaaggcttacctggctatcgcaatcctgccaactttattgtggtgtccgatgcgtatcccacagtcacgacccaagctgcggacttaattctgccaaccgccatgtgggttgagaaagagggcgcctatggtaatgccgagcgtcgcactcaattctggcatcaaatggtgcaggcgccgggcgaatcccactcggatctgtggcagttgatggagttctctaagcgctttacgaccgatgaagtctggtcgaaggaagtcttagcggcgaatccacaatttaagggcaaaaccttatttgaagtgctgtacaaaaacggcaacgtcgataagttcccgctggccgataccgatcctaagtatttgaacaacgaagcgaaacactttggcttctatgtccaaaaaggcctgtttgaagaatacgccacttttggccgtggccatggtcacgatttagcacctttcgatgcctaccacgaagcccatggtattcgctggccggtggttaatggtaaagaaaccaaatggcgtttccgtgagggcagcgatccttatgttaaacctggctcaggctttgagttctacggtaaacccgatggccgcgcagtgatttacgccttgcctttcgagccgcccgcagagtcgccagacactgaatacgatatgtggttatccaccggacgggtgctcgagcattggcattcaggttcgatgactcaacgcgtgccagagctttatcgtgccttccccgatgcagtgtgttttatgcacccagaagatgcgaaaaaacgtggtttacgccgtggtgatgaagttcgagtcgtgtctcgccgtggtgaaatcaaaacccgtgtcgaaacccgtggtcgcaacaaaccacctgtgggactcgtgttcgtaccttggtttgatgccagtcagctcattaataaagtcaccttggatgcgacagatccgctgtcgaaacaaaccgactttaagaaatgcgccgtgaaaatcgtcaaggtataa

SEQ ID NO: 222856 - DNA, 2491 bp, Unknown
  Bacterial polypeptide expressing nucleotide sequence isolated from the Sargasso Sea
atgaatagacgtgactttatcaaagccaatgcggtgattgcagcagcgggcgcagcgggcttagcgctgccggcatcggcgagcaacttaatcactagctcagaacaaaccaaattagagtggaacaaagccccatgccgcttctgtggtacgggttgctccgtgattgtcgcgacccgcgagggcaaagtggttgccacccacggcgatgcaaacagcgaagtaaaccgcggccttaactgtattaaaggttacttcctgtcgaaaattatgtacggcagcgatcgtttaacgacgccaatgctgagaatgaccgacggcaagtacgacaagcacggtgaatttactcccattagttgggatagcgccttcgatatcatggcgcagaaatggaaagaaaccttaaaagccaaaggccctaccgcagttgggatgtttggctcggggcagtggaccgtttgggaaggctatgccgcggttaagctgatgaaggcggggtttggctctaacaacatcgacccgaatgcgcgccactgtatggcgtctgccgttgtgggctttatgcgtaccttcggtatcgatgagcctatgggttgttacgatgatatggaagcggccgatgcctttgtgttgtggggctccaacatggccgaaatgcaccccattctatggactcgggtcaccgatcgccgcttaagcgcatcccatgtgaaggtcgcagttttatcgacgtttgagcatcgctccttcgacttggcagatttacctattgtatttacgccgcaaaccgacttagccatcctgaactttatcgccaactacatcattcaaaacgataaagtgaactgggactttgtgaagaagcatgtgaacttccgccaaggtaccacggatattggctatggtttacgtccaacccatccgctggagcagaaagccaaaaacgtgaaaacagcaggggattcgacgccgattgatttcgatacctttaaggcctttgtcgccgaatatacggtggagaaggtcagcaagatgtcgggcgtgcctgaggctaaactcatcgaattggccaaactctatgccgatcccgagactaaagtcacctccttctggaccatgggctttaaccaacatacccgtggtgtgtggtgtaacaacctgatttataacatccacttactgacaggtaagatttcaacgcccggtaacagcccattctcgttaaccggtcagccttctgcctgtggtacggctcgcgaagtgggaaccttctcacaccgtttacccgccgacatggtggtaacaaatccagagcatagaaaacacgccgaagaaatttggaagatccccagtggcattattccaccaaaacccggttatcacgccgttgagcaaaaccgccgcttaaaagatggcgacttgaactgctactgggtgcaagtgaacaacaatatgcaggcggggccgaacatcaatgaggaaggcttacctggctatcgtaatccggccaactttattgtggtatccgatgcctatcccactgtgacgactcaggctgcggacttaattctgccaaccgccatgtgggttgagaaagagggcgcctatggtaatgcagagcggcgtacccaattctggcatcaaatggtgcaggcaccgggtgaatcccactcggatctgtggcagttgatggagttctctaagcgctttacaactgacgaagtctggtcgaaggaagtcttagccgctaacccacaatttaagggcaaaaccttatttgaagtgctgtacaaaaacggcaacgtcgataagttcccgctggccgataccgatcctaaatacttgaacaacgaagcgaaacattttggcttctatgtccaaaaaggtctgtttgaagaatacgccacctttggccgtggccatggtcacgatttagcccctttcgatgcctaccacgaagcccatggtattcgctggccggttgtcgatggtaaagaaaccaaatggcgtttccgtgagggcagcgatccttatgttaaaccgggttcaggctttgagttctacggtaaacccgatggccgcgcagtgatttacgccttgcccttcgagccgcccgcagaatcgccagacactgaatacgatatgtggttatccaccggacgggtgctcgagcattggcattcaggttcgatgactcaacgcgtgccagagctttaccgtgccttccctgatgcagtgtgttttatgcacccagaagatgcgaaaaaacgcggtttgcgccgtggggatgaagtgcgtgtggtgtctcgccgcggtgaaatcaaaacccgtgtcgaaacccgtggccgtaacaaaccgcctgtgggactcgtgttcgtaccttggttcgatgccagtcagctcattaacaaagtcaccttggatgcgacagatcctctgtcaaaacaaaccgactttaagaaatgcgccgtgaaaatcgtcaaggtataag

SEQ ID NO: 222857 - DNA, 975 bp, Unknown
  Bacterial polypeptide expressing nucleotide sequence isolated from the Sargasso Sea
acctgacccgctacatcccggttcccaagaacccgcatggcctgaatacctccccggacggcaagtactttatgccaaatggcaagttgtcgccaacggtcaccattatttcgatcgagaagctggatgacctgttcgacggagcgattgagccccgtgataccgtggtgggtgagccagagctgggtcttgggcccctgcacaccacatacgacggtcggggtaacgcctacaccactctgtttatcgacagccaggtgtgcaagtggaacattgccgatgccatcaggcactacaacggcgaggacgtgaactacatccgccagaagctggatgtgcattatcagccgggccacaaccacgcgtctctgaccgaatcccgggatgccgatggcaagtggctggtggtgctgtcgaagttctccaaggaccggttcctgccggttggacctttgcatgcggagaacgaccagctgatcgatatctccggcgaggagatgaagctggttcacgatggcccggccttcgccgagccccacgactgcattctggtccgtcgtgatcagatcaagaccaggaagatctacgatcgtgacgatccgttctttgcctctgccgttgagcaggccaagaaggatggcgttactctggaagccgacaacaaggttatccgcgatggcaacaaggttcgtgtttacatgacctcaattgcgccgcagtacgggatgacggagttcaaggtgaagcagggtgatgaggtgaccgtgtatgtgaccaacctggacaccattgaggatgtgacccacggtttctgtatggtgaaccatggtgtgagcatggaggtcagtccgcagcagacggcttcggtgaccttcaaggcggatcgtcccggggtgcactggtactactgcaactggttctgccatgcgctgcatatggagaagcggggtcgcatgattgtagagaaagcctgat

SEQ ID NO: 222858 - DNA, 724 bp, Unknown
  Bacterial polypeptide expressing nucleotide sequence isolated from the Sargasso Sea
cgagccgcacagtatggcgcccgggtggcgttgatcgaggcgggaccgcttggcggcacatgcgtcaatgtgggttgtgttcccaaaaaaatcatgtggaacgcggctcacttcgcagacgcgctcgccatttcccaggactacggtttcaagttgcccgaggcggaattcaactgggcctctttcaagaagacgcgggatgcctatgtggaacggctgaacggcatctatcttcgtaacctcgacggatccggagttgatctctttcagggctgggcaagctttgagtcctcccaccagataagggtgggggatacccttttaagtgcagaccatattctcattgccactggcggcaggcccacgattcccgatctgccgggtgctgaactaggtatcaccagcgacggcttttttgaattgaccgagcagcccaagcgcccgctcgtgatcggcgcaggttacattgcaacggaactcgccggtgttctccattcgctgggctcagacgtcacgatgcttctgcgcaaggacattctgctgcgcggatttgacaccacgctgagggaggctgtcatggatgaaatgcagtctgccggtgtcaacatcctgacctgcatccagatggaaagcataggacgtgaggacaacggccgtttggcggtccacagacaggatggagaagtcatcagtggttttgactgcgtgctgttgctatcgggcg

SEQ ID NO: 222859 - DNA, 541 bp, Unknown
  Bacterial polypeptide expressing nucleotide sequence isolated from the Sargasso Sea
gatgactcaacattttgattacgacttgctggtcattggcgcaggctccggtggcgtccgggccgccaggaagagcgccgaatttggtgcaaaggtagccgtggtagaggaggctgcactgggcggtacttgcgtcaacgtgggctgtatcccgaaaaaactctacgtttatgccagcgaatacgcagccgcctggcgagaatccgcgggatttggttggcagacggagggagtttcttttcactggaacacgctgcgaaacaacaagattaacgaggtcgcgcgactgaatgctatttatgcgcgtctgcttgaggcgcccggggtggatattattgagggtcacggtgcgctcgcggggccgcaagaggttgtggtgggagaatcccgctaccacgccgagaagattctgctcgctactgggacctggcccgccatgccagagatcccaggcatcgagctggcgctaacctctaacgacatttttgatatagagcgctttctcgagcggctacttatcgttgggtgggtggctacatcg

SEQ ID NO: 222860 - DNA, 295 bp, Unknown
  Bacterial polypeptide expressing nucleotide sequence isolated from the Sargasso Sea
ctggtcgtggggggcggctcgggggggatggggctggcacggcgggcggccgagctcggcgcgaacgctgcggtggttgaggcggccccgctgggcggcacctgcgtcaacgtgggctgcgtgcccaagaaggtgatgtggacggcggtgtgtggcaagaattcatttcgcgctgttctaccaagtattatcccccatcaactcacccagggcacaaaatcaggcaactctgaacgaggcgttcagggacgcgagggggtacggcttcgacgtcggcggcgcgccagactttgac

SEQ ID NO: 222861 - DNA, 871 bp, Unknown
  Bacterial polypeptide expressing nucleotide sequence isolated from the Sargasso Sea
tatgtggtggaatattgatataaattcatttagttggagtaatttaataaataataaagacatagaaattgatcgattaaatgaaatttataagaaaatattaagctctaataatgtaaagttattcgagaacaaaggtgttttcgtagataatcacactttaaaagtaggtgataagacaattacagctgataaaattcttatatctaccggcggtctaccttttttgcccaatattagtggtattaataatgttatcacttcaaatgaagccttccatttagaaaaaataccaaaaaaaatcattattaatggtggaggctatattgctgttgagtttgcaagtatatttaatggcctaggatctgaagtaacaattatttacagaggtgagcaaattctgaaaggttttgacttacaattaagaaattttcttgctgaagaaatcaaaaaaaaaggtatcaaattatttacctctcaagaaattgtctcaatagaagaatctgattctaaaaaaattgtaaagactaacaatgatttaaaaattgagactgatgtagtaatgtttgcaactggaagaatacccaatacaaggaatttaggccttgaaaatattggtgtaagaatgaatggtaaaggcgctgttatagttgattctaatcataagacaaatatttcaaatatttatgctattggagatgtcacagataggtttaatctaacgcctgttgctttaaatgaagggatttgttttgcagacactgtttttggaaataaaaataatttaatggattattcaatggtaccaacagcagtttttagtttgcctaatgtagccactgtaggtttaactgaagaggaagcaaaagag

SEQ ID NO: 222862 - DNA, 289 bp, Unknown
  Bacterial polypeptide expressing nucleotide sequence isolated from the Sargasso Sea
gccagaagctacctgaagaaatacggtgaagacaacgttaaagtgtacacctctagctttgcttctatgtacaccgcggtaacccgccaccgtcaaatgaccaagatgaagctggtatgcgcgggtaaagaccaaaaagtggtaggccttcacggaattgggcacggcatggacgaaattctgcaaggcttcgccgttgccataaaaatgggcgcgactaaagctgactttgatgcgtgtgtagctattcaccctaccagtgcagaagagtttgttacgatgacctagg

SEQ ID NO: 222863 - DNA, 286 bp, Unknown
  Bacterial polypeptide expressing nucleotide sequence isolated from the Sargasso Sea
aacaatctaaataaacgtgaaataaccttaataagaggagaagctcgtttagaagacaaacataaggtgtgcgtgtctgatgagtcatttaaaaccgagcatattattattgccactggtggaaaacctacaattcctgacatagcaggagcaagttatggcattacttctgatgggttttttgagcttgaggaaaaaccaaaaaatgtttgcatagtaggaagtggatacattgcagttgagtttgcaggaatgctctcagccctcggtacaaatgtccctatga

SEQ ID NO: 222864 - DNA, 673 bp, Unknown
  Bacterial polypeptide expressing nucleotide sequence isolated from the Sargasso Sea
atgactcaacactttgattacgacctgctggtcatcggcgcaggctccggcggcgtccgggccgcgaggaagagcgccgaatttggtgcaaaggtagccgtggtagaagaggccgcactaggcggtacttgcgtcaacgtgggctgtatcccgaaaaaactctacgtttatgccagcgaatacgcagctgcctggcgagaatccgcgggatttggttggcagacggagggaatttcttttcactggaacacgctgcgagacaacaagaccagcgagatcgcgcgactgaatgctatttatgtgcgcctgcttgaggcgcccggggtggatattattgagggtcacggtgcgctcgcggggccgcaagaggtagtggtgggagaatcccgctaccgcgccgagaagattctgctcgccacgggaacctggcccgccatgccggagatccccggcatcgagctggcactctcctctaacgagatttttgatatggagcgctttcccgagcggctacttgttgtgggtggtggctacatcgccaccgaattcgccagcatcttctcaggcctgggcgccagtgtcgtccaaagctatcggggcgagctgtttcttcgcggtttcgatcacgacattcgccgatttctggccgaagaaatgcgtaaagccggcgtgg

SEQ ID NO: 222865 - DNA, 398 bp, Unknown
  Bacterial polypeptide expressing nucleotide sequence isolated from the Sargasso Sea
tctgggtcaacattttgactatatctgcctaggcgcaggcagcggcggtatcgcctcagctaaccgagctgccatgcgtggcgctaaagtgcttctcatcgaagcaaaacatgttggcggcacctgcgtaaacgtgggctgcgtacccaaaaaagtcatgtggtatggtgcgcatatcgccgaggccatgaacctctacgccaaagattatggatttgatgtttcagtcaacaaattcgactggaacaccttagtaaacagccgcgaagcctatattggtcgcatccacgaggcctacggtcgcggttttaccaataacaaagtcaccctgctcaatggctatggccgtttcgttaatggcaacacgattgaagtaaatggcgagcactacacggctg

SEQ ID NO: 222866 - DNA, 732 bp, Unknown
  Bacterial polypeptide expressing nucleotide sequence isolated from the Sargasso Sea
tttgcaaaactccaattttgaatatgatttaattgtaatcggtgctgggtctggaggagtaagggctgccagggtagcagctggacatggtgcaaaggtagctatcattgaagaggaaagacctggaggcacttgtgtgttgaggggatgtgttccgaaaaaacttcttgtttatgcttcagagtttaaaaagcaagtttctgattctagaggttttggatgggaagttaaggatttttcccataactgggataatttaaacttatcattaaaaaatgagttagataggctttccgaagtttataagagtatgctttctaattcaggttgtaaacttatcaatggtactgcaagactagttggcaatcatgaagttgaggttaatagtaagataatacaatcaaaaaaaattttaattgcaactggcggagtgtcttatattcctgaaattgatgggttgagaaaaaatgcaataacttcaaatgaagcattgaaactctcaaatcttcctaagacaatagtgataatgggcagtggatatattgctattgaatttgcatgtatttttagtagttttggttctcaagttcatttggtttatcgtgcggatcttccattaaaaggttttgacaatgaaattagaaaaaatcttgagattgaattgcaaaaaaaaggcattaatttgtatcccaattctaaaatattaagcgttaagggaaaggacaaattaat

SEQ ID NO: 222867 - DNA, 397 bp, Unknown
  Bacterial polypeptide expressing nucleotide sequence isolated from the Sargasso Sea
gatggaaagttttgattatgacctaatagtaattggcgcaggttctggaggaactagaacagcaagagtttctgctggttatggtgcaaaaacagcagtagttgaagtagatagacctggcggaacctgtgttcttagaggttgtgtaccgaaaaaattattaatttatggttctgaattttctaaaaatgttgaggatgcaattggatatagttgggaagttggagacataaagcctaactggtttgatttaatagcaaaaaaaaataaagaactagatcgtttacatgagatttacaaaaatcttataattaattctggatgtgatttgcactatggatatggcaaattaatttcaaagaacaaagttcttgttacttataataataaagaaaaa

SEQ ID NO: 222868 - DNA, 247 bp, Unknown
  Bacterial polypeptide expressing nucleotide sequence isolated from the Sargasso Sea
atgcttgatctaattgttattggtgcaggatctgctggccttgctgcggccaaacggtctgctggctatggtaaatccgttatgatttgtgataacgatgccattggtggcacttgtgtgaatgttgggtgtgtgccaaaaaaactttggcatggcattgcccattttaatcaacatgtagctatggcaaaatgtcagggttggtccgtaaaaaatttatcatttgattggacaaaaattcaaccac

SEQ ID NO: 222869 - DNA, 307 bp, Unknown
  Bacterial polypeptide expressing nucleotide sequence isolated from the Sargasso Sea
ggcactattggcctaacagagccagaagctactgaagaatacggtgaagacaacgttaaagtgtacacctctagctttgcttctatgtacaccgcggtaacccgccaccgtcaaatgaccaagatgaagctggtatgcgcgggtaaagaccaaaaagtggtaggccttcacggaattgggcacggcatggacgaaattctgcaaggcttcgccgttgccataaaaatgggcgcgactaaagctgactttgatgcgtgtgtagctattcaccctaccagtgcagaagagtttgttacgatgacctagg

SEQ ID NO: 222870 - DNA, 175 bp, Unknown
  Bacterial polypeptide expressing nucleotide sequence isolated from the Sargasso Sea
atgccaaagtttgactacgatctcataacaatcggtgctggttctggcggagtgagggcttcacgtcttgcaggtgcttacggagctcgcgtggctatcatagaagagttgagagaaggcggtacctgtgtccttagaggatgtgtcccaaaaaaactattagtttatgggagcc

SEQ ID NO: 222871 - DNA, 354 bp, Unknown
  Bacterial polypeptide expressing nucleotide sequence isolated from the Sargasso Sea
tatgttcgatttaatcgtcattggggcaggttcgggtggcttagctgcggctaagcgagcagctgccgccaaaaaaaaagtcgcgttaattgaaaatgacagtgttggtggtacctgtgtgacctatggctgcgtgccaaaaaaaatgtggcatgccatttccatgtttgcgcatcaatcaacgattgccaaccatcacggatggtcatttgggtcaccgtcatttgattggaaaactgtaaagccaaaattatcagcgtatatacaatcattaaatcagcggcatgaacaaaagtgcttggatattggtattgaaatgattcgcggtaccgcacgattggcatcccccaccag

SEQ ID NO: 222872 - DNA, 266 bp, Unknown
  Bacterial polypeptide expressing nucleotide sequence isolated from the Sargasso Sea
taaagatggttcttcttctgagctaaatatagatggtgtgtttatggcaattggccacactccaaacgtagatttcctagatggattaattgagctagatgaaaagggatatgtaaaaactggcttcacaactgaaactagcacctctgttcccggagtcttcgcagcgggtgatgttgctgattcaatttatagacaagccgtaacggctgctggaactggctgccaagcagcaattgacgccgaaaggtggcttgaccattaat

SEQ ID NO: 222873 - DNA, 187 bp, Unknown
  Bacterial polypeptide expressing nucleotide sequence isolated from the Sargasso Sea
atgccaaagtttgactacgatcttataacaattggggctggctctggcggcgtaagggcctcacgcctagcaggttcctatggcgctcgtgttgctatagttgaagaactgagagaagggggtacatgcgttctcaggggatgcgtaccaaagaagttattggtatatggaagtcatgtcacggaag

SEQ ID NO: 222874 - DNA, 1108 bp, Unknown
  Bacterial polypeptide expressing nucleotide sequence isolated from the Sargasso Sea
atcgaacaatctggtcatggaacagtcactataggatctgttgaaaaatttattacagaaaatgcatgggaaaaaggttgggtaaaaccaattgcggttaagaatgagagaaaagagagtgtaggaataattggagctggtccagcgggtcttgcatgtgcagaagaattaagaaaagagggcattcaggtaactatttatgacagatacgatagatcgggaggattacttatatatggaataccaaattttaaacttgagaaacatgttgtgactagaagaacagaacttttagaacaaagtggtattaaatttgtacataattttgaagtaggcaaagatgcatctttaaaagaattaaggaaaaaacacaatgcaattttgattgcaacgggtgtttataaagcaagagagattgatttacctggcagtgatttggcaaatatatttcctgcaatggaatttctaacagcatcaaacaaaaaaggattaggagataaagttcaattatttgatgatggtactttaaatgcaaaaggtaaggatgttgtggttataggtggcggcgacacagcgatggactgtgtgagaactgcaatcagacaggatgctaaatcagttaaatgtatttacagaagagataaaaaaaatatgccaggatcttcaagagaggtacaaaatgctgaggaggaaggtatagaatttgtttggttgacaactccatctaaatttaacggaaaaaataaagtagagagtgtagaagttaataaaattaaactgggtgaaccagatgatagtggcagaagaagaccagaaataattgaaggatcaaattataatgttaaggctgatttggttataaaatctcttggatttgatcccgaggatttaccaaagttatttggagaggataatctcaatttgacaaaatggggaactataaaaattgattttgatactatggaaacttctgttccaggagtatttgcagctggagatattgtaagaggagcttctcttgtagtttgggcaattaaagatggcagagacgtatcaggacaaattcttaaatttataaattcaaataaaaaacttaaagttgcataat

SEQ ID NO: 222875 - DNA, 295 bp, Unknown
  Bacterial polypeptide expressing nucleotide sequence isolated from the Sargasso Sea
aatgttgagtccgtatctcttgctgacactaaggatggttcctcttctgagctaaatatagatggtgtatttatggcaattgggcataccccaaacgtagatttcttagatggattggtagaactagatgaaaagggatatgtaaaaactgggttcacaaccgaaactagtacctctgttcccggagtttttgcagcaggtgatgttgcagattcaatttatagacaagcagtaacggctgctgggactggctgtcaagcagcaattgacgccgaaaggtggcttgaccattaat

SEQ ID NO: 222876 - DNA, 1600 bp, Unknown
  Bacterial polypeptide expressing nucleotide sequence isolated from the Sargasso Sea
catgctcgacgccaatctcaagaaccaactcaaagcgtacctcgaaaagatcacgcgcccgatcgaactcgtcgcctcgctcgacgacagcgcgaaatcgcaggaactgctggcgctgctgaccgagattgcgtcgctgacggatcgcgtgaccgtgaccgaacgccgcgacgacgccgagcgcaagccgtcgttctcgatcggcgagcccggcaagccggccggcatccgcttcgccggcattccgatgggccatgaattcacgtcgctcgtgctcgcgctgctgcagacgggcggccatccgatcaagctcgacgacgacgtgatcgaacagatccgcgcgctcgacggcgactacgcgttcgagacgtatttctcgctgtcgtgccagaactgcccggaagtcgtgcaggcgctgaacgtgatgtcgctgatcaacccgcgcatccgtcacgtcgcgatcgacggcgcgctgttccagggtgaagtcgagtcgcgccagatcatggccgtgccgacgatgttcctgaacggcgcctcgttcggccaaggccgcagcagcgtgaaggaaatcctcgcgaagctcgatacgggcgccagcgcgcgtgccgcgaagtcgctcgagaacaagccggtgttcgatacgctgatcgtcggcggcggcccggcaggcgctgcagccgcgatctactcggcgcgcaagggcattgcaacgggcgtggtcgccgagcgtttcggcggccaggtgctcgatacgatggcgatcgagaacttcgtgtcggtgcaggaaaccgaagggccgaagttcgcgaccgcgctcgaacagcacgtgaagcagtacgacgtcgacatcatggacgtgcagcgcgccgatgcgctgattccgggcgacgtgcaccagatccgcctcgcgaacggcgcggtgctgaaggcgaagacgatcgtcctcgcaaccggcgcacgctggcgcgaaatcaacgtgccgggcgagcgcgaataccgcaaccgcggtgtcgcgtactgcccgcactgcgacggcccgctgttcaagggcaagcgcgtcgcggtggtcggcggcggcaactcgggcgtcgaggccgcgatcgacctcgccggcatcgtgaaggccgtcacgctgatcgaatacggcgcgcaactgcgtgcggacgaagtgctgcagcgcaagctgcgcagcctgccgaacgtgacgatcgtcacgcaggcgcaaacgacggagctgaccggcgacggcagcaagctgaacgggctcgtctacaaggatctgcgctcgggtgacacgcagcgcatcgatctcgaaggcgtgttcgtgcagatcggcctcgtgccgaacaccgagtggctgaagggtacggtcgaactgtcgaagcacggcgagatcgtcgtcgatgcacgcggcgcgacgtcggtaccgggcgtgttcgcggccggcgacgtgacgacggtgccgttcaagcagatcgtgatcgccgtgggcgaaggcgcgaaggcgtcgctcggcgcgttcgaccacctgatccggcaggacgttgcaccggttgccgccgcgcagccgcaggccgaggaagcggtcgccgcgtaa

SEQ ID NO: 222877 - DNA, 313 bp, Unknown
  Bacterial polypeptide expressing nucleotide sequence isolated from the Sargasso Sea
cctgcgctcgggcgaaacgaagagcatcgagctcgaaggcgtgttcgtgcagatcggcctcgtgccgaacaccgaatggctgaagggcacggtcgagttgtcgaagcacggcgagatcgtcgtcgatgcgcgcggcgccacgtcggtgccgggcgtgttcgcggccggcgacgtgaccacggttccgttcaagcagatcgtgattgccgtaggcgagggtgcgaaggcgtcgctttccgcgttcgatcacctgatccgcaacagcgacgcagacgaagtggtcagcgaggcggaagctgaagcggcagtttga

SEQ ID NO: 222878 - DNA, 1132 bp, Unknown
  Bacterial polypeptide expressing nucleotide sequence isolated from the Sargasso Sea
aatgagccagacaaaagtagaagcaccatttgtagagaacaacagaccatttagaaatttaattatcaatggtgatatgagtatttctcaaagaggaacatctcaaagtggtgtggccaacaacgctaatgaagggcatgacactcctgttgataggtttggtttatttttttatggcaatgagggtggagccgcaacagtttcaagagattctgacgtgccatcagacaccacttatggtaaatttaatacatcaattaagatagatgttacaacagcagatacaagtattggagtaactggttctcactctttacaacagaccatagaatcaagttttatatttcattcaggatgggattacacaaattcatcatctaaaataacattacagttttgggctaaatcagttaaagctggagactatcatgttatgtttagagaccatgatgcaagtggtgaaagatactatgtatcaaaatatactcttgttgctaacacgtggaaacatgttgaaatagttgttccaggaaacagtgatttagtttttaataatgataatggagagggcttggaggtaagatggatgttatcaacaggtgatgatagagatggcgcaactgctgatacatggtttaaccctggttctgattattttcaatcaacaagcacacaagttaatttttttgatagcactgataatgaattctttttaacgggcgttcaactagaggtaggagatgttgcctctgcttttgagcatctcccaacagatattcaacagtatagatgtgagcgttattatcaagttatagatttcacaaatacgtttgcacaacctggtaatgcttacactgcctctgcagctgtaactaattttcgtttacacacagagatgagggcagacccaactataactttagcaagtgctggtggtggtagtggagggctagcttttttaacaagtgctggtgcttatccaggcacagtaggaagtcatacagctgggggcatatctactcatcaatttaaaatggatgctggtagttattctggtttagaaaatggtggtgcatcccccttgtatgtgactggtcacggccataaacacgaagctagtgcggagtattaa

SEQ ID NO: 222879 - DNA, 195 bp, Unknown
  Bacterial polypeptide expressing nucleotide sequence isolated from the Sargasso Sea
aatgccacattatgaatatgatttatttattattggcggcgggtctggcggtatacgtgcagcaagaatatcatctaatctaggtgcacgtgttgctttagcagaagaaagtgatttaggcgggacctgtgtaaatgtcggctgtgttccaaaaaaacttctattttatgcctcacacttcgcagaagatttcaa

SEQ ID NO: 222880 - DNA, 561 bp, Unknown
  Bacterial polypeptide expressing nucleotide sequence isolated from the Sargasso Sea
tatgtcaaaatttgattacgatcttattgttattggagcaggttcgggaggcactagaacagcaagaatttctgcatcatatggtgccaaagtattagttgtagagggtgatagagctgggggcacatgcgtacttagaggttgtgttcctaaaaaattattggtgtatgcgtctcaattttctgaacaagtgtcagatgcagaaggattttgctggcaagtaagtaattttcaaagtaactggcatgaacttattctaaaaaagaataaagaattagatagactgcatgaaatttatgttaatttaataaaaaattcaggctgtgacttaatttcaggctggggtaaaattacaggaccaaatactgtttcaataataaaagaagataataaaaaaattgaattatcttctcaaaaaatcatgatagctgctggtggtgaatcatcttttcctaactttgaaggaaataattacatgattaactcagataaagctttggatcttctcgaattaccagattctattgcgatttacggatctggctatattgcagttgaatt

SEQ ID NO: 222881 - DNA, 567 bp, Unknown
  Bacterial polypeptide expressing nucleotide sequence isolated from the Sargasso Sea
gatgcaagagtttgactatatctgtattggcggtggcagtggcggcattgcctcagccaaccgggcagcaaaacacggcaagaaagtcctgcttattgaagcaaaagcagtgggcggtacctgtgtaaatgtgggctgtgtgccgaaaaaagctatgtggtacggcgctcaggtagcagaagccattcataagtacgggccggattacggctttgatgtaacggtaaataaatttgactggtctacgctggttaagaaccgtcaggcgtacatatctcgcattcatgcctcttacgaccgggtgctgggcaacaatcaggtaaccctgctcaaaggttatgccaaattcgttaacaacactacggtggaagtcgacggtgaacagtacactgccccgcatattcttatcgcaacaggcggtaagcccttccgcccggatatccccggcgcagattacggtatcgactcggacggtttctttgagctcgacgagcagccaagacgtgttgccgtagtaggcggtggttatataggtgtggaactggctggcgtgctgcacgcgctggg

SEQ ID NO: 222882 - DNA, 622 bp, Unknown
  Bacterial polypeptide expressing nucleotide sequence isolated from the Sargasso Sea
atgccaaagtttgactacgatcttataacaattggggctggctctggcggcgtaagggcctcacgcctagcaggttcctgtggcgctcgtgttgctatagttgaagaactgagagaaggcggtacatgcgttcttaggggatgcgtaccaaagaagttattggtctatggaagtcatgtcacggaagagattacggacgctgaaggttatggttggagctttgaatcagtagaccacaattgggcaaaaatgattcaagcaaaaaataatgaactcgaccgtctccaccagatatatgtaggtttgctggataaagcgggcgtagagcgtatcagcgggcgaggtgtattggctgacagaaacactgttagagtaggcgaaaaagaaatcaccgctgaacgaattttagttgcggtcggcggatggccaaataaaccggatattcctgggatagagcattcaataagttcaaatgaagcacttgacctgagtgagagacctaaacgcatcgtgatagtcggttcaggctatatagctgtcgaatttgctggaatatttgcaggatttggatccgaggtagatattgtttttagagcggataaagtactgagaggatttgatt

SEQ ID NO: 222883 - DNA, 181 bp, Unknown
  Bacterial polypeptide expressing nucleotide sequence isolated from the Sargasso Sea
aatgacacattttgattatatatgtattggcggtggcagcggtggtatcgcatctgcaaaccgtgcagctaaacatggaaagaaggccgccatcattgaagcgaaagatattggcggtacttgcgtgaacgttggctgcgtgcctaaaaaagccatgtggtacggagcacaggtggctgaa

SEQ ID NO: 222884 - DNA, 719 bp, Unknown
  Bacterial polypeptide expressing nucleotide sequence isolated from the Sargasso Sea
tatgactgattataaatttgatttatttgttattggaggaggttcaggtggcgttcgagcagcaagagtagcatcttctaatggactaaaagttggtttagctgagggttgggatttaggaggtacttgtgttaatagaggttgtgttcctaaaaaactatattcctatgcatctcatattcgtgatgattttgatttgatggattcttttggttggtcaatcaccaaaaaaaaattttcttggaaaaagctggttgataataaaaaaaaagaactttctagattaaatggtatttattcatcattactcattaactcaggtgtagaaatatttaggagttacgcgagctttgtatccccaaagtcaattaaagttggaaacaaaataatacattctaaaaaatttttaattgctgttggaacaaaaccaagaaagctcgattttttaacttcaaatgaaattattacttctgatgaagcttttgatttaaagaatttacctaaaagtattatgattttgggcggtggttacatagcagtagaatttgcgtccattttcaatggtttgggggttgatactacaatttgtattagaggaaaaaaaatccttaaaggttttgatgacgatgttgttgagcatctaatgaacagtatgaaacataaaggagttaaatttattactggggagttccctgacgaaattaaaaaagaaagtaatt

SEQ ID NO: 222885 - DNA, 304 bp, Unknown
  Bacterial polypeptide expressing nucleotide sequence isolated from the Sargasso Sea
atgtctcgctatgagtatgatttatttgtaattggcgggggttctggcggcatacgcgccgctaggctttcttctagttttggtgcacgtgttgctatcgcagaagaaaaatatcttggtggtacctgcgtgaatgtaggttgtgtcccaaagaaattatttttttacgcatcccatttttcagaagaatttaatcatgctaagagttatggctggtattacaataataataaatttgtatgggatgatttaattaaaaataagaataaagaaataaaacgtctcaatggtatatatcaataaa

SEQ ID NO: 222886 - DNA, 664 bp, Unknown
  Bacterial polypeptide expressing nucleotide sequence isolated from the Sargasso Sea
gttgagtaatcaaattaaaaacaatatagaatatgatttaattgttattggtgcaggttctggaggtgttagggctgctagaattgcagcaaattatggcgctaaagttgcaattgtggaaagtgtaagagtaggtggaacctgtgttctaagaggatgtgtgccaaaaaaattattagtttatggtgctcagtttgcacaacaaattaagtctgctgaaggttatggttggtcatttcagggtgcaaagcatgattggaatagtttaattaaagctaaaaatatagaattagatagattgaataaaatatatattggtttattaagtaaagtagatatttttaatggttatggagatattttaagtagtaatgagattgttgtaggagataaaatattaaaaactaaaaatattattattgctgttggtggaaaaccctttatgccaaatatatcaggcgttgagtattgtattgactctgatcaagcattagatctcccttctttacctaaaagtattgttatttatggaggtggctacatagctttagaatttgctggaatattcaatttattaggttctaaagttactttaatatataggggaaaatatttattaagagggtttgatgaagaattatctcattttattactgaagagtat

SEQ ID NO: 222887 - DNA, 951 bp, Unknown
  Bacterial polypeptide expressing nucleotide sequence isolated from the Sargasso Sea
cgtgggtgtgtaccgaaaaagcttctgatttatggcgcgcactatgctgatcatatagtggatgcacgaaattacggctggacgattgacgccaggcacgattggggggcactcatcgagaataaaaatgcagagatggaccggctcaatggcatctacatgcgcatcttaaaaaataataacgtggatctgcatgagggtcgcggtgttctggaggatgagcatacggtcaacgttgacggcaaacggatcactgcagaaaatattcttattgcggttggcggttggccctcaacgccggaaatccccggcgttgagcacgtaatcagctccaatgaagcacttgaactcccatcactgcccaaacgcatggtggtggtaggaggcggttacatcgctgttgagtttgcgggcatctttgccagtctgggcgtcgatgttaccgagatcgtgcgagccgatacccttctccggggatttgatgaagatattcgccaggcccttaacgaggaaatgtcaaagcatggcatcaatatcatgtcgaaaaccgtgatccaacgcatcgagaaacaggataacgtgtatcgtctgcacctggcaaataacgatatcatcgagaccgacctcgtgatgtacgccaccggccgacgcgccaatacggagaacctgggcctggaaaatattggtgtcgctcttaaggataatggcgctgttatagtggatcagtggaaccgcacgtcggtggataatatttacgcggtgggtgatgtaacagaccgcgttcagctgacgcctgtggccattcaggaagggactgctgtctcggagacgctcttcaataataacccaatcaccgtcgactatggtgatgtgccgacggccgttttttcgacgccccctatcggaacagttggccttacggagcaacaggctcgccagaaatatggcaag

SEQ ID NO: 222888 - DNA, 856 bp, Unknown
  Bacterial polypeptide expressing nucleotide sequence isolated from the Sargasso Sea
gattggggggcgctcattgataataaaaatgcagaaatggaccggctcaatggcatctacatgcgcatcttaaaaaataataacgtggatctgcatgagggtcgcggtgttctggaggatgagcatacggtcaacgttgacggcaagcggatcacggcagaaaatattcttatcgcggttggcggttggccctcaacgccggaaatcagtggcgttgagcacgtcatcagttccaatgaagcacttgaactcccatcactgcccaaacgcatggtggtggtaggaggtggttacatcgctgttgaatttgcgggcatctttgccagtctgggcgtcgatgttactgagatcgtgcgggccgataccgttctccggggatttgatgaagacattcgccaggcccttgatgaggaaatgtcaaagcatggcatcaatattatgtcgaaaacggtgatccaacgcatcgaaaaacaggagagcgtatatcgtctgcacctagagaataacgatgtaatcgagaccgacctcgtgatgtacgcgaccggccggcgcgccaatacggagaacctgggccttgaaaatattggtgtcgctctaaaggacaatggcgctataatagtcgatcagtggaaccgcacgtcagtggataatatttacgccgtgggtgatgtaacagaccgcgtccaactgacgcctgtggccatccaggaaggggcggctgtctcggagacgctcttcaataataacccaatcaccgtcgactatggtgatgtgccgacggcggttttctcgacaccccctatcggaacagttggccttacggagcaacaggcccgccagaaatatggcaaggtgg

SEQ ID NO: 222889 - DNA, 640 bp, Unknown
  Bacterial polypeptide expressing nucleotide sequence isolated from the Sargasso Sea
atgtctgaatacaattacgatcttatcaccattggcgctggttctgggggtgtcagagcctcgcgtttagcaggcggatacggtgccaaggttgctattgttgaggaacttcgagaaggcggtacttgcgttttaagaggatgtgttcccaaaaaacttctcgtctatggtagccatatccaagaagaattgtccgatgcagaaggatacggatggactgtagatggtctgaaacataattgggaaaggatgatggatgcaaaaaatgctgaattggatcgacttcacggtatttatgttaatttgttaaaaaatgcaaatgtggagaggttccatgggcgtggaattatagttgatgagcatactgtgtccgtggatggaaaacatataactgcagaacgtattcttatggccgtcggcggatggccgagtactcctgaaattcctggaattgaatatgtaatcagctccaatgaagcgttggatttaagggaaaggccggatcgaatcctcgttgtgggatctggctatattgccgtcgaatttgccggaatatttaatagttttggatctagagtcgatttagttttcagagcagatcaagtacttcggggattcgataaagatattcgaagtacgc

SEQ ID NO: 222890 - DNA, 772 bp, Unknown
  Bacterial polypeptide expressing nucleotide sequence isolated from the Sargasso Sea
aatgacacattttgattatatatgtattggcggtggcagcggtggtatcgcatctgcaaaccgtgcagctaaacatggaaagaaggccgccatcattgaagcgaaagatattggcggtacttgcgtgaacgttggctgcgtgcctaaaaaagccatgtggtacggagcacaggtggctgaagccatacatcgctatgcacctgaatacgggttcgatttgtcggtaaatcactttagctgggacagcctaattgccagccgccaggcttatattgcgcgtattcatgcttcttacgaccgcgctcttaccgcaaatgacgttaccttaattcgcggtttcgcgaagtttatcgataacaacacggtagaagtcaacggcgaaaagtacacggctgatcatattacgattgctgtaggcggccgcccaatcttcccagatattgaaggtgctgagtacggtattgattctgatggtttctttgccttaaaagagcagccgaaacgcgctgtcgtggttggcgcaggctacattggagtggaattagccggcgttcttcacgcccttggtacagaatcgcatttggtagttcgcaaacacgctccgcttagaaatttcgaccctattattcacgaaaccttagtggatatgatccacgctgaaggttgcaaattgcacgaccatgctagcgtagagaaagtggaaaaagctgacgatggcgagctatcagtacacttaaccaatgggcgaagtgttaaaaagctgactgcttga

SEQ ID NO: 222891 - DNA, 309 bp, Unknown
  Bacterial polypeptide expressing nucleotide sequence isolated from the Sargasso Sea
catgactgaacattttgactatatcgccataggtggtggcagcggtggtatcgccagcgctaacagagcagccagccacggccagaaatgtgccatcatcgaagcaaaatttttaggtggcacctgcgttaatgtgggttgtgtgcccaaaaaagccatgtggtttgccggtcaaattgctgacgcttttaaatacgcgccggattatggtttagatgtacaaatgcctgcgttaaattggggcaaattagtcgaaagccgcgagggctacatctcccgaattcatgctctctacgacagagtgctggc

SEQ ID NO: 222892 - DNA, 553 bp, Unknown
  Bacterial polypeptide expressing nucleotide sequence isolated from the Sargasso Sea
catgactgaacattttgactatatcgccataggtggcggcagcggcggtattgccagcgccaacagagcagccagtcatggccagaaatgcgccattatcgaagctaaatttttaggcggtacctgcgtcaatgtaggttgtgtgccgaaaaaagccatgtggtttgcgggacaaattgccgatgccatgaaatacgcgccggattacggtttagatgttgaaatgccggctttaaattgggccaaattagtagaaagccgcgaagcttatatctcacgtattcatggctcttacgacagagtgctggcgaaaaacggcgtcacagtgatacgtggctttgcccgctttgtgaataaaaacactgtggaagtggatggcaagctgtatagcgctgaccatattacgatagccactggtggtcgtcctgtgcgccctgatgtacctggcgctgaactgggtatagacagcgatggcttttttgccttacaaagccagcccaaacgggttgttgtggtaggtgctggttacatcgcggtagaaattgccggcgtg

SEQ ID NO: 222893 - DNA, 745 bp, Unknown
  Bacterial polypeptide expressing nucleotide sequence isolated from the Sargasso Sea
aatgacgacgcactacgactatgacctgatcgtgctggggggcggctccggtggcctggcggcggccttccgcgccgcgcagcacggccgccgggtggccatgctggagcccggtgaactcggcggcacctgcgtcaacgtcggctgcgtgccgaagaaggccatgtggctggcggccgatctggccgggcgcatcggcctggctgcggcaatgggctttgatgttccgctgcgtccggcgctggactggaaggaactggtggtgcaccgccaggcgtacatcgccaacatccatgccagttatctcaagcgcctggacgagaacaaggtggtccgcgtgccgcgccgcggccgtctggtcgatgcgcataccgtggaatgcagcgacggcgtgcgcatcagtgccgagcacatcctgatcgccactggcgcgcatccgcagcgcccggatattccgggggcggcgcttgggctggtctccgatgatttcttcaacctgtgcagtgccccggcgcgcgtggccattgtcggcggtggctacatcgccgtggagctggccggcctgctgcaggcgctgggcagccgggtgacactgctggtgcgtggcgaccgcctgctggaacggttcgacgcggagctgaccgcgcagctcgccgacaacctgcgccaccagggcgtgcagctgcatttcggctatcgcctgcgcgagttgcagcgcgacggcgatgcagtgggtggcgtttgg

SEQ ID NO: 222894 - DNA, 708 bp, Unknown
  Bacterial polypeptide expressing nucleotide sequence isolated from the Sargasso Sea
tttgaaaaatgaatttgatctaattgttatcggtggtgggagcggtggtcttgcttcagcacagagagcagcagaatacggcaaaaatgttgctctaattgaaaaagctcctcttggaggaacctgtgtcaacgttggatgtgtgccaaaaaaaataatgtggtatgcatctcatttggtccatcaaatggaaatcgctgaggattatggttttaatttctcttcaataactcatgagtgggaacctttaaaaaagagaagagacgaatatatcaaaagactgaatcttatctatgaaaacaatctaaataaacgtgaaataaccttaataagaggagaagctcgtttagaagacaaacataaggtgtgcgtgtctgatgagtcatttaaaaccgagcatattattattgccactggtggaaaacctacaattcctgatatagcaggagcaagttatggcattacatctgatgggttttttgagcttgaggaaaaaccaaaaaatgtatgcatagtaggaagtggatacattgcagttgagtttgcaggaatgctctcagccctcgatacaaatgtcacaatgaatataaggactgaatcaatacttcgttcatttgattcaatgttaagtgagaatttaaaagagattatgacgcatcatgatatcaagattcagactggcaaaattccggaatccattgagagtgc

SEQ ID NO: 222895 - DNA, 871 bp, Unknown
  Bacterial polypeptide expressing nucleotide sequence isolated from the Sargasso Sea
ctgggtggaacttgcgtaaacgttggatgtgtacctaaaaaggtgatgtggaatgctgctcagatttcacaagaaatagaagatgcagcagattatggattcaacatttcccagcatggtcatgattggcctgttttaaagcagaaaagggatgcttacgtaaaacgtttgaatggtatttatcagagcaatttagagaaaaaatcaatcgatctgatacaaagccgaggcaaatttatctcggcaaaagaaatagaaacggagtatggggataaagtgcatgcagaaaacatccttatagctacaggtggctttccgattgtgcctgagatacctggcgctaattttggaattacttcagatggattctttgatcttgaggaaatgcccaaacgagtaggaataattggcagtggatacattgcggtggagttagcaggtgttttgaatgccttaggtagtcatgttatgcaatttctccgttatgacagtctgctacgttcttttgaagaaaaattaggaagccacctattagaacatatgcgtgcaactgggattgaagtaattaatcaagcggtacctcaaagcgttaaacatgaaaaaggcttagctctaactatggaggatgggcgcacatttgataattttgactctctcttgtgggctattggtagggctccaaacactcattttctgactctaaaaaatgctggtgttaaagttgatgataggggttatatagttgtagaccgctatcagaatactagtactagcggtgtatatgctgttggagatgttactgggaaagcacaacttacgccggtagccattgctgctggacgaagattggctgatagggtcttcaatgctc

SEQ ID NO: 222896 - DNA, 919 bp, Unknown
  Bacterial polypeptide expressing nucleotide sequence isolated from the Sargasso Sea
aggaactgtattatgacccgtcattttgattacttatctatcggcgccggcagcggcggcattgccagtgccaaccgtgccgctatgcgcggagccaaagccgctgtagtggaagcaaacgtagtaggtggcacctgcgtgaacgtcggttgtgtgccaaaaaaagtaatgtggtacggagcgcatattgcagaagccctgaaatacagccctgactatggctttgatgttacacagcacagtttcgactgggccaccctggtaaaaaaccgtgaagcttacattcagcgtattcacaccagctatcaaaaaggctttgccaacaataatgtcacttatattgaaggttttgcccgttttattgatgcccacaccgtagaggtaaacggtgagcatataacagctgatcatattaccatcgccaccggcggccggccgtcgcgacctgatattcccggtagcgagcatggtatagattctgatggcttctttgcgctgtccaaacagccgaaaaaagcgctggtaataggggccggttatatcgcagtggaaattgccggtgtattacacgctttgggtactgaaacccatctgctggtgcgtaaagaccggccgctgagaaattttgatcaagacattactgatatgctgcttgaaaggatggcacaggataaactgccgctgcatacacacagcaatgtcgccagtgtcgaaaaagtcagtgatggtaacctgactgtcaacctggataacggcgtacaatttaccaatattgattgcctgatttgggcaataggcagagagcctgccactgacaagctgggtttggctgctgctggtgtaaaaaccgatgcagatggttacatccgtaccgacaaataccagaacaccaatgtaaaaggcatttatgccgtcggtg

SEQ ID NO: 222897 - DNA, 564 bp, Unknown
  Bacterial polypeptide expressing nucleotide sequence isolated from the Sargasso Sea
catggaatttgattacgacttgtttgttttaggagcaggttcaggtggagtgcgcgctagtcgcatgtctgccagttacggtgccaaggtcgctgtggcggaatctatgtttttgggcggtacctgcgtcaatgtgggctgtgtccccaaaaaactcttcgtctatggctcgcacttccatgaggaatttcaggacgcgaaaaactatggctgggacgtgccgccgagcactttcgattggcctacattgcgagataataagactaatgaaatcaatcgattaaatggtatttatcagaatttactagataatgctggtgtcactttatacaacgagcacgcctgtttactggacgctcatacggttcaggtaggcagtgaaacagtgaccgcgcgttatattctcgtggccactggcggttggccagatatgccggatattcccggtgttgagcatgcgatcagttccaacgaagccttttatttgccggagtttccgcgagaagtcacggttattggcggtggttatatcgccgtggaattcgccggtattttcgccggcct

SEQ ID NO: 222898 - DNA, 757 bp, Unknown
  Bacterial polypeptide expressing nucleotide sequence isolated from the Sargasso Sea
tttaggtggtacctgcgtcaacgtgggctgcgtcccaaagaagctattcgtctatggctcccactattctgaggaattctccaacgcagccagctatggctggtctgtgggagatgctacttttgaatggagcacaatgagggacaataagaatcgtgagatagaaagactcaatgccatctatggagggttattgtcggacgcaggggtcactttgttcaatgacagagcaagcctacttgatgcacacacaatagcggttggcgaagaggagataacctcaaagaatatccttattgcgactggcagctggccgatagtgccagacgtgaagggtaaagaacacatcattacatcgaacgaagcgttctacctcgaagatttcccaaagaaggtaacagtcgttggtggtggctacattgcagttgaatttgcaggcatctttaatggttttggagcagagacgacgctcgtatatcgcggtgatatgtttttaacaggattcgataaatcgttgcgggaatttgtgaaacaagaactggaaaagtctgggatagatttgaaatttaatacacaagttaaagagattcgatcgaccgatgataaagacactaactctaaatatcagatatcgcttgaagacggagggatcctaaatgctgatttggttatgtatgcaaccggccggaaaccgaaaacggacaatttaggtttagagaatctcgggatagaacaaggcgcaaatggaaaaatatag

SEQ ID NO: 222899 - DNA, 1274 bp, Unknown
  Bacterial polypeptide expressing nucleotide sequence isolated from the Sargasso Sea
tatgaaatacgattacgatttgtatgttattggggcagggtccgggggcgttcgcgcgagtcggatggctgctcaatttggagcaagggtcgctgttgctgaatcaacttttcttggaggcacatgcgttaacgtcggctgtgttcctaaaaagctgtttgtgtatggctcccatttccatgaggaatttcaggatgctaaattctatggttgggaaaacaaagtaaatcaattcaattggccaaccttgagagacaataaaaccaaagagattgaacgcttaaatggaatctacgccaatctattggatggagcaggggttaaagttcaccacggaaaagccgtgctcaaagatgaacatactgtcgaggttgaagggcaaagctattccgccaagtacattctagtggcttcaggaagcactccaacaattccagattttcccggcaatgatctggttatcacctcaaatgaagccttttatctgcccgagcttcctaaaaagatagtcgttgtggggggagggtatatagccgttgaatttgcagggatatttgcaggcttgggtgtagagacgacattaatctataggggaccgttatttttaaggggcttcgatatctcaattcgggaatttgttaaaaatgaaattattaataaaaacataaatttaatgtttaatacgaaagtaaattctatttccttttctagggattctcgaattctctctctgtctaatggagaagaggtttctagtgacctggttttatatgcgacgggccgaaatccgaacaccagcaatctaggactggagcaagccaatgttgaactgggcgaacggggtgaaatcttggtgaacgaaaagtatcagaccagtcaaaaaaatatttatgccattggtgacgtcaccgatcgaatacagctaacaccggtagctatagaagaagggatgtgcatcgctaaccacttatttggagatgagagttatccaacactatcctatgacaatatccctaccgctgtattttgtcagcctaacattgggaccgttggcttgacggaggaagaggccttagctagctatgccggtgaccttgatatttacgaatctcaattcaaacccatgaagcttacgatgaccgaccgagaagaacgctcttttatgaagatgatcgtacaaaggagtactgacgccgtattgggtatacatatggtggggggggatgctggggaacttattcagggattagccgtcgctttgatcgcaggtgcga

SEQ ID NO: 222900 - DNA, 628 bp, Unknown
  Bacterial polypeptide expressing nucleotide sequence isolated from the Sargasso Sea
gcccgaatggtttggtcaatatgttggggcattagacgaaaattctaatcagactgattactggaaatttactgttttcgcaataattgttactgctctagctggactatttgtagttaatttaagacgaggtgttacaggtcgaagatttttagccatccgctctaacgaaagagctgcagctgctgctggtgttaatgttgcgcgaacaaaaatgcttggattcggagtttcatcatttttagctggattagctggggttttagttgcttataaaatgccaatggtcacgagtgaattcttcagtccatttgtaggtttagcgatgattgcatttgtttacttaggaggcattacaacagtttggggtgcggttctcggtggaatgttggtaggtggcggtctgctatcggagttcggttcactccatttcgaaggcataactcaggcctatatcaacgcggtaggaggagtaggtttgatagtaaatgcgatattaaccagtggtgaaggaatttctcttacagtaactaatcaagcaaagcatatggttgccacgatgagaggtaaaacttcagaagtggatgtggtaaaggaaattaatgaacctgagaaggagaatgtatga

SEQ ID NO: 222901 - DNA, 684 bp, Unknown
  Bacterial polypeptide expressing nucleotide sequence isolated from the Sargasso Sea
gttggataaaataagctctgttctctcccaattccggttggataatcgtgtggccatggtcacaggctctggtaacggtatagggagaattgcggcactggcgttgagtgaggcaggtgctcatgtttgtgtgtcggatttaaatgcggcatctgcagaaaaagtagctagtgagataaaggagtcggagggctcggcagacagttggcaattagatgtttccaagaaccaggagatcaaaaaaaccatctcagacgtcgtggagcaacaccagcgaatagatatcctggtgaataatgcagggatggcaaagcgtggcccaactgaggatatgacgttggaggagtggagcaaagttgtccagacaaatcaaactcaggttttcatgtgttctcgtgaagtagggagacatatgttggctgcgggtacgggagctattatcaatgtgacctcaatcatgggcttagttggcgggggattgtacccaaacctctcgtaccacgctactaagggagccttggtgaacatgaccagggcattggcagcagaatgggcggggcggggtattcgggttaacgcgattgccccgactttcgtgcgaacaaattttgcgcgtgcggttttggcggatcccaaaactagtcagtctattgtggacagaaccccaatgggtcgggtagctga

SEQ ID NO: 222902 - DNA, 799 bp, Unknown
  Bacterial polypeptide expressing nucleotide sequence isolated from the Sargasso Sea
agcaaggagcactccgggagcaaggagcacggcaagcagctgatggaggggtattgggcgtttcgactggctgtcgcggctgccgatgctcacgatgccgcgctatcattttctcagagcgcacatagagcacgccagtctcaagggcggacatattatagtggtgtagtttgtgcgaatcgccaattgaccaccaaggaagcggtaaagcaggttcaccatctggagttggaaccaatggactcttcaacatcgacgtcatacgattctggagatgtattgggcgtactgccacattcactgcatccagatgatgataatctgaccggcttattgaaacgcatgggcttcgctccaaacgtgagagtgcgaatttaccctttggcaactcctgaaaaaagagattcatttcctgtcataccgttaaaatatttgatcgcaggaggaattgatgtcaactctgcttctcctagacgttactttttcgaagtgatgagtcacttcacggcgagtgagcatgaaaaagagcgccttcaatactttgcctcaggcgagggggcagtggatttatacaagtacaatcagcgtgaacgaagaactgtgttcgaaatctttgacgactttccatccttgaagccttctcttgaatggtttctccacgttgctccgcacttacatccgagactgtattcaatctcgtcttcaccttacgacaccgtccagacaagagcaacgcatattacagttgcttcagttgaatgggttacacccatgaagcgtaaacgcaagggtctgtgct

SEQ ID NO: 222903 - DNA, 773 bp, Unknown
  Bacterial polypeptide expressing nucleotide sequence isolated from the Sargasso Sea
aatcagtctcccaaaagcggaacaacgcaagctggacagcgaccacctgcgggagccgctgcagagcgaacttgggaatgaactgcccaatttcagcgaagacgccctgcagatcctcaagttccacggcagttaccagcaggacgatcgcgacaaacgcgagaaagggaaggacaagacctggcagatgatgctgcgcctgcgcagccccggtggtcgcatccccgcacggttgtttctcgccctggatgacctctccgatcggctgggggacggcaccctgcgggccacaacccggcaggccttccagatgcatggcatccccaaggccgatttgaaagaagtgatcggcaccatcgtgcgcaacctgggttccaccctggcggcctgtggtgacatcaaccgcaatgtgatggctcctgccgctccattcgaaaaaggcggctacccggcagcacggcggctggccgacgagatcgccgatctgttgagtcctgaagctgccgaaggctcctacctcgacctctgggtggacggcgatctcagctatcgcttcagcccgccagcggccgttcgccgcgctcgcaaacgccagttggagccaggtgtgttctccggcagtgaggcggagccgctctatggcgacacctacctccccagaaaattcaaggtcgccgtcaccgtgccaggtgacaactcggtggatctgctgacccaggacatcggactggtggccttcaccgatccttccggtgatctgaggggctgcaacg

SEQ ID NO: 222904 - DNA, 538 bp, Unknown
  Bacterial polypeptide expressing nucleotide sequence isolated from the Sargasso Sea
aaaaatctcatatttcgtgagtaaagggaacattagtctacccccccctgacgtccccatgattctcataggaccaggcaccgggatagccccttttcgttcctttgtgcgaactcggttgttccagtcacaggcaagcgataaaggcccagtaggagacgtgcttgtgtttttcggatgtagaaacgcactccacgattatctatatgaggatgaatgggaagaactgcagaagagtggtttctttgcaagaaagaatgcctttggaggaatcgttgttgcattttctcgtccaactcaaaatgagaagaagaagtacgtgcaaaatcgtataactgatgaagagaaacgtgtgtggtcgtttcttgaggctggagcaaaaatttttgtcgcaggcgctgcagaaaagatgcccacagctgtgcgcgaagcgatacagaaagttgttcaatcacaagggtctcgcagcgaaaaggaaagttcgatttacatgacgaaaatggatacaaatggtcgatactttgtagatgcctggtaa

SEQ ID NO: 222905 - DNA, 299 bp, Unknown
  Bacterial polypeptide expressing nucleotide sequence isolated from the Sargasso Sea
tatgatttctgacagccaatctgctccacaacttcacaagaacgaaggaattaaaacccgcagcaactatctccggggcacgattctcgagggcatcgccgacagttcgaacggatccatcgcggccgacgatcagcagctatctaaattccacgggctctaccagcaggacgatcgcgacgtgcgcgccaagcgtcgcaagcataagctggataaagcctacgccttcttggctcggatctgcctgcctggtggcatttgcacccccgagcaatggcaggtaatggataaactcgcta

SEQ ID NO: 222906 - DNA, 847 bp, Unknown
  Bacterial polypeptide expressing nucleotide sequence isolated from the Sargasso Sea
aagttgttgctggatttatccaaagagcaaattatttggattaatggatatttagcaggaaaagttgatatttcaatagaaaaaccagaacaacaatcaaagccaaatattgataaattaacgattatttatgctacagaaactggcaattctaaaaaaattgcaattgatctaaataagagaattaaatctctcgggataaaaacaaacctaaaagcgattgaacaatatagttatgacaatttagttaaagaagaatatttagtgtttgttacttctactcatggagaaggagaattaccagaaaccgctaaagaattttggacatttcttgaaagagaagaactaaatttatctaaattaaaatatgcaatattatcgcttggagactctaattatccaaaattctgtgaagctgggaaattattagatagtaaacttaaagaactagatgcaaaagaatggttgcctatgaaggaattggatttggattttgctgattatattaatagttggataggagaagtaattaacttaattacaaagccaatcaagaaaaatcatattggcaaaattaagtctaatatcgtactaaatgacgaaggttcaaataaagaaattcatcatattgaaatagaaactgatgcaaaatatcaaccaggagattctataggtataaaaattgatgataactctcccagactatattcaatttcttcctcgccagatgcccatgaaggagaaattcatttaacagtcaagaagctagataatggattatgctctccatatttagcaagtcttgagaagaatgatgaagtggagttttacatttcgcctaaataat

SEQ ID NO: 222907 - DNA, 721 bp, Unknown
  Bacterial polypeptide expressing nucleotide sequence isolated from the Sargasso Sea
catgtccgcgtcgacgcgcgccgcggcgacggcgacgacgcgcaagacgcgcgcgagcggcaccgtcggtggtgggacgacgacgtcgacgacgagaacgtcgagaccgcgatgcggggtcgtgcgatgggcgaacgatcgcgtcgcgaggtttgacgcgctcggacgcgagcgaacgtctcgcgcgagcgtcgtgacgcgcgtggcgacgcccacggggaaagggcccgatcgacccgtcaagcgaagcaaggtggagatcatcaaagaaaactctgattttcttcgacatccgttgattgaggagttggcgacggaggcgtcgaatatttctgaagatgcggcgcagttgtacaagtttcacggggggtatcaacaggatgatcgagagaagcgcgcgttcggcgagggtaaattttatcagtttatgatgcgcaccaagcagccggcggggaaagtgccgaataagctgtatctcaccatggatgatttggccaacacgcacggcaatgggacgttgcgattgacgacgagacagacgtatcagttgcacggcatcttgaagagtgatctgaaggcgacgttcgcgacggtgattcgcaacatgggttcgacgctcggcgcgtgcggagacattaaccgtaatgtaaccgcgtctccggcgccgtacgccaacagaccagaatacgatatcgcacaagagtggccaaggacatcgctg

SEQ ID NO: 222908 - DNA, 979 bp, Unknown
  Bacterial polypeptide expressing nucleotide sequence isolated from the Sargasso Sea
gttatagatggtgataagaaattttttaatattttagttggtggtggattgggaagccatcatcgacaatcacaaacttttccaaggttagcagatgaattaggtatgtgtgaagaagatcaagttattgatgtagtcaaaggaataattagtattcaaagagattatggagttagaactgataggaagcaagctagaatgaaatatttactagaaaattggggagtaaataagtttcgagaagaacttgaactaagaattggatttaagctaaatgaatacataaaaaagtctttaacgaaaattgataattactacggttggcataaacaaaaacaagcgggcaagttttattgtggaatctttgttgagaatggaagaattaaagataaaggttccgtgaagttaaaatcaggcttggcaaaaataataaagaaatataatgtggagacaagattaacagctactcaggacttaattcttgtaaatattgataaacaaaatgttgagggtgtcaaggaaatgttagcagagcataatattgatactaatgaaagatattctaatttgaggttagcgtcgatggcatgccctgcacttcctacgtgtagtttagccgtagccgaagctgaaagattcttaccttctcttatagatgagctggaacatatgggactaggggacgaaaaaataaaaattagaatgagtggttgccctaattcttgttcaagaccacctgtatcagaggtaggtttaattggtgccacagcaaaaaaatataatatatatttaggtggagatttttacggaactcgattgaacaagttgttcatggaactcgtagatgatagcgagcttgcatataaaatttcaaaattaattaattattggaaaaaaaataaaaatgcagaggaagaaccttttggagatttttgtaatagaactgattttgaacttttaaggaaagaggtcatataaa

SEQ ID NO: 222909 - DNA, 223 bp, Unknown
  Bacterial polypeptide expressing nucleotide sequence isolated from the Sargasso Sea
atgaaaaaagaattaaagctagtaaaaaatgaaggaattaaagaatcaagtaatggattgagaggtacgattcatgaagaactaatggattctgagtccataaaatttacaggtgataatcaacaagtcttaaaattccatggaatttaccagcaagatgatagagataaaagaaaggctttgatgaaggccaagctagaaaaagattatagttttatgatta

SEQ ID NO: 222910 - DNA, 390 bp, Unknown
  Bacterial polypeptide expressing nucleotide sequence isolated from the Sargasso Sea
caatggcagaagctgagcgttacttacctgacgctgtcactgagcttgaagggctattagccaaacacgggcttgctgatgatagcgtgattttccgcgtaacgggctgtccgaatggctgtggtcgtgccatgctttctgaagtcgggttagtaggaaagggccctggcaagtacaacctgcatttaggtggcgatcgcgaaggcactcgtatccctcgtatgtatcgtgaaaacatcagcgagcaagaaattatgtcagagctcgatacgctgtttggccagtgggccagcaatcgagaagacggcgaagcgtttggagattttgttgttcgtaccggcgttgttaaaccggtagttgattcagcgcgtgatttctatgagcaataat

SEQ ID NO: 222911 - DNA, 769 bp, Unknown
  Bacterial polypeptide expressing nucleotide sequence isolated from the Sargasso Sea
tatgctattagcctctttagctgctcaggccagccctttgtctgctcaacaaatcaaggatttacagtcgctggtgagtcaactgaatcctatacagcaggcttgggtcagtggttatctggcagcagctgcccagctggctggcggtctttctgcagcacccgtgcagcagaccaatgaaagtgcggtactgactattctgtatggctcacaaactggcaacgccaaagcggtagctactaaggtcaaagcagcggctgagcaacaaggtatagcggtgaagctggccgatattggcagctataaaaccacggctctggcaaaagaaaaatacttgctgattgtcacttctacttatggtgaaggtgagccaccagaaagtgcagtggctttccacaaatttttattcagcaaaaaagccccgaaactggatggcctgaaatatgctgtcttgggtttgggcgataccagttacgaattcttctgtaaaaccgctatcgatttcgacgagcaattagcggctttaggtgccaaacgtttgcatgcaagggctgatctggatgtggattatgcggcacaagcggccagttggactgaagctgcagtgttggcttttgcacctgagttaaaacaggagacgggttctgcccaggttattgcctggccaggagctacggccacggcaagtcacgacagcgcctacaccaaagaaactccatacagtgcagagttgtcagtcaatcagaaaattactggccgtgattcgacc

SEQ ID NO: 222912 - DNA, 247 bp, Unknown
  Bacterial polypeptide expressing nucleotide sequence isolated from the Sargasso Sea
gaagttggtctggtggggaaagcgcccgggacgttacaacctccatttagggggcaaccgtattggaactcgcattccccggatgtttaaagagaacatcaccgagccggaaattctggcatcgctggatgaactgattgggcgctgggcgaaagagcgcgaagcgggtgaaggcttcggtgactttacggtgcgtgcgggcattattcgcccggtgctcgatcctgcccgggatttctgggaataa

SEQ ID NO: 222913 - DNA, 529 bp, Unknown
  Bacterial polypeptide expressing nucleotide sequence isolated from the Sargasso Sea
cctatctgataaatgtgaaataggatctagagtaaaaattttcttaatcccaaataaattatttagattacctaaagatcaaactaagccaataattatgataggtcctggtacaggcgtagctccttttttgtcatttatacaagaaagaaaatatctaaagagtaatggaaaaaattggttattctttggtgctcagactaagaaagatgattttatatatgaagatgaaatttcaaattttgttaaagaaaaaattttgaataatttagatactgctttttcaagagatcaggataaaaagatttatgtacaggataaaattaatgacagaagtgttgagttttttaagtggttagaaaatggtgcaataatatatgtatgtggagatgctaaaaaaatggctaaagatgttgaaaccacaattataaaaatgattgaaaaagagctgaaatgtaatgatagaaaagctttagaatacttaaaaatattaaaaaaagacaaaagatacttattagatgtgtattaa

SEQ ID NO: 222914 - DNA, 217 bp, Unknown
  Bacterial polypeptide expressing nucleotide sequence isolated from the Sargasso Sea
aatgactcagccaattaacccggatttacaggtgcaaggtcagctgtctgataacgagcggttgaaaaaagacagccatttattacgtggcactatcaccaaagatttaaaagacgaaatcaccggcggctttaacggcgacaactttatgttgatccgtttccatggcatgtatcagcaggacgaccgcgatattcgccctgagcgcgctgaacaa

SEQ ID NO: 222915 - DNA, 1138 bp, Unknown
  Bacterial polypeptide expressing nucleotide sequence isolated from the Sargasso Sea
gtcgagttcgacctcggatcgagcggcatcacctacaagcccggcgattcggtcggtgtgatcccacagaacaacgccgagctggttcgaggcatcgtcagtcgtctcaaattggactcggatgctgtgttcgcgctcaactggaagaaggaagacaccgacaagcacgcgacgcatcctttgcctcacatccgcacgccgtgcacagtggagtccgctttcacgaactacatcgatatcaccgggtgtccgcgcaagtcgctcttgcgcgttttggctgaacactgttccaatgaaggagaaaagaacgcgctcttacacctctcttctcgaggtggtcgaactgactacgagaaggaaataaggtcgcagtcgccgacgttattgacgctcttagaacaattcaagagctgttctccgcctctcgctgagctgctcgacgctctctcgccactcgcgccgagattgtactcgatcacctgcgccccggaagcggcgccgacgacaccatcggtggcgttcagtgtcgttaaattcgaggtttcgggaagtggcgagcgtctaggagtggcgacgaattggctcgacgcgaaaatggacagtgataacaagaaagtccccgtttacatcaagcccagtctgaaatttggcttgcccgaagactctgcagcgccgctcatcatgattggaccggggactggagtcgctccattccgcggtttcctgcaagccagacgtgcgcgaatgcaacaaggacacgtgttgtcggaagctatgttattcttcggctgtcgcaaacctgatgaagactttttgtaccgagaagattgggacggcttcaccgcggacggaacgctctcccgcttcgtgtgcgccttcagtcgcgaaacctccgagaaagtgtacgttcaacacaagctcaaagaacacgcgaaagatatcgcacgtttaatttcggaaggtgcgtacatcatggtctgcggagacggcgcacacatggccaaggacgtccacgccgtcctcgccggtatcgtcgccgacgcgggcgtatgcggcgtcgcggacctcaaggccgccgaggcgcttctcatggatttcacaaagtccggtcgatacgttagagatatttggagttgac

SEQ ID NO: 222916 - DNA, 2179 bp, Unknown
  Bacterial polypeptide expressing nucleotide sequence isolated from the Sargasso Sea
atgtccgactcttccctgctcatactgttcggctcagagtcaggtaacgcagaggacttggcatccatagccgagaagcaggcgaaatcccagggactttcgcccacagtgaagggcatggacgagatagagataggggatctcgctggttcgaagcatgtcctgatctactgcagcacgtggggcgaaggagacatgcccgacaacgcgatagacctctgggaagccgcaaatggcgactccccgcccaacctcgaaggatgcaacttcgcagtctgtgccctaggagacaccagctacgagttcttctgccagtcaggaaaggactgggacgcctggttcgagaagcagggagcgaccagggtagtggatcgcgttgactgcgacgtagaatacgatgacccagccgcagagttcaccgccagcgcactttcgattttcgcttcattgggcggtggggcgccagcagaatccgatgccgtgaacgagtccgacgcagacgaggcaccaccagtagaagactccgtagcagaagggggggaatccgtagacggactcgacgaccttctatcatccggggaccgctcactggttctcctgttcgggtcccagtcaggaaactccgagggactagctgccaagatcgccaaggacgccaaggcatacggtctcgagggagaggtgcatgacatggacggcttcgacttcaactccctttcaagcaagaggagggtcatgatcgtctgctccacttggggcgagggcgagcagcccgacaacgccgaggacctgtggcagttctcgatttcagactccgcctctaggatggaaggggtgcacttcgcaatcctagcactaggggactccagctacgagttcttctgccagtcaggaaaggactgggacggccagttcgagaaactaggagccactagggccatcgatcgactcgattgcgacgtggactacgacgcacctgcagcagagtggctgatggacgccctccccactctagcagcggtcgatagcaccggacacttccacgaggacatggtggactcaatcaagatgtacgcaagcggggactcactaggtgccgagggcgaggacggcttctcggtgcctaaaatcgccatcgaggccattcaggtcgaggctaccattttccgctacgaccccgagacctccagcacaggcacggacacttggctctgctccctctcggcgaacatgtcagtcctcgaggttctgaggaccctgaagatgacacaggacggttctctcaccttccgggacggaactgccgacgaccccaacacggccatctctgtgaacggtaggctggtcctcccgggtttgacaaggctagactcagttgcccccatgagagatgggcaggtctcccttaggatagaaccacttcccggattcgatgtcattcgcgatttggcgatagacccctggtctctggagagaaagcgcgaatcgagcgagccatggatggtagcagcgacaagggagggtgcgcaaaccccgcagggagccattggcaccatggaacccggtgctgcagcgaagattcactccatcaggaacttcgccagccagaacatcatccactctagctccgatgcgatcccccacgccaacggctacttgggcccagcagtcatcgcatcatcctggtctcgcaggaatgacccccggacttccccaaccaagaggaaggccatcgacgacatgctctcctcccacaacggaatcaaggccgagacagacttcgcccctatcaggcgccagtcatccgttcccaggcaggtctcggacgccctcctggaggcgaagaactcggtcatgaccgacgagggcttcaacggcaagcacggcaagcacgtttggtggtacacctggtcagtaaagagcagcggcctggtaaacgacacggtgatctacagacaggcactaggccccttcgccctactcggaaacctgttctcgggagtaacggctaggatggtgctgggcttcacaagaaccggtggaaacatgttcaacggcatgctgggtatggtcgctcctcctgcgggtatagggaagatgcccaagcagttcaactcctcagtggacaaacaccacgaggtcgtggcgatcttcaacgagatggacggaagattctgat

SEQ ID NO: 222917 - DNA, 868 bp, Unknown
  Bacterial polypeptide expressing nucleotide sequence isolated from the Sargasso Sea
atgttgttaggtcaactaaatgctgcggcaagcccgctatcgcaagagcaagttcaaaagctgcaaggtttagtggctgagcttaatccaatacaacaagcgtgggtaagtggttacttagcagctaatgcaaatgcttcagcacttggtatgcctacggctggcacatcagtaacgggcgatgcagcagaattaactattttatatggctcacaaacgggtaatgcaaaaggtgttgcaacccaaatgaaagagcaagctgaatcgcgtggtttatcagccaaattagtgagtatgtctgattacaaaccaacggccctgaaaaaagaaaagtttttaaccgttgttgtatcgacttacggtgaaggtgaaccgcctgaagatggcgaaacgttgcacgcatttttagccactaaaaaggcccctaaactcgacggtgttaaaatagctgtcattggtctaggtgattctagctatgagtttttctgccaaacagcaaaagactttgaagagcgtttaaataagctaggcgctgagtcagtttaccaacgcgctgatttagatgttgactacgaagaagaagctgcaacatggatacaaggcgcactggatgcatttgaaccagatttaaaagcgcaacagggtaacgcaggtggacaagccgcggttatgccatttggtgcaccaacacctgcagccagccagtacacaaagcaaaatccatttgaagccgaattattagcagttcaaaaaattaccgggcgtgattcaacaaaagatgtacgccatgtagaaatttcgcttgaaggctctgatatcacttacacaccgggtgactcactgggtgtatattttttaaatgatgagg

SEQ ID NO: 222918 - DNA, 904 bp, Unknown
  Bacterial polypeptide expressing nucleotide sequence isolated from the Sargasso Sea
gcaaccttaattgagtctcaaaaaatcacagggcgtgattcaatcaaagacatccgccatatcgaaataagcttagaggacagcggcattacttaccaaccaggcgatgcgcttggtgtttggtttaaaaatgcgccgttgttagtatctgaacttattagcatattgtcgttaaacggcgatgcagaggtaactgtgggtgacgcaactatgtcacttactgatgcattaacttcaaagctagaattaacgttaagctaccctaactttattaagtcgtaccaagcagcaacaggctctgaaacgctggcgacgctcatggaagataaagcgcagcttcgcacttatatggccgagcgtcagattatcgatattgttcgcgaccacccaggtaagatttcagaacagcagctggttgaagcacttcgcccgcttaccccacgcttgtattcaattgcgtcaagccaagcagaagttgaagaagaagttcatttaactgtggcgcacgttgattatgaagcgttcggccatcgtcaccaaggtggggcgtcgggtttcctttgtgagtatttagaggaaaacggtgaagttgatgtgtttgttgaaaacaacgacaacttccgcttgccggctgatccgaatactcctgttattatggtgggaccaggcacaggtattgcaccgtttagatcgtttatgcaagagcgtgatgtacaaggcgctgaaggcaaaaactggttgttctttggtaacccacactttacgcaagatttcttgtatcaagtagagtggcaaggttacgttaaagaaggcctgctagataaaattacgctggcgttctcccgtgatcaggaagagaaagtatacgttcaacaccgtttacttgaacacggtaaagaggtgt

SEQ ID NO: 222919 - DNA, 964 bp, Unknown
  Bacterial polypeptide expressing nucleotide sequence isolated from the Sargasso Sea
ccacgtagtattcgatttgggggattctggtctagaatacaaggctggagatgcactgggtgtaatccctcgttgtcctcctgagttggtagaacaattaatttcaacagccaactttagcggagatgaattggttgaaactcatcttggtgaggctaccctcaaggaagcccttaccgaccatttggagattcacagaatttcaaagaaatggattcaaaatcttggcagtagaatggctgatgatggacctgtagagattagaatcgctcgtagacatagggtttcaactgaggatggttctctgctcgtagattggtccggctcaggagaagatggagatgttccagaaggttacgaagaaatcggcgccgcctgtgaccctgctgaggcactttggagaagcctaaccggtgatgcagatgcaatggaggactacatttggtctcgtgattatatcgatgcgatgggagatttcggacacattggatttactgcacaacaatttgtcgatggaatggatcgattgaagccacgtctatactctattgctagtagtccagagcatgagccgggcaccgttcacttgaccgttggtatcgttcgatactctcaccatggtcgagatcgcaccggcctttgtactggattcctctctgatcgttgcgaaaccaacgataccgagattggtgtattcatgtctccaacccgttcattcattttacctgaagatggtagcaccgattgcataatggtaggcccaggaaccggaattgctcctttccgtgcctatcttcaacagcgcgatatcaatagtgacaagggtcgtaattggctattctttggtgactggaccgaagaaggagaatactactacagagatgaaatggaagattggaaggagcgaggagttatcaatcgtcatgacttagcatggagtcgcgctggagatgagaaggtatac

SEQ ID NO: 222920 - DNA, 831 bp, Unknown
  Bacterial polypeptide expressing nucleotide sequence isolated from the Sargasso Sea
aaagcagaaactcacgttgcggtatttgttagtacccatggtgaaggtgatgcaccagacgatgctattgagctacatgaattcttggctggcaaaaaagccccgaagcttgctgataccaaatacgcagttttgggtttaggtgacagtagttacgagtttttctgccaaacgggtaaagactttgatgaacgcttaggtaagcttggcggtaaagctattgtagagcgtctggactgcgacgttgattatgaagcggaagccgaagcatggctgagcaagctcatcgactcgctaaaagacgattttagtgcagctccgcaagcagcggtagcggcgcaaactggcgcggcagtgcagggtgtagcagcgcaaacttacaccaagaaagcgccgtttaaagcgaccttaattgacgcacaaaaaatcacaggtcgtgattctgttaaagatatacgccacattgaaataagccttgaagatagcgggattacctacaagccaggtgatgcgcttggtgtatggtttaaaaatgcagcatctctagtgtcagagcttattagtatcttgtcattaaacggcaatacagaagtgtctgtggctgacgcgaccatgtcactcaccgaagcattaacgtcgaagcttgaattaaccttaagttaccctaatttcattaagtcatatcaagaggcgacaggctctgaatcattggctacattgatggaagataaagcgcagctgcgtacctacatggccgaacgtcaaattattgataaagtgcgcgaccatccgggtaagttgtctgaacagcagcttgtagatgctttacga

SEQ ID NO: 222921 - DNA, 685 bp, Unknown
  Bacterial polypeptide expressing nucleotide sequence isolated from the Sargasso Sea
cagattcggttgggtcgaaggtatagatggtaaacaccacctgacggtatttatcgagaacggccgtatcctggattatccgggcaaaaccttaaaaaccggtgtcgctgaaattgcccgtattcataaaggcgatttccgcatgaccgccaatcagaacctgattatcgctggagtggcggctgaagataaaacccggattgaagctttagcccgtcaacacggtctgattaacgattcagtcactgagcagcgtaagaactctatggcttgtgtgtccttgcctacgtgtcctttagctatggccgaagccgaacgttatttaccaaccttggtcactcatgtcgaagctttgctgagcaaacatggcgtgcctgatgatcatattatcttacgggtggtgggttgcccgaacggttgtggccgcgccatgctggctgaagccggtttagtcggccgtggtcctggtaaatacaacttgtatttaggtggtaatacccagggcacccgtattccaaagctgtacttagataacgtggctgaagctgaaattctgcaggcgctggacggcctgattggacgttgggtgcttgagcgccaaagcggtgaatgttttggtgattttgtcgtgcgagttggcgttgtggccgaagtgaaagtatctaaaaccgactttcatgcctga

SEQ ID NO: 222922 - DNA, 880 bp, Unknown
  Bacterial polypeptide expressing nucleotide sequence isolated from the Sargasso Sea
acaaaaaatcacaggggtcgtggattctgttaaagatatacgccatatcgaaataagccttgaagatagcggaattacctataagccaggtgatgcgcttggtgtatggtttaaaaatgcagcatctctagtgtcagagcttattagtatcttgtcattaaacggcaatacagaagtgtctgtggctgacgcgaccatgtcactcaccgaagcattaacgtcgaagcttgaattaactttaagttatcctaatttcattaagtcatatcaagaggcgacaggctctgaatcattggctacattgatggaagataaagcgcagctgcgtacctacatggccgaacgtcaaattattgatattgtgcgcgaccatccgggtaagttgtctgaacaacagcttgtcgatgctttgcgaccgctaacgcctcgcttgtactcgatagcatcaagccaagccgaagtggaagaagaagtacatttaaccgtagctcacgttgactatgaagcgtttggacatcgtcatcaaggcggcgcatctggctttttgtgtgaatatctagaagaaaatggcgacgtagaagtgttcgtagaaagtaacgataacttccgtttgcccgctgatccaaatacgccagtgatcatggtcggtccgggtacgggtattgcaccgtttagatcgttcatgcaagagcgtgacgtacaaggtgctgaaggcaaaaactggttgttctttggcaacccacatttcacgcaagattttctatatcaagtggaatggcaaggctacgttaaagaaggcctgctagacaaaattacgctggcattttctcgtgaccaagaagaaaaagtatatgttcagcaccgtttactagaaaacggt

SEQ ID NO: 222923 - DNA, 856 bp, Unknown
  Bacterial polypeptide expressing nucleotide sequence isolated from the Sargasso Sea
acgctagacgtagccgctgcggttgtcacaactcagcgtgactggggtaaccgagttaatcgtaaaaacgcgaagacaaaatatacgttagagcgcgttggtgtagataactttaaagcggaagtagaaaagcgcgcgggcgtaacattccaagagagccgcccttacgagtttactgaccgtggcgaccgatttggctgggtagaagggattgatggtaaataccaccttaccgtgtttatcgaaaatggtcgtattttagattacccaggtaaaacgctaaaaacgggctgtgcagaaattgccaaaattcataaaggggatttccgtttaactgcaaaccagaacttgattattgctggggttccaccacaagacaaagacaagatagaagccttggcgcgtgaacatggactaatagcgccatcaatttctaatcagcgcttagactctatggcttgtgttgcattgccaacctgtccgctagccatggcagaagcagaacgttatctacctgatgccgttaccgaactagaaggcttacttgccaagcacggtcttgaagaagatagcgttatcttccgcgtgacaggctgcccgaacggctgtggtcgcgccatgctttcagaagttggcctggtaggaaaagggccgggtaagtacaaccttcacttaggtggtaaccgcgaaggtacgcgtattccgcgtatgtatcgagaaaatataagcgagcaagaaatcatggcagagcttgatacgctgcttggccagtgggctaaagagcgtgattcaggagaagcttttggtgattatgttgttcgcgctggtgttgtcaaaccagtagtagactccgcac

SEQ ID NO: 222924 - DNA, 616 bp, Unknown
  Bacterial polypeptide expressing nucleotide sequence isolated from the Sargasso Sea
aggcgaaattcatttaactgtggcaattgttaaatataataattttgaaagagatcgatttggattggcgacaggtgatttagcaaagggaattacggttaatgaaaccgaagtcccgatatacattcaaccaacccgtgatttcgtaattcctagtgatggaagcaaagacataattatggtggggccaggaacaggtattgctccatttcgtgcgtttatggaagaaagagttaacactggagctaccggtagaaattggttgtttttcggtgaagttcacgaagagagcacattcttttacaaagatgaatggttcgaatatatgaaaggtgggcaccttactaagttaactacagcattttcaagggaccaaaaagagaagatttatgtacaaaaccgaattactaacaatggtaaggaaatttgggattggttgcagaatggggcttattttttcatttgcggtgataagcagtatatggctaaagatgttcacaaagccctgatcaatattgctgaagagcatggaaaaatgaaaaaagaagaggctgaacattacattaatcaaacgttaatgaaagaagaacaccgatatcttagagacgtatactaa

SEQ ID NO: 222925 - DNA, 799 bp, Unknown
  Bacterial polypeptide expressing nucleotide sequence isolated from the Sargasso Sea
gtggcaggcgatcgacaagttcgcccatgacaacactatttacggcagcatttgtttgaccaaccgtcagaccttccagtttcacggcattctgaagaagaacgttaaaccggtacaccagatgctgcattccgtcggcctggacgcactggcgaccgccaacgatatgaaccgtaacgtgctgtgcacctccaacccgtatgaatctgagctgcacgccgaagcctacgagtgggcgaaaaagatctccgaacatctgctgccgcgcacccgcgcctatgcagagatctggcttgatcaggaaaaagttgcgaccaccgacgaggagccgatcctcggtcaaacctatctgccgcgtaagtttaaaaccacggtggtgatcccaccgcagaacgacatcgatctgcatgccaacgacatgaacttcgtggcgattgcggaaaacggcaagttggtgggctttaacctgctggtgggcggcggtttgtccattgagcatggcaataagaaaacttacgcccggacggcaagcgaatttggttatctgccgcttgagcatacactggccgtggcggaagcggtggtgacgactcagcgtgactggggtaaccgtaccgatcgtaaaaacgccaaaaccaaatacacgctggaacgcgtaggcgttgagacctttaaagctgaagttgagcgccgcgcggggatcaagtttgagcctatccgcccgtacgagttcaccggtcgcggcgatcgtatcggctgggtgaaagggatcgacaataaatggcatctgacgctgttt

SEQ ID NO: 222926 - DNA, 845 bp, Unknown
  Bacterial polypeptide expressing nucleotide sequence isolated from the Sargasso Sea
catgtcactcaccgaagcattaacgtcgaagcttgaattaaccttaagttaccctaatttcattaagtcatatcaagaggcgacaggctctgaatcattggctacattgatggaagataaagcgcagctgcgtacctacatggccgaacgtcaaattattgatattgtgcgcgaccatccgggtaagttgtctgaacagcagcttgtagatgctttacgaccgctaacgcctcgcttgtactcgatagcatcaagccaagccgaagtggaagaagaagtacatttaaccgtagctcacgttgactatgaagcgtttggacatcgtcatcaaggcggcgcatctggctttttgtgtgaatatctagaagaaaatggcgacgtagaagtgttcgtagaaagtaacgataacttccgtttgcccgctgatccaaatacgccagtgatcatggtcggcccaggtacgggtattgcaccgtttagatcgttcatgcaagagcgtgacgtacaaggcgcagaaggcaaaaactggttgttctttggcaacccacatttcacgcaagattttctatatcaagtggaatggcaaggctacgttaaagaaggcctgctagacaaaattacgctggcattttctcgtgaccaagaagaaaaagtatatgttcagcaccgtttactagaaaacggtaaagaggtgtatgaatggctagagcagggcgcacacttctatgtgtgtggcgatgcaatgcacatggcgaaagatgtagagaacgccctaattagtattgtgcaagagcacggcggtaaatctgaagccgatgcaaaagcctatgttgtagacttacgta

SEQ ID NO: 222927 - DNA, 707 bp, Unknown
  Bacterial polypeptide expressing nucleotide sequence isolated from the Sargasso Sea
tttgcaaaaccctgcacctttaaccgctcagcagctggttgattcgctgcgtaaacagcaacctcgtttgtactctattgcctcttctcaggctgaagtaggggatgaagtgcacttaacggtaggtgtggtgcgttacgacgcctttggtgaaacgcatttaggtggtgcttcaggctttttggccgagcgattggaagaaggctcgcaggtcaaggtctttgttgaacacaacgacaacttccgcctgccggaccatgaaactcctgtcattatgataggtcctggcacaggcatagcgccgttccgcgctttcctgcaggagcgggatcaggctggagctacaggtcaaaactggctgttttttggtaatccacactttactcaagacttcctgtatcaggtcgagctgcaggactatctaaaacgtggcgtgctgagcaaactggatgtggcctttagtcgcgatcaggcgcaaaaggtttatgtgcaggacaaattacgcgtaaaagccgaagagatctggacctggttacaacaaggcgcttacctgtatatctgtggtgatggcaataaaatggccaaagacgtgcatcaggctttgctcgacatcgcccagcaacaaggtggctttagtgcagaacaagcagaacagtattttgacgatttacgtcaagccaaacgttatcagaaggatgtttattaat

SEQ ID NO: 222928 - DNA, 791 bp, Unknown
  Bacterial polypeptide expressing nucleotide sequence isolated from the Sargasso Sea
aatgagtaacgaaaaatcaccatttatcgttgagggcaaactggctgacaacgagcgtttaaagcgtgaaagtaataatttgcgtggcaccatcactaccgatcttaaagatgatcttactggtggtttcaccgctgataacttccagcttattcgctttcacggtatgtaccaacaagacgatcgtgatattcgcgctgagcgtgcaaagcagaaacttgagccgcttcacaatgtgatgttgcgtgcccgtttacctggtggtgttattacgcctgaccaatggttagcgattgataagtttgcagccgatcacaccatgtacggcagcattcgtttaacaacccgtcaaactttccagtttcacggtgtgttaaagccaaagattaagtccatgcaccaaatgctaaacaaggtaggcatcgactctattgctacggcaggcgacgtaaaccgaaacgtactatgtacgtcaaatccggttgaatctgagcttcaccttcaggcatttgaatgggcgaagaagataagtgaacacttactacctaaaacccgcgcgtatgctgaaatttggttagacggtgaaaaagtcgaaacgactgaaaagcctgtagagcctattttgggtgataactatttaccgcgtaagtttaaaacgacggtggtgattcctccgcaaaacgatgtagatgttcacgcgaatgatcttaactttgttgcgattgctgaaaatggacagctagttggctttaacgtacttgtcggtggtggtcttgcaatgactcacggcg

SEQ ID NO: 222929 - DNA, 645 bp, Unknown
  Bacterial polypeptide expressing nucleotide sequence isolated from the Sargasso Sea
cgtaaatcgaaacgtactttgtacgtcaaatcctgtggaatctgagctacatcttcaagcgtttgagtgggctaaaaagataagtgaacacttacttcctaaaactcgagcgtatgcagaaatttggttagatggcgagaaagtagaaacaactgaaaagcctgtagagcctattttgggtgataactacttgccgcgtaaatttaaaacgacggtagttattcctccgcaaaatgatgtagatgttcatgcgaacgatcttaactttgtggcgattgcagaaaacggccagctagttggctttaacgtacttgtgggtggtggtcttgcgatgacccacggtgataagagcacgtatccacgaaaagcgtctgacttcggatttattccgcttgaaaacacgctcgacgttgccgctgcggttgtaacaacccagcgtgattggggtaaccgtgttaaccgtaagaacgcaaagaccaagtacactttagagcgtgtaggggtagacaactttaaagctgaagttgaaaagcgcgcgggtgtgacgttccaagaaagtcgaccttacgagtttacaggtcgcggcgatcgatttggctgggttgaaggcattgacggtaaataccaccttaccgtgttcatcga

SEQ ID NO: 222930 - DNA, 949 bp, Unknown
  Bacterial polypeptide expressing nucleotide sequence isolated from the Sargasso Sea
atgagtgagcaaaagttagcattaaacgaatacctaaagaccgacagtgattatctgcgtggcactattaaagagggattagactcctcggtgacgggcagttttagcgacggcgatcagcaattgatcaagttccacggcttctatcagcaggatgaccgcgatttacgtaacgagcgtaaagaacaaaaactcgagcctttatatagctttatgttacgtgcccgcgtgccaggtggtgtgtgtacacctaagcaatggttaggtgtggatgaaattgcctcgacgcttactagctctaacagcattcgtttaacgacgcgccagacgttccaataccacggcattccaaagcgtaatcttaagaccattattcaaggcttggaccgtgaggcactcgattctattgccgcctgtggtgacgttaaccgtaacgtgatgtgtaacccgaatccggtggaatctaagctgcatgcgcaggcctatgaagtcgcgaaaaagctgtctgatcacctgctgccccacactcgcgcctacgccgagatttggttagatgaagagaagttactgaccacagaagacgaaaccgttgaacctgtgtatggcaaaacctacttgccacgtaagtttaaaatggccgttgccgtaccaccggataacgatgttgacgtctataccaacgacttaggctttattgctgtggctgaaaacggcgaattagtcggttttaacctgacagcaggtggcggcatgggctcgacccacggtgaagtcgaaaccttcccgcgcttggccgatgactttggtttcatcaaaactgaagatgtgatgaagtttgccgaagctgtgatgacagtgcagcgtgattggggtaatcgtaccaaccgtaagcgttcacgccttaagtacactatcgtcgaccatggctatgagaagtttaaggccgaag

SEQ ID NO: 222931 - DNA, 766 bp, Unknown
  Bacterial polypeptide expressing nucleotide sequence isolated from the Sargasso Sea
agaaaggttcgccaatttatcttacatcatcaatttgcagacttagtggcgaactatcagctcaaggccgatgctaatctggatgcaaacaagttagtggagctattacgcccattaacgccaagactctactccatcgcttcgagccagagtgaagtcgataccgaagtgcatctgacagtggccttggtggaggatgagcaccaagggcaagcccgttttggcggcgcatcgcatttcttagcctcggcagaggaaggcgccgaagtaaaagtgtatgttgaaccgaacaagcatttccgtttacctgaagatccacaaacgcctgtcatcatgattggcccaggcactggtgttgcgccgtttcgcgcctttatgcaggagcgcgtggcgcaaggcgctgagggcgatagctggttattcttcggtaatcctcactttgagcaggacttcctgtatcaaaccgagtggcaacagtatctgaaaaacggcgatttaacccgtatcgatgtggcattttcgcgggatcaggcccataagatttacgtgcagcaccgaattaaagagcagggacaaaccctgtggcaatggctgcaaaatggcgcgcatctttatatttgtggtgatgccgagcgtatggccaaagacgtacatcaagccctattagcggttgcggtggagtttggcggactgtcgagcgaggcggcggaagaatatttcgagagcctgcgcagtcataaacgttaccaaaaagacgtgtactaat

SEQ ID NO: 222932 - DNA, 922 bp, Unknown
  Bacterial polypeptide expressing nucleotide sequence isolated from the Sargasso Sea
ttgagcgcggacgcgacggtcaacgtgtcaggcgtgggtgaaatgcatctcgccgacgcgctcgcgaggcactacgaaatcgcgcgccccagccccgctgcgctcgcattcattgccgcccgcagcagcaacagcgcattgcgcgatctgctcggcaccgagcgcaaggccgatctcaaacaatggctgtggggccaacagctcgccgacgtccttcacgagtttcccgtcaagctgacggcagccgaattgaccggcatgctcaagcgcctgcaaccgcgtttgtattcgattgcatcgagcccgaaagcgcatcccggcgaagttcatctgacggttgccgccgttcgctatagcaacgggcgccgccatcgcaagggcgtctcgtcgacgttcctcgccgaccgcgcgagcgacgtcagcgtgccggtattcgtgcagaagtccgcacactttcggcttcctcatgttcccggcacgccgatcatcatggtcggtccaggcaccggcattgcaccgtttcgcggatttctgcacgaacggcgtgcacggggtgacaagggccgcaactggttgttctttggcgagcaacacgcagccaccgatttctactatcgcgacgaacttgaggcgatgcgggacagcggtgttctaacccggctcgacctcgctttctcgcgcgatcaaacggaaaaaatttatgtgcaggaccgcatgcgcgagcagggtgcgcaattgtgggcatggctcgaagacggtgcgcatttctacgtctgcggtgacgcaaaccggatggcaagagacgtggacgcgacgctcaggcatgtggtcgcccagcacggcggcatgagcgaagaaaaagccgctgagtatgtgagccatctggcgcaggaaaagcgctacgtgcgtgacgtttattgac

SEQ ID NO: 222933 - DNA, 1699 bp, Unknown
  Bacterial polypeptide expressing nucleotide sequence isolated from the Sargasso Sea
atgagtgagcaaaagttagcattaaacgaatacctaaagaccgacagtgattatctgcgtggcaccattaaagagggattagactcctcggtgacgggcagttttagcgacggcgatcagcaattgatcaagttccacggcttctatcagcaggatgaccgcgatttacgtaacgagcgtaaagagcaaaaactcgaacctttatatagctttatgttacgtgcccgtgtgcctggcggggtgtgtacgcctaagcaatggttaggcgtagatgaaattgcttcgacgctcaccagctctaacagtattcgtttaacgacgcgtcagacgttccaataccacggcattccaaagcgtaacctgaagaccattatccaaggcttggatcgtgaagctctggattctatcgctgcctgtggtgacgttaatcgtaacgtgatgtgtaaccccaatccggtggaatctaagctgcatgcgcaggcctatgaagtcgcgaaaaagctgtctgatcacctgctgccgcacactcgtgcttacgccgagatttggttagacgaagagaaattactgactacagaagacgaaaccgtagaacctgtatacggcaaaacctacttaccacgtaagtttaaaatggccgtggccgtaccgcctgataacgatgttgatgtctacactaacgacttaggctttattgccgtggctgaaaatggcgaattagtcggttttaatctgaccgcaggtggcggcatgggctcgacccacggagaggtagaaaccttcccacgcttagccgatgactttggttttattaaaaccgaagatgtgatgaagtttgccgaagctgtgatgacagtgcagcgtgactggggtaatcgtaccaaccgtaagcgttcacgcctgaaatacaccatcgtcgaccatggctatgagaagtttaaggccgaagtggaagcccgtgccggcgttaagtttgaacccaagcgcgatgtggtgattggcgatcgcggcgatcgttacggctgggtagaaggtgtcgatggtaagtggcatttaaccctgtttatcgaaagcggccgtatcaaagacttgccgggtaagagcttacaaactggtatgcgtgaaatcgctaagatccacaagggtgatttccgtatgacctcaaaccagaatatgattatcgcgggtgtggcgcccgaggataaagcgactatcgaaggccttgcccgtaaacacggtttactcggccaagtgttgacacaaacccgtggtcattcgattgcctgtgtggccttgccaacttgtccattggcgatggcggaagctgagcgttatttccctgagtttattgaccatattgatgcgctgcaggctaaaaatggcattagcgatcaagctattgtggtgcgtatgacaggctgtccaaacggttgcgcgcgcccatttgccgccgaaatcggtcttgtgggtaaggcgccggggcgctataacctgtatctcggggcgaacttcgaaggcactcgcctaaataagatgtacagagagaatatccaagaggctgagatccttgctgaattggatgcattatttgcccgctacgcgattgagcgaaatgcaggtgaaacctttggtaacttcactgtccgcgtgggcgtggtgaaggcggttatcgatgccgctaaggatttccatggctgat

SEQ ID NO: 222934 - DNA, 1822 bp, Unknown
  Bacterial polypeptide expressing nucleotide sequence isolated from the Sargasso Sea
atgttgttaaaagaactttcatcactggcttcacccctgtcgcaaccgcaggtcgacaagctgaaacaactcaccgcggaattaaatgccgtgcaacttgcttgggtgagtggttatttagccgcaacagccaatgcgggagggaatcaagcccagctagtgccagtgtctgatacacaggcagcgcagactgtaaccattctctatggcagccaaaccggcaatggtcgtggcattgccaaagccttggccgaaaaggctaaagcacagggctatagcgtgaatttagcctccatgggtgaatacaatgtgcgccagctcaagcaagaaactttgttattgctggtggtcagtacccatggtgaaggtgacgcgccggatgatgcgattgaattacataagtttttaacatcaaaacgcgcacctcaattaaacaacttacattactcagtgttggctttgggtgattcgagctatgagttcttctgccaaaccggtaaagactttgatgcgcggctttcggcattaggcgctaaagccttattgccgttggttgagtgtgatgtggactatgaggctgcggccggacagtggcacgccgatgtgcttactgcggttaagccactcattcaaaccacggctaatgtggtggcactgaatgaaattaattcaacttcggcgcaagttgccagcgagggcgaatttactaagcaaaacccttacagtgccgaagtgttggtgagccaaaagatcaccggacgcgattcagacagggatgtgcgccacgttgaaattgatttaggtgaatcaggcttacgctatgaagtcggtgatgcccttggggtgtggtttagcaatagcgaaaccttagtcgatgagattttggcgggcttagggttagcggccgatgccaaggtgactgtcgctaatgagtcaatcagcctcaagcaagccttgatcgagaagaaagaactgacgcagttgtatcctggtttagtcaaaacttgggccgagttgtccgcaagtcctgagctacttgctattagcgaagataaagagcaggttcgtcagtttatcttacatcatcagtttgcagacttagtggctaattacaagctcaagcctgacgctaatctcgatgcaaacaagttagtggaattattacgcccattaacgccaagactttactccatcgcctcgagccagagtgaggttgatacggaagtgcatttaaccgtggcattggtggaagatgaacatcaagggcaaacgcgttttggcggtgcttctcacttcttagcctcggcgcaggaaggcgccgaagtaaaagtgtatgttgaaccgaataagcatttccgtttacctgaagatccacaaacgccggtcatcatgattggtcctggcaccggggttgcgccgtttcgcgcctttatgcaggagcgcgtggcacaaggcgctgagggcgatagctggttattcttcggcaacccgcattttgaacaggacttcctgtatcaaaccgagtggcaacagtatctgaaaaacggcgatttaacccgtatcgatgtggcattttcgcgggatcaagcccataaggtttacgtacagcaccgtatcaaagagcaggggcaagccctgtggcaatggctgcaaaacggcgcgcatctttatatttgtggtgatgccgagcgaatggctaaagacgtgcaccaagccttgcttgaggttgcggtggagtttggcggactgtcgagcgaggcggcggaagaatatttcgagaccctgcgcagtcataaacgttaccaaaaagacgtgtactaat

SEQ ID NO: 222935 - DNA, 1636 bp, Unknown
  Bacterial polypeptide expressing nucleotide sequence isolated from the Sargasso Sea
cttgcgcggcaccatagcgcaggatctcacagacccgctcaccggcggcttcaacggcgacaacttccagctgatccgctttcacggcatgtaccagcaggatgaccgcgacattcgcccggagcgcaccgcccagaagctggagccgctgcacaacgtcatgctgcgcgcccgcctgcccggcggcatcatcaccccggcccagtggcaggtgatcgacaagttcgccgaggatcacagcctgtacggcagcatccgtctgaccacccgccagacgttccagttccacggggtgctcaagcgcgacatcaagatgatgcaccagaccctcaacagcaccggcatcgacagcatagccaccgccggcgacgtgaaccgcaacgtgctctgcaccagcaacccggtggaatccgagctgcaccaggaggcctacgagtgggccaagaagatctccgagcacctgctgcccaagacccgcgcctacgtggagatctggctggacggcgagaagttggggggtgacgaagagccgatcctgggttccaactacctgccgcgcaagttcaagaccactgtggtgatcccgccccacaacgacgtggacatccacgccaacgatctcaacttcgtggccatcagtgatcacggcaagctggtgggcttcaacgtgctggtgggtgggggcctggccatgacccacggcgacaccagcacctacccgcgcaaggcgagcgatttcggcttcgtgccgctctcccacgtgctggaagtggcagccgccgtggtcagcacccagcgcgactggggcaaccgggtcaaccgcaagaacgccaagaccaagtacaccctcgagcgcgtcggcgtcgaggccttcaaggccgaggtggagagccgtgccggcatcccgttcgggccggtgcgcccctatgagttcaccagccgtggcgatcgcttcggttgggttgaggggatcgacggcaagcaccatctgaccctgtttatcgagaacggccgcctgctggacttcccgggcaagcccctcaagaccggcatgctggaaatcgccaagatacaccagggggatttccgtctcaccgccaaccagaacctgatcatcgcaggcgtacctgccggcgagaaggcccgcatcgaagcactggcacgccagtacggcctgctggatgacggcgtgagcgagcagcgcaagcagtccatggcctgcgtggccctgcccacctgcccgctggcgatggccgaggccgaacgcatgctacctgccttcgtcagcgacatcgaagggctgctggccaaacacggtctggccgatgacgccatcatcttccgggtcaccggctgccccaacggctgcggccgcgccatgctggcggaggtgggtctggtgggcaaggcgccgggacgctacaacctgcacctgggtggcaacctcgaggggacccgcatcccgcgcctgcacctggagaacatcacggagccgcagatcctggccgagctggatgccctgatcggtcgctgggccaaggatcgcagcgcgggcgagtgcttcggcgacttcgtcatccgcgccggcatcatagccccggtcatcgactccgcgagggacttctatgcagcctga

SEQ ID NO: 222936 - DNA, 1297 bp, Unknown
  Bacterial polypeptide expressing nucleotide sequence isolated from the Sargasso Sea
atggcgggaaaatcatctaaatccgagtggtcagcaaagaaaccctatttcactaaaattactgacaatttcgtattgaatggagaatcttcaagaaaagagacaagacatattgtattcgatttgggagattccggtttggagtacaaggcaggggacgcccttggcgtagttccaagatgtcctcccgaggaagtggaagaaatcctgagaatttgtggattctctggtgaggaaatagtggaaaccaacctcggagattgctctctaagagacgctctaacagataggtatgaggttcacagagtctcgaagaagtggattaagggactagcagaaaggtcaggaggagatgctcccaagtcggaaataagaatcgtctcaagaaagagatcctcatcagtcgatggagcgctaatagttgactggtcgtcaagcggtgagggagacgttcccgaaggctatgttgagatgggggaaatgggcgataactcagcaatacttctccacgaacttatctccgataacgatgcgatggaggactacatttggtcacgagattatgtcgatgcattgggagatttcgctagtttcggcttcactccacagcaactattggaaggaatggaccgtttgaagccgagactgtattcgatagccagcagccccgacttcgaagagggaacagtccatctgaccgtagccatagtgagatactctcaccatgaaagggatcggacaggcctttgtacggggttcatggcagacaggtgtgagaccaacactacggaagtgggagtttacatgtctcctacaagatctttcgttctcccagaggatggtacaaaggacatcataatggtaggacctgggactgggatagcccccttccgtgcattcctgcaacagagagagataaacggggactcagggagaaattggcttttcttcggcgattggaccgaggagggagagtatctctacagggatgagatgggcgattggaaagataggggaataatctcgaaacatgatttagcatggtctagacaaggatctgagaaagtatatgtccagcacttgatggagaaaaatggggaggaaatttggaactggatagatggaggtgcatacttctatgtttgtggcgataaacagtatatggcaaaagacgtacactcgacattgataggaatctgctcggagtttggcggaatgagtcctgaagatgcaaaggatttcgtagagacaggattaatgaaaacggagaagaggtatctcagagacgtatattgat

SEQ ID NO: 222937 - DNA, 4189 bp, Unknown
  Bacterial polypeptide expressing nucleotide sequence isolated from the Sargasso Sea
catgaccgccacccccgtcaagagcgtgtgcccgtactgcggcgtcggctgcgggatggtgctgcacgtcgaggaaggcgaagtcgtcaaggtgtccggcgacgccgaccatccggccaacttcgggcggctgtgcacgaagggctcgtcggcgcacgtcgcgctgcgccgctcggggcggctcgaccgcgcgttcgtgcgccgcgcgcgcgaggacgacctggtgccgctgccggcccgcgacgcgatcgccgacaccgcgcgccgcctgcgtgcggtgctcgacgcgcacgggcccgacgcgctgtcgttctacgtatcggggcagatgtcgatcgaggcgcaatacctcgtcaacaagctcgcgaagggcttcgtcggcacccacaatatcgagtcgaactcgcgcctgtgcatggcgagcgcgggcaccggctacaagcagtcgctcggcgcggacggcccgcccgggtcgtaccaggatttcgatcgcgcgaacctgttcttcgtgatcggcgcgaacatggccgactgtcatccgatcctgttcctgcggatgatggatcgcgtgaaggccggcgcgaagctgatcgtcgtcgatccgcgccgcaccggcacggcggacaaggccgacctgttcctgcagatccggccgggcaccgatctcgcgctgaccaacgggctgctgcacctgctgcatgcgaacggccgcaccgatgccgcgttcatcgatgcgtacaccgaaggctgggacgcgatgcccgcgttcctcgccgactacacgcccgagcgtgtcgcggaaatcaccgggctcgcggaagccgatctccgcacggccgcgcagtggatcggcgacgcgcaggagtggatgagctgctggacgatggggctcaaccagagcacgcacggcgtgtggaacaccaatacgatctgcaacctgcatctcgcgacgggcaagatctgccgccccggcagcggcccgttctcgctgaccggccagccgaatgcgatgggcgggcgcgagatgggctacatgggccccgggctgccgggccagcgctcggtggcgtccgacgacgatcgccgtttcgtcgagaacctgtggcgcgtgccggccggcacgctgcgcacggagaccgggcaaggcacggtggacatgttctcgcggatggcggccggcgacatcaaggcctgctggatcatctgcacgaacccggtcgccacggtgccgaaccggcagaacgtgatcgccgggttgcaggccgccgagctcgtgatcgcgcaggatgcattcctcgacaccgagaccaaccgctatgcggacatcctgctgcccggcgcgctgtgggcggaaggcgacggcgtgatgatcaactccgagcgcaacatgacgctgatgcgcgcggcaatcgcgccgccgggcgacgcgctgcccgactggcgcatcgtcgcggaagtcgcgcgcgcgatgggctacggcgatgcgttcgactatgcgtcggcggccgacgtgttcgacgagatcgtgcgcttctcgaatccggcgaccggctacgacctgcgcggcgcgagccatgcggcgctgcgcgacgggcccgtgcagtggccggtcgcgccgggcaccgcgcgcgaacgccacccgatccgctacctgaacgacggcgtgagccagacgctgcgcccggccgccgacggcaacgacgcgccgcgcgtcgcgttcccgacgccgtcgggcaaggcgcgcttcttcgcgcggccgcacgtcgatccggccgagctgcccggcgacacgttcccgatcgtgctgaacaccgggcggctgcagcatcaatggcacacgatgacgaagacgggcaaggtcgcgatgctgaacaagctcaacccgcgcccgttcgtcgagctgcacccggacgatgcgagcgcgctcggcatcgccgcgaaggacagcgtcgagatccgttcggcgcgcggccgcgcggtgctgccggccgtcgtgaccgagcgcgtgcagcgtggcaactgcttcgcgccgatgcactggaacgacgtgtacggcgacgagctgtgcatcaacgcggtgacgaacgacgcgatcgaccccgaatcgcagcaacccgaactgaaatactgcgcggtcgcgctgcggcgcgtcgagaccgatgcgttcgcgtccgccgatgaagcggccgcgcatcccgacgcccgcgccgacgacgcgcagccggcgccggcgctggtgcaggcgactgcttcacaggaatccgacatggcagacatcgacactttcgcggcggcgctcggcgtggccgatatcgcgccgccgccgttgacggacaccgagcggctgtacgtggccggcttcgtcagcgggctgaaggcgggcgcgggccggcgcgagggcggcgtgcccgtggtgccggcagccgcgccgctcacgctgccggttcgcttctggctcgacgggatgctcgcggggttgttcagccgttcggcgcccgctcgggcacaggacggtgcggcgccgtcgctgccggccgatgccggcgcgtccggcggcgtgcggatcgtgcgcgcgcggccgaaggtcgtgctgctgtgggcatcgcagaccggcaacatagaatcgttgaccgaggattacgcgactcagttgatgaacgcgggcttcgacatccgcaccgcgtgcatgtcggactacccggtggcgtcgctcgccggtgcgcagtacgtgctgctgatgacgagcacgttcggcgacggcgatgcgcccgacaacggcagcgaattctgggacgcgctgcaggccggcagcgccgcgcgcctcgacggcgtgcacttcgccgtgctcgcgttcggcgatcgcaactacgaccagttttgcggccacggccgccggctcgacgctcggctcgcggaactcggcgcggcgcgtctctgcgcgcgcgtcgattgcgacgtcgaattccagcgcgacgccgaccagtggctcgaacgcgtcgtcgcgcggatcaaggaggccgacgccgcgctgcacgcggtgccgaccggcgggatgagcccgtcggggctgctgccgacgaaggcgcatccggcgccgtcgaagctcgtcgcgaacctgcggctgaaccgtccgggtgcggcgaaggagacgcgctatgtgtcgctgtcgaccgaaggcgcgaacctcgaatacgaaaccggcgacgcgctcggcgtgtggccgaccaactgcccggagctggtcgacgaactgctgtccgtcaccgcgctgaaggccgatgcccccgtgtcggtggcgggtgtcggcgatgtgcgcctcggtgacgcgctcgcgcgtcacttcgacatcacgcgcccgcatccggacacgctcgcgttcatcgcgtcgcgcagcgcgaacggcgcgttgaaggcgctgctcggcgacgaccgcaagggcgacctgaagcaatggctgtgggggcagcagctcgcggacgtgctgcacgagtttccggtcgagctgtcgggcacggagctggtcgggatgctcaagcgcatgcagccgcgcctctattcgatcgcgtcgagcccgagcgcgcatgcgggcgagatccacctgaccgtgtcggccgtgcgctatcacaacggccggcgtgcgcgcaaaggggtggcgtcgacgttcctcgccgatcgcgcggatgacggtcgcgtgccggtgttcgtgcagaagtccgcgcatttccggccgccggtgagcggcgacgtgccgatcgtgatggtcggcccgggtaccggcgtcgcgccgttccgcggcttcctgcacgagcggcaggcgcgcggcgcgcgcgggcgcaactggctgttcttcggcgagcagcatgcgcagaccgacttctactacggcgacgagctgcgcgcgatgcacgacagcggcttcctgacgcggctcgatctcgcgttctcgcgcgaccaggcagacaagatctacgtgcaggaccggatgcgcgagcaaggcgccgagttgttcgcatggctggaggaaggcgcgcacttctacgtgtgcggcgatgccgcgcggatggccaaggacgtcgatgcggcgctgaaggcggtcgttgccgagcacggcgggatgtcggacgaagccgcgaacgactacgtcgcgcggctttcgaaggcgcggcgctatatgcgggacgtgtactga

SEQ ID NO: 222938 - DNA, 1699 bp, Unknown
  Bacterial polypeptide expressing nucleotide sequence isolated from the Sargasso Sea
atgagtgagcaaaagttagcattaaacgaatacctaaagaccgacagtgattatctgcgtggtaccattaaagagggattagactcctcggtgacaggcagttttagcgacggcgatcagcaattgatcaagttccacggcttctatcagcaggatgaccgcgatttacgtaacgaacgtaaagagcaaaaactcgagcctttatatagctttatgttacgtgctcgcgtgccaggcggtgtgtgtacacctaagcaatggttaggcgtggatgaaattgcctcgacgctcaccagctctaacagcattcgtttaacgacgcgccagacgttccaataccacggcattccaaagcgtaatcttaagaccattattcaaggtttggaccgtgaggcactcgattctatcgccgcctgtggtgacgttaaccgtaacgtgatgtgtaacccgaatccggtcgaatctaagctgcatgcgcaggcctatgaagtcgcgaaaaagctgtctgatcacctgctgccgcacactcgtgcctacgccgagatttggttagatgaagagaagttactgaccacagaagacgaaaccgttgaacctgtatatggcaaaacctacttgccacgtaagtttaagatggccgttgccgtgccgccggataacgatgttgatgtctatactaacgatttaggctttattgcggtggctgaaaatggcgaattagttggttttaacctgaccgctggcggcggcatgggctcgacccacggtgaagtcgaaaccttcccgcgcttggccgatgactttggttttatcaaaactgaagatgtgatgaagtttgccgaagctgtgatgacagtgcagcgtgactggggcaatcgtaccaaccgtaagcgttcgcgccttaagtacactatcgttgaccatggctatgagaagtttaaggccgaagtggaagccagagctggcgtcaagtttgagcccaagcgcgatgtggtgattggcgatcgcggcgatcgttatggctgggtcgaaggtgtcgatggtaagtggcatttaaccctgtttattgaaagcggccgcattaaagacttgccgggtaagagcttacaaaccggaatgcgtgaaatcgcgaagatccacaagggcgatttccgcatgacctcaaaccagaatatgattattgcgggtgtggctcccgaggataaagcgaccattgaaggccttgcccgtaaacacggtttactcggccaagtgttgacccaaactcgcggtcattcgattgcctgtgtggccttgccaacctgtccattggcaatggcggaagctgagcgttatttccctgagtttatcgaccatatcgatgcgctgcaggctaaaaatggcattagcgatcaagcaatcgtggtgcgtatgacgggctgtccaaacggttgcgcccgcccatttgccgccgaaatcggcttagtgggtaaggcgccgggtcgctataacctgtatctcggggcgaacttcgaaggtactcgcctgaataagatgtacagagagaatatccaagaggctgagatccttgctgaattggatgcattatttgcccgctacgcggttgagcgtaatgcaggcgaaacctttggtaacttcaccgtccgcacgggcgtagtgaaggcggtaatcgatgccgctaaggatttccatggctgat

SEQ ID NO: 222939 - DNA, 1813 bp, Unknown
  Bacterial polypeptide expressing nucleotide sequence isolated from the Sargasso Sea
atgttgttaaaagaactttcatcactggcttcacccctgtcgcaaccgcaggtcgaaaagctgaaacaactcaccgctgaattaaacgcggtgcaacttgcttgggtgagcggttatttagccgcaacggccaatgcgggcaatcaggcccagctcgcgcccgtgtccgacgcacaggcggcgcagacagtgaccattctctatggcagccaaaccggcaatggccgtggtattgccaaagctttggccgagaaggcgaaagcgcagggctatggcgtgaatttagcctctatgggggaatacaatgtgcgtcagctcaagcaagaaaccttgctactgctggtggtcagtacccatggcgaaggtgaagcgccggatgatgcaattgaattacataagtttttagcatcgaaacgtgctcctcaattaaacaacttacattactcagtgttagcactgggcgattcgagctatgagtttttctgccagacaggtaaagacttcgatgcccgtctgtcggcattaggcgccaaagcgctgctgcctctggttgagtgtgatgtggattatgaggctgcggccggacagtggcacgccgatgtgctcaccgccgtgaagccactcattcaaaccacggctaacgtggtggcgctcaatgataccggctcggcacaagttgccagcgagagcgaatttactaagcaaaacccttacagtgctgaggtgttggtgagccagaagatcaccggacgcggttcagaccgagacgtacgccacgttgaaatcgatttaggcgagtcaggcttacgctacgaagtgggtgatgcccttggggtgtggtttagcaacaatgaaactttggtcgatgagattttagcgggcttagggttagcggccgataccactgtgaccgtcggtaatgagtcaatcagcctcaaacaagccttaatcgagaagaaagagctgacgcagttatatcctggtttagtcaaagcctgggccgagttgtccgcaagccctgagctgcttgctattagcgaagataaagaacaggttcgccagtttatcttacatcatcaatttgcagacttagtggcgaactatcagctcaaggccgatgctaatctggatgcaaacaagttagtggagctattacgcccattaacgccaagactctactccatcgcttcgagccagagtgaagtcgataccgaagtgcatctgacagtggccttggtggaggatgagcaccaagggcaagcccgttttggcggcgcatcgcatttcttagcctcggcagaggaaggcgccgaagtaaaagtgtatgttgaaccgaacaagcatttccgtttacctgaagatccacaaacgcctgtcatcatgattggcccaggcactggtgttgcgccgtttcgcgcctttatgcaggagcgcgtggcgcaaggcgctgagggcgatagctggttattcttcggcaacccgcattttgagcaggacttcctgtatcaaaccgagtggcaacagtatctgaaaaacggcgatttaacccgtattgatgtggcattttcgcgggatcaggcccataagatttacgtgcagcaccgcattaaagaacagggacaaaccctgtggcaatggctgcaaaatggggcgcatctttatatttgtggtgatgccgagcgtatggctaaagacgtacatcaagccctattagcggttgcggtggagtttggcggactgtcgagcgaggcggcggaagaatatttcgagactctgcgcagtcataaacgttaccaaaaagacgtgtactaat

SEQ ID NO: 222940 - DNA, 1006 bp, Unknown
  Bacterial polypeptide expressing nucleotide sequence isolated from the Sargasso Sea
tccggcctgtgttatcagccgggcgacgcgctgggcgtgtggtatcagaacgacccggcgctggtcaaagagctggttgaactgctgtggctgaaaggtgatgaaccggtgacggttgaaggcaaaaccttgtcgctcgctgaagcgttgcagtggcatttcgagctgacggtgaataccggcaatatcgtggagaactatgccaccttaacccgcagcgaaacattgctgccgttagtgggtgacaaagcacagttgcagcattatgccgccaccacgcccatcgtcgatatggtgcgcttttccccggcgcaattggatgctcaggcgttagttgatcttctgcgtccgttgacgccgcgtttgtactccattgcctcttctcaggcggaagtggaaagcgaagtgcacgtcaccgtgggcgtggtgcgttatgagatagaaggtcgcgcccgtgctggtggtgcttccagtttcctcgccgaccgcgtggaagaagaaggtgaagttcgcgtgttcattgaacacaacgacaatttccgcctgccgtcaaacccgcagacgccggtaattatgattggcccgggtacgggaattgcaccgttccgtgccttcatgcagcagcgtgcggctgatggagccgaaggcaaaaactggctgtttttcggtaacccgcactttaccgaagatttcctgtatcaggtggaatggcagcgttacgtcaaagagggcgtactgagccgtatcgatctcgcctggtcccgcgatcaaaaagaaaaagtctacgtacaagataaactgcgccaacagggcgcggaactgtggcgctggattaacgacggtgcccacatttatgtctgcggcgacgccaatcgtatggcgaaagacgttgagcaggcgttgttggaagtgattgccgaattcggtggtatggatatcgaagcggcggatgaatttttaagtgagctgcgcgttgagcgccgttatcagcgagatgtctactaat

SEQ ID NO: 222941 - DNA, 859 bp, Unknown
  Bacterial polypeptide expressing nucleotide sequence isolated from the Sargasso Sea
atgagcgaaaaacatccagggccactggtggtcgaaggtaaactgacagacgccgagcgcatgaagctggaaagcaactatctgcgtggcaccattgctgaagatctgaatgacggtctcaccggcggtttcaaaggcgacaacttcctgctgatccgtttccacggcatgtaccagcaggacgaccgcgacatccgcgccgagcgtgcagagcagaagctggagccgcgtcacgcgatgctgctgcgctgccgtctgccgggcggggtgattaccaccaaacagtggcaggcgatcgacaagtttgccggtgaaaacacgatctacggcagcatccgtctgaccaaccgtcagaccttccagttccacggcattctgaagaagaacgtcaagccggtgcaccagatgctgcactccgttgggctggacgcgctggcgaccgccaacgacatgaaccgtaacgtgctctgcacctcgaatccgtatgagtccgagctgcatgccgaagcgtacgagtgggcgaagaagatctccgagcacctcctgccgcgcacgcgcgcctatgcggagatctggctcgatcaggaaaaagtcgcgaccaccgatgaagagccgatcctcggccagacctacctgccgcgtaagtttaaaaccacggtagtgatcccgccgcagaacgatatcgacctgcacgccaatgacatgaacttcgtggcgattgccgaaaacggcaagctggtgggctttaacctgctggtgggcggcggcctgtccattgagcacggtaacaagaaaacctacgcccgtaccgccagcgagttcggcttcctgccgctggagcatacgctggccgtggcgg

SEQ ID NO: 222942 - DNA, 1807 bp, Unknown
  Bacterial polypeptide expressing nucleotide sequence isolated from the Sargasso Sea
tatgctatttgcatcgttagctgctcaggccagtcctttgtccgctcaacaaatcaaggatttacaatcgcttgtaagtcaactgaaccctattcaacaggcctgggttagtggctatctggcggcagcagcgcaattggctggcggtcaaactgctgcggtttcgccacagagtcacgaaagtgccgtgttgaccatattgtatggctcacaaaccggtaatgccaaagctgtagcgaacaaaattcaagcggctgctgagcaacaaggcatagctgtgaagttgacagatattggcagctacaaaaccactcaattggcgaaagaaaaatacctgctgattgtcacttctacttatggcgaaggtgagccgccagaaagtgctgtggctttccacaaatttttattcagtaaaaaagcaccaaaactggatggtctgaagtatgccgtgctgggtttaggtgataccagctatgaattcttctgcaaaacagccatcgactttgacgaacaactggcagctttaggtggcaaaagattacacgcccgtgctgatctggatgttgattatgcagcgcaggcggccagctggacagaaacagcagtgcaggcttttgcgccagagttaaaacaagctacgggttccgcccaggttattgcctggcctggtgccacagccacagctggtcatgacagcgcttatagcaaagaaacaccttatctggctgagttatccgtcaatcagaaaatcactggccgtgattcaaccaaagatgtgcggcatatcgaaatttctttagctgattcaggaataacctatcagcctggtgatgcgctgggggtgtatttccttaatgacgataaagctgtagacgctattctggccgctacgggtctggatggtgcttctgaagtgcagttggcaggccagacgtacagcttaaaaacggcgttaactgaacatttagagctgactcagtcctatccaagctttgtagaaaagtacgctcaggcgaccgccaacagtgaattgctggagctggtcaaagataaagctgctttgcgtcagtatctggacaatcgccagactttagatgtgattttgcaaaacccggcgcctttaactgcccagcagttagtggatgcgttgcgtaaacagcaaccgcgcttgtactccattgcatcctctcaggctgaagtgggtgatgaagtgcatttaactttgggcgtagtacgttacgacgcttttggtgacacccatttaggtggcgcttcaggtttccttgccgaacgcctggaagaaggcgctcaattaaaagtatttgtggaacacaacgacaacttccgtctgccggatcatgaaaccccagtcattatgatagggccaggcactggcatagctccgttccgtgctttcttacaagagcgggatcaggctggagccacaggccagaactggttgttttttggtaacccgcactttacgcaagacttcctgtatcaggtcgaactgcaggattatttaaaacgcggtgtgctaagtaaactggatgtggcttttagccgcgatcaggctcagaaggtttatgtgcaggacaaactgcggttaaaagccaaagaaatctggacctggttgcagcagggcgcttatctctatatctgtggtgatggcaacaaaatggccaaagatgtacatcaggccttgctcgacatagcccaacaacaagcaggttttaccgtagaacaagcagaacagtattttgacgatttacgtcaagccaaacgttatcagaaggatgtttactaa

SEQ ID NO: 222943 - DNA, 1675 bp, Unknown
  Bacterial polypeptide expressing nucleotide sequence isolated from the Sargasso Sea
gctgtctgataacgagcggctgaaaaaagacagccatttattacgtggcactatcaccaaagatttaaaagacgagatcaccggtggttttaacggtgacaactttatgttgatccgttttcacggcatgtaccagcaggacgaccgtgatatccgtcctgagcgcgctcagcaaaaactggagcctttacataatgtgatgttacgtgcccgtatgccgggcggtattatcaaaccagaacaatggctggccatcgacgagtttgcggcggataacaccatctatggcagtattcgtttaaccacccgtcagaccttccagttccacggcgtattaaagccaaagatcaaaggtatgcaccagatgctgaacagcataggtatcgactctatcgctaccgctggtgacgtaaatcgtaacgtcttatgtacctccaacccggtcgagtcggtattgcatcaacaggcttatcagtgggctgcgaaaatttctgagcatttattgccaaaaaccaaagcctacgccgaaatttggctggatgagcagaaggtagagaccacagaagtcgaacctattctgggcgaagcctatttaccgcggaagtttaaaaccacagtagtgatccctccgcaaaatgacgtcgacgtgcatgccaacgacttaaactttgtcgccattgccgaaaatggccagttggttggctttaacgtcttagtgggtggtggcttggccatgacgcatggtgataaaggcacttacccacgtaaagccgaagactttggttttattggtcttgagcatgtgctggctgtggctgaacatgtagtgacagttcagcgtgattatggcgacagggtcaatcggaaaaatgccaaaaccaaatacaccatagaccgaatcggtgtggacgtatttaaagccgaagtggaaaaacgtgttggcgtgaagttccagccaagccgtgcttatgaattcactggccgtggcgatcgttttggttgggtcgaaggcatagacggcaaacatcacctcactgtctttatcgaaaacggccgtattctggattatccgggcaaaactttaaaaacaggtgtcgctgaaattgcccgtattcacaaaggcgatttccgcatgacagccaatcagaacctgattatcgctggcgtcgctgaggaagataaagcccgtattgaagctttagcccgtcaacatggtctgatcaacgactcagtcacagagcagcgtaaaaactctatggcttgtgtgtccttacctacatgtccactggcgatggcggaagccgaacgttatttaccgaccttagtcactcatgttgaagagttgctgaccaaacacggcgtgcctgacgatcacattatattgcgggtggtgggctgtcctaatgggtgtggtcgcgccatgctggccgaagcaggtttagtgggtcgtggtcctggtaaatacaacctgtatttaggtggtaatactcaaggcacccgtattcctaagctgtatttagacaatgtggccgaagctgaaattctgcaggcgctggaccagctgattggtcgctgggtgctcgaacgcaacagcggcgaatgttttggtgattttgtcgtgcgtgttggcgttgtggccgaagtgaaagtatcaaaaaccgactttcatgcctga

SEQ ID NO: 222944 - DNA, 972 bp, Unknown
  Bacterial polypeptide expressing nucleotide sequence isolated from the Sargasso Sea
aatgtttgatgtagttgttataggaagcggtccagctggatatgtggcagcaattagatcatctcaactgggactaaaaactttatgtattgaagagtcatatgatgaaaaaggaaatattaactttggtggtacatgccttaatattggatgtataccatcaaaagctcttttagattcatcgcaaaggtactatgaagcaaataaaaacttagataaacatggtatcaaagttggagatcttaaattagatctaaaaaaaatgatgcatagaaagaatgaaatagttaagaaattaactaccggaatatcaggattatttttaactaataaagttgaatctttatgtggcagaggaaaagttatatcagaaaatatagtagaagttactatgtcagatggatctgttgagaatatagaaacaaaaaatataattattgcaacaggatctaaaccaattgaaattccagctgcaaatttcagtaataatattgtagatagcacaggagctctatcctttaataaggttcctaaatctttaggtgtcattggagcaggtattattggtttagaattaggaagtgtatggtcaaggctaggatctaaagtaacagtcattgaagcattggataattttctgcctatggtagattctgatctttcaaaagaatcttttaaagagtttaaaaaacaaggtctagatattcatttgggctctaaattaaccagctctaaagaacttaaagattctgtacaaattttatatgaacaaaaaggaaatgaagctgaaatgacttttgataagttaattgttgcagtcggaagaaaggccaattcagaagatattatttcaaaagaattagacattaaattagaaaatggtttaatcgaagtaaataattattgtcagacttccatttcaaatatatgggcaattggagatattgtaaggggtcaaatgcttgctcataa

SEQ ID NO: 222945 - DNA, 1045 bp, Unknown
  Bacterial polypeptide expressing nucleotide sequence isolated from the Sargasso Sea
ttattgaatttatctgaaaattttcacaaggcaaaaaattttgaaaagattggtatcgaaactggtgaaattaaattgaaccttggaaagatgatgaaaaataaagaaaaggctgtaactgttttaacaaagggaatagaatttttgttcaaaaaaaataaggtttcttatttcaaaggcaaggggtcatttaagagctcaaatgaagtagtagtttctagggatggaaaggaaacagttattgagactaaaaaagcaataattagtactggttcagagcctgtatcaatacctggaatggaatttgatgaggaaaaaataatctcgtctactagagcattatccttggaaaaattaccaaaaaaaatggttgtagttggtggaggatatattggtttggaaatgggttcagtttggtcaagacttggaacagaagtagaagtcgttgaatttctagatcatattacacctggtatggatcgcgagatatcaagtgaattcatgaagatacttaaaaaacaaggaataaaatttaaattaaataccaaggttgaaaaaattacaaaaaatgaaaatggagttatcctagaagtaattgataaagaaaataagaaaaataatatagaagctgatgttgtccttatttcagttgggagacgaccatacacgaccggtttaaaattagaaaatgtaggagttaaaactgacgaaaaaggaaaggtaaaagtagataaaaattttgaaacaaatattaaaaacatatttgctattggagatgttattgatggtcctatgttagctcacaaagcggaagaggaaggaatagcagttgcagaatttattgctggccaatcaggacatgttaattacgagattatacctggtgtaatttatactactccagaggttgcttcagtaggaaaaactgaggaacaattaaatgaaaaaaaaattaattttaaagtcggaaaatttccttttatggcaaactcaagagcaaaagcaatagacgaaccagaaggtttcgtaaaaatacttgctgatg

SEQ ID NO: 222946 - DNA, 529 bp, Unknown
  Bacterial polypeptide expressing nucleotide sequence isolated from the Sargasso Sea
atgacagaaaaatttcaagcaactataatcggaggtggtccaggtggctatgtatgtgcaataagattagcccaactgggtttaaaaactgcatgcattgaatctagagggagtttaggaggaacttgcttaaatattggatgcataccttcaaaaagtttgcttaatctttcagaaaattttcataaagcaaaaaatttttcaaaaattggtattgaagttggcgaggttaaactcaatctccaaaaaatgatggaaaataaagacaaagcggtaacgactttgacaaaaggtgtagaatttttatttaagaaaaataaagtaacttattttaaaggtactggtaaattaaaatcaaaatctgaaatatcaattatagataaaaataataaagagacaaatatagaatcagaaaatattattataagtactggctcagaacctgtacctcttccaggagttgagtttgatgaagaaaaaataatttcttctactggtgcgttatcattaaagtctgtcccaaaaaaaa

SEQ ID NO: 222947 - DNA, 984 bp, Unknown
  Bacterial polypeptide expressing nucleotide sequence isolated from the Sargasso Sea
tgcataccctctaaagctttgcttcatgcagcgaaagtcatcgatgacgcacacgccatgaaagaccatggaatcgattttggcaccccaagaatcgaccccatcagactttcagcatggaaaaactctgtcgttggcaaactgaccaacggtctgaagtcactggcaaaacagcgtaaagtagaatgcctgaccggaaaaggaactttcctagattcccatcatcttcagattgaatcaaaaagcggaacaaccattgtccgatttgaaaatgccatcatcgccgccggttctgaaccggttaaactcccattccttccagatgatcccaggatcatagattccacgggagcattaaatcttcaaaaaatcccggaaacgatgctggtcatcggaggtggaatcatcggtctcgagatggcgaccgtttacaggtcaatggggaccaaaatcacggttgttgaaatgcttgacgagttgatggctggagccgaccgtgatctggttaaaccctttcaccgcgacgtttcacgtcaaaacgataacatctggctggaaaccagagtcactcaagtcgaagctcagaaaaaaggattgaaggtccattttgagggaaaaaatgctcctgaaaaaccagttgtcttcgaaaaaatcctaagtgcggtgggaagaaccccgaacggattaaaaatcggtgcagaaaacgcaggggtttcggtggatgaaaaaggattcattgcggtcgactcccagatgcgcaccaatgtatcgcatatttatgccatcggagatatcgtcggccaaccgatgctggctcataaggcaacccatgagggtaaggttgccgcggaagtgatttgcgggatgaaaagtcattttgacgctcgggccattccatctgttgcctatactgaccctgaagtcgcatgggccgggatcaccgaagaggaagccaaaagccagggaatgaactatgcaaaggga

SEQ ID NO: 222948 - DNA, 853 bp, Unknown
  Bacterial polypeptide expressing nucleotide sequence isolated from the Sargasso Sea
ctcaaaactttatgtattgaagaattatcaaatgataaaggtaaacctaactttggtggaacatgtctaaatgtaggatgtataccctcaaaatctttattagattcgtcacatagatattatgaagctaaaaaaaatctaagcgatcatggaattcaacttggagatgtgaaattagatttaaaaacaatgatggagcgaaaggataacattgtttcaaaactaactggtggaatagatggattatttttaacaaataaagttgaaagtatttgtggcaaaggaaaagtaatttcaaaaaatactgttcaaattgataaggcagatggttcttctgaaaaagtagacgctaagaatataattatcgccacaggctcctctcctatagaaattcctgctgcaagttttggtaagcatatcgttgatagtactggagctttagctttcgatagtgttcctaaaagattgggtgttgttggtgcaggaattattggcctagagcttggtagtgtttggtctagactaggttctgaagtaaccgttttagaggcactagaggactttttgcctatgactgatacagatatctctaaagaatctttcaaagaatttaaaaaacaaggattagatattcaattagcttcaaaggttactagtacaaaagagttaaagaatttagtaaaagttaaatatgagcaaaaaggaaaagaaatcgaggttgaattcgataagttaatagttgctgtaggtagaaagccaaactcagaaaaagttctgccaaaaaatctaggtatcaaaattgaaaatggttttattcaagttaatgaatactgtcaaacttccgtagaaaata

SEQ ID NO: 222949 - DNA, 1030 bp, Unknown
  Bacterial polypeptide expressing nucleotide sequence isolated from the Sargasso Sea
ttatttatgaactatgatttacttgttctgggtgggggacctgggggttataccgcggcattcagggcggcggatcttggcctaaatgtggctttggtcgagaggtattcaagcttagggggggtctgtttaaacgtgggctgtattccttctaagaccctattgcatgtctccaaggttattggcgaagtaaggggactagcggattacggcatccattatgagagcaaccaaataaatttagagaaattgaatattaaaaaaaggtctgtgatctcccagctatctaatggactggctggcttggctaaacagagaaggatagaagtaataactggggaagggcgatttacacgggctaacaggctcagcgttaattcaagtcaaactcccagcatcgaggttcaatttaaaaatgtgatcatctctactggttccaaatcaattggtctaccggatatcccagatgatcctagaattatagactctaccggagcactagagctcagcgacattccagaaagacttctaatagttggcgggggtatcatcggcttggaaatggcctcagtttatgctgaattaggaagccgggtcacaattgttgagttggcttctgatttgatggttggtttggatcaagatttagtagttcctttagaaaaatctattttaaaaatagtagaggctatttttaaaagcacgcgagtttcgagaatagtttctcataaagattcgctctcggtagatcttgatgggcctgatgttccgtcaaacatgaattttgataaggttttgctagcaattggtcgagagccaaatacgagaggcttgggtttcgaagaattaggcattcaattatcccatgatggttttgtttcggtagacagtatgatgtgcgctgctccgggtgtatacgctgtcggggacatagtagggacgccaatgctagcgcataaagccgctcatcagggtaaagtcgctgcagaagcagtggctggattgaaaactgagttctcgccgtcaacca

SEQ ID NO: 222950 - DNA, 920 bp, Unknown
  Bacterial polypeptide expressing nucleotide sequence isolated from the Sargasso Sea
attaaagcatcccaattaggtcttaatacagcttgtgtagaatttgcctctgatgaaaaaggaaatcaaaaatatggaggtacttgccttaatgtaggttgcattccatcaaaatctcttctggattcatctcacaaatattacgaagctcaaaaagattttgcatctcatgggatagatctaaaagatttatcagtcaatattccttcaatgatgaaaagaaaggatgaagttgttaataaacttacaactggaataactggactctttaaagcaaatggtgttgaagcaatatcaggaagagggaaagttattaatcagaaccttgtagaggtttcaaataatggagatataacaagcttggagacaaaattcataatattagcaacaggctcaaatccaattgaaattccaattgcaaaatggtctgaaaatatagtcgatagtacaggagctcttaattttgacagggttccagaaagacttggaataattggtgctggagtaattggtttagagcttggtagcgtatggtcaagacttggagctgaggttacagtcatagaggcaatggatgatttcttacctattgtcgacaaacaaatttctaaagaatgccatcgagagtttaagaaacaaggtttagatattcatttaggattaaaacttacctcagctaaagataatggtaaagatgttgaaatttcttatgaatcaaaaggtgaagagcttaaagcctcttttgataagttgattgtggctgtagggagaaaacctaatacagctgatatctcagatgagtcatttccaatagagttggatgaattaggaagagtccaagttgacgatttttgtaaaacaaattatgaaaatatttatgctgttggtgatattgttagaggaccaatgcttgcacacaa

SEQ ID NO: 222951 - DNA, 522 bp, Unknown
  Bacterial polypeptide expressing nucleotide sequence isolated from the Sargasso Sea
ccattgaaattaaagataattttcaaacttctgttgaaggaatctacgcaattggcgatgtagctccaggaccaatgctagcacacaaagctgaagaagaaggagtggcttgtgttgaatttataaacggtcaaaaacctcatataaactacgacgctataccagcgattgtttataccaatcctgagatagcatcagttggaaaaacagaggaacaactcaagcaagaaaagaaagacttcaaggttggaaaatttccttttatggcaaatggccgtgccttaactacctctgcatcagaaggatttgttaaaattctggttgataaacaaacagatgaaattttaggtgctcatataatcggtcatgatgctggtcaactgattgcagaaattgttacgacaatagaatttggtggtagtgcagaagatattgctagagtatgtcatgctcatccgacaactagtgaagcagtaaaagaagcagctttaagtgtagatggtagagcaattcatatttaaa

SEQ ID NO: 222952 - DNA, 799 bp, Unknown
  Bacterial polypeptide expressing nucleotide sequence isolated from the Sargasso Sea
catgaccaaaacgcaatttgacattgccgtcattggtggtggtccgggcggctatgtagcagccattcgggcagcccaactagggataaaaacggtggttatcgagcgtgagcacctcggtggcatctgtctaaattggggctgcattccaaccaaagcattgttgcgcgcggccgaattgcggcactcgttgggtgaaatgactgattttggaataatggttggcgaggtaagcgttgaccttggtgcggttgtaaaccgttcacgaaaagtggcatcacgcttatcaaagggggtgaagcagctgttaaaaaaaaataagattcaagtgattgaggccgatgcaaaactaggcgaggcaaaggcagggctgcgccaacttactctctctgatggcaatacggttttagcaaagcatgttattattgccacaggggcacgtgcgcgtgcgctgcccatgattgaggtgaatggcgaaaccattctgacataccgcgaggcgatggtaccgcaaagcatgccagagtcacttatcatcgttggatctggtgccattggtagcgaatttgcatcattttatcatgatatgggcgttaaggtaacgctggttgaggcaatggatcggatcttgccggttgaggatgctgaagtatccgcctttgttcaaaagtcatttgaaaaacgcggcatcaccgtgatgacgggggtaaagctgcaatcagtcaaaagcagtaaaaatgcggtctccgcagtcattgaagggcaggacagtccattacaggctagccgaatgatcttg

SEQ ID NO: 222953 - DNA, 337 bp, Unknown
  Bacterial polypeptide expressing nucleotide sequence isolated from the Sargasso Sea
gatgtcggaaaaatttcaagcagtagttatcggaggtggcccaggaggttatgtttgcgcaattagacttgctcaactaggtttaaaaactgcatgtatagagtccaggggatctcttggtggcacatgcctgaatattggttgtatcccctcaaaaagcttacttaatttgtctgaggaatttcacaaagttaaaggtttggcaaacaaaggtattgaaataggagaagtaaaactaaatctcgataaaatgatgaagagcaaggacaaagcagttactgttcttacaaaaggtgtagaatttcttctaaaaaaaaataaagttacctactttaag

SEQ ID NO: 222954 - DNA, 886 bp, Unknown
  Bacterial polypeptide expressing nucleotide sequence isolated from the Sargasso Sea
ggatatgtatgtgcaattagattatcacaattaggcttaaaaactgcatgtatcgagtccagaggatctttgggaggcacttgccttaatataggatgcattccttctaaaagccttttaaacatgtcagaaagttttcatagagccaaaaacttctcaaatattggtattgaaactggagaaattaagctgaatcttgaaaaaatgatgagtaataaagacagctcggttgcaacacttacaaaaggagtggagttcttatttaaaaaaaataaagtcacttacattaagggggttgggtcttttaatgaaaaaaacgaaattttagtcaaaaatgataaatcagagatgaaaattaaaactgataaaaccataataagtactggatcagaacctctatccctcccaggaatagattttgacgaaaaaaaaattctttcatcaacaggagctcttaatatttctaaacttccaaaaaaaatggttgttgttgggggtgggtatatcggcttggagatgggttctgtatggtcaagactaggaactgaggttcatgttatagaatatttagatcacataacaccaggacttgataaagaaatttcaaatgaatttatgaaaatattaaaaaaacagaatattcaatttgaattaaatactaaagttgaaaaaatttctaaaaatgaccaaggagtaataatagaaacctctaataaagacgcaaaaaacaaaattgaagctgatgtagttttaatttctgttggaagaaaaccttacactgataaattaaatttagataaaattggcgtaaatctcgacaaaaaaggaaaaattacagttaatagaaattttgagactagtgttaaaaaatatttatgcaatagga

SEQ ID NO: 222955 - DNA, 872 bp, Unknown
  Bacterial polypeptide expressing nucleotide sequence isolated from the Sargasso Sea
aatgaaagaacaaagcacttggcaagtcatggcgtgagctttggtgagccaaagattgatttagacaaaattcgtgactacaaagacggcgttgttaagcaacttaccaacggtcttgcaggcatgtctaaaatgcgcaaaacccagcatgtgaaaggctacggtaagtttacgggcagcaacactcttgaagtgcaaggcgacgacggcgttaccactattacgtttgaaaaagcaattattgctgcaggctctgagccaatcagcttgccattcattcccgaagacgatcgcgtaatcgactcaactggcgctttggaaatgaaagatattccagagaaaatgctagtccttggcggtggtatcattggtcttgaaatgggtacagtgtacgaagctctaggctcaaacgttgatgtagttgagtttttagaccagcttattccagctgccgataaagacatcatgaaagtattcatgaaagactacaaagaaaaattcaacatcatgctagaaaccaaagtaactgcggttgaagcaaaagacgatggtttgtacgttacgtttgaaggcaagaaagcacctgctgagccagtacgttacgacaaagtacttgtagcagttggccgtaagccaaatggtaatctagtaagtgctgataaagccggcgttaatgttgatgagcgtggtttcatcaatgttgataagcaaatgcgcactaacgtagagcatatctttgccattggcgaccttgtaggtcagcctatgcttgcacacaaagcggtacatgaaggtcatgttgctgcagaagtggttgcaggtcagaagcactacttcgacccacgtgccattccatcagttgcgtacacaga

SEQ ID NO: 222956 - DNA, 937 bp, Unknown
  Bacterial polypeptide expressing nucleotide sequence isolated from the Sargasso Sea
ttggtggtggacccggagggttatgtttgtgcaatccgggcagcgcaacttggtcttaagacaggctgcatagagtcaagaggaacccttggaggaacatgtttaaatgttggatgtattccatctaaaagtcttttgaatctatcagacatgtataaaaaagcacaaaaagattacaataatcttggtatagaagttggagaagtgaaattaaatttgaaaaaaataatgatgaataaaagcaaatcagttcaagtattaacaaaaggtgttgagtttttatttaaaaaaaataaagttacttacataaagggcaagggagttttattttcaaaaaacgatgtagttgtatacgaaaacggaaaaaaaacctcatacaaatctaaaaacattgtcattgctactggttcatcatcaagttctgttccaggtatcgaaattaatgaaaaaaatataatttcttcgacaggagctatatctttagagaaagttccaaaaagtatggtcgttatcggaggtggttatatcggtcttgagatgggttctgtatggtcgagattaggctctgatgttacagtaattgaatatttggatcatattacaccaggtatggacagggaagtttctaaagagtttcaaaagattctaactaaacaaggtataaaatttttattaaacaacaaagttacaaatgtaaaggatgaaaacaataaagttattgttgaatttgaagataagaataccaaaactaaaaacaaaatcgagtgtgaaaaagttttagtctctgttggtagaaagccttacacagacggtctaaatctttcaaagattggtatagataaggataaaaaaggtaggatcgatgttgataaagaatttaggacgtcaattaaaaacatttttgcaattggagatgtaatcaaaggaccaatgtagc

SEQ ID NO: 222957 - DNA, 571 bp, Unknown
  Bacterial polypeptide expressing nucleotide sequence isolated from the Sargasso Sea
tatgtcagaaaaatttgatgttacagtaattggtggtggtcctggtggatatgtttgtgcaattagattgtctcaacttggtcttaagacagcatgcatagagtctagagggtctctaggaggaacatgtttaaatattgggtgtattccatcaaaaagtttacttaatttatctgaaaaatttcacagtgccaaaaattttgaaaaaattggaatcgagactggagaaataaaactcaatttagataaaatgatgaaaaataaagacaaagcagtgacagttttgactaaaggagttgaatttttattcaaaaaaaacaaagtcacttattttaagggaaaaggttcatttgagaacgagaattcaataaaaatcgaagggtctgaaggaactaaaataattcaaactgataaaacaataatcagtacaggatcagagccagtttcattgccgggagtagattttgatgaagaaaaaattctttcctcaactggagccctttctatacctaaacttccaagtaaaatgattgttgtaggagggggatatattggattagaaatgggatca

SEQ ID NO: 222958 - DNA, 733 bp, Unknown
  Bacterial polypeptide expressing nucleotide sequence isolated from the Sargasso Sea
atgtctcgatatgaccttgcagtacttggtggaggtccaggaggttatgttgcggcaattcgaggagctcaattaggtcaagcagtctgtgttatagacaaagataaactaggaggtgtttgtcttaattgggggtgtataccaacaaaggccttattaaaaaatgctgaagtatacaatattatcaaaaatgctgataaatatggtataaatgtggatcaagtttccgttaactttaaaaaaaatgtaaaaagaagtcgagatgtatcagcccgcttaagtaagggcatcgaatttttaatgaaaaaaaacaatgtcgtgcacataaatggtgttggtaggcttataacgaataataagattgaggttcaaaatggaaacaataagaaaatcattgagtctgaaaatattgtaatagcaaccggagcacgacctaggtcatttccaggaatgaaatttgatggtaggcgagtcattagctccaaagaagcgatgtccttagaatcacctcctgataaaatgataatcatcggttcaggtgcaataggatgtgaatttgcttattattttaatgaatttggtactcaggttcatttactagaaatggaagatcgaattttgcctaatgaagatctagaaatatcaaatgaagtacaaaatagttttgaaaaaattggaataaaaatatcaaagggtattagagtctcaaagattgagagcttgaaaacaaaag

SEQ ID NO: 222959 - DNA, 106 bp, Unknown
  Bacterial polypeptide expressing nucleotide sequence isolated from the Sargasso Sea
aatggattttgatgtagtagtcataggaggaggccctggtggatatgtagcagcaattaaaagcgctcaattagggcaaaaagttgcttgtattgaatttgatagc

SEQ ID NO: 222960 - DNA, 658 bp, Unknown
  Bacterial polypeptide expressing nucleotide sequence isolated from the Sargasso Sea
agagtccaggggtagcttaggtggaacttgtttaaatgttggctgtattccttcaaaaagtctcctaaatttgtctgagaattttcataaagcaaaaaattttagtaagattggtattgaagttggtgacttaaaattaaatttgccaaaaatgatgcagaataagacaaaagcagtcacagtcttaacaaaaggggtggagtttttattcaaaaaaaataagattacatattttaagggtacaggtaaatttaaatctaaaaatgagataacaattcaacaagacaagggagagatttcaattcaaacaagcaatgtcgtaatttgtaccggatctgaaccagtaaattttaaaggaacttcttttgatgaagaaaaaatcgtttcatcaaccggtgcgttgtctttaaataaagttccaaaaaagatgttaataataggagctggttatataggtttagaaatgggctcagtttggtcgaggcttggatctgaggttcatgtattagagtatcttgatcatattactcctggaatggatagagaaattggtattgaatttatgaaaattttaaaaaaacaaggaattacattccatttaaaaacaaaggtaaattcaattaaaaaaaatcaaaaaggtgtaataatctcagcgtca

SEQ ID NO: 222961 - DNA, 562 bp, Unknown
  Bacterial polypeptide expressing nucleotide sequence isolated from the Sargasso Sea
aaatctaggtatcaaaattgaaaatggttttattcaagttaatgaatactgtcaaactaccgaagaaaatatttgggccgtaggtgatgttgttaggggtccaatgcttgctcataaaggtagtgaagagggaattatggttgctgagagaattgcgaataaacaagcagaagttaattatgatttagttccaaatgtaatctattcacatcctgaaatagcatgggttggaaaaaatgaaaatgaattgaaatctagcggaatcaaatacaaagtgggtaaatttccatttgctgctagcggtagagcccttgcggtagatcaatcagttggttttgttaaagtgatctcagatgaaaaaacagattctattataggagttcatgtttttggcccagcagcagcagaaatagttcaacaggctttaatatcaatggaatttggttcaagtgctgaagatattgcactaactatgtttagtcatccaacagtttcagaagcttttcatgaggcagctttatctgtaaataatcaggcaattcatataggaaataaaaaataa

SEQ ID NO: 222962 - DNA, 691 bp, Unknown
  Bacterial polypeptide expressing nucleotide sequence isolated from the Sargasso Sea
aggaaaaggggcatccaggaaggttgagataacattcgagaaacatggctctgaacagaccttgaaagtggacaaggtactagtgacagttggaaggaaacccaacacgaagggttggggtctggagaacatcggagccaggatggacggttcgggtacgttcatcagaactgatagacaatgcagaacatcggtaccaggagtgtacgcgattggggacgtatctggagagcccatgctcgctcacaaggccagtgctgagggggagatggtcgcagagattattgctggacacaagagggaattcgacaaggttgcaattcctgagatagttttcacagagcctgagattgtttcagtagggctgactccagaagaagccagagagaggggagaggaaatcatagttggaaaattccctcttgctgctaatgggagagcattgagtcttgaagcggaaaagacggggggattcatcagagtgactgccagggagtccgaccatgtcatcctaggagtccaggccgttggcagccacatagccgagttacactcggaattcgttctcgcactagagatgggcgcattactggaggacgtggctgggacggtccatgcccatcccactatgtcggaggcattccatgagagcgttctcaagacattaggccatgctatccacataagttga

SEQ ID NO: 222963 - DNA, 610 bp, Unknown
  Bacterial polypeptide expressing nucleotide sequence isolated from the Sargasso Sea
atgcaagaaaattttgatcttatagtaattggaggaggcccaggtggttatgtttgcgcgataagagctgcacaacttggattaaaagctgcatgcatcgaatctagaggcacattaggagggacatgtttaaacattggttgtattccctctaaaagcttacttaactcttcagaactttatcataaagccaaaacaaattttaataatataggaattgaaacaagtagtattaatttaaacttagaaaaacttatgatgaataagaataagtcagtgcaggttttaacgaagggtgttgaatttctattcaaaaaaaacaaagttacttatattaaaggaaaagctgttttattttcaaaaaataatgttgtagtttataacgaccaaaaaaaaacatcgtatagttcaaaaaatatcgttatagccacaggttccgaaccaacttcattacctggaattaaaattgatgaaaaagaaattatttcatcaacaggagctctctcattgaacaaagttccaagaaagttaattgtaataggaggtggatatatcggtcttgaaatggggtctgtatggtcaagacttggctcagaggtaacagttatga

SEQ ID NO: 222964 - DNA, 232 bp, Unknown
  Bacterial polypeptide expressing nucleotide sequence isolated from the Sargasso Sea
atggcaaacaaagaaagttacgatattgccgtcattgggtctggaccaggcggatacgcagcagcttttagagccgcagaccttggtaaaaaggtggttctggtcgacagagacaaagacctaggtggcgtctgtttgaacagggggtgcataccatcaaaagcgctattacatatttcaagagtgatcaatgaggtagagcacttgtcaggcattggagtttcgtttggta

SEQ ID NO: 222965 - DNA, 731 bp, Unknown
  Bacterial polypeptide expressing nucleotide sequence isolated from the Sargasso Sea
aatggcagaaaaatttcaagcaactataattggaggtggtcccggaggctatgtttgtgcaataagattggctcagctaggtattaaaactgcatgcattgaatccagaggaactttaggaggaacttgtttaaatattggatgcataccttcaaaaaacttactaaatttctctgaaaattttcacaaagcaaaaaatttctcaaaaattggaattgaagtaggcgaagttaagctaaatcttcaaaaaatgatgcaaaataaggataaagcggtaatgaatttgacgaaaggagtagaatttttatttaaaaaaaacaaagtaacttattttaaaggaactggtaaattaaaatcaccatcggaaataataattatagataaagaaaacaaagaaacaaatattcaatcagataatataattataagcactggctcagagccagtacctcttccaggaattgaatttgatgaggaaaaaataatatcttctactggagctctatcattaaaatctgtaccaaaaaaaatgttagttgttggtggaggatatattggtctagaaatgggatctgtctggtcaagactagggacagaggtacatgtaattgaatttttagaccatatcacaccaggcatggataaagaaatttcaaaagaatttatgaaaattttaaaaaaacaaggtttgaattttcatttaaaaactaaagttgaaaaaatatcaaaat

SEQ ID NO: 222966 - DNA, 805 bp, Unknown
  Bacterial polypeptide expressing nucleotide sequence isolated from the Sargasso Sea
atgacacatgttgattttgatcttatggtgattggtggaggccctggtggatatgtagctgcaattagagcatctcaactaggtatgacagttgcattaattgaggataaacatttaggtgggatttgtttgaattggggatgcattcccactaaagctttattaagagctagtgaaattagacatatgttagataatgttgatgaatttggttttacagtatctggcataaaaatggatataaataatataactaaaaggtctagaaaagttgcatcgcaattgtcatctggcattagtcatcttttgaaaaaaaataaagtaaaagtttttgaaggttttggcagtttggttaaagactcatcaaatattaagaaaataagaataaaaacaaaagataataatttagaaaaaaccgctaagaatgttatccttgctactggagctagatctagaaatttaccttttgtttcatctgacggagtaaatatttgggattataaaaccgcaatgactcctccaaaattaccttcatcacttattatagttggctctggtgcaattggaatggaatttgcctctttttataatgatttaggagttgatgtaactattgtagaagctttgccttcaattttaccaaatgaagacaatgatatatctaaaattgtaaagttaaactttgaaaaaagaggtataaagattaaaactaattcagcattaaaatcagttacaaacaaagaaaattctgttttagctgaaataatcactaatgaaaaggttgaaacaataaactcggaaaaac

SEQ ID NO: 222967 - DNA, 526 bp, Unknown
  Bacterial polypeptide expressing nucleotide sequence isolated from the Sargasso Sea
atgtctgaaaaatttcaagctgtagttataggaggaggtcctggtggctatgtatgttcaataagacttgctcagctaggtattagaactgcttgcatcgagtctagaggttctttaggaggcacatgtttaaatattggatgtataccttcaaaaagtttattaaacttatcagaaagctttcatagagcaaaaaatctttcaagccttggaattgaaactggcgatgttaagcttaatcttcaaaaaatgatgaaaaacaaggataaagctgtaactgttttgactaaaggcgttgagtttttattcaaaaaaaataaggtaacttattttaagggcacaggtagttttaaatcttcaaaccaaatttctataaaagatgaacaaaaaaaagaaactgtaattgaagcagataaggtaattataagtaccggatcagagccagtttcattgccaggtgtagtttttgatgaaaaaataatcatttcatcaactggagctttatctttagaagccagttcctaaa

SEQ ID NO: 222968 - DNA, 451 bp, Unknown
  Bacterial polypeptide expressing nucleotide sequence isolated from the Sargasso Sea
aatgatagataaatttcaagcagtagttattggtggaggcccaggaggttatgtatgtgcaattagactctcacaattaggtctaaaaactgcatgcatagagtctagaggttctctaggtggaacttgtttgaacataggctgtataccatcaaaaagcttattaaatttatctgaagaattccataaagctaaaaatttatcaaacaaaggtattgaagtaggagaaataaaattaaatttatcaaaaatgatgaaaaataaagataaggcagttacagttttgactaaaggagtagaatttttattaaagaaaaacaaagtaacttattttaagggaactggaagttttaaatcaaaaaatgaaattttgattatagaaaaagaaagtaaaaaagaaacatcaataaaagcagataaaattgtaattgcaacaggttcattaccagtt

SEQ ID NO: 222969 - DNA, 737 bp, Unknown
  Bacterial polypeptide expressing nucleotide sequence isolated from the Sargasso Sea
gctcggctcgcacggcatcacgttcggcaagccgcagatcgatctcgacaaactgcgcgacttcaagtcgggcgtcgtcaggaagctgaccggcggtctcgccggcatggccaaggcgcgcaaggtcgaagtggtgacgggcaccggcgcattcgtcgatccgcatcacatggaagtgcagacagaaggcggcaagaaggtcgtcaagttcaagcaggcgatcatcgccgcgggctcggaagcggtgaagctgccgttcattccggaagatccgcgcgtggtcgattcgaccggcgcgctcgagctgcggcagattccgcagcgcatgctggtgatcggcggcggcatcatcggcctggaaatggcgacggtgtacgcgacgctcggcgcgaagatcgacgtggtcgaaatgctcgacggtctgatggcgggcgcggatcgcgatctggtcaaggtctgggagaagtacaacagcaagcgtttcgccaacgtcatgctgaagaccaagaccactgcggctgaagcgaaagaggacggcatctacgtgtcgttcgaaggcgagaaggcgccggccgaggcgcagcgctacgacctcgtgctggttgccgtcggccgtacgccgaacggcaagcggatcagcgcggacaaggccggtgtcgcggtgacggaacgcggcttcatcgaggtcgacaagcagatgcgcacgaatgtgccgcatatcttcgcgatcggcgata

SEQ ID NO: 222970 - DNA, 919 bp, Unknown
  Bacterial polypeptide expressing nucleotide sequence isolated from the Sargasso Sea
tttgatttagctgcgatgatgcgacgaaaggatgaagttgtctccacactcagtaagggaattgaggctcttcttaagaaaaataaaattactcgctatgcaggtgttgggagactttcagggccagggcaggttgaggtgctggcgaccgatggagtgatgagcgttgttgagtctcctcggatcctcttggctgttggaagtcgatcaacagttcttcctgggatagaagttgatggaacgttcgttggtacgagtactgaagcacttgctttcaatgaggttcccccacatctcgttgtaattggaggagggtatattgggctggagttggggagtgtatggcgccgccttggttcgaaggtcactgttctggagtttgccgatcgcattttgacgggcatcgatgctgacattgccagcgaagccctttcgctctttaagaagcagggacttgatattcgtcttcagacaaatgtcacgtcagctcgtcgggtcggtgaaacctgtattgttgaggtggagggtaacgaagcaattgagtgtaaccgagttcttgcagcgactgggcgacagcctgccaccactgacatcggtcttgaatccgttggaattgttactgacaagcgagggtgtatcccagtgaatgatcactttcagacgtcagcagctggtatttgggccattggtgattgtattccaggcccaatgcttgcccataaggcagaggaggacggagttgcatgcattgacggaatgactgggggctgggctcatgttgactatcgcctgataccggctgttgttttcactcatccggagattgcaacagtagggatcatggaagatcaactggtcgcggatggggtcccctataataaaggggtgtttccatttcgtgcgaatggtcgggcgcgta

SEQ ID NO: 222971 - DNA, 754 bp, Unknown
  Bacterial polypeptide expressing nucleotide sequence isolated from the Sargasso Sea
tatgtatgatgttgttgtaattggaggcggtcctgctggttatgttgcagcgatcaaagcatcccaattaggtctaaatacagcttgcgtagaatttgcttctgatgaaaaaggaaaccaaaagtatggaggaacttgccttaatgtaggctgtattccatccaaatctcttttggattcatctcataaatacttcgaagctcaaaaagattttgcatctcatggaatagatctaaaagatttatcagtcaatattccttcaatgatgaaaagaaaggatgaagttgttaataaacttacaaccggaataactggactgtttaaagcaaatggtgttgaagcaatatcaggaagagggaaagtcattaatgagaaccttgtagaagtttcaaataatggagataaaacaagcttggagacaaaattcataatattagcaacaggctcaaatccaattgaaattccagttgcaaaatggtctgaaaatatagtcgatagcacaggagctctcaattttgatagggttccagaaagacttggaataattggagctggagtaattggtttagagcttggtagcgtatggtcaagacttggagctgaggttacagtcatagaggcgatggatgatttcttacctattgtcgacaaacaaatttctaaagaatgccatcgagagtttaaaaaacaaggtctagatatacatttaggatcaaaactcacctcagctaaagataatggtaaagatgttgaa

SEQ ID NO: 222972 - DNA, 370 bp, Unknown
  Bacterial polypeptide expressing nucleotide sequence isolated from the Sargasso Sea
atgcatggtaaaaagcatgatctcgttgttctcggtggagggcctggaggttacgtcgcggcaataagagcggctcaattgggaatgtctgttgcaatcatcgagaaagagcatttaggaggtatttgcttaaattggggctgtattccaactaaagcgatgttaaaatcagctgaagttttttcattaattaataaagccgaggcatacggcgtatcggccggaacaacctcatttgatttaaataaaattgttgatcgctcaaaacaaatagcagcacagttatcatctggagtaaagtatcttctagaaaaaaacaagataactgtaatcaatggagtggggacgttgatggaaataataatgtgag

SEQ ID NO: 222973 - DNA, 198 bp, Unknown
  Bacterial polypeptide expressing nucleotide sequence isolated from the Sargasso Sea
catggattttgatttaataatagttggttcaggcccagggggttatgtggctgcgataagaggagctcaattggggcttaaagttgctattattgaaaaggaagctttagggggtatatgccttaattggggatgtattcccacaaagtcgttcttaagatcagccgaggttctcaaaattatagagggttcagaaaa

SEQ ID NO: 222974 - DNA, 895 bp, Unknown
  Bacterial polypeptide expressing nucleotide sequence isolated from the Sargasso Sea
aagaaattcaaagctgataagatattaatagcaactggttctgtgccttctactattccaggtatagatatagatgaaaaaaatatagtatcatctactggagcattagagtttgaaaaagttcctaaaaaacttgctgtaataggtggaggttacataggattggaattagggtcagtatggaagaggttaggagctgatgttactgttatagaattttctgatactctggttccagctatggataaagatatagcaaaggtttttcatagtactttaaaaaaacaagggattaactttatgttaagcactaaagtagagagtgctttgaataaaaaagaaaaggtacaaattaattgtttgaacttattgaataataaatcagagattttggattttgataaagttttagttgctgtgggaagaaaacccttcactggtggcttagggttagacaatttaaacataaatattaataaaaacggcactatagatgtagataaaaactttcaaactaatatagagggtatatatgctataggagatgttatttcagggccaatgttagctcataaagcaagttctgaaggacatgtttttgctgaacaactactaggtaataaaccagaagtaaattatcaatgcattccagctgtagtatatacagaacctgaagtagcttgggtagggccttcagaaagagaattagaaactaaaaaaattgcatacaaaaaagggattttcccttttagcgcaaatgctagaggaaagacaacaggagataccataggaagcataaaattcttatctgataaagataatgataaagttttggcagttcatattataggtgctcatgcaggagagttaatcggagaagcagtagcagcaatag

SEQ ID NO: 222975 - DNA, 814 bp, Unknown
  Bacterial polypeptide expressing nucleotide sequence isolated from the Sargasso Sea
aatgaccgatactcaatttgatattgccgtgattggtggtgggcctggcggctatgttgcggccattcgggcggcccagcttgggctaaagtcggtggtgatcgagcgtgagaatcttggcggtatctgtctgaattggggctgtattccaacgaaagcattgctgcgcgctgccgaattgcgtcattcaattgatgaaatggccgattttggcatcacggttggcgacgtgaaagtcgatcttgcggttgtggtgaaacggtcacgcaaggttgccggccgcctgtcgatgggggtcaagcatctgctgaaaaagaacaaagttaccgtcattgcggccgaagccaagcttggtgcggcaaagggcggtttgcgccaaatcaacctgtcaaatggagagaccgtatcagccaagaatgtgattatcgccacgggtgctcgcgcccgagctttgcccaatttcgaggctaatggcaaaaccatcctgacctaccgcgaagcaatggttcctgaaaccatgccggaatcgcttatcattgttggttcaggtgcgattggaagcgaatttgcctcattctatcatgatatgggtgtcaaggtgacgctggtcgaggcgcttgaccgtattttgccagttgaagatgaagatgtgtctgcttttgttcaaaaatcattcgaaaagcgcggcatcaagattatgaccggcgtcaaattgcaggcggtgacaagcgatgcaaacggcgttcaagcgagtatcaaaggccatgacaagtcattgcaggcaagccggatgattcttgccgttggcattacc

SEQ ID NO: 222976 - DNA, 751 bp, Unknown
  Bacterial polypeptide expressing nucleotide sequence isolated from the Sargasso Sea
atttccgtaggtccaggtgatagcgtctcacaaggagacttgatctctattgtgtcatccgagtcaaaacccaatgaagaagatgaatctaacactgaagaaaaagaaacagaacaaccgattcaagagagtgaagatactagtgaatcttcaaaattcaaacatgattatgacttgattgtagtgggtgctggaccaggtggttatgcagcagcatttagagcatctgatttgggtttgaaagttggtttggttgagcgaaattcagatttaggaggtgtttgtctcaatgttggatgcattccatcaaaggcttttctgcatgcggcaaagatcttggatgattcaaaagaggcagaggtcagcggcatcgtttttaaagagccagaaattaatctatccaaaatgaaagaatggaaaaataacatcatcggcggattgaccggaggattatcaggattggcaaaacaaagaggtgttgatgtgattcatggtacagcaaagttttcttccaaaaatgagatagaggtcaaccatgaaagcgactctcgaagaatttcatctaatcaatttattattgctgttggatcagagcctgctgagctgagtttcttgccagatgacccaagaattattgactccactggagcattggagcctgatcagatacctaatgatattctaatcattgggggaggaataaaaggtcttgagatggccacaatatactcggctcttggtagtgaggtca

SEQ ID NO: 222977 - DNA, 853 bp, Unknown
  Bacterial polypeptide expressing nucleotide sequence isolated from the Sargasso Sea
tatgtatgatgttgttgtaattggaggcggtcctgctggttatgttgcagcgatcaaagcatcccaattgggtctaaatacagcttgcgtagaatttgcctctgatgaaaaaggaaaccaaaagtacggaggcacttgccttaatgtaggctgtattccttcaaaatctcttttggattcatctcacaaatacttcgaagctaaaaaagattttgcatctcatggaatagatctaaaagatttatcagtcaatattccttcaatgatgaaaagaaaggatgaagttgttaataaacttacaactggaataactggactgtttaaagcaaatggtgttgaagcaatatcaggaagagggaaagttattaatgagaacattgtagaagtttcaaataatggagataaaacaagcttggagacaaaattcataatattagcaacaggctcaaatccaattgaaattccagttgcaaaatggtctgaaaatatagtcgatagcacaggagctcttaattttgatagggttccagaaagacttggaataattggagctggagtaattggtttagagcttggtagcgtatggtcaagacttggagctgaggttacagtcatagaggcgatggatgatttcttacctattgtcgacaaacaaatttctaaagaatgtcatcgagagtttaaaaaacaaggtctagatatacatttaggatcaaaactcacctcagctaaagataatggtaaagatgttgaaatttcttatgaatcaaaaggtgaggagcttaaagcctcttttgataagttgattgtggctgtggggagaaaacctaatacagctgatatctcagatgag

SEQ ID NO: 222978 - DNA, 488 bp, Unknown
  Bacterial polypeptide expressing nucleotide sequence isolated from the Sargasso Sea
aatggatttaaaatatgatgttaccattattggctccggtcctggaggttatgtcgcagcaattcgttctgcgcaattgggacacaaaacagcaataattgaaaaagataaactaggtggtatttgtcttaattggggctgcatacccacaaaagcacttctaaaatcgtcagaagtttattccatcatgaagaagtcagattattatggagtgacagctgaaaatgtaagttttaactttaaaaatattattgatcgatctcgtggtgtggctaacgacctttctcaaggtattggttacctattaaaaaagaataaaattgatttaattaatgggaatggctatatcctagacaacaacactatcaagattcaagctgataataaagaaactattatatctacaaagaatattattatttcaaccggtgcacgcccaaaagaattacctggtataagctttagcgaggatgtttggtcttataaac

SEQ ID NO: 222979 - DNA, 822 bp, Unknown
  Bacterial polypeptide expressing nucleotide sequence isolated from the Sargasso Sea
gatgtcagaaaagtttgatgtagcaataataggtggaggtccaggaggatacgtttgcgcaattagaatgtcgcaacttggtttaaaaactgcttgtattgaatcaagaggcactttaggaggaacatgtttaaacattggatgtataccttcaaaaagtcttttaaatttgtctgaaacttatcataaagcaaaaaaatttgaaaaaattggaattgaaattagcaatcttaaactaaatttagaaaagatgatgaaaaataaggaaaaagcagttacaattttgactaagggagttgaatttttattcaaaaaaaacaaaatttcttattttaaagggattgctagttttaaatcaaaaaatgaaatcttaattactgatagtaataaaaaacaaacaataattgaaacaaaaaattctataattagtactggatcagaaccattagcgcttccaggagtaaaatttgacgaagaaaaaatactttcatcaactggagctttgagtttatctaaagtaccaaaaaaaatggcgattgttggaggaggatatataggcttagaaatgggctctgtatggtctagacttggatcagaagttcaagttcttgagtttttagatcacataacccctggtatggataaagaaatttcaaatgagtttatgcaaatattaaaaaaacaaggcataagttttaatttaaaaacaaaagttgaaaaaatatcaaagtcaaaaaatggagttttaatagaaatttcggatgttgagggtaaaaaaaaaatagagaccgatgtagttttaatttgcgttggaagaaaacc

SEQ ID NO: 222980 - DNA, 652 bp, Unknown
  Bacterial polypeptide expressing nucleotide sequence isolated from the Sargasso Sea
aatgtcagaaaaatttgatgcaactgttattggcggtggaccaggtggctatgtttgcgcaataagattgtctcaactcggattcaaaactgcatgtgtggaagctagagatactctgggaggcacatgtttaaatataggatgtattccatcaaaaagtcttctaaatctatctgaaaattatcataaaattaaaactttagataaaatgggaatagaagttgattcaataaaattaaatcttgaaaaaatgatgaaaaataaagataaatcagttgaaaatttgactaaaggagttgaatttctttttaaaaaaaacaagatttcttattttaaaggaattggaagtttccattcaaaaaatcaaatttctgtaatagataaaaataaaaaaaaaacaattattgaaacaaaatatacaattataagtactggatcagagccaatttcattacctaaagttaaatttgatgaaaaaaaaattgtttcttcgactggagcactctcgttaacttcggttccaaaaaaaatgattgtaattggaggtggttatataggacttgaattgggatcagtatggtcgagactcggggcagaggttcatattattgagtatttagatcatataactccaggactagatagagaaatt

SEQ ID NO: 222981 - DNA, 478 bp, Unknown
  Bacterial polypeptide expressing nucleotide sequence isolated from the Sargasso Sea
aatggaagaaaactttgatcttttagtaataggcggagggccaggtggttatgtttgtgctattagagcatctcaacttggacttaaaacaggatgtatagagtctaggggtacgctaggtggcacatgtttaaatatagggtgtataccttcaaaaagcttattaaattcttcagagctatatcataaggcaaaaaataattttagtagtattggtatagaatcccaaggaattaaactgaatctaaaaaagatgatggcaaataaaaataaatcagtacaagttttaacaaaaggtgttgagtttttattcaaaaaaaataaagtttcgtatattaagggaaaagcagctctcttttcaaaaaataatgttattgtttatgaaaatggtaaaaagacttcttacaagtcaaaaaatatcgttatagccacaggttcttacccaacttcattgccaggcataaaaattgatgagaaa

SEQ ID NO: 222982 - DNA, 931 bp, Unknown
  Bacterial polypeptide expressing nucleotide sequence isolated from the Sargasso Sea
gcaacaggatcatcttcgattgagataccaaatattcctgttgatgaaaaacaaatagtatcttcaacaggtgctctttctctatctaaaataccaaaatcacttctagttattggtggtggatatattggattagagatgggttcagtatggagtagattaggttcaaaggtaacagttgttgaagctcttgacagaattgttccaactatggatgatgaaattgctaaagagtttatgaaaatgttaactaaacaaggattagaatttaaattatcgcatagagtgagttctgcaaaatctagtaaatctggtgtagatgttgaaatggaaacatcagataaaaagaaaataaaagaaaactacgaaatagttttaatgtcagtaggaagaaaaccaaatacagagggactgggtctcgaaaaaattggcattaaattaaccgaaaaaaaatccattgaaattaaagataactttcaaacttctgtaaaaggaatctacgcaattggggatgtagcaccgggaccaatgctagcacacaaagctgaagaagaaggagttgcttgtgttgaatttataaatggtcaaaaacctcatataaactatgatgctataccagccattgtttataccaatccagagattgcatctgtaggtaaaacagaagaacaactcaagcaagaaaagaaagatttcaaggtaggaaaattcccttttatggcaaatggtcgtgccttaaccacttctgcatcagagggatttgtaaaaattttagttgataaaaaaacagatgaaatcttaggtgctcatataatcggtcatgatgcaggacaattgattgcagaaattgttacaacaattgaatttggtggtagcgcagaagatattgctagagtatgtcatgctcatccaacaacaaggaagcggtaaa

SEQ ID NO: 222983 - DNA, 356 bp, Unknown
  Bacterial polypeptide expressing nucleotide sequence isolated from the Sargasso Sea
ccatccagaagttgcttgggtagggaggggtgaagaggaattaaaaaaagaaaagatagattatattacgggtacttttccatttgctgccaatggcagggctcttacctcaggagaaagcactggttttgttaaaataatatcagacaagggaacagataaaattcttggtgttcatgtatttggaccatctgccgcagatatagtgcaacaagctattattgctatgaattttggatcaacagcagaacagcttggttctacaatatttagtcatcctacagtctccgaggctttacatgaagcagctttggcagtaaatagaaaagcaattcatattgggaatcgaaattaaa

SEQ ID NO: 222984 - DNA, 568 bp, Unknown
  Bacterial polypeptide expressing nucleotide sequence isolated from the Sargasso Sea
gggactgggtctcgaaaaaattggtattaaattaaccgaaaaaaaatccattgaaattaaagataactttcaaacttctgttgaaggaatctacgctattggcgatgtagcgccgggaccaatgctagcacacaaagctgaagaagaaggagttgcttgtgttgaatttataaatggtcaaaaacctcatataaactatgacgccataccagcgattgtttataccaatccagagattgcatctgtaggtaaaacagaagaacagctaaagcaagaaaagaaagacttcaaggttggtaaatttccttttatggcaaatggtcgtgccctaaccacttctgcatcagagggatttgttaaaattttggttgataaaaaaacagatgaaattttaggtgctcatataatcggtcatgatgctggacaactgattgcagaaattgttactacaatcgaatttggtggaagtgcagaagatattgctagagtatgtcatgctcatccaacaactagtgaagcagtaaaagaagcagctctaagtgttgatggcagagccatacatatttaa

SEQ ID NO: 222985 - DNA, 677 bp, Unknown
  Bacterial polypeptide expressing nucleotide sequence isolated from the Sargasso Sea
atgcctgaccggaaaaggaactttccttgattcccatcatcttcagattgaatcaaaaagcggaacaaccaccgtccgatttgaaaatgccatcatcgccgccggttctgaaccggttaaactcccattccttccagatgatcccaggatcatggattccacgggagcattaaatcttcaggaaatcccggaaacaatgctggtcatcggaggtggaatcatcggtctcgagatggccaccgtttacaggtcaatggggaccaaaatcacggttgttgaaatgcttgacgggttgatggctggagccgaccgtgacatagttaaaccctttcaccgccacgtttcacgtcagtacgataacatctggctggaaaccagagtcactcaagtcgaagctcagaaaaaaggattgaaggtccattttgaggggaaaaatgctcctgaaaaagcagttgtcttcgaaaaaatcctaagtgcggtgggaagaaccccgaacggatttaaaatcggtgcagaaaacgcaggtgtttcggtggatgaaaaaggcttcattgcggccgactcccagatgcgcaccaatgtatcgaatatttatgccatcggagatatcgtcggccaaccgatgctggctcacaaggcaacccatgagggtaaggttgctgcggaagtgatttgcg

SEQ ID NO: 222986 - DNA, 562 bp, Unknown
  Bacterial polypeptide expressing nucleotide sequence isolated from the Sargasso Sea
gtctcgaaaaaatttggaattaaattaacggataaaaaatctattgaaattaaaaataactttaaaacctctgtagaaggaatctatgcaatcggtgatgtagcaccaggaccaatgttagcacacaaagccgaagaagaaggcgttgcttgtgttgaatttataaacggtcaaaaacctcatataaattatgacgctataccagccattgtttataccaatccagagattgcatctgtaggtaaaacagaagaacaactcaagcaagaaaagaaagacttcaaggttggaaaatttccttttatggcaaatggtcgtgctttaaccacttctgcatcagagggatttgttaaaattttggttgataaaaaaacagatgaaattttaggtgctcatataattggtcatgatgctggacaattgattgctgaaattgttacagcaatagaatttggtggtagtgcagaagatattgctagagtatgtcatgctcatccaacaactagtgaagcagtaaaagaagcagctttaagtgtagatggtagagcaattcatatttaaa

SEQ ID NO: 222987 - DNA, 395 bp, Unknown
  Bacterial polypeptide expressing nucleotide sequence isolated from the Sargasso Sea
gatggattatttagagaaagatttagttgttttgggtggcggccctggtgggtatgcggcggcgttttatgcggcgagtcatggattaaacgttacgttaattgataagaatgagaatttaggagggacgtgtttaaatgaaggttgtattccatcaaaggctttaattcatgctacagaattaatacatgcggctgaggaaggaaaagcttttggcgtgacctttactaagcctaagattgatttggatcaattgcgtgattggaaatcatcaattatttctaaattaaacaagggtatagcttctttgtgtgataaaaagaaggtgtcgtttattcatggtcgtggttattttgaagatggaaaaacgttgcgtgtggaatctaaaaaaggac

SEQ ID NO: 222988 - DNA, 94 bp, Unknown
  Bacterial polypeptide expressing nucleotide sequence isolated from the Sargasso Sea
atgaatttcgatttggtaataattggttcagggccaggaggttatgtggctgcaattagaggcgctcaattagggctaaaagttgctgtcatga

SEQ ID NO: 222989 - DNA, 169 bp, Unknown
  Bacterial polypeptide expressing nucleotide sequence isolated from the Sargasso Sea
tatgtctgaaaaatttgatgcaattgttattggtggtggcccaggtggatatgtttgtgcaataaggcttgctcaattaggaaaaaaaactgcatgtgtagaatacagaggcactttaggtggaacatgtttaaatattggatgcataccttcaaaaattttattgaac

SEQ ID NO: 222990 - DNA, 754 bp, Unknown
  Bacterial polypeptide expressing nucleotide sequence isolated from the Sargasso Sea
aagtacaacagcaagcgttttgcgaatgtcatgctgaagaccaagaccaccggcgcggaagcgaaagacgacggcatctacgtgtcgttcgaaggcgaaaaggccccggccgaagcgcagcgctacgacctcgtgctggttgccgtcggccgtacgccgaatggcaagaagatcggtgcggacaaggcgggtgtggcggtcacggatcgcggctttatcgacgtcgacaagcagatgcgcaccaatgtgccgcacatcttcgcgatcggcgatatcgtcggccaaccgatgctcgcgcacaaagccgtgcatgaaggtcacgtcgccgctgaagccgctcatggcgaaaaggcctacttcgacgcgctgcagattccgtcggtggcctacaccgatccggaagtcgcatgggccggcaagacggaagaccagctgaaagccgcaggcatcaagtacggcaaggcggtgttcccatgggccgcttcgggccgcgcaatcgccaacggtcgcgacgaaggcttcaccaagctgctgttcgacgaagaaacccatcgcgtgatcggcggcggtattgtcggtctgaatgccggcgatctgatcagcgaagtctgtctggcagtcgaaatgggtgcggacgcaacggatatcggtaagacgattcatccgcatccgacacttggcgaatcgatcggcatggccgccgaattgtacgaaggtgtttgtaccgacctgccgccgcagaaaaagaagtaat

SEQ ID NO: 222991 - DNA, 202 bp, Unknown
  Bacterial polypeptide expressing nucleotide sequence isolated from the Sargasso Sea
tatggcagaaaaatttgaagtaattgtaattggtggaggaccagcaggttatgtttgttcaattagattggctcaattgggttttaaaacagcatgtgtagaatctagtctcacattgggtggtacttgtcttaatgttgggtgtataccttcaaaaagtctattaaatctgtcggaaaagtttcataacacaaaatattta

SEQ ID NO: 222992 - DNA, 598 bp, Unknown
  Bacterial polypeptide expressing nucleotide sequence isolated from the Sargasso Sea
atggctgtcggggtggaaggacttagcgaagggataggcttggaagctttaggtgttcggaaaaataacgatttgatggaagttaacgaaaaacagcagacttcagtaaatggtatatgggcgattggagatgttgcgggtgctccgcagctagcgcacgctgctgtagcggaggggatcgcagccgtagaatttatctctggtcgagaaaggcctccagtcaaccgtcaaaatataccgaattgcatttattcacagccacaagttgccagtactggtctcagtgaagctcttgcgttgagtcggggtatcaaagtgaaaattggtcgtttcccttttcaagctagtggaaaagcattggcaagtgggcataccgatggattcgttaaactgatttttgggtctgaatatggtgagctacttggggggacaataattggattcggagctacagaattaattgctgaggtctcgctagcagttaatatggaagccacttatgaggagttattgtggaccatacatgcgcatcctacactttcggaggtagtcatggaagcagctggtgctgcttttgatgaggcgataaatatatgaa

SEQ ID NO: 222993 - DNA, 404 bp, Unknown
  Bacterial polypeptide expressing nucleotide sequence isolated from the Sargasso Sea
aaaagctagaatgaattatgatcttgtacccaatgttatttatactcatcctgaagttgcttgggttggaaagactcagcaagagctcgaagatcatggtgtggagtttaagattggaagttttccatttgctgcaagtgggagagctctagctgcagctgattcagtcggttccgtaaaggttttagctgataagaaagatgacacaatattgggagttcatgtatttggtccttctgctgcagatattgtccaacaagcagttatagcaatggagtttggatctagtgctgaagatataggcttaactgtgtttagccatccaacagttagtgaggcatttcatgaagctgcattagctgcaaataattctgcaattcacataggcaataaaaggaaatgaa

SEQ ID NO: 222994 - DNA, 436 bp, Unknown
  Bacterial polypeptide expressing nucleotide sequence isolated from the Sargasso Sea
caaagccgaagacgaggcagtggcctgcatcgaacgcatcgccgggcatgccgccgaggtcaactacggggtcatacccggggtgatctacacccgcccggaagtcgccagtgttggcaagggtgaggaggagctgaaggccgagggccgcgcctacaaggtgggcaagttccccttcaccgctaacagtcgggcgaagatcaaccacgagaccgaaggcttcgtgaagatcctcgccgacgccaataccgaccaaatcctcggcgtgcacatgatcggcccgagcgtgggcgagttgatcggcgagtactgcgtggccatggagttttccgcctcggccgaggacatcgcgctgacctgccacccacacccgactcgttcggaggcagggcgccaggcagcgatgggcgtgcatggctggacgatgcaggcgtga

SEQ ID NO: 222995 - DNA, 370 bp, Unknown
  Bacterial polypeptide expressing nucleotide sequence isolated from the Sargasso Sea
aatgtcagataaatttgatgtaactgtaattggaggcggtcccggtggatatgtttgtgcaataagactatctcaattaggtttaaaaactgcatgtatagagtcaagaggatctcttggaggaacatgtttaaatatcgggtgtataccatctaaaaatctattaaatttttctgagaatttttataaagcaaaaaacttcaatgaaatcggaattgaagttggtgaagtaaaattgaacattgataaaatgatgaaaaataaagaaaaagcagttgcagttttaacaaaaggtattgaatttttatttaagaaaaataaagtcacatattttaaaggtataggtgcttttaaaagtgcaaatgaaata

SEQ ID NO: 222996 - DNA, 667 bp, Unknown
  Bacterial polypeptide expressing nucleotide sequence isolated from the Sargasso Sea
atgccagataaatttcaagcagtagtaattgggggtggtccggggggctatgtttgtgcaataagactttctcaattaggtcttaaaacagcatgtatagaatcaagaggctctctaggaggaacttgtttgaatataggatgtattccttcaaaaagcttacttaatttgtcagaagaatttcataaagtccagaatttatcaagtaaagggattgaaataggagaagtaaaattaaatttatcaaaaatgatgaaaagcaaagataaggcagttacaattttaacaaagggagtagagtttttactaaagaaaaataaagtaacttattttaaaggcacaggtagctttaaatctgaaaatgaaattttgattaaaaataataaaaatgaagagaaattaatacaagcagataagataattattgcaactggatcagttccagtatcattaccaggaattaaattcgatgaaaaagtaattgtttcatcttcaggtgctttaaaatttgaacaagttccaaaaaaaatgcttgttgttggtgggggttatataggattagaaatgggatctgtttggtcgagacttggatctgaagttcatgtaatagaatttttagatcatattacacctggtatggacaaagaaatttcacatgaatttatga

SEQ ID NO: 222997 - DNA, 484 bp, Unknown
  Bacterial polypeptide expressing nucleotide sequence isolated from the Sargasso Sea
tatgtatgatgttgttgtaattggaggcggtcctgctggttatgttgcagcgattaaagcatcccaattaggtctaaatacagcttgtatagaatttgcctctgatgaaaaaggaaatcaaaagtatggaggcacttgccttaatgtaggatgtattccgtcaaaatctcttttggattcatctcacaaatattacgaagctcaaaaagattttgcatctcatggaatagatctaaaagatttatcagtcaatattccttctatgatgaaaagaaaggatgaagttgttaataaacttacaactggaataactggattgtttaaagcaaatggtgttgaagcaatatcaggaagagggaaagttataagtgagaaccttgtagaagtttcaaataatggagatataacaagcttggagacaaaattcataatattagcaacaggctcaaatccaattgaaaaatcccattgcaaaatggtctga

SEQ ID NO: 222998 - DNA, 330 bp, Unknown
  Bacterial polypeptide expressing nucleotide sequence isolated from the Sargasso Sea
cgaaagagcagggcgtaagctatgaaacagcaacgttcccatgggctgcttcaggccgtgccattgcatctgatgcaactaacggtatgactaagatgattttcgaaaaagaaacgggccgcgtaatcggtggtgcaatggttggtacaaacgccggcgaaatgcttggcgaaattggtctagctattgagatgggtgctgacgctgaagacgtagcattaactatccatgctcacccaacgcttaacgaatcaattggtcttgcgtctgaaatcttcgaaggaagcattactgacctgccaaacccaaaagcgaagaaaaagaagtaaa

SEQ ID NO: 222999 - DNA, 904 bp, Unknown
  Bacterial polypeptide expressing nucleotide sequence isolated from the Sargasso Sea
tgctctttctctatctaaaataccaaaatcactcctagttattggtggtggatatattggactagagatgggatcagtatggagtagattaggttcaaaggtaacagttgttgaagctcttgacagaattgttccaactatggatggtgaaattgctaaagagtttatgaaaatgttaactaaacaagggttagaatttaaattatcgcataaagtgagttctgcaaaatctggtaagtctggtgtagatattgaaatggaaacatcagataaaaagaaaataaaagaaaactacgaaatagtattaatgtcagtaggaagaaaaccaaacacagagggactgggtctcgaaaaaattggtattaaattaaccgaaaaaaaatccattgaaattaaagataactttcaaacttctgttgaaggaatctacgccattggtgatgtagcaccgggaccaatgctagcacacaaagctgaagaagaaggagttgcttgtgttgaatttataaatggtcaaaaacctcatataaactatgacgctataccagcgattgtttataccaatccagagattgcatctgtaggtaaaacagaagaacaactcaagcaagaaaagaaagacttcaaggttggaaaatttccttttatggcaaatggtcgtgccttaaccacttctgcatcagagggatttgttaaaattttagttgataaaaaaacagatgaaattttaggtgctcatataatcggtcatgatgctggacaactgattgcagaaattgttaccacaattgaatttggtggaagtgcagaagatattgctagagtatgtcatgctcatccaacaactagtgaagcggtaaaagaagcagctttaagtgttgatggcagagccatacatatttaa

SEQ ID NO: 223000 - DNA, 274 bp, Unknown
  Bacterial polypeptide expressing nucleotide sequence isolated from the Sargasso Sea
aatgaagaaatatgatgtgatagttattggcggtggtcctggcggatatgttgctgcaatacgggctgctcaactaaataaaaaagttgctttgattgaatctcagcatttaggtgggatttgtttgaattgggggtgtattccaacaaaatctttattaaaaaatgcagaagtacttgatattattaaaaatagtagcaagtatggaattgatgttaaagattatacaattaattgggataaagttataaaacgttctagagatatagcaaac

SEQ ID NO: 223001 - DNA, 617 bp, Unknown
  Bacterial polypeptide expressing nucleotide sequence isolated from the Sargasso Sea
tatgtatgatgttgttgtaattggaggcggtcctgctggttatgttgcagcgattaaagcatctcaattaggtctaaatacagcttgtgtagaatttgcctctgatgaaaaaggaaatcaaaaatatggaggcacttgccttaatgtgggttgtattccatcaaaatctcttctggattcatctcacaaatattacgaagctcaaaatgattttgcatctcatggaatagatctaaaagatttatcagtcaatattccttcaatgatgaaaagaaaggatgaagttgttaataaacttacaactggaataactggattgtttaaagcaaatggtgttgaagcaatatcaggaagagggaaagttattaatgagaaccttgtagaagtttcaaataatggagatataacaagcttggagacaaaattcataatattggcaacaggctcaaatccaattgaaattccaattgcaaaatggtctgaaaatatagtcgatagtacaggagctcttaattttgatagggttccagaaagacttggaataattggagctggagtaattggtttagagcttggtagtgtatggtcaagacttggagctgaggttacagtcatag

SEQ ID NO: 223002 - DNA, 645 bp, Unknown
  Bacterial polypeptide expressing nucleotide sequence isolated from the Sargasso Sea
tagataaagatggtaataaaaataattttgattgtgatgttgttttaatttctgttggtagaaaacctaatacggatggtttaaatttagagtcagtaggagtaaatcttgatgaaaggaatagaattaaaactgataaaaattttatgacaaacgttcaaaatatttatgcaataggcgatgtgattgttggcccaatgcttgcacataaagcagaagatgaaggtatagctgttgcagaaaatataattggtcaatctgggcatgtaaattacgatacaatcccaggagtagtttatacaacaccagaagtagcatcaattggtaaaactgaggagcaattaaaaaaattaaataaaaaatataaagtagggaaattttcgtttatggccaattcaagagccaaagctatagatgatgcggaaggttttgttaaaattttagctgatgagcaaactgataaagtattaggcgcacatataattggacctcatgctggagaattaattgcagagattggcgttgcaatggaatttggagctagtgcagaagatatagcccgaacttgtcatgctcatccaactttttctgaagcggttaaagaagccgctttatcagtagataaaagagcaatacactcttaat

SEQ ID NO: 223003 - DNA, 151 bp, Unknown
  Bacterial polypeptide expressing nucleotide sequence isolated from the Sargasso Sea
aatgtcacaaaaatttgatgcaattgtaattggtggcggtccaggtggttatgtctgttcaataagactatctcaattaggcttaaaaacagcgtgcatcgagtcaagaggatctcttggagggacatgtttaaatattgggtgtattcca

SEQ ID NO: 223004 - DNA, 672 bp, Unknown
  Bacterial polypeptide expressing nucleotide sequence isolated from the Sargasso Sea
cttggaatgaaggttgcttgtatagaaaaagagccatcactcggtggaacttgtttgaacattggatgcataccttctaaagcattattaaattcatctgaaaaatttgttgaaatttcaaatcatgctgcagagcatggcataaaaacatcaaagatagatttagacctaaatgttttgatggatcgcaaaactaagattgtaaaaaaacttacaacagggatcagttttttatttaagaaaaataaaatcacgcatattccaggcatgggttcatttgtagataaaaatactatttctattacaaatggaaaaaatgaaattactgctagtgctaaaaattttattatcgcaacaggatcatcttcgattgagataccaaatattcctgttgatgaaaaacaaatagtatcttcatcaggcgctctttctctatctaaaataccaaaatcactcctagttattggtggtggatatattggattagagatgggatcagtatggagtagattaggttcaaaggtaacagttgttgaagctcttgacagaattgttccaactatggatggtgaaattgcaaaagagtttatgaaaatgttaactaaacaaggattagaatttaaattatcgcataaagtgagttctgcaaaatctggtaagtctggtgtagat

SEQ ID NO: 223005 - DNA, 902 bp, Unknown
  Bacterial polypeptide expressing nucleotide sequence isolated from the Sargasso Sea
tttagccgaaggcaaagaaacaacaattcaaacagacaaaacaattattagtactgggtcagaacctatatcaatacctggcatggaatttgatgaagaaaaaatactttcttcaactggagctttatctctttccaaattgccaaaaaaaatggttgtcgtaggtggtggttatattggtttagagatgggttctgtttggtcaagattagggacccaagtagaggttattgaatttttagatcatataaccccaggcatggataaagaaatttctaaagaattcgagaaaattttaaagaaacaaggaataaaatttcaattaaatacgaaagtagagaaaattataaaaagtaaaaattgtgtaagcattaatactgttgataaagaaaaaaagaaaaacaagatagatgcagacgttgttttgatttccgttggaagaaagccacataccaaagatttaaatttagaaaatgttggagttcaaactgatgaaaaaggaagggtaaaagtaaataaatattttcaaactaatgttaaaaatatttatgcaatcggagatgttatagaaggacctatgcttgcccataaagcagaagaagaaggtattgcagttgcagaattaattgcaggtcaatcaggaaacgtaaattatgatattataccaggtgtcgtttatacctctcccgaggttgcatcagtcggtaaaacagaagagcaattaaaaacaaataaaaataattacaaagttggaaaatttccatttatggcaaactcaagagcaaaagcaattgatgaacaagaaggatttgtaaaaattcttgctgatgcaataacagataaggttttaggagttcatattattggccctcatgctggagaaatgattgctgaaatggcaa

SEQ ID NO: 223006 - DNA, 841 bp, Unknown
  Bacterial polypeptide expressing nucleotide sequence isolated from the Sargasso Sea
attatacaatctgaaaaaactataatagcaactggatctgtggctactcctttgccaggaattgaaatcgatgagcaaaaaatagtttcttccacaggtgcattaaagcttgaaaaagttcctaataaaatggtcgttgtaggtggtggttatattggattagaaatgggatcggtttggtcaagattgggagccgaagtagaagtggtagagtttttagatcacatcactccaggtatggataaagaaatatcttcagaatttatgaaaattttaaagaaacaaggcataaagtttaatatgcaaaataaagttgaaacaattaaaaaaaataaatccggagttgtagtatccactgtagataaagaaggaaataaaaataattttgagtctgatgtagttttaatttctgttggtagaaaggcaaatactgagggcttaaatttagagactattggagttgaactggatgatagaaaaagaattaaaactgacaaatcttttaaaacaaatttagaaaacatatatgcaatcggtgatgtgatatcaggacctatgcttgctcataaagctgaagatgaaggtgttgctgttgccgaaaacatcgcaggacaatcagggcatgtcaattatgatactattccaggggttatatacactactccagaagttgcagcgattggaaaaactgaggaacaattaaaagactctaaaatggaatataaagttggaaaattttcattcatggccaactcaagagcaaaagctattgatgatgcagagggatttgtgaaaattttagctgatgaaaagacagataaagtactaggtgctcatataa

SEQ ID NO: 223007 - DNA, 475 bp, Unknown
  Bacterial polypeptide expressing nucleotide sequence isolated from the Sargasso Sea
aatgtacgacattatagtaattggaagcgggccggctggttatgttgcggcaataagagcatctcaattaggtttaaaaactgcgtgcattgaaaaatcctctattaataataaaccacaattaggtggtacttgtcttaatataggttgcattccatcaaaagcactattggattcatcacatcgatatgcagatgctctaaatcatttctctcatcatggaataaaggttaccaagcccaaaatagatatttctcagatgatggaaagaaaaaacaaaatagtttctcagctcacttctggagtcgctgggcttctaaaagcaaataaagtatctcaaattacaggcagcgcaaaaattattgattcaaataatgttgaagtttctaatgaagaaaatactgaattgctaaaaaccaagaatattattatagctactgggtctatgccaatagatattcctgttgcaaggtag

SEQ ID NO: 223008 - DNA, 145 bp, Unknown
  Bacterial polypeptide expressing nucleotide sequence isolated from the Sargasso Sea
aatgtcagaaaaatttcaagctgtagttattggaggtggaccgggtggttatgtgtgtgcaatcagacttgctcaattaggattaaaaactgcatgtatagagtctagagggtctttgggaggtacttgtttaaatgttggttgc

SEQ ID NO: 223009 - DNA, 286 bp, Unknown
  Bacterial polypeptide expressing nucleotide sequence isolated from the Sargasso Sea
atgacagaaaaatttgattcagtagtgatcggtggcggacctggtggatatgtttgcgctataaggttagctcaactaggtcaaaaaaccgcctgtatagaagctagaggtgctctaggtggaacttgtttaaacattggatgtattccttcaaaaagcttattaaatttgtctgagaattttaaaaaggctaaaaatttttctaaacttggaattgaaacaggagacgtaaaacttaatttagacaagatgatgaaaaataaagaaaaagcagtttcaatttgac

SEQ ID NO: 223010 - DNA, 874 bp, Unknown
  Bacterial polypeptide expressing nucleotide sequence isolated from the Sargasso Sea
aaaaatctagaaaaacatggaattggtgttgaaaatgtaacattagatctttcatcaatgatgaaaagaaaagatgatattgtttcaaaacttacaggcgggataagtagtttatttttagctaacaaagttcaatccttatcaggaaaaggaaaaatcatttcaaaaaatattatccaagtcactcaagctagtggcaaaactaaagatattcaagcaaaaaatattatcatagcaaccggctctaatcctatagaaataccttcagctaattttagtaaaaatattgttgatagcactggcgcattatctttcaaaagtgttccaaaaacattgggtgtagttggagcaggtatcattggtttggagttaggaagtgtttggtcgagattaggctctgaggtaactgtattagaagcattagaagattttttgcctatggctgatccagatatagcaaaagattccttaaaagagttcaaaaaacaaggtttaaatattgaacttgcatccaaagttattagtagtaaagaattaaaaaacgcagtggaggtgacatatcaacataaaggaaaagaaatacaaaaagagtttgaaaaacttattgttgctgtaggtagaacaccaaattcttctaatgttatatctgaaaaactaaatattaaaacacaggatggttttattgaagttaatgaattttgtcagacttcagtaaagaatatatgggcaattggagatgtagtaaggggtccaatgttagctcataaaggaagtgaggagggtattatggttgctgaaagaatagcagataaacaagcacaagttaattatgatttagtgccttcagtgatttactcacatcctgaaatagcat

SEQ ID NO: 223011 - DNA, 825 bp, Unknown
  Bacterial polypeptide expressing nucleotide sequence isolated from the Sargasso Sea
tttgaataagaattatgatatagtagtaataggtggtggtcctggtgggtatgtagcagctattagagcagctcaattgggtaactcagtggcagttatcgaaaaagaggctttaggcggcatttgtcttaattggggctgtataccaacaaaatctttacttaaggattctgaagtgcttcatttagtgaagaatgcagataagtttggaattaaaatagataattataggatcgatttcagttcaaccgtgaagcgaagtaggagtgttgcaaaaagactctctaagggtatcgaattcctattaaaaaagaataatattgagcatatctctggtgtggcttcattgaaatcgttaacggaaattgaagtattgaatgaaaaaggtgagatgtcaattctgtccggcaaaaatattatcttagcttcaggtgctaggaatcgtgaagtctctggtctaaaaactgatggaaacaggataatttcttcgaaagaggcaatggtattaaaaaaaataccaaagagtattgtaattattggtgctggagctataggaatagagtttgcaagtttttttaatgagtataattcagaagttcaaatagtagaaatgcttccagaactgcttccagtagaggacgacgaagtatcttccattcttaaaagatcctttgaagatcgtggtatcttaattcatacatcagctaaagttgagaagatagaaaaattaaagacaaaagtaaaagttcatatcctctcaaatggaaataaaagtgttttggaggctgaattagctctagttgctgtaggcgttcagggtaatgt

SEQ ID NO: 223012 - DNA, 811 bp, Unknown
  Bacterial polypeptide expressing nucleotide sequence isolated from the Sargasso Sea
gtaattggtggaggacctgcaggatatgtatgtgcaattagattatcacaattaggattaaaaaccgcatgtatagagtccagaggatctttgggaggcacttgtcttaatataggatgtattccttctaaaagcctgctaaatatgtctgaaagttttcataaagctaaaaatttctctaatattggcattgaaactggtgaaattaagctaaatctggaaaaaatgatgagcaataaagaaagttctgttgctacacttacaaaaggagttgagtttttatttaaaaaaaacaaagttacttacattaaaggggtaggatcatttaatgaaaaaaatgaaatattagtcaaaaatgataaatcagaaataaaaattaaaactgataaaactataataagcacaggatcagagcctttatctcttccaggaatagattttgatgaaaaaaaaattctttcatcaacaggggctcttaatatttctaaacttccaaaaaaaatggttgttgttgggggtgggtatattggattggagatgggttctgtttggtcaagattgggaactgaggttcacgtcatagaatatttagatcacattactccaggacttgataaagaaatttcaaatgaatttatgaaaattttaaaaaagcaaaatattaaatttgaattaaatactaaagttgaaaaaattactaaaaatgaacaaggagtaataatagaaacttctaataaaggctcaaaaaataaaattgaagctgatgtagttttaatttctgttggaagaaaccctacactgataaattaaa

SEQ ID NO: 223013 - DNA, 670 bp, Unknown
  Bacterial polypeptide expressing nucleotide sequence isolated from the Sargasso Sea
aatgtcagaaaaatttgatgtaattgtaattggtggtggtccaggtggctatgtatctgcaataagactatcacaattaggtttaaaaacagcttgcattgagtctagaggatctctaggaggcacatgtttaaatattggctgtattccatctaaaaatttactaaatttttctgagaattttcataaagctaaaaactttgaaaaaattggaattgaagttggtcaagttaagttgaacttagataaaatgatgaaaaataaggaaaaagcagttggtattctaacaaaaggtatagagtttttattcaagaaaaataaagtcacatattttaaaggtacaggcgcatttataagtgcaaatgaaatatcaattttatctgagggtaaagaaactacaattcaatcagataaaacaattattagtacaggttcagagcctacttcaatacccggcatagaatttgatgaagaaaaaataatttcttcaactggtgccttatctctttccaagttaccaaaaaaaatggttattgtaggaggtggttatatcggactagaaatgggatctgtttggtcaagattaggtacccaagtagaagttattgaatttttagatcatataacaccaggcatggatagagaagtttcaagtgaattcgagaaaatt

SEQ ID NO: 223014 - DNA, 820 bp, Unknown
  Bacterial polypeptide expressing nucleotide sequence isolated from the Sargasso Sea
aatggcagataaatttcaagcaactataattggaggaggtccaggaggttatgtttgtgcaataagattagcccaattaggtattaaaacagcatgcattgagtctagaggaactttaggaggaacttgtttaaatattggatgcataccttcaaaaaatttgctaaatctttctgaaaattttcataaagcaaagaatttctcaaaaattggaattgaagtaggtgaagttaagctaaatcttcaaaaaatgatggaaaataaggataaagctgtaatgaccttgacaaaaggcgtagaatttttattcaaaaaaaataaggtaacctattttaaaggaattggtaaattaaaatcgccaaatgaaataacaattgtagacaaagaaaataaagaaacaaatattcaatctgataatataattataagcactggctcagaacctatgcctcttccaggaatagaatttgatgaaaaaaaaataatatcttctactggtgcgctatcattaaaatctgtaccaaaaaaaatgttagttgttggtggtggttatattggtttagaaatgggatctgtttggtcaagattgggttcagaagttcatgtggttgaatttttggatcatattactccaggtatggataaagaaatttcaaatgaatttatgaaaatattgaaaaagcaaggtttaaattttcatttagagactaaagttgaaaaaatatcaaaatcaaaaaatggggttataatagaaacgtcagacaaagaaggaaaaaaaataaaatttgaaagtgacgtagttttgatttctgtgggtaga

SEQ ID NO: 223015 - DNA, 238 bp, Unknown
  Bacterial polypeptide expressing nucleotide sequence isolated from the Sargasso Sea
atgaataaaaagaattttgatgttgtggttataggtggtggtcctgctggttatcccgctgcgattagagcggcgcaaaatggattgtcggttgcttgcgtggacgaatggaaaaaccgtgatggaagcgatgctttcgggggaacatgcttaaatgcaggctgtattccgtcaaaagcgttattagagtcaacggagctttactatcgtgcagcctcagagtttaacagcacggaat

SEQ ID NO: 223016 - DNA, 805 bp, Unknown
  Bacterial polypeptide expressing nucleotide sequence isolated from the Sargasso Sea
ttgtctaatacagagctagtagacatcgttgtaataggttctggtccgggtggctatgccgcagcatttagggcagcagatctcggtcaaaaagtactaatgattgatagggatagcgaccttggaggtgtctgtctaaatagggggtgtatcccctccaaggctcttttgcatatttctaaagtaatgactgaggcttctcacctatcaaccattggagtttctttttcagagcctcaaatagaacttgatgtagttagggactataaaaataaaatagtctctaggttgagcagtgggatttcacagcttgcaaacgcacgaaaagtaaacaccatccatggagacgcttcgtttatatcaaacaatgaattgatcgtaaaaagtgaaacaggagacgaaacaattgcttttaagaaatgcattatcgcagttggttcaagttcggcgatgctcccagggctcccggacaacaacccatcaatacttacgtcaaaaacagccctagatttaaaagatatccccaaaaaccttcttgttgttggcggcggcgttattggccttgagctaggacaggtgtatgcatccttagggtctgatgtttcagtggttgagtttttaccatcgctgataccgggggcagatcaagacattgtgaaaccgttacaaaggcgactttctaaacagtttaaatcgattttgctatcttcaaaagtggtggcggttaaggagacagaggagggcgacctaagcgtttctattgaatcaaaagacggcacagaggatttaagattgaaaaaatact

SEQ ID NO: 223017 - DNA, 805 bp, Unknown
  Bacterial polypeptide expressing nucleotide sequence isolated from the Sargasso Sea
agatgttgttgaatttatggatagtatcattcccacgatggacaaagattgtggaaaggaattaacgaaagctttaaaaaaggaaggattcaaattccatatgaagcaccgagttcaatctgttgagaacactggaaaaggaattaaagttacggcgctgaacaaaaaagatgaaacggttgttttggaagcagactattgcttagtatcggttggtcgaaagccgtacactgaaggtcttggtctagaaaatgctggtgttagtttagatgaaaaaggaagagtgaatgttgacgagcattgtgctacaaacgttcctggaatatatgctattggagacgttgttcgaggcgtaatgttagcccacaaagcagaggaagaaggtgtttacgtcgcggagcagattgctggtcaaaaacctcatataaatcataacttaatccctggtgtcgtttatacatggccagaggtttcagctgttggaaaaacagaacaagagttaaaagatgcagggatagaatataaaactggtaaattcaacatgagagctctaggtagagcaagagcaagtatggatttagcgggatttgtgaaaattctcgcagataagaatacagatgaaattttaggagtgcatatagttggagcaagagcagcagacttgattatggaggcagtaacggctatggaatatagagcctctgctgaggatctagctcgtatttgtcatcctcacccaacatttaccgaggcaattaaagaggctgctttggatgcaacagataaaagagcaattcacgcataa

SEQ ID NO: 223018 - DNA, 715 bp, Unknown
  Bacterial polypeptide expressing nucleotide sequence isolated from the Sargasso Sea
tgtctgaacgtaggctgtattccttcaaaagccttgcttgattccagtgaacattttaataatgccaaacataattttgagttacacggaattaagacccagaaacttgaactgaattggcctaggatgcttgagcgaaaggatgatgtggtaagtcagacctgtgatggactccaatacttaatgaaaaaaaataaaatcacatttcttaatggtcatggaacatttaatgataaaaatacaatcactgtgaaaggtaaagataatgatgagcagagattgaaaactaaatatactatcgttgcaaccggttctaaaccgtcaagcattcccggtgtaaactgcgataaaaaacacatcattacttcaactgaagctctcagtctgccgaatattccagagaaactaattgtgattggtggaggtgtgattgggcttgaacttggttcagtttttaaacggctaggttcaacagtgcaggttgtggaatatctagatagattggttgctggaatggatatttctttgagcaaagagattctgagggttttaaaaaaacagggtattgaattttttctcagtcatgctgttcaaaaagcagttgtaaatggaaaaaatgttgaaataactgcaaaaaacaaacagggaaaagaagttgaattcagtggtgattactgcctggtagcagttgggagaagaccatacaccgaaaatc

SEQ ID NO: 223019 - DNA, 832 bp, Unknown
  Bacterial polypeptide expressing nucleotide sequence isolated from the Sargasso Sea
atgattgttgtgggtggaggttatattggtttagaaatgggttcggtgtggtctagactagggtctgaagtccatgttattgaatttttggatcatattacaccaggtatggataaagaggtatctaaggaatttatgaagattttaacaaaacaaggaattagttttcatatgcaaacaaaagtagaatcaattaaaaaaaataaaacatcagcgaagattttactgatggataaagatggaaggaaaaaagagttagaatgcgatgttgtattaatttcagttggaagaaagccaaatactaagaatttaaagttagattctgttggagttttattagatgaaaaaaaaagaattaaagtaaataaaaattttgaaactaatattaaaaatatttatgcgataggcgatgtaattgcagggccaatgttggcacataaggcagaggaagagggaattgcagtagccgaattaatatcaggtcaatccggtcatgttaattatgatgttattccaggagttatttatacatccccagaagttgctacagttggaaaaacagaagaacaactaaaatcattaggtattaaatacaaagtaggaaaattcccatttattgcaaattctagagctaaggcaattaatgaacctgaaggatttgtaaaaattcttgctgatgaaaaaacagacaaaatattaggtgtacacatgataggcccacatgttggtgaaattataggagaggtagctgtagctatggaatttggcgcaagttcagaagatgtagcgaggacatgtcatgcacatccaactttttctgaggcagtaaaag

SEQ ID NO: 223020 - DNA, 727 bp, Unknown
  Bacterial polypeptide expressing nucleotide sequence isolated from the Sargasso Sea
atggtaaaaaacttcgatttagcaataattggttcaggtccgggtggttacgtagcggctataagagcatctcagctaggcctaagtgtagttttaattgaaaaggcagaacttggaggagtttgcctcaattggggatgtatcccaactaaagctcttctaagatctgcggaagtttttgatttagtaaagaggtctcaagactttggaatagacataccaggccattcgctaaatatagaaaatattgtactacggtcaaaaaatgtagctgcaaaattgtctaatggagttaaatttcttttagctaaaaataaagtagaagtcattcgggggaaagggactttattagataataatagattaagtattgaaaaagaaaataaagacggggatatcacaatagtagcccgaaatattattattgctactggtgctcgacccaaggagattcctgggcttaaagtagacggttctacggtttgggactacaaatatgctctaaggccttctcaaattcccgaaaaattaattattattgggtcgggagccataggaattgaatttgctagcttctataatgcgataggttcagaagtaacagtattagaaatgaagaatagaatattattagctgaagataaagatgtggcagattatgcgcaaaaatgctttgagaaaaaaggtattaaatttgttttaggaaccagttttgaagtggcttctt

SEQ ID NO: 223021 - DNA, 898 bp, Unknown
  Bacterial polypeptide expressing nucleotide sequence isolated from the Sargasso Sea
tggaggtccaggaggttatgttgcggcaattcgaggtgctcaattaggtcaaacagtctgtgttatagacaaagataaactaggaggtatttgtctcaattgggggtgtataccaacaaaggccctattaaaaaatgctgaagtatacaatattatcaaaaatgctgataaatatggtataaatgtggatcaagtttccgttaatttcaaaaaaaatgtaaaaagaagtcgtgatgtctcagcccgcttaagtaagggcatcgaatttttaatgaaaaaaaacaatgtcgtgcacataaatggtattggtagacttatcacgaataacaagattgaggttcaaaatggaaataataagaaaatcattgagtctgaaaatattgtaatagcaactggagcacggcctaggtcatttccaggaatgaaatttgatggtaggcgagtcattagctccaaagaagcgatgtccttagaatcacctcctgataaaatgataatcatcggatcaggtgcaataggatgtgaatttgcttattattttaatgaatttggtactcaggttcatttactagaaatggaagatcgaattttgcctaatgaagatctagaaatatcaaatgaagtacaaaatagttttgaaaaagttggaataaaaatatcaaagggtattagagtctcaaagattgagagcttgaaaacaaaagtaaaagtatttactaatggcgaccataaaaaaggttttcaagaaagtgatatagctcttctagcagttggcgttacaggaaatatcgaaaatataggattagaggacctaggtattaagactgaccagggtgccattaagataaatgaatataatcaaacaaacatatcaaatatttatgcaattggtgatgta

SEQ ID NO: 223022 - DNA, 682 bp, Unknown
  Bacterial polypeptide expressing nucleotide sequence isolated from the Sargasso Sea
caggggatctctaggtggtacatgcctgaatattggttgtatcccttcaaaaagtttacttaacttgtctgaggaatttcacaaagttaaaggtttggcaaataaaggtattgaaataggagaagtaaaactaaatcttgataaaatgatgaagagcaaggacaaagcagtcactgttcttacaaaaggcgtagaatttcttctaaaaaaaaacaaagttacctattttaaaggccatggaagttttaaatcaaaaaatgaaatcttaataaaagatgatcaaaaaaaagaaacaataattcaaactgaaaaaacagttatagccacaggatctgtaccagtatctctaccgggcatcgaaatagatgaaaaaataatagtttcatcaactggagctttaaaattagaaaaagtgcccaataaaatggttgttgttggtggaggttatatcggcttagagatgggatcagtgtggtcaagacttggtgcaaaagtagaagttgttgagtttttggatcatataacacctggtatggataaagaaatttcgtctgagtttatgaaaattcttaaaaagcaaggaatgaagtttaatatgcaaaataaagttgaaacaattcaaaaaaataattcaggtgcagtggtctcaacaattgataaagatggaaataaaaataatttt

SEQ ID NO: 223023 - DNA, 454 bp, Unknown
  Bacterial polypeptide expressing nucleotide sequence isolated from the Sargasso Sea
atgatagacaagtttcaagcagttgtaatcggtggaggtccaggtggatatgtctgtgcaataagacttgctcagctaggctttaaaactgcatgcattgaagctagaggttctctaggcggaacttgtttaaatataggatgtattccgtccaagagcttattaaatttatcagaggaatttcataaagttaaaggtttatcaaataaaggaatagaaattggggaagtaaatctaaatttgtcaaaaatgatgaagaataaagataaagccgtttcaatattaactaagggtgttgagtttttattaaaaaaaaacaaagttacctatattaaaggtactgcaagttttaaatcaaaaaatgaaatcctagtaaaaaatcatgaaaataaagaaactatagtaaatgctgaaaaaataataatagcaacaggttcattgccagtatctttac

SEQ ID NO: 223024 - DNA, 264 bp, Unknown
  Bacterial polypeptide expressing nucleotide sequence isolated from the Sargasso Sea
caagtaggtttaaatacagctggcgtagaacttgcctctgaagaaaaaggaaatcaaaagtatggagggacttgccttaatgtaggctgtattccatcaaaatctcttttggaatcatctcataaatactatgaagctcaaaaagaatttgcatctcatggaatagatctaaaagaattatcagtcaatattccttcaaggatgaaaagaaaggatgaagttgttaataaacttacaacgggaataaccgggctgttaaaagca

SEQ ID NO: 223025 - DNA, 754 bp, Unknown
  Bacterial polypeptide expressing nucleotide sequence isolated from the Sargasso Sea
tatgtatgatgttgttgtaattggaggcggtcctgctggttatgttgcagcgattaaagcatcccaattaggtctaaatacagcttgtgtagaatttgcctctgatgaaaaaggcaatcaaaaatatggaggcacttgccttaatgtaggttgtattccatcaaaatctcttctggattcatctcacaaatattacgaagctcaaaaagattttgcatctcatggaatagatttaaaagatttatcagtcaatattccttcaatgatgaaaagaaaggatgaagttgttaataaacttacaactggaataactggactctttaaagcaaatggtgttgaagcaatatcaggaagagggaaagttattaatgagaaccttgtagaagtttcaaataatggagatataacaagcttggagacaaaattcataatattagcaacaggctcaaatccaattgaaattccaattgcaaaatggtctgaaaatatagtcgatagtacaggagctcttaattttgacagggttccagagagacttggaataattggagctggagtaattggtttagagcttggtagcgtatggtcaagacttggagctgaggttacagtcatagaggcgatggatgatttcttacctattgtcgacaaacaaatttctaaagaatgccatcgagagtttaagaaacaaggtttagatatacatttaggatcaaaacttacctcagctaaagataatggtaaatgtgtagaa

SEQ ID NO: 223026 - DNA, 847 bp, Unknown
  Bacterial polypeptide expressing nucleotide sequence isolated from the Sargasso Sea
cttggaaccgcatatcaatcattttggaagcaaaatcactgtagcagaattttcatcaactttattatcaatggctgatcaagacttagtcaatccattatcaaaaattttaaatcaaaaatttgacaatattttcttatctactgaagtggtaaatatagaagaaaaaaataataatgttatcgcaacctttaaaaaaaataatgaaatttttcaagattcctttgatatagccttaatatctataggtagaacacctaatactagatatttaaatttagacagtacaggaattaaattagacaaaagaggtttcattccagttaataaaaagagaaggactattataccaaacatatatgcaataggagatataacaggcgaccctatgctagcacacaaagcaacgcatgaaggtaaaatagcagcagaaaatatatctggtttaaatgttatttttcaacctctatctattccctctgttatatataccaatcctgaaattgcatgggttggtcatactgaagtcgaattaaaaaataaaaaaatagattataataaagcaacttttccatggtcagctagtggtagagcaatgactactggaagcacttctggtaaaactaaaattttaacttcaaaagataattcttcaatactaggagttggaatatgtggaacaaatgctggagaattaatatcagaggcaatgttagcaattgaaatgggtgcaaatattgaagatattagcttgactatacatcctcatcctactttaagtgaaactattgctaatgcatctgaaatgataactaaaacaattactgatttatatatcaaaaattga

SEQ ID NO: 223027 - DNA, 511 bp, Unknown
  Bacterial polypeptide expressing nucleotide sequence isolated from the Sargasso Sea
atgactaaaaaatacgatttaattgttcttggaagtggtcctggaggatatgttactgcaattagggcatctcaactcggactaaagactgctatagttgaaaaggaaagtctgggtggagtttgtttaaattggggttgtattccaactaaggctctgttaaagtctgcacaagtattcgaatacttaaaaaaagctgattcatatggactaaaagttaaagattttgacaaagattttgaatcggttgttaaaagatcaaggaatgtagctgatggaatgagtaaaggagtaacttttttgatgaagaagaacaagattgatgttattaatggatatggcaaagtgttaccaaacaaaaaggtttcagttgaaaatgatggtgaagttcaagaatttgagtcctcaaatatcattatagccactggaggtagatcaagagttattgattctattcctcaagacggcaaaaaaattattggttatagagaagcaatgacactccctaaac

SEQ ID NO: 223028 - DNA, 598 bp, Unknown
  Bacterial polypeptide expressing nucleotide sequence isolated from the Sargasso Sea
catggataattttgatttagtagtaataggtggaggcccgggaggttacgtttgtgccataagagcagcacaactgggtttaaaaactgcttgtgtagagtcaagaggagctctaggtggaacttgtttaaacatagggtgcattccttcaaaaagtttattaaatctgtctgaaaactttcataaagctaaaaaagactttgaccgacaaggaatcgagatcgaaggtattaaacttaacattgagaagatgatgttaaataaaaataaatctattcaagttcttactaaaggagtggaatttttatttaaaaaaaataaagtaacctacataaaaggaaaaggtgtgctattttccaaaaatgatattgtagtttacgaaaataacaaaaaaacaaattataagacaaaaaatattgttatagctacaggttctgatgtagcatctttaccaggaatagaaatagatgaaaaaaatataatttcttcaactggagctttatctcttaataaagtgccaaaaaaattagctgtgataggaggaggttatatcggtctagagatgggttcggtatggtcaaggctaggctcagaagtt

SEQ ID NO: 223029 - DNA, 798 bp, Unknown
  Bacterial polypeptide expressing nucleotide sequence isolated from the Sargasso Sea
gaattccatacgcacggaattaaaacgtccaaagtcagtattgatattccgtcaatgatggaaagaaaggccaaagttgtaacgcagctgactcaggggattaaaggcttatttgctgcaaataaagtagattcgttacatggtgttggcacaatctcggataataacgaagttttcgttttagatgccaaaggaaacagtgataagtacctcgcaaaaaatatcatcattgccacagggtctgtaccaataaatatcccacctgcaccggttgataatgaggttatagttgattccaccggtgcgctagaatttgacgcagtaccggagcgcttaggcataataggtgccggtgtaataggacttgagcttggaagtgtttggggaagacttggagcaaaagttactgttcttgaagcgctagatgagtttctaccctcggtcgatactcaaatagcaagagaggcgaaaaaaatattaggtaagcaagggctcgatattaagttaggctctaaagtaactgggcacaaaatcagtaagggtaaaaagaaagaggtgacagttacttttgagacaaagggcgcctcggaagaaattacattcgacaaattaattgttgctgttggacgaaggcccgttacagactcgctattagccaatgatgtcagtattgatctttgtgataggggtttcataaaagttaatgagcagtgccaaacgaatgtccctaacatttatgccgtgggtgatgtagttagggggccaatgcttgcccataaaggctctgaagagggagtt

SEQ ID NO: 223030 - DNA, 796 bp, Unknown
  Bacterial polypeptide expressing nucleotide sequence isolated from the Sargasso Sea
atggataattttgatctattagtaattggtggaggtccaggaggttatgtttgtgcaattcgagcagctcaacttggtcttaaaacagcatgcgttgagtcgagaggagccttgggcggaacctgtttaaatattggctgtattccatctaaaagcttgttaaatttatctgaaaattaccttaaagcaaaaaaagattttaatcagcagggtattgagatcgaaggcattaagctgaacatagacaaaatgatgtctaacaagaataaatcaatccaagttctcacaaaaggagtagaatttttatttaagaaaaataaagtaacttatattaaaggaaaaggagttctattttctaaaaatgatgtggttgtttacgataataacaaaagaacaagctacaagacaaaaaatatagttatcgcgacaggatccgaagtggtttctttgccagggatagatattgatgaaaaaaatattatttcctcgactggagctctttcacttaaaaaagtcccgaacaaattagctgtaataggcggcggctatattggattagaaatgggttcagtatggtctaggcttggttctgaagttactgtgatagagtaccttgattatataacaccaggaatggatagagaaatatcagatgaatttaaaaaaatattaattaaacagggaattaaatttaagttaggttcaaaagttaattccgttaaaaatactaatacgggtgtatcaataaattataccgatatcaagaattcaaaaaatgaaacattaagttttgata

SEQ ID NO: 223031 - DNA, 541 bp, Unknown
  Bacterial polypeptide expressing nucleotide sequence isolated from the Sargasso Sea
taacttaacagataataaatcaattgaaattagagataactttcttacctcagtaaaaggaatttttgctataggtgatgtagcccctggaccaatgctagcacataaatccgaagaagagggggtggcgtgtgttgaatttataaacggtcaaaagcctcatataaactatgatgctataccagcaattgtatacacaaatcctgagattgcatcagttggaaaaacagaagaacaacttaaaaaagaaaataaagatttcaaagttggtaaatttccatttatggcaaatggtcgtgcattaactacctcggcttcagaaggttttgttaaaattttagttgataaaaaaacagatgaaattttaggcgctcatataattggtcatgatgctggacaattgattgcagaaattgttacaaccatagaatttggtggtagtgcagaagatattgctagagtatgtcatgctcatccaacaactagtgaagcggtaaaagaagcagctctaagtgttgatggtagagcaattcacatttag

SEQ ID NO: 223032 - DNA, 427 bp, Unknown
  Bacterial polypeptide expressing nucleotide sequence isolated from the Sargasso Sea
atgagtgacgaatttgatgtaattataattggaggtggtccgggaggatatgtttgtgctattagggcatcccagctaggtttaaagacagcgtgcgtagaaagtcgcggtgctcttgggggaacttgtcttaatataggttgtattccatcaaaaagtttacttaatctctcagaaaatttttacaaagctaaaaaagatttttctaatcaggggatagaagtatcaaatgtgaaactgaatgtagaaaaaatgatgctcaataagaataaatcagttcagactttaacaaaaggtgtagaatttttattcaaaaaaaacaaagtaagttatttaaaaggcaaaggtgttatattttcaccatcaagcgtggtggtttataatgaggggaaaaaaacttcttataacgctaaaaatatcgtaatag

SEQ ID NO: 223033 - DNA, 769 bp, Unknown
  Bacterial polypeptide expressing nucleotide sequence isolated from the Sargasso Sea
agaattgttccaactatggatggtgaaattgctaaagagtttatgaaaatgttaactaaacaaggattagaatttaaattatcgcataaagtgagttctgcaaaatctggcaagtctggtgtagatgttgaaatggtaacatcagataaaaagaaaataaaagaaaactacgaaatagttttaatgtcagtaggaagaaaaccaaacacagaaggactgggtctcgaaaaaattggtattaaattaaccgaaaaaaaatccattgaaattaaagataactttcaaacttctgttgagggaatctatgcaatcggcgatgtagcgccgggaccaatgctagcacacaaagctgaagaagaaggagttgcttgtgttgaatttataaatggtcaaaaacctcatataaactatgacgctataccagccattgtttataccaatccagagattgcatctgtaggtaaaacagaagaacaactcaagcaagaaaagaaagacttcaaggttggaaaatttccttttatggcaaatggtcgtgcactaaccacttcagcatcagagggatttgttaaaattttggttgataaaaaaacagatgaaatcttaggcgctcatataattggtcatgatgctggacaattgattgcagaaattgttacaacaattgaatttgggggcagcgcagaagatattgctagagtgtgtcatgctcatccaacaactagtgaagcagtaaaagaagcagctctaagcgttgatggtaaagcaa

SEQ ID NO: 223034 - DNA, 433 bp, Unknown
  Bacterial polypeptide expressing nucleotide sequence isolated from the Sargasso Sea
tatggattttgatttggttataattggttcagggcctgggggttatgtggctgcgattagaggggctcaattaggtctaaatgtagcaattattgaaaaagaggctttaggaggtatatgccttaactggggatgtattcctactaaatcatttttgagatcagcagaagttcttaaaattataaaaagttcagaaaaatatggaattaaaagcgaattaggtcatgtagatatcagtgagattgttaaaagatctcgttcaattgctaaaaaattatccaatggtgtacagtatcttttgaagaaaaacaaagttaggatcttttatggtgaggcttccttcaaatcatctaaatgtataaaaattaagtctagaaataacacagttcaagaaataagcagtgaaaacatatgtattgccagtggtggcagg

SEQ ID NO: 223035 - DNA, 805 bp, Unknown
  Bacterial polypeptide expressing nucleotide sequence isolated from the Sargasso Sea
ggtgccggcccggccggctaccacgccgccatccgcgccgcgcagctgggtctgaagaccgcctgcatcgacgctgcgctgggcaaggacggcaagcccgccctcggcggcacctgcctgcgcgtgggctgcattccgtccaaggcgctgctggattcctcgcgccagttctggaacatgggccacatctttggcgaccacggcatcagcttcaaggacgccaagatggacgtcgaggcgatgattggccgcaaggacaagatcgtcaagcagttcaccggcggcatcggcatgctgttcaaggccaacaaggtcaccccgtactacggattcggtgagctgcagccgggcaacatcgtcaaggtcaagcagcacgacggctcggaagtcgagctgaagggcaccaacgtcatcatcgctgccggttcggactcgatcgaactgccgttcgccaagttcgacggcgacaccatcgtcgacaacgtcggcggcctggacttcaccgaagtgccggcccgcctggccgtcatcggcgccggcgtgatcggcctggaactgggcagcgtgtggaagcgcctgggtgcggaagtgaccatcctggaagcactgccggacttcctggccgccgccgatgccgaagtggccaaggtcgccgccaaggaattcaagaagcagggcctggacatccgcttgggtgccaaggtctccaaggccgaggtgaccggcaagggcaagaagaaggaagttgccctgacctacaccgatggtgaaggcgaaaagagcctggtcgtggacaagctgctgg

SEQ ID NO: 223036 - DNA, 831 bp, Unknown
  Bacterial polypeptide expressing nucleotide sequence isolated from the Sargasso Sea
ggaattaattttttatttaacaaaaataaaattgatagatttattggggaagctaaaatattaaaagaaaataaagtaaaaattttagctaacaaaaaagaagaaataattaaagctaagaacattataattgcaactggttccaacccttcaaaattaagaaatgtagatattgatgaaagtaaagttgttagttcaactggagcgctaaaatttgataaagttccaaaaaaattgcttgttataggcgctggtgtaattggtctagagatgggaactgtatggagaaggcttgggtctgaagttgaagtgatcgagtttcttccaagaatattaaatggaatggacactgaaatttcagaaaaatttatgaaaattttagtaaatcaaggaattaaattcaggttaggctggtctgttgaaaaaacttcaataaatggtgatgttgtagatttacaaattaaagaacaattaaactcaaatgaagaaaacttgcaagcagatgcagttttggttgctgttggaagagaaccaaatacacaaaaccttggtttaagtgacataggattaaaattagataaaaagggttttatagaaactgacgaaaactttgaaactaatatatcaaatatttatgctattggtgatgtaattaaagggccaatgcttgcacataaagctgaagaggatgcagtggcgttagtagaattaataaataatgaagcgggtcacatagattataatttggtaccaaatataatttatacttcacctgaggtagcttctatcggacttactgaagatgatttgaaagaaaaaaaataccctata

SEQ ID NO: 223037 - DNA, 862 bp, Unknown
  Bacterial polypeptide expressing nucleotide sequence isolated from the Sargasso Sea
atttttggtggagggccaggcggatatgttgctgcaatacgagcaagtcaattagggcataaagtatgtattattgaaatggagaagttaggaggggtgtgtcttaattggggctgtattcccacgaaagccttattgaaaaatgctgaagtttacaagacccttaaagatgctcatttatatggtatttcaacaggtaaaatatcagtaaatataaaaaagataattcaaagaagtagagaagcatcaaaaaagttgagtaagggcatagaatttttaatgaacaaaaatgggattactcatgtatcgggcgttggtaaattgatcggcgggcatgatttaattgttacaaataaaaaagaacaaaaaaaaatttctgcaaaaaatattatcattgcaactggcgctagaccaaaattaattccaggtgtagaaattgatgggaaacaaataattggatccaaagctgcgatggttttagagattttgccaaagaaaatattaattataggatctggagcaattggatgtgagttcgcgtattatttcaattcctttggcgttgaagtacaaattatcgaaatgcaaaacagaatacttccaatggaagatgaagaaatttcaaagacagttgaaaaatgttttaaagattcaggtattaaagttttaacaaattctaaggtccaaaagattactaaattaaagaataaagtcaatattactgtaaaaaatgagtctattttttctaccgatctggtcttagttgcaactggtgttcaaggaaatattgaggatattggtcttaataaagtaggaataaaaactcgcgatagctcaatagttattgatgagtactgtcgaa

SEQ ID NO: 223038 - DNA, 763 bp, Unknown
  Bacterial polypeptide expressing nucleotide sequence isolated from the Sargasso Sea
atggataaaagttttgatgtaattgttataggaggaggtcccgcaggctatgtatgtgctattagatctgcccaattgggttttaaaactgcatgcatagaatcgagaggatcattgggtggcacttgtttaaacgtcggatgtataccttcaaaaagtctactaaatttatctgaaaattattataaagcaaaaaaagaatttaacagtttgggaatagaaactaatagcatcaaacttaacttatctaagatgatggctaataaaaacaaatcagttttaacactaacaaagggagtagagtatctatttaaaaaaaataatatttcttatttaaaagggaaaggttctatttcatcgaaaaatactgttacggtaatagatgaatcaaaaaaaaaatctaattatcaagctaagaatatagtaattagcacaggatcagtctctactactttaccaggtataaaaattgatgaaaaaactattgtgtcatccaccggagctttatcttttgaaaaagttcctaaagaactaattattattggaggaggctatattggattagaaatgggttctgtttggaaaagattaggctcaaacgtaacggtcattgaatatttagatcatataattcctggaatggataaagatatttcaaacgaatttttaaaaattctaaaaaaacaaggaattaattttaaactaaactcaaaagtaacagcagtaaatgttgtaaaaggcagagcaattgtgatttacaaac

SEQ ID NO: 223039 - DNA, 821 bp, Unknown
  Bacterial polypeptide expressing nucleotide sequence isolated from the Sargasso Sea
gggtgatccagtattaaccctagagactgaaaaggctgcaatggatgttccaagcccttttgccggtgttgtagagaagatttccgtaggtccaggtgatagcgtctcccaaggagacttgatctctattgtgtcatccgagtcaaaacccaatgaagaagatcaatctaacactgaagaaaaagaaacagaacaagcgattcaagagagtgaagatcctagtgaatcttcacaatccgaaaatgattatgacttgattgtattgggtgctggaccaggtggttatgcagcagcatttagagcatctgatttgggtttgaaagtcggtttggttgagcgtaattctgatttaggtggtgtttgtctcaatgttggatgcattccatcaaaggcttttctgcatgccgcaaagatcttggatgattcaaaagaggcagaggtcagcggcatcgtttttaaagagccagaaattaatctatccaaaatgaaagaatggaaaaataacatcatcggcggattgaccggaggattatcaggattggcaaaacaaagaggtgttgatgtgattcatggtacagcaaagttttcttccaaaaatgagatagaggtcaaccatgaaagtaattctcgaagaatttcatctaatcaatttattattgctgttgggtcagagcctgctgagctgagtttcttgccagatgacccaagaattattgactccactggagcattggaacctgatcagatacctaatgatattctaatcattgggggaggaataattggtcttgagatggccacaatatactcggctcttggta

SEQ ID NO: 223040 - DNA, 392 bp, Unknown
  Bacterial polypeptide expressing nucleotide sequence isolated from the Sargasso Sea
gatgtctgaaaacaatttcgatgtaacagttttagggggaggaccaggaggttatgtcgctgcgataagagcagcccagttagggctgaagacagcactggttgaaaaagatgacggctcaggtatagccggccttggtggagtttgtctaaattgggggtgcattcccagcaagtctttgctaaaaaatgctgaactagttaaccaagttaatgattcagaaaaatgggggatttcttttgacaacgttacctttgattttccaaaagccattgcaagaagcagagatgtatctaaacaattaactcagggaatcgaatacctaattaagaaaaacaaaatacagttgtataaagatgagggggtacttgaaagtggaaccgaaatctccc

SEQ ID NO: 223041 - DNA, 235 bp, Unknown
  Bacterial polypeptide expressing nucleotide sequence isolated from the Sargasso Sea
gatgaatatgtcgcgaaatatttttgatgtagttgtgattggtgctgggcccggtggatatgttgccgcaatccgcagcgcgcagctgggtcttaagactgcaattattgagaaagagcatatgggaggcatttgccttaattgggggtgtattcccacaaaggcaatgttaagatctgctgagatctttcatctaatgcaccgagcaaatgagtttggattgagagcagaaaaa

SEQ ID NO: 223042 - DNA, 293 bp, Unknown
  Bacterial polypeptide expressing nucleotide sequence isolated from the Sargasso Sea
tatgacagaaaaatttgactcagtagttattggtggcgggcctggtggatatgtttgcgctataaggttagctcagttaggtcaaaaaactgcctgtatagaagctagaggtgctctaggtggaacttgtttaaacattggatgcattccttcaaaaagcttattaaatttgtctgagaattttaaaaaggctaaaaatttttctaaacttggaatcgaaacaggagacgtaaaacttaatttagataagatgatgaaaaacaaggaaaaagcagtttcaatcttgaccaagg

SEQ ID NO: 223043 - DNA, 605 bp, Unknown
  Bacterial polypeptide expressing nucleotide sequence isolated from the Sargasso Sea
gatgtacgacattattgtaattggaagcgggccggccggttatgttgcggcaataagggcatctcaattaggtttaaaaactgcttgcattgaaaaatcctctagtaataataaaccacaattaggaggtacttgtctaaacataggctgcattccatcaaaagcactattggattcatcacatcgatatgcagatgttctaaatcatttctccgaccatggaataagggtttccaagcccaaaatagatatttctcagatgatggaaagaaaaaacaaaattgtttctcagctgacttcgggagtcgctgggcttctaaaagcaaataaagtatctcaaattactggtagtgcaaaaataatcgattcaaataatgttgaagtcagtaatgaagagaatactgaattgctaaaaaccaaaaatattattatagccacaggatctatgccaatagatattcctgttgcaaaggtagacaacaataatattgtggacagtactggagccctcgaatttaaagcagtacctaagacattgggaattattggggcgggcattatcggattagagcttggaagtgtatggtctagacttggatcaaagg

SEQ ID NO: 223044 - DNA, 406 bp, Unknown
  Bacterial polypeptide expressing nucleotide sequence isolated from the Sargasso Sea
atggcagaaaaatttcaagcagttgttataggaggtggccctggaggttatgtttgtgcaattagacttgcacagttaggtcttaaaaccgcatgtatagagtctagaggttcattaggtggaacttgtttgaatataggctgtataccatctaagagtttgcttaatttgtctgaagaatttcataaagtcaaagatttatcaaataaagggattgaggttggacaggtaaaattaaatttaccaaaaatgatgaagagcaaagataaagcggttacagttttgactaaaggtgtggaatttttacttaaaaaaaataaagttacttactttaagggtactggaagtttcaaatcaaaaaatgaaattctgattaaagatagtgagaataaagaaacccacgtag

SEQ ID NO: 223045 - DNA, 788 bp, Unknown
  Bacterial polypeptide expressing nucleotide sequence isolated from the Sargasso Sea
aatggctcagaaatttgatttagcagttgttggcggggggccaggtggctatgttgctgcgatacgggcagcgcagcttggtaagtctgtggttctggtagaaagtgagcacctcgggggtatatgtctaaattggggatgtatcccgacaaaagcaatgcttaagtcagcagaagttttttacactatgaagcacgcaaaagagtatggtttaattttgaaggacattaattttgatttagaggcaatcgttaatcgttcaagaaacattgctagccggttatcaactggtgtaactcaccttctaaagaaaaacaaagttacggtcgtatccggtaaagcaaaaattgaagatcaaagaactctaatcgtaaacgaagacaaaaaacaaaatataagttttgagaatttgattattgcaacaggctctcgagccaaagaaatgaaagggcttgagactgacggtactttggtttggaattacaagcacgctttaataccaaaaaaaataccagaaacgcttttagtagttggatctggcgctattggagttgaatttgcatctttttacaactccctaggtgttgacaccactttgatcgaaatagctgaaagaatacttcccaatgaagacgatgaaatatcagctgaagcgaagaaggaatttataaacagaggtataaaggttttggataatacttctttaacaaaaattgctaaaaatgagcaaacggttgaggtcacacttaagactttagaaaatatcgaaactcacgaatttgatacca

SEQ ID NO: 223046 - DNA, 689 bp, Unknown
  Bacterial polypeptide expressing nucleotide sequence isolated from the Sargasso Sea
tatgtatgatgttgttgtaattggaggcggtcctgctggttatgttgcagcgattaaagcatcccaattaggtctaaatacagcttgcgtagaacttgcctctgatgaaaaaggaaatcaaaagtatggaggcacttgcctaaatgtaggctgcattccatcaaaatctcttttggattcatctcacaaatactacgaagcccaaaaagattttgcatctcatggaatagatctaaaagatttatcagtcaatattccttcaatgatgaaaagaaaggatgaagttgttaataaacttacaactggaataaccggactgtttaaagcgaatggtgttgaagcaatatcaggaagagggagagttattaatgagaaccttgtagaagtttcaaataatggagataaaacaagcttggagacaaaattcataatattagcaacaggctcaaatccaattgaaattccaattgcaaaatggtctgaaaatatagtcgatagcacaggagctcttaattttgagagggttccggaaagacttggaataattggagctggagtaattggtttagagcttggaagtgtatggtcaagacttggagctgaggtcacagtcatagaggcgatggatgatttcttacctattgtcgataaacaaatttctaaagaatgccatcgagagtttaaaaaca

SEQ ID NO: 223047 - DNA, 481 bp, Unknown
  Bacterial polypeptide expressing nucleotide sequence isolated from the Sargasso Sea
aatgtcagaaaaatttgatgtaacagtaattggtggtggccctggtgggtatatctgtgcaataagattatcacaactaggtctaaaaactgcatgcattgaatccagaggatcgcttggtggaacctgcttaaatgtagggtgtattccatcaaaaagcttattgaacttatctgaaaattatcacaaggcaaaaaattttgaaaagattggtatcgaaattggtgaaattaaattgaaccttggaaagatgatgaaaaataaagaaaaggctgtaaccgttttaacaaagggaatagaatttttgttcaaaaaaaataaggtttcttatttcaaaggcaaagggtcatttaagagctcaaatgaaatattagttactggggatggagaagaaacagttattgagactgaaaaagcaataattagtactggttcagagcctgtatcaatacctggaatggaatttgatgaggaaaaataa

SEQ ID NO: 223048 - DNA, 220 bp, Unknown
  Bacterial polypeptide expressing nucleotide sequence isolated from the Sargasso Sea
atgtccaattttgattatgatcttattgttattggtggtggcccaggtggatatgtggcagcaattaaagcgtctcaacttggcatgtcagttgctttggttgaggataaacatttaggtgggatttgcttaaattggggatgtattcctactaaagcgctattaagggctagtgaaattagacacatgttagataatgtagatgaatttggttttacag

SEQ ID NO: 223049 - DNA, 867 bp, Unknown
  Bacterial polypeptide expressing nucleotide sequence isolated from the Sargasso Sea
aaaaaattggtatggaagtaggttctttaaaacttaaccttcccaaaaatgatgaaaaacaaagaaaaagcagtaacagtttaaccaagggaatagagttcttgtttaaaaaaaataaagttacctattttaaaggaaccggctcaattacaagtaccaaccaaatatcgataaaatctaatgataataaaaatgaaactattgaagcaaaaaacataattattgcaacaggttctgatccagtctctttaccagatgttaaatttgatgaagaaaaaatagtttcatctactggagcactctctttaaaagaggttcctaaaaaattagttgtagtcggtggtggatacattggactagaaatgggatcagtttggtcaaggttgggatctgaagtccaagttgtggaattcttagatcatataactccaggtatggacaaggagatatcaaatgagtttcaaaaattattaaaaaagcaaggaataaattttaatttaaagacaaaagtagactcgatttcaaaaaataaaaatggagttagtataaatacaactgatgaaaaaggtaacaaaaaacagtttgattgtgatgttgttttaatttctgttggtagaaaacctaataccagcaacttaaacttagaaaaagttggagttgataaagatgataaaggaagagtaaaagtgaataaacattttcaaacaaatattaaaaacgtttatgcgattggtgatgttattgagggtccaatgttagctcacaaagccgaagaggaaggcatagctgttgcagagattatcgcaggtcagtcaggtcatgtaaattacgatacaataccaggtgtaatttatacctcaccctgaa

SEQ ID NO: 223050 - DNA, 715 bp, Unknown
  Bacterial polypeptide expressing nucleotide sequence isolated from the Sargasso Sea
taaagcatcccaattaggtctaaatacagcttgtgtagaatttgcctctgatgaaaaaggcaatcaaaaatatggaggcacttgccttaatgtaggttgtattccatcaaaatctcttctggattcatctcacaaatattacgaagctcaaaaagattttgcatctcatggaatagatttaaaagatttgtcagtcaatattccttcaatgatgaaaagaaaggatgaagttgttaataaacttacaactggaataactggactctttaaaacaaatggtgttgaagcaatatcaggaagagggaaagttattaatgagaaccttgtagaagtttcaaataatggagatataacaagcttggagacaaaattcataatattagcaacaggctcaaatccaattgaaattccaattgcaaaatggtctgaaaatatagtcgatagtacaggagctcttaattttgacagggttccagagagacttggaataattggagctggagtaattggtttagagcttggtagcgtatggtcaagacttggagctgaggttacagtcatagaggcgatggatgatttcttacctattgtcgacaaacaaatttctaaagaatgccatcgagagtttaagaaacaaggtttagatatacatttaggatcaaaacttacctcagctaaagataatggtaaatgtgtagaaatttcttatgaatca

SEQ ID NO: 223051 - DNA, 877 bp, Unknown
  Bacterial polypeptide expressing nucleotide sequence isolated from the Sargasso Sea
tcaaaccttggaatagaaacaggcgaactaaaacttaatatagaaaagatgatgaaaaataaagacaaagcagttactgttttgaccaaaggtgtagaatttttatttaaaaaaaataaagttacctattttaaaggcacaggaagtttcaaatcacctaaccaaatatcaataattgatgataaaaaaaaagaaactattttagaggctcaaaaaattattattagtacaggatctgagcctctttctttaccaaatgtaaaatttgatgagaaaattattttatcttcaacgggagctttgtcacttaattctgttccaaaaaaaatgattgttgtaggtggtggttatattggcttagaaatgggctcggtatggtctagattagggtctgaagtccatgttattgaatttttggatcatattacaccagggatggataaagaggtatctaaagaatttatgaagattttaacaaaacaaggaattagttttcatatgcaaacaaaagtagaatcaattaaaaataacaaaacatcagcgaaggtttttctgatggataaagatggaaagaaaaaagaattagaatgtgatgttgtattaatttcagtaggaagaaagccaaataccaagaatttaaagttagattctgttggagttttattagatgaaaaaaaaagaattaaagtaaataaaaattttgaaactaatattaaaaatatttatgcaataggtgatgtaatagcaggcccaatgttggcacataaggcagaggaagagggaattgctgtggctgaattaatatctggtcaatctggtcatgttaattatgatattattccaggagttatttatacatcccccagaagttgctgca

SEQ ID NO: 223052 - DNA, 764 bp, Unknown
  Bacterial polypeptide expressing nucleotide sequence isolated from the Sargasso Sea
tatgtatgatgttgttgtaattggaggcggtcctgcaggttatgttgcagcgattaaagcatcccaattaggtctgaatacagcttgcgtagaatttgcctctgatgaaaaaggaaaccaaaagtatggaggcacttgccttaatgtaggctgtattccatcaaaatctcttttggattcatctcacaaatactacgaagctcaaaaagattttgcatctcatggaatagatttaaaagatttatcagtcaatattccttcaatgatgaaaagaaaggatgaagttgttaataaacttacaactggaataactggactgtttaaagcaaatggtgttgaagcaatatcaggaagagggaaagttattaatgagaaccttgtagaagtttcaaataatggagataaaacaagcttggagacaaaattcataatattagcaacaggctcaaatccaattgaaattccagttgcaaaatggtctgaaaatatagtcgatagcacaggagctcttaattttgatagggttcctgaaagacttggaataattggagctggagtaattggtttagagcttggtagcgtatgggcaagacttggggctgaggttacagtcatagaggcgatggatgatttcttacctattgtcgacaaacaaatttctaaagaatgccatcgagagtttaaaaaacaaggtttagatatacatttaggatcaaaactcacctcagctagagataatggtaaagatgttgaaatttcttatg

SEQ ID NO: 223053 - DNA, 355 bp, Unknown
  Bacterial polypeptide expressing nucleotide sequence isolated from the Sargasso Sea
aatgaccaataccaaatttgacattgccgtgattggtggcgggcctggtggctatgttgcggccattcgggcggcccagcttgggctaaaacctttggtgatcgagcgtgagaatcttggtggtatctgtctgaattggggctgtattccaactaaagcattgctgcgcgctgccgaattgcgtcattccgttgaagaaatggccgattttggcatcactgttggcgaggtgaaagtcgatcttgcggcggtggtgaaacggtcacgcaaggttgccggccgcctgtcaatgggggttaagcatctgctgaaaaagaacaaggtgactgtgattgcggctgaagccaaactggtt

SEQ ID NO: 223054 - DNA, 502 bp, Unknown
  Bacterial polypeptide expressing nucleotide sequence isolated from the Sargasso Sea
aatgactaaaaaatatgatttaattgttcttggaagtggaccaggaggatatgtaactgctattagggcatctcaactgggacttaaaactgctatagttgaaaaggaaagtcttggtggggtttgtttaaattggggatgtattccaactaaagctctattaaagtctgcacaagtattcgaatacttaaaaaaagctgattcatatggactaaaagttaaagattttgataaagattttgactcggttgttaaaaggtctaggagtgtagctgacggaatgagtaaaggagtaaatttcttaatgaagaagaacaagattgatattattaatggacatggtaaagtgttaccaaataaaaaagtttcagttgaaaatactggtgaagtacaagaatttgagtcctcaaatataattatagctacaggaggtagatcaagagtaattgattctattcctcaagacggtaaaaaaataattggttatagagaagcaatgact

SEQ ID NO: 223055 - DNA, 247 bp, Unknown
  Bacterial polypeptide expressing nucleotide sequence isolated from the Sargasso Sea
catggctgataccaacttcgacgtcatcatcattggtgccggaccgggcggctatgttgcggccatccgggcttcgcaattgggtatgaaaacagcgataatcgagaaagaacatcttggtgggatttgtctgaactggggttgcattccgaccaaggcactgttgcggacggccgagatatataacttcattaagcacgccgctgagtatggcctgagtgttgaaaaggcctcatttgatttaaag

SEQ ID NO: 223056 - DNA, 319 bp, Unknown
  Bacterial polypeptide expressing nucleotide sequence isolated from the Sargasso Sea
atgaatagttttgatttagtagttattggtggaggtcccggaggttatgtttgcgctataagagctgcacaacttggtttaaaaacagcatgtatagagtctagaggagctttaggaggaacttgccttaacataggctgcataccctcaaaaagcttgttaaatttgtcagaaaatttccataaagcaaaaaaagattttaatcaacaaggaattgaaatcgagggcatcaaactcaacattgataaaatgatggcgaataaaaataaatctattcaggtacttactaaaggggtagagtttttatttaaaaaaaata

SEQ ID NO: 223057 - DNA, 910 bp, Unknown
  Bacterial polypeptide expressing nucleotide sequence isolated from the Sargasso Sea
aaatatagccgtataggtggagtttgccttaacgtaggttgtattccatctaaatctcttctccatgctgcaaaagttattgaagaaaatcaatcattcagtaacaacggaattttttttggtgaaccaaagatagatcttacaaagttgagaaattggaaaaacgaaattataaagaatttaacaggaggattggagaatcttgcaaataaaagaaaagttaatgtattaacagggttgggtaaatttttagataaaaataatatttgtgttataaattcttcaggcgaagaacgttatgtaaattttgaaaatgcaattattgctacaggatcccaccccataaaattaccattcctacctgaggacaatcgaatttttgactctaccgacgctttagaaataaatagtataccgaatcatctgcttataattggtggaggaataattggtttagaaatggcaacagtttatagtgcccttggttcaaaaattacaattgtcgaaatgatggatggtttaattactggagcggaccgagatattgttaaacctttacataaaatgattgaaaaaaaatgtgaaaatatttggctggaaactagtgttaaaaaaattgaattatcaaaaaaagggttgaaagttttttttaaaggaaaaaatgccccggatgaaccaaaatatttcgataatattcttagttctgtcggacgctctccaaattcatcttttatatctgtagacaaagtaggtgtgaatgttgatgaaaaaggttttataaaaactgactcgcaaatgagaacaaatatttccaatatttttgctattggtgaccttgtaggacctccgatgttagctcataaagctactcacgaagcaaaagtggcagcagaagttatttgggaatgaa

SEQ ID NO: 223058 - DNA, 1168 bp, Unknown
  Bacterial polypeptide expressing nucleotide sequence isolated from the Sargasso Sea
aatgaatttaccaaaaatgatgaaaagcaaagaaaaggcagtcacagttctcactaagggtgtggaatttttattaaaaaaaaacaaagtaacttattttaaaggaactggaagttttaaatcaaaaaaagaaattataatcagagatgacaaaaataaagaaacaattattcaagctgaaaaagtaataattgctactggttctcttcctgtatctttaccaaaaattgaatttgatgaaaaaattattgtctcatctacaggtgctttaaacttagaaaaagtaccacaaaaaatggttgttgtaggtggtggatatattggtttagaaatgggatccgtttggtctcgtcttggagcagaagtgcatgttgttgagtttttagatcacataactccaggaatggataaagaaatttcacaagaattcatgaaaattctcaaaaagcaagggattaaatttcatttacagcacaaagtcgaaaaagtaacaaaaaatgaattaggtgcagttgtttcaacatctgacaaagatggaaataaaaaagattttgagtgtgatgttgttctgatttctgttggaagaaaacctaatactaatggattaaatttggaaaaaattggtgttaagattgatgaaaaaaatagaattaaaactagtaaagcttttcaaacaaatttagataatatttatgctattggagatgtaatatcaggaccaatgcttgctcataaagcagaggatgaaggaattgcagttgcagaaaatattgcaggccaatcaggtcatgtaaattatgatacgataccaggtgttatttatacaacaccagaagtggcttctatcggaaaaactgaagagcaattaaaggaaaaaaatattcagtacaaaattggtaaattttcatttatggcaaattctagagcaaaagctatagatgatgctgagggttttgtgaagattttagcagatgaaaaaactgacaaagtattaggcgctcatttaataggtcctcatgctggagaattgattgccgaaattggtattgctatggagtttggtgcaagttcagaagatatagctagaacttgccatgctcaccctactttttctgaagctgttaaggaagcagcactgtctgttgataaaagagcaatacactcttaa

SEQ ID NO: 223059 - DNA, 1003 bp, Unknown
  Bacterial polypeptide expressing nucleotide sequence isolated from the Sargasso Sea
catggcaatcatcgacatcaaggtgcccgacatcggcgacttcgccgaagtggccatcatagaagtgctggtcaagcccggcgacaccatcaaggccgagcaaagcctcatcaccgtggagtccgacaaggcctccatggagatcccctccagccatgctggggttgtgaaggaactcaaggtcaagctcggcgacaaggtcgccgaaggctcggtggtgctgacgctggaagtgcagggcgcaggcgcggcagcgccagcaccggctgcggccccagcgcctgcagtttctgagcaaaaacaggcccctgcgcccgttcagcaagcgcaagcagctatcaatccagtagcatccagcttcgctggatcggccgatctggactgtgacgtgctcgtgctcggcggcggccccggtggctacagcgccgccttccgcgccgccgacctgggcctcaaggtcgtcatcgtcgagcgctacgccaccctgggcggcgtgtgcctgaacgtgggctgcatcccctccaaggcgctgctgcacgtggccgccgtcatggacgaagtcagccacatggcggacctgggtgtggactttggcgcgcctgccgtcaacatcgacaagctgcgcggccacaaggaaaaggtcatcggcaagctcaccggcggcctggccgccatggccaagatgcgcaaggtaaccaccgtgcgtggctacggcgcgtttgttggcaccaaccaccttgaggtggaagaaaccaccggcaccggccaggagaagacgggcaccaagaaggtcatcgccttcaagaaggccatcatcgccgccggtagccaggccgtgcgcctgcccttcatgcccgacgacccacgcgtggtcgattccaccggcgccctggcgctcaaggaagtccccaagcgcatgctcatcctgggcggcggcatcatcggcctggaaatgggcactgtctacagcaccctgggcgcacgcctcgatgtggtcgagatg

SEQ ID NO: 223060 - DNA, 589 bp, Unknown
  Bacterial polypeptide expressing nucleotide sequence isolated from the Sargasso Sea
atgtcagaaaaatttgatgttacagtaattggtggtggccctggtggatatgtttgtgcaattagattgtctcaacttggacttaaaacagcatgtatagagtctagaggatctctagggggaacatgtttaaatattggatgtatcccgtcaaaaagtttacttaatttatctgaaaaatttcacagtgctaaaaattttgaaaaaattggaattgagactggagaaataaaactcaatttagataaaatgatgaaaaataaagacaaagccgtaacagttttgactaaaggagttgaatttttattcaaaaaaaacaaagtcacttattttaaaggcaaaggttcgtttgagaacgaaaaatcaataaaaattgtaggctctgaaggcactaaaataattcaaactggtaaaacaattatcagtacaggatcagagccagtttcattgcctggagtagattttgatgaagagagaattctttcttcaactggagccctatctattcccaaactccccaacaaaatgattgttgttggaggaggatatataggattggaaatgggatcagtttggtcaagactggcac

SEQ ID NO: 223061 - DNA, 1366 bp, Unknown
  Bacterial polypeptide expressing nucleotide sequence isolated from the Sargasso Sea
tttgaaaaaattgaccattattggtggagggccggcaggatatgctgccgcactttacgcaagcaattttgatttagaaattactttaattgaatccgacactctaggtggaacttgtttaaacagaggttgtataccggcaaaatactggctacatgttgcggaattaaatcatgaaattgagacctcaagtgaatttggtattgatatagataaaaaaagtattaactgggctaaaacagctgaaaaaagatacgatattgtcaataagcttgtaggtggaattggcatgctacttaactctaaaaaggtaaatgtaattgaaggctggggcttgataaaagacaaaaataatgtcctagttaaaaaagcagatggtgaagaaatagtaattgaatcagattttatacttcttgcaactggttcaaaaccaagatcacttccaagtattgaaattgataatgaatttgtaattacatctgacacagcattgaattgggagataccaccaaaaaaagtatgcgtaattggagcgggagcaattggttgtgaatttgcaagtctcttaaatgatttagattctgaggttgtagttgttgagttagctactgaaattttacctggattagacaaaagaacatctggtgaattaagaaagcaactcactaaaagaggagtcaattttaaactaggcacatctgtagatttgataaatgacaaaaaagttagattttctgatggtgagagtgatagctttgattgtgtattagtcgctgtaggaagagaacctttgactcaaaatattggacttgaggaagtagggataaaagttaacaaaggctttgttcaaactaacttagaaactttacaaactgagatagaaaatatttacgcactaggtgatattgttgaaggcactcctcaactagctcatgtagcttttgctgaagcagtaagttctataactcatattgcgacaggtgaaaataaacccgttaattacaatgcaataccttatgttgtatataccaggccagaacttgctgaagtaggtatcaactctcataaagcaaaagagcttggaatgaaaattaatcaatcgcaacatagcttcgctggtataggtagagctatgattcaaaatcaaaatgagggattagtaaaagtttactcagaagaaaatggccctatagtaggtgcaagtgtatgtggtccagcagctggtgaaatgatacatgaattaatgtatatggttggctgggaagcgcttccagatgaagcagcagagtttatacatgcacacccaacactgagtgaagcaataggtgaatcattaatgagtttaagtggtaaggggttacattaa

SEQ ID NO: 223062 - DNA, 733 bp, Unknown
  Bacterial polypeptide expressing nucleotide sequence isolated from the Sargasso Sea
aatgtcagaaaaatttgatgtaattgtaattggtggtggtccaggtggctatgtatctgcaataagactatcacaattaggtttaaaaacagcttgcattgagtctagaggatctctaggaggcacatgtttaaatattggctgtattccatctaaaaatttactaaatttttctgagaattttcataaagctaaaaactttgaaaaaattggaattgaagttggtcaagttaagttgaacttagataaaatgatgaaaaataaggaaaaagcagttggtattctaacaaaaggtatagagtttttattcaagaaaaataaagtcacatattttaaaggtacaggcgcatttataagtgcaaatgaaatatcaattttatctgagggtaaagaaactacaattcaatcagataaaacaattattagtacaggttcagagcctacttcaatacccggcatagaatttgatgaagaaaaaataatttcttcaactggtgccttatctctttccaagttaccaaaaaaaatggttattgtaggaggtggttatatcggactagaaatgggatctgtttggtcaagattaggtacccaagtagaagttattgaatttttagatcatataacaccaggcatggatagagaagtttcaagtgaattcgagaaaattttgaagaagcaaggaataaaaatttcaattgaataccaaagtagagaaaataacaaaaagtaa

SEQ ID NO: 223063 - DNA, 607 bp, Unknown
  Bacterial polypeptide expressing nucleotide sequence isolated from the Sargasso Sea
atgacaatattaggtggagtatgtttgaatgtgggctgcatcccctcaaaagcgctgttgcacatggctaaatttattgatgaagcggctgaaatgaaggcccatggaattgatgtcggtactccaaaattggatatagataaaattcgtggttttaaagattctgtcatttccaagctgacgggtggcttgaaaatgatgtccaaacagagaaaggtgcagattgttaagggttatggatcatttgttgatgccaatacattgtctgtagaaagtgatggtgagattactgaagttaaattttccaattgcattatcgcagcaggatcacagcccgtctcgttaccatttatccctaaagatccaagaattatggattcaactggagcacttcagctagagcaaacgcaaggtgaattgttagtaatggggggaggcattattggtttagaaatggcaaccgtgtactctgcattaggtatgaaaatttctattgtggaaatgttgccacaattgattccgggtgcagatgctgatgtggtcaagccataccaaaagcgtattcaaaaaaaatacgacagtattatgctggaaactaaggtggtga

SEQ ID NO: 223064 - DNA, 793 bp, Unknown
  Bacterial polypeptide expressing nucleotide sequence isolated from the Sargasso Sea
ttggctgagataagaatacctgatctaggcgactttgatgaagttgaagtcgttgagttgcatgttgcagagggggatagaatcgaggagggtgatccagtattaaccctagagactgaaaaggctgcaatggatgttccgagtccttttaccggtgttgtagagaagatctccgtaggtccaggtgatagcgtctcacaaggagacttgatctctattgtgtcatccgagtcaaaacccaatgaagaagatgaatctaaaactgaagaaaaagaaacagaacaaccgattcaagagagtgaagatactagtgaatcttcaaaattcaaacatgattatgacttgattgtagtgggtgctggaccaggtggttatgcagcagcatttagagcatctgatttgggtttgaaagttggtttggttgagcgaaattcagatttaggaggtgtttgtctcaatgttggatgtattccatcaaaggcttttctgcatgcggcaaagatcttggatgattcaaaagaggcagaggtcagtggcatcgtttttaaagagccagaaattaatctatccaaaatgaaagaatggaaaaataacatcatcgacggattgaccggaggattatcaggattggcaaaacaaagaggtgttgatgtgattcatggtacagcaaagttttcttccaaaaatgagatagaggtcaaccatgaaagcgattctcgaagtatttcatctgatcagttcattattgctgttgggtcagagcctgctgagctgagtttcttgccagatgacc

SEQ ID NO: 223065 - DNA, 952 bp, Unknown
  Bacterial polypeptide expressing nucleotide sequence isolated from the Sargasso Sea
attgcctggaatagaaattgatgaaaaaacaattgtttcttctacaggtgctttaaaacttgaaaaagttccaaataaattggtagttgttggtggtggttatatcggattagagatgggatcagtgtggtcaagattaggtgcggaagtacaagtaatcgaatttttagatcatattacgccagggatggataaagagatttctttagagtttatgaagattttaaataaacaaggtattaaatttaatatgcagaataaagttcagacaattaaaaaatctaattctggagtgattgtttcgactgttgataatgaaggaaataaaaatcactttgattgtgatgttgttttaatttcagttggtagaaaaccgaatacagaaggtttaaatttagaagctattggagttaaattagatgaaagaaaaagaattaaaactaataaagaattcaaaacaaatttagataatatatttgcaatcggagacgttattgacggacctatgctagcacataaagcagaggatgagggaattgcggttgcagaaaatattgcaggtcaatcaggccatgttaactatgatacaataccgggagttatctacactacaccagaagttgcatctattggaaaaactgaagaacagttaaaagaatcaaataaaaaatataagataggtaaattttcatttatggcaaattcaagagcaaaagcaattgataatgctgaaggatttgtaaagattttagcagatgaaactactgataaagttttaggtgcacatataataggaccacatgctggcgaattgattgctgaaattggtgttgcaatggaatttggtgcaagttcagaagacattgctaggacttgtcatgctcatccaaccttttctgaagcagttaaagaagccgctttatctgtagataaaagagcaatacactcgtaa

SEQ ID NO: 223066 - DNA, 727 bp, Unknown
  Bacterial polypeptide expressing nucleotide sequence isolated from the Sargasso Sea
atggaaaataaatttcaagcggttgttattggtggtggtccaggaggatatgtatgcgctataagactagctcaattaggtataaaaactgcgtgtatagagtccagaggctcattggggggcacttgtcttaatatcggctgtataccatctaaaagtttattaaatttatcagaagaatttcataaagtaaaaaatttatcaaacaaaggaattgatataggtgatgtaaaattaaacttgtcaaaaatgatgaaaaataaagataaagcagtatctattttgacaaaaggagttgagtttctattaaaaaaaaataatgtcacctactttaaaggcaaaggaagctttaaatcaaaaaatgaaatttctattaaagatgataagcaaaaagaaactttgataaaaactgataaagtaataattgcaacaggctcggtgccagtatctttaccaggaattgaatttgatgagaacgtgattgtttcatctacaggtgccttggaactaaaaaaagtgccaaaaaaaatgatagttgtgggaggtggttatatcggactagaaatgggctcagtctggtcaagactaggcgcagaagttcatgttgttgaatttttagaccatataacaccaggtatggatagggagatctctaatgaatttatgaaaattttaagtaaacaaggaattaattttcatatgcagcataaagttgaaaaatcataaa

SEQ ID NO: 223067 - DNA, 1366 bp, Unknown
  Bacterial polypeptide expressing nucleotide sequence isolated from the Sargasso Sea
ttgaaaaaaataacgataattggcggtggccccgcaggatatgcggctgctttatacgctaataatttcgatttagatgtaacactaatagagtctgatgttttaggtggtacttgtttaaacagaggatgtattcctgcaaaatactggttacatgttgctgaactcaatcatgaaattgaaaatgccaatgaatacggaatagaaataaatcaaaaaaatattaattgggcaaatacaacaaataaaagaaacgagatagttaacaagttagtttctgggataggaactttattaaaaagtaaaaaagtaaatgtaattgagggatggggacagatagagtcaaaaaatgttgtaattgttaaaaaagaaaatggagaagaagaaaagattgcttcagattacatcctcttagctacaggttctcaaccaagaagcttacctagtttagagtttgataataatttcataataaattcagatacagcattgaactgggacgagccaccaaaaaaagtttgtatagtcggtgcaggagcaattggatgtgaatttgcaagtttacttattgatcttgattcagaagtaactgttgttgagttagaagatgaaattcttcccggtttagacaagagaacatctgcagaattaagaaaacaattaacaaaaagaggcgtaaattttaaattaaaaacttccatagaaagcaccagtaataatgaaatagttttttcagatggagaaaaagaaaatttcgactctgtcttggttgctatcggccgacaaccttttactcagaatattggcctggataatgttgggatatcaaatgaaaatggatttattaatgtagatcttgaaactatgcaaacttctacagataatatctatgcattaggtgacatagtaaaagactctccacagttagctcatgtagcttttgcagaagcaatctctgcaattacacatattgctactggcgaaaaaagccctgtaaattattcagcaattccatatgttgtatatacaaatccagagctagctgaagtaggtacaaactctgaaaaagcaaaagtaaatgagctcaatgtttcccagtctcagcatagttttgtcggcgtgggaagggctttaatacaaaaccaaaaccaaggaatcgttaaagtttatgcagaggaaaatggccctatcgttggcgcaagtgtatgcggtccaagtgcaggagagttaatacatgagttaatgtatatggttggatgggaagctcttcctagtgaagctgcagaatttattcatgctcacccaacattaagtgaagctataggagaatcactcatgtctctaagcgggaaaggtttgcattaat

SEQ ID NO: 223068 - DNA, 1120 bp, Unknown
  Bacterial polypeptide expressing nucleotide sequence isolated from the Sargasso Sea
attttcacaaggcaaaaaatttttgaaaaaattggtatagaaattggtgaaattaaattgaaccttggaaagatgatgaaaaataaagaaaaggctgtaactgttttaacaaagggaatagaatttttgttcaaaaaaaacaaggtttcttatttcaaaggcaagggatcatttaaaagctcaaatgaaatagtagtttctggggatggaaaagaaacagttattgagactggaaaagcaataattagcactggctcagagcctgtatcaatacctggaatggaatttgatgaggaaaaaataatctcgtctactggagcattatccttggaaaaattaccaaaaaaaatggttgtagttggcggaggatatattggtttggaaatgggttcagtctggtcaagacttggaacagaagtagaagttgttgaatttctagatcatattacacctggaatggaccgtgagatatcaactgaattcatgaagatacttaaaaaacaaggaataaaatttaaactaaataccaaggttgaaaaaattacaaaaaatgaaaaaggagttaccctagaagttattgataaagaaaataagaaaaataatatagaagctgatgttgttcttatttcagttggaagacgaccgtacacaaccggattaaaactagaaaatgtaggagttaaaactgatgaaaaaggaaaggtaaaagtagataaaaattttgaaacaaatattaaaaacatatttgctattggagatgttattgatggtcctatgttagctcacaaagcagaagaggaaggaatagcagttgcagaatttattgctggccaatcaggacatgtcaattacgatattatccctggtgtaatttatacctctccagaagttgcttcagtaggaaaaactgaggaacaattaaatgaaaaaaagattaattttaaagttggaaaatttccttttatggcaaattcaagagcaaaagcaatagatgagcctgaaggttttgtaaaaatacttgctgatgcaacttctgataaagttttaggagtacatattataggcccacacgctggagaaatgattgctgaaatggctatcgcaatggagtttggtgcaa

SEQ ID NO: 223069 - DNA, 985 bp, Unknown
  Bacterial polypeptide expressing nucleotide sequence isolated from the Sargasso Sea
atgactgataaatttgatgttacagtaattggtggtggtcctgcaggatacgtttgtgctattagattagctcaattaggtttaaataccgcatgcatcgaatcaagaggaagtttaggaggaacttgtttaaatattggctgtataccatcaaaaagtttattaaacctatctgagaattttcataaagctaaaaactttgctgatattggtattgagactggtgaggtaaaactaaatttaaaaaaaatgatggaaaataaagataaatcagtattagtattgacaaaaggtgtcgagtttctgtttaaaaaaaataaggttacatacataaaagggactggaacattaaaaagtagagatgaaatcttagtaaaaaataacgaagaagagaaaacaattaaaacagataaaataattattagtacaggttctgctcctttatctcttcctggaatagagtttgatgaaaaacaaatactttcttcaacaggtgcattatctatttctaagctgccgaaaaaaatgattgtagtaggtggtggatatattggtttagaaatgggatcagtttggtcaagattgggaaccgaagtacaagttgtagagtatctcgatcatattacacctggattagataaagaaatatcaagcgagtttatgaaaattttgaaaaaacaaaatattaaatttgacttaaatactaaggttgaaaaaatttctaaaagtagtgaaggagtaattgttgaaatctctaataaaggaaataaaagtaaactagaagctgatgtagttcttatttcagtagggcggaaaccttatacggataatttaaatttagatcaaattggcgttattcttgataaaaaaggtagagttaaagttaataaaaattttgagacaaatattaaaaatatttacgcaataggagacgttatagatggtcctatgcttgcacataaagcagaggaagaaggtattgctg

SEQ ID NO: 223070 - DNA, 1393 bp, Unknown
  Bacterial polypeptide expressing nucleotide sequence isolated from the Sargasso Sea
ttggaacaatttgatatcacagtgattggcagcgggcctgctggttacgtttgcgcaattagggcatcacaacttggatacaaagtttgttgtatcgaaaagggacaaacgcttggcggtacctgcttaaatattggatgtattccctcaaaatctctattgcattcttctcatttatttcatcaagcttcagaacttaatcaattaggcattaattttgataacgtatcgtttgatctaaataaaataatgaaatctaaaaatgaaagtgtcgagtcacttacaaatggtatcgattttctttttaaaaaaaataaagttacaagaaaattgggatttgcgaagttcattaataatgagcaaattgagattttaactggcgatagttctgaggttattaaatcatctaaaacaattattgctacaggttcagaagttgtttcacctgagggagtgatcattgatgaaattgatatcttatcatccactggagctttaagtttatcgtctgttccaaagcacttaatggttattggcgcaggttacattggcctggaaatgggatctgtttggtcaagactagggtcaaaggtaacagttattgaatatgctgaccgaatacttcctggaatggaccaagaaatttctgatgcttttcaaaaaatactcattaaacaaggatttgattttaaactttctactgctctaagaaaggtaaataaaagcaacggctcactttctgtttcggttgaaaacaatggtcaaactcttgatatggattgtgacaaagttttaatatcgactggtcgaaaaccttacacttttggtctgaacttagagaagataggagtaaaaacgaatgataaaggctttattgagactaatcagcattttaatacttcgattgaaaatatttatgcaatcggtgattgtaaagtaggaccaatgcttgcccataaagcttcagaagaaggtactgctgtagctgagattattgacggtcaggctggacacgttaactataatacaattccatcggttatttatactgccccagaagttgcatcagttggaaaaacagaggaagaattaaagaaaaacaacatcacatacaaaataggtaaatttccgttttcagcaaatggtaaagctaaagtgatgaatgaaacaagcgggtttgtgaagatcttatctgataaaaatacagatgaagtattaggtgttcatatcattggagcagacgctggcaaccttattggcgaactcacaattgcaatggaatttggtgcatcagctgaagatattgcaagaacgtgtcacgcacatccaactctaacagaatcaataaaagaagctgcgttaaacgtggatgatcaagctattcatatttagc

SEQ ID NO: 223071 - DNA, 1366 bp, Unknown
  Bacterial polypeptide expressing nucleotide sequence isolated from the Sargasso Sea
ttgaaaaaaataacaattattggcgggggaccagctggatacgcagctgcactatacgctcacaactttaatcttgaagtaacacttatagagtctgatgtcttaggtggaacatgtctaaaccgtggttgtatacctgcaaaatattggctccatgttgcagagttaaaccatgaaatttcaacatcagaaaattatggaataaatgtggatgggaaatcaatagattggaataaaacatcactcaaaagaattgaaatagtagaaaaacttgtatctggcataaaaatgcttttaaaaagtaagaatgtaaatgtcatagaaggatggggctctattgaaagtcagtcttcagttttagtacaaaaatcagatggaaccagcgaaaaaattgattccgattatattattcttgcaactggatctaaaccaagaaatcttccaaatattgaaccagatgaagacttcattatcacatcagatactgcactgaactgggaagagccgccaaaaaaagtttgtatcgttggtgctggtgcgattggttgtgaatttgcaagtctgttaaatgatcttgaatcagaagtgactgttgttgaattagctaaagagatacttcctggtttggataagagaacatcaggtgaactaagaaagcaactaaccaagcgaggagttgagtttaagctaaatacatcaattgatggaatagatgataagactgttaatttttcagatggtgaaaagaaagaattcgatgcagtattaattgccgttggcagagctccattaactgaaaacattggattagataacgtaaatattgcttcagaaaatggttttataaatgtagatttagacacctttgaaacatctgttgctaatatttttgcacttggggatatcgtgaacaatacacctcaattagctcatgcagcttttgccgaagcaatatcggcgattacatacattgcttctggtgaaaaaaagccattagattataaagcaataccatatgttgtttatacaaggccagaattggcagaaattgggcttaatgccgaaaaagctaaattagaaaatattgaaattgaacaatctcagcatagctttgctggtgtaggaagagcaatgattacagagcaaaaccaaggattagtaaaagtttatgcagaaaaagaggggcctatagtaggtgcaagtgtttgtggaccttctgctggagaaatgatacatgaaataatgtatatggttggatgggaggctctaccagaagaggcagcagagtttattcatgctcatccaacattaagcgaggcagtaggagaatcattacttggtttgactgggaaaggattacattagt

SEQ ID NO: 223072 - DNA, 1426 bp, Unknown
  Bacterial polypeptide expressing nucleotide sequence isolated from the Sargasso Sea
atgtcttcaaaaaaacatattgatattcttgtgattggctctggtcctggtggttatgcagctgccttcagagcagcagatcttggaaggaaagttataattgtagacaaagatccaactcttggtggtgtttgtttgaacaggggctgcatcccgtcaaaaaccttattgcatattgctaaggttttagaagaaactgaatcattaaaaaaaatgggggtttcatttgcaaaaccaaaaatagatataaataccgttcgtgattggaaaaataaaattataaaacaactttctggtgggattgctcaaatggcaaaggcgagaaaagtagaaacaattgagggagttgccacatttatttctgataaagaaattcaagtagaaagaaaatcagacaaagagaatatcacctttgaccattgtattatagcagcagggtcatcatcatcgagaattccaggaattccatttgacaataaaaatgttctaacctctaagacagcactagatatagaaaaaatcccaaaaaacctattggtaataggtgggggatatattggtcttgagatgggaactgtttttaatgctcttggcgctgatgtgagcattgcagagtttttaccaaacttactacccggtgcagacccagaccttgtcaaacccttagcaagaaaattaaaaaaacattttaatgaaatacacttatcaacaaaaatagtagatgtaaaaccttcaaaaccaaatggtttgatagttacaatggaaaaagatggtgaaacaaccacaaaaaagtttgagcaggttcttgtttctgtaggaagaaaaccgaacacaaaaaccattggtttagaaaacacaaccataaaaacaaacaccaaggggtttattgaggtagataaacaacaaaaaacgaatgtaaaaaacatttacgcaatcggcgatatcgctggtgaccctatgttggcgcacaaagcaacacatgagggaaaggttgcggctgaggttatctgtggtttgcccgctgcatttgacgctaaggctatacctgctgttatttttacagatccagaaatagcttgggttggaatcacagaatctgaggcaaaagaaaaatcaataccgtacgaaaaaggtgagtttccatgggccgcaagcggaaagtcgcttgctattggtagaaacgaagggaaaacaaaaataatttttgacccaataacaaaaagaacaataggtgtgggtattgttggaccaaatgcaggagacctaatctcagaaggtgcccttgctatagagatgggtgctgatgctgaagatataagccttacagttcatcctcacccgactcttggtgagacctttgctaacgcagcagaggtttttgagggtactgtaaccgatttatatatccccaaaaaacccgggtagc

SEQ ID NO: 223073 - DNA, 564 bp, Unknown
  Bacterial polypeptide expressing nucleotide sequence isolated from the Sargasso Sea
aatggctgaaaaatttgatgtcactgtaattggaggaggacctgcaggatatgtatgtgcaattagattatctcaattaggcttaaaaactgcatgtatagagtctagaggatctttgggaggcacttgccttaatatagggtgtattccctctaaaagtcttttaaatatgtcagaaagttttcataaagcaaagaacttttcaaatattggtattgaaactggagaaattaagctaaatcttgaaaaaatgatgagtaataaagacagctcggttgcaacacttacaaaaggagtggagttcttatttaaaaaaaataaggtcacttatattaaagggtttggatcttttaacgaaaaaaacgaaattttagtcaaaaatgataaatcagaaataaaaattaaaactgataaaaccataataagtactggatcagagcctttatctcttccaggaatagattttgatgaaaaaataattctttcatcaacaggagctcttaacatttcaaaacttccaaaaaaaatggttgttgttggaggtgggtatattggattagagat

SEQ ID NO: 223074 - DNA, 847 bp, Unknown
  Bacterial polypeptide expressing nucleotide sequence isolated from the Sargasso Sea
atgttcgacataattgtaattggaagcgggccagcaggttatgttgctgcaataagagcctctcaattaggtttaaaaaccgcgtgcattgaaaaatcctctagtaatggtaagccacaattaggaggtacatgtcttaacataggttgtattccatctaaagcattattggactcatcccaccgatatgcagatgcgctaaaccatttatctgatcatggaatcaaggtaaccaaacccaagatagatatttctcaaatgatggacagaaaaaataaaattgtttctcaacttacgtcgggagtcgctgggcttctcaaagcaaataaagtatctcaaattacaggtagtgcaaaaataattgattcaaataatgttgaagttactaatgaagaaaagactgaattgctaaaaaccaaaaatattattatagctacaggatctatgccaatagatattcctgttgcaaaggtagacaataaaaatattgtggacagtactggagccctcgaatttaaatcagtgcctaagacattgggcataattggggcgggcattattggattagagcttggaagcgtttggtctagacttggatcaaaggtaacgattttagaggctatggatgattttttacctatggcagattcaaaagtctctgatgacgttttcaaagaatttaataagcaaggattaaatattaatttgggctgcaaagtaactgccgcaaattcaaatgaaaaaaaagtaactgtaaattttgaaaaaaatggaaatcagtctgaattaacttttgaaaaattaattgttgctgtcggtcgtaaaccttatacaaataatctatttg

SEQ ID NO: 223075 - DNA, 250 bp, Unknown
  Bacterial polypeptide expressing nucleotide sequence isolated from the Sargasso Sea
aatgtcagaaaaatttcaagcaactataattggaggcggcccaggaggatatgtttgtgcaataagacttgcccagttaggcataaaaactgcatgcattgaatccagaggaactttaggaggaacttgtttaaatattggatgtataccatcaaaaagtttgttaaatctttctgaaaattttcataaagcaaaaaatttctcaaaaatcggaattgaagtaggtgaagttaaactgaatcttgaaaaa

SEQ ID NO: 223076 - DNA, 109 bp, Unknown
  Bacterial polypeptide expressing nucleotide sequence isolated from the Sargasso Sea
atggcagactatgatcttatagttataggcgctggaccaggtggatacgttgctgctattcgcgcagcacaattaggcatgaatgttgcatgtgtggaaaaagaagaaa

SEQ ID NO: 223077 - DNA, 1567 bp, Unknown
  Bacterial polypeptide expressing nucleotide sequence isolated from the Sargasso Sea
attgagtaagaataaaaaaattttagtcccagatctaggtgattttgataatgttgaagttacagaagtgcttgtaaatgctggacaaaaaattgaaaaaaatgaaaatattatcactgttgaatcagataaagcttcaatcgatatcccctctgatatctcaggaacgattgtttcaataaatgtgaataagggggacatcctaaaaaaagatgatcaaattcttttaattaaggaaacgacaaagaataggcaagaaaaagaaaacctaaaaaattcaaaaaataaatcctcagtgatgcatgattctgagttacttgttttgggtgcaggaccaggtggttatacggcagcttttagggcagccgatcttggtatgaatgtaactttagtggaacgctcaccgaccctcggaggggtttgtttgaatgaaggatgcattccatctaaagcactgctgcatgcagcaaatgttattgagcaaaccagcgccatgaaagatcatggaataaaattttctaatccgaagatagagatgaagaaattaatgacttggaagcaaggcattatcagtaaattaaattctggtctcgttgatttatcaaaaaagagaaacgttaaaataataaagggaaatgcacaatttcaaagtgataatagtgtagtcattgacaacaaaaaggttattaagttcgaaaagtgcatcattgctgtaggttctgagagtgcgaccattccaggtttaccagatgatgatagagttcttgattcatccaaagctctggaactagaaaaagtgccgtcaaaaatgctaattgtaggtggcggaataattgggttggaaatggcatgtgtttaccatgctcttggatcagaaataacagttgtcgagcttacagattctcttatgccgggaaccgatggtgatttagttaaaatttacactaaatttattcgtgatcgttataaggacgtctatttgaaaacaaaagttggcaagatacaacctgttaagaacggattaaaggttttctttgaaggtaacgactgccctaaaacagcaacttatgacaatatccttgtgtcggtgggcagaaaatcaaatggcaatcagataaatattgaaaaaactggtgttgcgtgtgatcaacgtggaatcataaaagtagataaacaaatgaggacaaatatagataacatttttgccattggagatttaaccggtgatccgatgttggcccataaagcaactcatcaagcaaaggttgctgccgaagtcgcgagcggtaaaaaaagttccttcgatgccagagtgattccatcagtcgcctataccgatcctgaaattgcctgggttggagtcacagaaaatcaagcaaaatcagatggtatagattatgaaaaatcaagattcccatgggcggcgagtggccgatcactcgctattgggcgggacgaagggtttacaaaacttctatttgaaaaggaaacagatagagtaattggaggaggtattatcgggccatatgctggagatctcatatctgaagttgctttagcaatgaaa

SEQ ID NO: 223078 - DNA, 1018 bp, Unknown
  Bacterial polypeptide expressing nucleotide sequence isolated from the Sargasso Sea
gatgggcaataaggagattgaaacaaaaaatattgttattgcaactggttcaattccaacatcaataccaggcgttgaaatcagtggcgataagattatatcttcaactgaagcactttcacttaatgaggtacctaacaaacttattgtagttggtggcgggtacataggcttagaacttggttcagtctggtcaaggttaggatccgaagtaacagttgtagaatacttaaatagaattacacctggaatggataacgaggtttcttcagctcttcaaaaaatattatcaaaacaaggattaaatttttcattaaattctcaagtaatatctgtttctgaagaaggttcaaatgcctctgttgtgatgaaaaatagagaaagtaatgaggaagaaactattgaagccgattatgttttaatttctaccggtagaaaaccttatttagaaaatttatttaatgatggaatagatgttcaaaaaactgatgctggtttcttaaaaaccgactctcatttaagaacaaatattgatggaatttgggcaataggggatgtcgttgaaggaccaatgctagctcataaggctgaggaagagggtattgctgtagcagagcttattgctggtaagccaggccatgtcaattatgatataataccaagtgtcatttatacaaatccagaagtagcctcagttggaatgacagaggaacagctcaaagaaaaatcaattgattattctgttgggaaatttcctttcctggctaatggaagggcaaaggttaataatactactgacggttttgttaaaattttatcatcaactgatacagatcaaatattaggagttcatataattggtgatcaagcaggtaatatgataggagaagctgcagtagccatggaatttgaagctacgtcagaggatcttgctagaatttgtcatgctcatcccacactttcagaagctataaaggaagcagctttatctgttgatggcagagcattacatatgtaa

SEQ ID NO: 223079 - DNA, 317 bp, Unknown
  Bacterial polypeptide expressing nucleotide sequence isolated from the Sargasso Sea
aatggcagaaaaatttcaagcaactataattggaggtggtcccggaggctatgtttgtgcaataagattggctcagctaggtattaaaactgcatgcattgaatccagaggaactttagggggaacttgtttaaatattggatgcataccttcaaaaaacttactaaatttctctgaaaattttcacaaagcaaaaaatttctcaaaaattggaattgaagtaggcgaagttaagctaaatcttcaaaaaatgatgcaaaataaggataaagcggtaatgaatttgacgaaaggaagtagaatttttattaaaaaaa

SEQ ID NO: 223080 - DNA, 1360 bp, Unknown
  Bacterial polypeptide expressing nucleotide sequence isolated from the Sargasso Sea
gctgcgtttcgggctgctgatctcgggaaaaaagttatattaattgaccgcgaccctacgcttggtggtgtatgtctaaatcgaggttgcataccatcaaaagcgcttttacatattgccaaggtgatggatgaaacaaataacctttctaaaatgggagtatcatacaataaacctgatattgatttagagaaaataagattacataaaaataaaattgtatcacaacttaatcaaggtattgacaagatggctaaagctcgaggtgttgaaacgatacaaggcttagctagctttaaaaataatagtgaactagaggtaagaactaaatcatcgaatatcactataaaatatgaaaaatgtattattgccacgggttcaacttcaggaatgattccaggtatttctataaagcatgattcaattttaacttctagaactgctcttgaattagttgatataccaaacaaattacttgttatagggggtggagctattggcttagaacttggccaagtgtatgcttctttaggttcaaaagttactattgttgaattcatgcctaatataattccaggcgctgatgaagatattgttaagcctctttatagaaaactaaccaaacaattcgaatcaattttattatcatcaaaggttacaaatctagaagtacaaaagaatcattcaataaatgtatcaattgaaaatggtaaaggggtaactaatgataattatgataaagtattagttgcaataggtagaaaaccaaatacagaattattaaatctcaataatacagatattaaattgaatagtgaaggctacattgatgtagatgtttatcaaagaacatccgtaaaaaatatttttgcaattggcgatattgtaggaaacccaatgcttgcccataaggccacgcatgaaggaaaagttgcagcagaagtttgctcaggacacccggctgcaatggattataaagctattccatctgtagtatacacggaccctgaagttgcatgggcagggcttaatgaagtagaagcaaagttaaataaagtaaattatacaaaaggtgagttcccatgggcagcaagtgggagagcaatttctatgggagcaaatcaaggtaaaacaaaaattctttttgatcctgaaactaaaagagtgcttggtgtgggtattgttggaccaggtgcaggggatatgatttccgagggcatgctatctattgagatgggtgccgatgctgaagatatatcattaactattcatcctcaccctacagttggtgaaacttttgcaatggcagccgaagtatttcttggaactattacggatctttatgccccgaaaaaataat

SEQ ID NO: 223081 - DNA, 778 bp, Unknown
  Bacterial polypeptide expressing nucleotide sequence isolated from the Sargasso Sea
tatggctgatccagatatatcaaaggaatcatataaagaatttaaaaatcaaggtctagatatcaaattaagctcaaaagtcatagatacaaaagaactcaaaaactctgtgaaagtaacttatgaacaaaaaggcaagaagcatgaaatggagtttgaaaagttgattgtagctgttggaaggattccaaattctgaagaaattttgtctgaagatataaatatcaaaattgataaaggatttattgaggtaaatgaattttgccaaaccagcattcagaatatttgggctataggagatctagtaagaggaccgatgttggcacacaaaggaagtgaagaaggaattatggttgctgaaaaaattgcaaataatcatgtgcaagttaactatgatctagttccatctgtaatatatacccatcctgagattgcctgggttggtatgaatgaaaatgaattaaaatcaaaagacattaaatttaaaataggtaagtttccttttgctgcaagtggaagagcgttagcagttgaccagtctgagggttttgtaaaagttctaacagatattaaaactgatacaattctcggcgttcatgtctttggcccagctgctgcagaaatagttcaacaggcattaatttcaatggaatttggttcaagtgctgaagatattggccttacaatgtttagtcatccaacagtatccgaagcatttcatgaagccgctttagcatcaaacaatcaagctattcatattggaaataaaagaaaatga

SEQ ID NO: 223082 - DNA, 1420 bp, Unknown
  Bacterial polypeptide expressing nucleotide sequence isolated from the Sargasso Sea
tatgagcaaaaataaacatacagaaattcttgtaataggcgcggggccaggtggatatgcagcagcttttcgagcggctgaccttgggaaaaaagtaactttagtggatcgtgatgaagttatgggtggtgtttgtttaaatagaggatgtataccctcaaaagccttattgcacattacaaaagtaatggatgaagcggcttcgctatctaaagcaggtgtaacatttggaaagcctaaaatagatatagatactattcgtcaacataaagataaaattgtatcgcaactgaataatggaattgcaggtatggctaaagcaaggaaggtagattttttgcaaggcaaggcaatgtttagatctaattcagaagtagaagtagtaaatggaaagaaaaaagaagtgttatcatttgaccagtgcattattgctgctggctcatcctctgctatgctgcctaatattcctaaaagtaaaaatattcttacctctaaaactgcacttgaattggagaatatcccaaaaaccatgcttgttgttggaggcggggtaattggagttgagcttggtcaggtgtatgcgacccttggcaccaaagtatcattggttgaatttttgcccaatataattcccggagctgatcaagacattgttaaaccccttgagcgcaaactcaacaaacaatttgattcaataatgcttaactcaaaggttgttaatattaaagaatccaaaaagaatgttcttagtgttacgatagaaaaagaaaaaacctccaccattatagaatatgaaaaaattctaatagctattggcagaaaaccaaatacaaaccttcttaacctaaaagcaactagcgttacaattaatgatcagggatttataaatgttgataactatcaacgtactagcgtcaaaacaatttttgccataggcgatatatcagataatccaatgttagcacacaaagcaactcatcaaggaaaagttgcagctgaagttgcttgtggtgaaccctcaatttttgatccaaaagcaataccaagcgtggtttatacagatcccgaagtggcatggtgtggattgactgaaatacaagctaaaactgatgatataccttattcaaaagctgaatttccgtgggctgcaagcggaagagctatagcaatgggggcaaaccaagggaagacaaaaatattgtttgatcctgattctaaacgcgtgctaggcgttggaattgtaggaccatcagctggtgatattatttctgagggaatgttagctattgaaatgggatcagatgctgaagatatttcactaaccattcaccctcatccaaccattggtgaaaccattggtttggcttctgaagtttttgatggtaccataaccgatttatatatacctaaaaagaaataa

SEQ ID NO: 223083 - DNA, 976 bp, Unknown
  Bacterial polypeptide expressing nucleotide sequence isolated from the Sargasso Sea
gcaactggatctgaggcgatgcctatgcctaacattgaattcgacgaaaaaacaatcgtctcttcaactggcgccttatctttaaaagaagttccgaaaaacctagttgttgttggcggaggttatattggtttagaaatgggctctgtctggtctcgtctaggagctgaagtcaatgtaattgaatttttagaccacatcactcctgggatggatagagagatttcagaagagttcatgaaaatattgaagaaacaaaatattaagtttcacctaaacagaaaagtaactagcatcaaaaaaactaacagtggggtacaaatttcaacttcagataagagtggagataataaagattttaattgtgacgtagttttaatatcaattggaagaaaaccatttacttccaatttgaatttgatttctgcaggagtaaaatcagatgaaaaaggaaggattaaaatcaacaaaaaatttcaaactacaacaaaaaatatttacgctattggagatgtgattgatgggccaatgttagcccacaaagcagaggaggaagggattgcagttgcagaaatagttgcaggtcagtctggtcacgtaaactacgatttaattccaggggtaatatacacctctcctgaggtggcaagtataggtttaacggaagagcaactaaaagaaaaaaataagtcttataaaattggaaagtttccttttatggctaactcaagagctaaagcgattgatgaacctgaaggattcgtaaaaattttagctgataaagacactgataaagttttaggcgtacacatgatagggccacatgtaggagaaatgattgcagaaatggcagttgcaatggagtttggagcgagctctgaagatatcgcacgaacgtgtcatgctcatccaacattttctgaggcaattaaagaggcagccttatctgttgaaaaaagacaaatacactcttaga

SEQ ID NO: 223084 - DNA, 594 bp, Unknown
  Bacterial polypeptide expressing nucleotide sequence isolated from the Sargasso Sea
ggagaagaccattcacagataatctattagatgagagttgtggaataactcttgatgaaaaaggtttcgttcctgttgatgaacattgccaaacagatcttgagaatgtttatgctgttggagatcttgtaagaggcccgatgcttgcacataaagcaatggaagaaggagtgatggttgccgagagaattgctggtaagaaaatggaagtaaattatgatttggttccaagtgttatatacactcatccagaaatagcatgggttggaaagacagaaaaacaattaaaaaatgagggagttgattttaaaaaaggaaattttccatttgcagcaagtggtagagctttagctgctggcgatgcggttgggtcagtaaaagttttagcagataaagaaacagatcaagttctgggagtacaaatattcggaaactcagcatcagaaatattgcaacaaggtcttattggcatggagttctctgctagttcagaagatttcggtcttactatgttcagtcaccctactgtttcggaagctctgcatgaagctgccttagctgttaataaacaagcaattcatatagggaactgat

SEQ ID NO: 223085 - DNA, 429 bp, Unknown
  Bacterial polypeptide expressing nucleotide sequence isolated from the Sargasso Sea
ccgcggaagtgatttgcgggatgaaaagtcattttgacgctcggggcattccctctgttgcttataccgatcctgaagtcgcatgggccgggatcaccgaagaggaagccaaaagccagggaattaactatggtaaagggattttcccctgggctgccagtggacggagcctcgcactgggacgagacgagggaatgacgaaaataatgtttgaagagggcaccaaaaaggtgattggtataggtatcgtggggccgaatgccggggaacttattgcagaaggaatgttagccattgaaatgggggcagacgccaccgatatcggatctaccattcatcctcatcccacactttctgaaaccctcggattggccgtcgaggcttacgaaggaaccatcaccgatctctacctgccaaagcggaaataat

SEQ ID NO: 223086 - DNA, 532 bp, Unknown
  Bacterial polypeptide expressing nucleotide sequence isolated from the Sargasso Sea
atgtctgaaaaatttcaagttgcaatcataggaggtggtcctgcaggatatgtgtgtgctattaggctatcacagctaggttttaaaactgcatgtattgaggcaaaagaaactttaggtggtacctgtcttaatgttggctgtattccctctaaaagtttacttaatttatcagagaacttttataaggctcgaaacttctctaaactgggtattgaaataggtgatttaaaactaaatttagaaaagatgatgaaaaataaagatagagcagtaacggttttaactaaaggtattgagtttttgtttaagaaaaataaaattgcccattttaaagggctaggagttttaaagtctaaaaatgaagttttaataattgatgaaaataagaatgaaaagactattgtagcagagaagataattataagctctggatctgaacctatttcttttccagggactaagtttgatgagcaaaaatattgtatcttcaacccggagcactatccactgaaatctgttcctaaaaaat

SEQ ID NO: 223087 - DNA, 868 bp, Unknown
  Bacterial polypeptide expressing nucleotide sequence isolated from the Sargasso Sea
aatgactattattggctcaggtgcaattggttgtgagttcgcatattatttcaatgaatttggaacacaggtccatttattagaaatgatggattacatcctacctaatgaggattcagaggtctcggatgaagttgaaaaaagttttaaaagagctggaattaaaatttctaagggtgtgaaggtttcaaaaattgaaagtttaaaaaccaaggtaaaaattcatacagataaaactgaaagtaatctaatagaaagtgatgtggcacttttagctatcggtgttacgggtaatctggaaaatattggactagaatctcttggtattaaaacggagaaaggcgctatttgtgtagatgaatttaatcaaacaaatatatcaaatatttatgctataggagatgtgtcagggcccccatggttggcacatgtagcatctgctcaaggtcatattgttgcagagcatatgaatggattagcaccagagcctgttgattattctaatgtccccggctgtacttattgtcagccacaagttggttctttggggctaacagaggctgaagcaatcaaagaggggttcaatgtaaaggtcggaaaatttttatttcaagcgagtggaaaagcaatggcagttggtgatactacaggatttgtaaaattagttttcgatgaaaaatacggtgaattactaggagcccatatagttggctcagaagcaactgaattgattgctgagttgggagtcgctaaggcactagaaacgacctgggaagagatcgcaatgaccatacatgcgcatccaactctctcagaatcaataatggaagctgcgatggatgcttttggatcggccatccatcaatga

SEQ ID NO: 223088 - DNA, 298 bp, Unknown
  Bacterial polypeptide expressing nucleotide sequence isolated from the Sargasso Sea
atgtctgaaaaatttgatgcaattgttataggcggtggtccaggtgggtatgtttgtgcaataagacttgcccaattaggaaaaaaaactgcatgcgtagagtacagaggtactttaggcggaacttgtttaaacattggatgtatcccgtcaaaaaatttattaaacctttccgaaaattttcaaaaagcaaaaaacttttcaaaagtaggaattgagataagtgatatcaaattaaatcttgataaaatgatgaaaaataaagataaggcagtaaccgtattaactaagggtgtag

SEQ ID NO: 223089 - DNA, 175 bp, Unknown
  Bacterial polypeptide expressing nucleotide sequence isolated from the Sargasso Sea
tatggaagattttgatttaattattattggtgcaggtccaggtggttatgtcgctgcaattagagcggcacaacttggaatgaaagttgcttgcattgaaaaagaaacttcacttaggaggtacgtgtttaaatataggatgtattccatcaaaagctttattaaactcttctga

SEQ ID NO: 223090 - DNA, 109 bp, Unknown
  Bacterial polypeptide expressing nucleotide sequence isolated from the Sargasso Sea
tatgaaaacaaacacatatgacataattattattggaggaggtcctggaggttatgtggccgcaattagagctgcacaattgggatttaaagttgcttgtatgaaaaaa

SEQ ID NO: 223091 - DNA, 1116 bp, Unknown
  Bacterial polypeptide expressing nucleotide sequence isolated from the Sargasso Sea
aatgtctgaaaaatttgatgttgtcgttattggtggtggtccagcaggatatgtctgtgctataagatcttctcaacttggcttaaaaactgcttgtattgaatcaagaggatcattaggtggtacatgcctaaatattggatgcataccatctaaaagtttattaaatttatctgaagcattccatgaagcccaaagtttctctaaaattggtattgaaacaggagatattaaattgaatttaggtaaaatgatgcaaaataaagacaaagcagtaacaattctaactaaaggcgtagagtttttatttaaaaaaaataaagttacttatcttaaaggcaaaggaagtcttttggataaaaataaaatattagtagaagacaaaaataataaacagacaattgaaagtaagaatattgtcttaagcaccggatctgaagcagcttcactacctgggttgagttttgatgaggaaaaaattttgtcatctacaggtgctttgaatatgagcaaagtcccacgaaaaatgtttataattggtggtggttatattgggctagaaatgggatctgtatggtccagattgggttcagaagttcatgtaattgaaactcttgaccatattactccaggattagataaagaaatatcaagtgaatttttaaaaattttaaagaaacaaggtttaaaatttcatttaagtacaaaagtcgaaaaagtttacaaaatagaaaaaggaataaatatagaggtaatagatgtaaatcaaaaaaaagtgttgcacgagtgtgatgtagtgctagtttcagttggtagaaaaccttacaccaaaaatttaaatttagaaaaaattggtattaatacagatagtaaaggaagaataaaagtaaacaaaaattttcaaacaaatgtaaataacatttatgctatcggagacgtaattgagggaccgatgttagcacataaagctgaagaagaaggtatagcagtagcagaactaatatctggccaagcagggcacgtgaattatgatttaataccaggggttatctacactacgccggaggtggcttatgtgggaaagtctgaggaggaactaaaaaaaataaatcaagg

SEQ ID NO: 223092 - DNA, 1215 bp, Unknown
  Bacterial polypeptide expressing nucleotide sequence isolated from the Sargasso Sea
aagtaaaaggtttagcaaagaaaggcatagaaattggaaatgttaaattgaatcttgataaaatgatgaagaacaaagataaagctgttactgtacttacaaaaggtgttgagtttctgttgaaaaaaaacaaagttacttattttaaaggtaaaggaagctttaagtctaaaaatgaaattttaattaaagacaatcaaaataaagaattattaataaaaacagaaaaaacagtaatagcgacaggatcaacagctgtatctttacctggaatagaaatagatgaaaaaataatagtatcttccacaggagctttaaagtttgataaagttccaaagaaaatggttgtagttggaggaggatatattggtttagaaatggggtcagtgtggtcgagattaggttctgaggtacatgttattgagtttttagatcatattacgcctggcatggataaagaaatttcatcagaatttatgaaaattttaaaaaaacagggaataaaattcaatatgcaaaataaagttgaaaaaattaaaaaaaataattcaggagcagttgttttaactgttgataaagatggaaacaaacataatttggaatgtgatgttgtattaatttctgtaggcagaaaaccaaatacagaaggtttaaacttggatgctttaggagttgatctagatgaaagaaaaagaataaaaacagataaaaattttaaaactaatgtagaaaatatttatgcaattggagatgtaatagatggtccaatgttagcacacaaagcagaagatgaaggtatggctgttgcagaaaatattgttggtcaatctggtcatgtcaattatgagacaataccaggtgtgatatatacaacacctgaagttgcttcaatagggaaaactgaagaacaattaaaagaattaaaaaaaaaatataaagtaggtaagttttcatttatggctaattcgagagcaaaagcgatagatgatgttgaaggatttgtaaaaattttagcggacgaaaaaacagacaaggtcctaggagcccatataattggacctcatgcaggagaattgattgcagaaattggtgttgctatggaatttggagctagtgccgaagatattgcacgtacttgccatgctcacccaacattctcagaagctgtaaaagaggcagctttatcagtagataaaagagctatacattcttaag

SEQ ID NO: 223093 - DNA, 205 bp, Unknown
  Bacterial polypeptide expressing nucleotide sequence isolated from the Sargasso Sea
atgaagaaaagctatgatataattgttctaggtagtggacctggtggatatgttgctgcaataagagcaagtcaattaggtttaaagactgcaattattgaaaaagaaagcctaggtggagtttgtttgaactggggatgtattccaactaaagcattattaaagtctgctcaagtttttgaatatctcaaaaaatgcagatcaa

SEQ ID NO: 223094 - DNA, 913 bp, Unknown
  Bacterial polypeptide expressing nucleotide sequence isolated from the Sargasso Sea
ttcacaggtgctctttctctatctaaaataccaaaatcactcctagttattggtggtggatatattggattagagatggggtcagtatggagtagatttggatcaaaggtaacagttgttgaagctcttgacagaattgttccaaccatggatggtgaaattgcaaaagagtttatgaaaatgttaactaaacaaggtttagaatttaaattatctcataaagtgagttctgcaaaatctgctaagtctggtgtagatgttgaaatggaaacatcagataaaaagaaaataaaagaaaactacgaaatagttttaatgtcagtaggaagaaagccaaacacagagggactgggtcttgaaaaaattggtattaaattaaccgaaaaaaaatccattgaaattaaagacaactttcaaacttctgttgagggaatctacgccattggtgatgtagcacctggaccaatgctagcacacaaagctgaagaagaaggggttgcttgtgttgaatttataaacggtcaaaaacctcatataaactatgacgctataccagcgattgtttataccaatccagagattgcatctgtaggtaaaacagaagaacaactcaagcaagaaaagaaagacttcaaggttggaaaatttccttttatggcaaatggtcgtgccttaaccacctctgcatcagagggatttgtcaaaattttggtagataaaaaaacagatgaaattttaggcgctcatataatcggtcatgatgctggacaactaattgcagaaattgttaccacaatcgaatttggtggaagtgcagaagatattgctagagtatgtcatgctcatccaacaactagtgaagctgtaaaagaagcagctttaagtgttgatggtagagcaattcatatttaag

SEQ ID NO: 223095 - DNA, 220 bp, Unknown
  Bacterial polypeptide expressing nucleotide sequence isolated from the Sargasso Sea
atgaaagaaaaatttcaagcaactgtaatcggaggaggacctggaggttatgtttgtgccataaggcttgctcaacttggtattaaaactgcatgcatcgaatctagaggtacattaggtggaacttgtttgaatattggatgtatcccatcaaaaaatttattaaacctttctgaaaatttttataaagctaaaaatttctcaaaaattgggaattgag

SEQ ID NO: 223096 - DNA, 256 bp, Unknown
  Bacterial polypeptide expressing nucleotide sequence isolated from the Sargasso Sea
atgtcagaaaaatttcaagctgtagttattggaggtggaccgggtggttatgtatgcgcaatcagacttgcccaattaggattaaaaactgcatgtgtagagtccagaggatctttgggaggtacttgtttaaatatcggttgtattccatcaaaaagcttacttaatctgtctgaagaatttcacaaagtaaaaagtttagcaaataaaggtattgaagttggtgaagtaaaattaaatttagaaaaaatgatga

SEQ ID NO: 223097 - DNA, 1153 bp, Unknown
  Bacterial polypeptide expressing nucleotide sequence isolated from the Sargasso Sea
accttccaggctcttttgcacattgttaaaatagtaaacgaaacaaaacatctttccagtttaggggtgtcttttggcgatctcaaatttgatattgaaaaaatcaggaatcataaaaacaaaataatctctcagctcaatggtggaatttctcaacttgctaaagctagaaacgtggaggttctatgcggtgaagcttcttttttgtcaaacgatgagcttttggttaaaacaaaaacggaaaagaaacagattggatttaaacattgtataatagcagcgggttctcgttcaacaatgttaccgaacattcctcaaaaccacccttcaatattaacatcaagaacagccttggagcttgaatcgattccaaagtctctccttgttatcggaggtggaattataggtcttgaattgggtcaagtgtatagtactttaggatccagcgtttcagttgttgagtttatgccgaacctggttcctggggctgatgatgatgtcgcaaaacccttagtgcgaaaactaagaaaacaatttgaatcgacaatgctttcttcaaaagtaaccaatgttgaaatcctcgaaaattccggtgttaaagtttctattgaaaacaatggcgaagtaagtgaaagtacctatgaaaaggtcttggttgccgtgggtagaaaaccaaatacagatcttttaggtattgaaaacacagaaataaaaacagatgaaaaaggtttcattgcagttgatgtttatcaaaaaacttctgtagaaaacatttatgcaattggtgacatctctggaaatccaatgcttgcacacaaagccacccatgaaggtaaggttgctgccgaagtttgctctgggttgccatctgctatggatgctaagtctatccccagtgtgatttatacagatccagaagtcgcctgggttgggttaacagagaaagaagcaaaagaaaaagatattccatacgaacttggtgagttcccttggtctgctagtggaaaagcgatgattttaaacgccgtccagggaaaaacaaaagtcttgtttgatcctgcaaacaaaagagttcttgggggagccgttgttggcccttctgccggggacattgtttctgaaatcgtattggcattagaaatgggttctgatg

SEQ ID NO: 223098 - DNA, 733 bp, Unknown
  Bacterial polypeptide expressing nucleotide sequence isolated from the Sargasso Sea
aatgactaatgataaaatttatgatgttataataattggaagcggtcctggaggttatgtagctgcaattagagcctctcaattaggtttaaatactgcagttatagaaaaggataaactaggaggtatttgcttaaattggggttgtattcctacaaaagctcttttgagagcatcagaaattaatcatattatatctgaaacttctggttttggtataaatgtcaaaaattttaggattgattggaaaacaattgtaagtagatctcgtaatgtatccgaacaattgtcaaaaggagtggattatttattaaagaaaaataaggttgatataattaaaggcgaaggaagaatatctggaaaaggaagagttatagtaaagaattctgataaagaaacattatatacaacttctaatataattcttgcaacgggggctagcccaaaaaaaattaagggtttagaaagtgataataaatatatatggagttataaagaagctatggttcctgaaaaaagaccagattctatcttgatagtaggcgcaggagctattggtattgaatttgctagtttttataatgatttcggtacagaagtaacagttgttgaagcacaagaatacatactcccttcagaagataaagacatttcaatgtttgcaaaaaaatgttttgaagattgtaagattaaaatttttaataattcaaaaaataaattatgtaaaatctaa

SEQ ID NO: 223099 - DNA, 1265 bp, Unknown
  Bacterial polypeptide expressing nucleotide sequence isolated from the Sargasso Sea
tggatgtattccctcaaaaagcttattaaatttatctgaaaattttaaaaaagctaaaaacttctctaaacttggaattgagacaggagatgtaaaactcaatttagataagatgatgaaaaataaggataaagcagtttcaatcttgaccaagggtgttgaatttcttttcaaaaaaaacaaggtaacttacttaaaaggttttggtagttttatttctgagaagaaaatattagtaaaagacgaagatggtaaaaaaagagaaattgaggcaaaaaacattattattgcaactggatctgaggcaatgcctatgcccaacgtagaatttgacgaaaaaacaatcgtctcttcgacaggcgccctatctttaaaagaagttccaaaaagtctagttgtcgttggtggtggttacataggtttagaaatgggctctgtctggtctagactaggggctgaagtcaatgtaattgaatttttagatcacatcactcctgggatggatagagaaatttctgaagagtttatgaaaatattgaaaaaacaaaatataaaatttcacttaaataggaaagtaactagcattaaaaaaactaaaaatggggtacatatttcaacgtcagataagaatggagatagtaaagattttaattgtgacgtagctctaatatcaattggaagaaaaccgtttacatccaatttaaatttgagttctgcaggagtaaaatctgatgaaaaaggaaggattaaaattgacaaaaaatttcaaacttcagcaaaaaatatttacgccattggagatgtaattgacgggccaatgttagcccacaaagcagaggaggaagggattgcagttgcagaaataattgcaggtcaatctggtcatgtaaactacgatttaattcctggggtaatatacacaactcctgaggtagcaagtataggtttgacagaagaacaactaaaagaaaaaaacaagtcttataaaattggaaagtttccttttatggctaactcaagagctaaagcgattgatgagcctgaaggtttcgtcaaaattttagcagataaagacactgataaagttttaggagtacatatgatagggcctcacgtaggagaaatgattgcagaaatggcagttgcaatggagtttggagcgagctctgaggatatcgcacgaacgtgtcatgctcatccaacattttctgaggcaataaaagaggcagctttatccgttgaaaaaagacaaatacactcttaaa

SEQ ID NO: 223100 - DNA, 115 bp, Unknown
  Bacterial polypeptide expressing nucleotide sequence isolated from the Sargasso Sea
ttggttgttattggttcgggaccaggcggttatgtatgtgcgattcgtgcatctcaattaggaattaaaacagctttattgaaaaatatacatctcttggaggaacatgcctaaa

SEQ ID NO: 223101 - DNA, 466 bp, Unknown
  Bacterial polypeptide expressing nucleotide sequence isolated from the Sargasso Sea
gacgttatagatggaccaatgcttgctcataaagcagaagaagaaggaattgcagttgcagagttaattagtggaaaagctggacatgttaattatgatattatacctggagtgatatatacatcacccgaagtagcttcagttggaaaaactgaggagcaattaaaaaaaaataatgttaattataaagtaggcaaatttccgtttacagcaaactcaagagccaaggccatagatgaaccattaggttttgtaaaaatgttagcagattctaaaactgatagagttttaggtgttcatattataggacctcatgcaggtgaattaattgctgaaatgacattagctatggaatttggcgcaagttcagaggatatagccagaacatgccacgcacatccgacgttttctgaagctataaaagaatctgcattatcagtagaaaaaagacaaattcactcttaat

SEQ ID NO: 223102 - DNA, 982 bp, Unknown
  Bacterial polypeptide expressing nucleotide sequence isolated from the Sargasso Sea
tttggaacaatttgatatcacagtgattggtagcgggcctgctggttacgtttgcgcaattagggcatcacaacttggatacaaagtttgttgtatcgaaaagggacaaactcttggcggtacctgcttaaatattggatgtattccctcaaaatctctattgcattcttctcatttatttcatcaagcttcagaacttaatcaattaggcattaattttgataacgtatcgtttgatctaaataaaataatgaaatctaaaaatgaaagcgtcgagtcacttacaagtggcatcgattttctttttaaaaaaaataaagttacaagaaaattgggatttgcgaagttcattgacaatgagcaaattgagattttaactggcgatagttctgaggttattaaatcatctaaaacaattattgctacaggttcagaagttgtttcacctgagggagtgatcattgatgaaattgatatcttatcatccactggagctttaagtttatcgtctgttccaaagcacttaatggttattggtgcaggttacattggcttggaaatgggatctgtttggtcaagactaggatcaaaggtaacggttattgaatatgctgaccgaatacttcctggaatggaccaagaaatttctgatgcttttcaaaaaatactcattaaacaaggatttgattttaagctttccactgctctaagaaaggtaaataaaagcaacggctcgctttctgtttcggttgaaaacaacggtcaaactcttgatatggattgtgacaaagttttaatatcgactggtcgaaaaccttacacttttggtctgaacttagagaagataggagtaaaaacgaatgataaaggctttattgagactaatcagcattttaatacttcgattgaaaatatttatgcaatcggtgattgtaaagtaggaccaatgcttgcccataaagcttcagaagaaggtactgct

SEQ ID NO: 223103 - DNA, 261 bp, Unknown
  Bacterial polypeptide expressing nucleotide sequence isolated from the Sargasso Sea
aatgttgaaatttgaccttgcagtattaggtggaggcccaggcgggtatgttgctgcgattcgcgctgctcaattaggtcaaaagatatgcatcatcgacgaagacaaattaggcggcatatgtctaaattggggttgtatacctacaaaatctttattaaaaaatgctgaagtatatcatataataaaaaatgcagatcgatatggaataactgttgatcaagttaaggtcaatttcaaaaataatgtaaaaagaagtcg

SEQ ID NO: 223104 - DNA, 1126 bp, Unknown
  Bacterial polypeptide expressing nucleotide sequence isolated from the Sargasso Sea
ctggttgcaacacttacaaaaggagtggagtttttatttaaaaaaaacaaagttacttacataaaaggggtgggatcttttaatgaaaaaaatgaaatattagtcaaaaatgataaatcagaaataaaaattaaaactgataaaactataataagcacaggatcagaacctttatctcttccaggaatagattttgatgaaaaaaaaattctttcatcaacaggagctcttaatatttctaagcttccaaaaaaaatggttgttgttgggggtggctatattggattggagatgggttctgtttggtcaagattaggaactgaggttcacgtcgtagaatatttagatcacatcaccccaggactcgataaagaaatttcaaatgaatttatgaaaattttaaaaaaacagaatattaaatttgaattaaatactaaagttgaaaaaattactaaaaatgacaaaggagtaattatagaaacgacaaataaagattcaaaaaataatattgaagctgacgtagttttgatttctgttggaagaaaaccctatacagataaattaaatttagaaaaaattggagtaaatcttgataaaaaaggaaaaataaaagttaacaaaaattttgaaaccaatgtaaaaaatgtttatgcaataggagatgttatagatggacctatgttggctcataaagctgaagaggaaggaatagccgtagcagagctaattgctggacagtcaggtcatgtgaattatgatatcataccaggtgtaatttatacttcaccagaggtagcttatgttggtaaaaacgaggaagaattaaaagaaaaaaaaataaactttaaagttggcaaattcccatttatggcaaactcaagggctaaagcaataaatgagccagagggatttgttaaaatattagctgaaagtacaacagatagagttttaggtgtgcacataattggtccacatgctggtgaaatgattgctgagatgtcagttgctatggaatttggagcaagttcagaggatatagcaagaacttgtcatgcacatcctactttctcagaagcaattaaagaagcagctctatcagttgataaaagacaaatacactcttaga

SEQ ID NO: 223105 - DNA, 646 bp, Unknown
  Bacterial polypeptide expressing nucleotide sequence isolated from the Sargasso Sea
tatgtatgatgttgttgtaattggaggcggtcctgctggttatgttgcagcgatcaaagcatcccaattaggtctaaatacagcttgcgtagaatttgcctctgatgaaaaaggaaaccaaaagtatggaggcacttgccttaatgtaggctgtattccatcaaaatctcttttggattcatctcacaaatacttcgaagctcaaaaagattttgcatctcatggaatagatctaaaagatttatcagtcaatattccttcaatgatgaaaagaaaggatgaagttgttaataaacttacaactggaataactggactgtttaaagcaaatggtgttgaagcaatatcaggaagagggaaagttattaatgagaacattgtagaagtttcaaataatggagataaaacaagcttggagacaaaattcataatattagcaacaggctcaaatccaattgaaattccagttgcaaaatggtctgaaaatatagtcgatagcacaggagctcttaattttgatagggttccagaaagacttggaataattggagctggagtaattggtttagagcttggtagcgtatggtcaagacttggagctaaggttacagtcatagaggcgatggatgatttcttacctattgtc

SEQ ID NO: 223106 - DNA, 636 bp, Unknown
  Bacterial polypeptide expressing nucleotide sequence isolated from the Sargasso Sea
ataaaaagaaaataaaagaaaactatgaaatagttttaatgtcagtaggaagaaaaccaaacacagagggactcggtctagaaaaaattggtattaaattaaccgcaaaaaaatccattgaaattaaagataatttccaaacttctgttgaaggaatctacgcaattggcgatgtagctccaggaccaatgctagcacacaaagctgaagaagaaggagtggcttgtgttgaatttataaacggtcaaaaacctcatataaactacgacgctataccagcgattgtttataccaatccagagattgcatctgtaggtaaaacagaagaacagctaaagcaagaaaagaaagacttcaaggttggaaaatttccttttatggcaaatggtcgtgccctaaccacttctgcatcagagggatttgttaaaattttggttgataaaaaaacagatgaaattttaggtgctcatataatcggtcatgatgctggacaactgattgcagaaattgttacgacaatagaatttggtggaagtgcagaagatattgctagagtatgtcatgctcatccaacaactagtgaagcggtaaaagaagcagctctaagtgttgatggcagagccatacatatttaaa

SEQ ID NO: 223107 - DNA, 1360 bp, Unknown
  Bacterial polypeptide expressing nucleotide sequence isolated from the Sargasso Sea
agtgggcccaggaggatatgttacagctataagagcttctcaattaggactaaaaactgccatagtggagaaggaaagtttaggtggagtttgtttaaattggggttgtataccaacaaaagcgttgctaaaatcagctcaagtcttcgaatacattaaaaaggctgatacatatggtctaaaaattaaagattttgataaagattttgatgctgtaataaagaggagtagagatgtcgctggtggtatgagtaagggtgtgaattttcttatgaagaaaaataaaattgaagttataaacggatatggtaagatcaaaccaaataaagttgtctctgtagaaaaagaaggaactgaaatggattttgaatcagataatattattattgcaactggcggtagatcaagagtcatcgattctattcctcaagatgggaaaaagataattggctatagagaagcaatgacccttaaaaagcaaccaaaaaaaatgataatagttggctctggagctataggcattgagtttgcttatttctataattcaatggggactgaagtaaaagtcatagaatatatggatagaattttacctgttgaagataaagatatatccaatcaactaaataaaacttttaaaaaatcaggaatcgagattttaactaactcagaggtaatttcatctgatgtaaaaggtaagggagttaaggttcaagttaaatctgatggtcaaatatctgatcatgaggcagatattgtgctttcagcagttggctataaaagtaacattgaaaatattggtttagaggaggttggaattgctgttgataaagacaaaattattgttgatgaattttataaaactaacattcctggatattatgctattggtgatataacttctggtcaggctctagcacatgtcgcatctgcagaaggaatactttgcgttgaaaaaattgctaatcacgatgtggaaccgattaattatgacaatattccaggatgtacttactgttcacctgaagtagcatctgttggtttaactgaagaaaaagcattggagatgggttacgaaataaaggttggtaagtttccatttacagcgtctggaaaagctcaggcctctggacactctgatggttttgttaaggtaatttttgatgaaaaatatggagagtggcttggttgtcatatgataggagcaggtgtaacagacatgatcgctgaggcagttcttggtaggaaacttgaaacaacaggcaaagagatactaaatgctgttcaccctcacccaacaatgagtgaagctttgatggaagctgttgctgatgcatatgatgaagtcattcacctttaa

SEQ ID NO: 223108 - DNA, 1150 bp, Unknown
  Bacterial polypeptide expressing nucleotide sequence isolated from the Sargasso Sea
ttgtattccttcaaaaagcttactcaatctttctgaagaatttcacaaagttaaaggattggcaaataaaggtatagaagttggtgaagtaaaattgaatttagagaaaatgatgaagagcaaagataaagctgtaacagttcttaccaaaggtgttgaatttcttttgaaaaagaacaaagtttcttactttaaaggacatggaagtttcaaatctaaaaatgaaatttcaataaaggatgataaaaataaagaaactgttatccaaacagaaaaaacagttatcgccacaggatcagtcccagtttcattaccaggaatagatatagatgagaaaacaattatttcttctacaggtgctttaaaattagagaaagttcctaagaaaatggtcattgtagggggaggttatattgggttagaaatgggatctgtatggtcaagacttggagcagaagttcaagttgttgaatttttagatcatattactcctggaatggataaagaaatctcaacagaatttatgaaaattttaaaaaaacaaggaatgaaatttaatatgcaaaataaagttgaaacaattgaaaaaaatgaggcaggcgtagtggtttcaacactagataaagaaggtaataaaaataattttgaatgtgatgtagttttaatttctgttggcagaaaacctaatactgatggtttaaatttagactctgtaggagtaaatcttgatgaaaggtatagaattaaaactgataaaaattttaagacaaacgtggaaaatatttatgcaataggcgacgtaattgttggtccaatgcttgcacataaagcagaggatgaaggtattgcggtcgcagaaaatatagttggtcaatcagggcatgtaaattacgatacaattccaggtgtaatttacacaacaccagaagtagcatcaattggtaaaactgaggaacaattaaaagaattggataaaaaatataaagttgggaaattttcatttatggctaattcaagagctaaagctatagatgatgcagagggttttgtaaaaattttagctgatgagcaaacagataaagtattaggtgcacatattattggacctcatgcaggagaattaattgcagagattggtgttgcaatggaa

SEQ ID NO: 223109 - DNA, 729 bp, Unknown
  Bacterial polypeptide expressing nucleotide sequence isolated from the Sargasso Sea
catggataattttgatttaatagtaattggtggaggtccaggaggctatgtttgtgccataagggctgcgcaacttggtttaaagacggcctgcgtggagtccagaggatctctgggggggacttgtttaaatgttggttgcattccttctaaaagtctactgaatttgtctgaaaattttcataaagccaaaaaagattttaatcaacaaggaatagagattgaaggaattaaacttaatattgaaaaaatgatgtcaaataagaataaatcaattcaagtacttactaaaggtgtagaatttttatttaaaaaaaataaagtaacatacataaaaggaaaaggtgtaatattttctaaaaatgatgttgtggtttatgaagataataaaaaaacgaactataagtcaaaaaatattgttatagccacgggttcggacgtagcttctttgccaggaataaaaatagatgagaaaaatataatttcttcaacaggagctttatcccttaacaaagtgccaaaaaaattagccgtgataggtggaggctatatcggtttagaaatgggttcagtttggtcgagattaggctcagaagtgactgtaattgaatatcttgactttataactcctggaatggatagggaaatttctaatgagtttaaaaaaattttaattaaacaaggtataaaatttaagatgggatcaaaagtaaattcagttaaaaatat

SEQ ID NO: 223110 - DNA, 667 bp, Unknown
  Bacterial polypeptide expressing nucleotide sequence isolated from the Sargasso Sea
aatgtcggaaaaatttcaagcagtagttataggaggtggcccaggaggttatgtttgcgcaattagacttgcccaattaggtttaaaaaccgcatgtatagagtccaggggatctctaggtggtacatgcctgaatattggttgtatcccttcaaaaagtttacttaacttgtctgaggaatttcacaaagttaaaggtttggcaaataaaggtattgaaataggagaagtaaaactaaatcttgataaaatgatgaagagcaaggacaaagcagtcactgttcttacaaaaggcgtagaatttcttttaaaaaaaaacaaagttacctattttaaaggccatggaagttttaaatcaaaaaatgaaatcttaataaaagatgatcaaaaaaaagaaacaataattcaaactgaaaaaacagttatagccacaggatctgtaccagtatctctaccgggcatcgaaatagatgaaaaaataatagtttcatcaactggagctttaaaattagaaaaagtgcccaataaaatggttgttgttggtggaggttatatcggcttagagatgggatcagtgtggtcaagacttggtgcaagagtagaagttgttgagtttttggatcatataacacctggtatggataaagaaatttcgtctgagtttatg

SEQ ID NO: 223111 - DNA, 709 bp, Unknown
  Bacterial polypeptide expressing nucleotide sequence isolated from the Sargasso Sea
gatggtagattttgatttaattgtaattggtgcaggacctggggggtatgtagcagcgattagaggggctcaattgggaatgaaagttgcctgtattgaaaaagaaaaaacattaggtggaacttgtttaaatattggttgcattccttctaaggcacttttaaattcatcagagaaatattttgaactttccaaacacttagatgaacacggaatatctactggtaaagttgctctagacttatcaaaattaatgcaacgaaaaaacaaaattgttaagcaattaacttcaggaattggttttttgttcaaaaaaaataagattacacatattcaaggatcagcttcttttattgataataaaaaaattaaagttactacttctgaaggtgaaaaaaattatacagcaacaaattttatcattgccacaggctctacttccatttctattgatgcaatacctgtagatgaaaaacaaattgttacttctactggagctttagcactagagtcagtcccaaaatcccttctcgttattggtggtggctatattggcttagagatgggttccgtatggagtagacttggatcaaaagttacagtggtagaagcattagatagaattgttccaactatggatgaagaaattgctaaagaatttatgaaatctcttcaaaaacaaggattagaatttaaactttcctcataa

SEQ ID NO: 223112 - DNA, 200 bp, Unknown
  Bacterial polypeptide expressing nucleotide sequence isolated from the Sargasso Sea
aatggaagattttgatttaatagtaattggtgcgggacctggcggatatgtagctgcaatcagagcagctcaacttggaatgaaggttgcttgtatagaaaaagaaccatcacttggtggaacttgtttgaacattggatgcataccttctaaagcattattaaattcatctgaaaaatttgttgaaatttcaaatcatg

SEQ ID NO: 223113 - DNA, 466 bp, Unknown
  Bacterial polypeptide expressing nucleotide sequence isolated from the Sargasso Sea
atggcagattttgatttaatagtaattggagcaggtccaggtggttacgtggcagcaattagagctgcacaactcgggatgaaagttgcgtgtgttgaaaaaggacaaacacttggtggcacatgtttgaatattggctgtattccatccaaagctttattaaattcgtctgaaaaatttgctgaaatttctaaacatagtgaagagcacggtatcagcacaggaaaagttgagattgatttatctaaactcatgcaacgtaaaaataaaattgtaaaacaactaacatctggaattggttttctttttaaaaaaaataaagtcactcatattcagggattagctagctttgtagacaagaatacaattaaagtttcgtcatctgatggtgaaaaaaattattcagcaaaaaattttattattgcaacaggatcttcttcaatttctatagatgcaattcccgtcg

SEQ ID NO: 223114 - DNA, 908 bp, Unknown
  Bacterial polypeptide expressing nucleotide sequence isolated from the Sargasso Sea
aatgacagataaatttcaagcagtagtaattggtggtggtccaggaggttatgtgtgtgcaatcagacttgctcaattaggattaaaaacagcttgtatagagtcaagaggatctttaggaggcacctgtttgaatattggatgtatcccctcaaaaagcctacttaatttatctgaagaattttataaagttaagagcttagcaaataaaggaatagaagttggtgaagtaaaattaaatttagacaaaatgatgaagagtaaagataaagctgtaactgttcttacaaaaggtgttgaatttcttttgaaaaaaaacaaagtcacttactttaaaggtcatggcagttttaaatctcagaatgaaatttcaataaaggatgataaaaataaagaaactattattcaagcagaaaaaatagttattgccactggatcagttcctgtttcattaccaggaatagatattgatgagaaaacaatagtttcatcaactggggctttaaaattagagcaagtgcctcagaaaatggttgtcgtgggaggaggttatataggattagaaatgggctctgtatggtcaagactaggtgccgaagttcaagttattgaatttttagatcacattacacctggaatggataaagaaatatcttcagaatttatgaaaattttaaaaaagcaaggaatgaaattcaatatgcaaaataaagttgaaacaattaaaaaaaaaggaactggtgctatagtttcaacagtaaataaagatggtaataaaaataattttgaatgcgatgttgttctaatttccgttggtagaaaacccaatacagatggtttaaatttaaaggcagtaggcgtaaatcttgatgaaaagaaaagaattaaaacagataaaaattttaaaa

SEQ ID NO: 223115 - DNA, 145 bp, Unknown
  Bacterial polypeptide expressing nucleotide sequence isolated from the Sargasso Sea
tatggcagatcagcaatttgacattggcgttatcggcgcaggaccaggagggtatgttgcggcaattcgttgtgcgcagttggggctaaatacggtgataattgaaaagcggaataccctagggggtacctgtttgaattggggt

SEQ ID NO: 223116 - DNA, 933 bp, Unknown
  Bacterial polypeptide expressing nucleotide sequence isolated from the Sargasso Sea
caattaaataatattaaattaagtacacatgtagtcgatagtgaaggcgctctaaaacttgaagaagttcctaaaacgcttgtaattattggggcaggagtcataggcctcgaacttggaagcgtctgggccagattaggctctgaagtagtaattctagaggcccaggatgacttcttgcccatgctagataaaagaatctccagacaggtcctaaaagaattccaaaaccaaggcttagacatcagattagggtctaatgtattggaagcagaagaagatcaagaagggatgaaacttacttatacagatggagataaggaaacttttttgcgcactgagaaaatcatacttgcagttggaagaaagccaaatctagataatttgttcgatgacacgttattaaatctcaacaaacaaggattcatcgatgtgaatgagttttgtcagacttctatagataatatttgggcaataggtgatgtagttaggggacctatgctggcccataaagcatctgaagaaggggtaatggtggcagagaggattgcagacaatgatgtaagattaaactacgaccatgttccaaatgttatctatacccacccagaggtagcttgggtaggtttaaatgaaactcagttaaaagaacaaaatatagactttaaatcaggttctttcccttttcttgcaagtggaagagctcttgcttctggtgaatcagtaggctcagtatttataacagcagataacgaaacggataagatattaggaattcaagtttttggaccttcagcagcagaaatcttacaacaaggtctaattgccatggatcaaggcgttacttcagaggatttcggtaaaactatttttagtcatccaacagtttcagaagcattacatgaagccacattagctatgaacacaaagcga

SEQ ID NO: 223117 - DNA, 205 bp, Unknown
  Bacterial polypeptide expressing nucleotide sequence isolated from the Sargasso Sea
atgtttgataaatttgatgttacagttattggaagtggaccaggtggatatgtatgtgcaataagattagctcaactaggtttaaaaacagcatgtattgattcaagaactaaaccaggtggaacctgtttaaacattggatgcataccttctaaaaatttattaaatatctcagaaaattttagtaaagcaaaaaacttttgaa

SEQ ID NO: 223118 - DNA, 850 bp, Unknown
  Bacterial polypeptide expressing nucleotide sequence isolated from the Sargasso Sea
ggaagtgtttgggcaagattagggtccaaagtaacaattttggaagctcaacaagaatttttgccaatgttggatgcaaggatgtctagacaaattcttagggaatttaatagacaagagttagatataagatttgggtccaatattttagatatttcagatacaacgactggtgtggaagttaagtttcaagaaaatggagaagatattaatctgaaggctgaaaaaatgattatagcaattggaagaaagcctaatactcaagatttattcaataatgatttagtttccatagatgataaaggctttatcgaagtcgatgaatattgcctgactaagactaagagcatatgggcaattggagatgccgtaagaggaccaatgctagctcataaagcttcagaagaaggaattatggtttcggaaagaatagccggagagaattttcaaataaattacgcacatattcctaatgtaatatatacccatcctgaggttgcttgggtaggtaaaaatgaaaaagagcttaagagtctagaggtagattacaaatctggatctttcccttttgccgccagcggaagagcgcttgcatctggtgagtcaactggctctgttaccatctatgctgataacaaaacagatcaaattttagggattcaggtttttggtccttcagcatctgaaatcatgcatcaaggcttgattgcaatggacaataaaataacttcagaaaaattcagttcaactatattcagtcaccccactgtttcagaggcccttcacgaggcgacacttgcgatgaatcaaaaggctattcatattcaaaatagaaaaaagaaaaagtaac

SEQ ID NO: 223119 - DNA, 895 bp, Unknown
  Bacterial polypeptide expressing nucleotide sequence isolated from the Sargasso Sea
ggtgccaaaagcttggcagttattggggcagggtatataggattagaactgggttctgtctggcagagattaggttcaaacgtaactgtaatagagtacatggactctatagtacctactatggatgaagatatagcaaatattttttataaagatttacaaaaacagggtttaaattttctactttctcatgagttactaagttctaaaatacttgataataaacaaattgagttaaaaattaaagatttacaatcaaataaaaaaattaagcaaaaatttgataaggttcttttatccatcggtagaaagcctgcaagtaagggaatgggtttacatgatataggaataaatttagatgagtatggacgaataatagttgatgaaaaatatcaaacttctttagccaatatatatgctattggtgatatcatagcaggtcctatgcttgcccataaagctagttcagaagctgaagcactaatagatatacttgtcggcaaaaaggggcaattaaattataacgcaatcccttcggttgtttatacaagtccagaggtggcctgggttggtaaaactaaaaaagaattagatttatctaaattaaaatattctacgggaatatttaagttttcatcaaattcacgtagtaaggttacaggtaatataattggagaagttaaagtttattctgaagaggttacaaaagaaattttaggtgcgcatataattggagagaatgcaggagaaatgataggggagtttgttgttgctatggagatgggtgcaactgcagaagatcttgccctaatatgccatgcccatcccactttatctgaatctgtaaaagaggcctctagtatttctgcctatggaaatactattcactcatagc

SEQ ID NO: 223120 - DNA, 285 bp, Unknown
  Bacterial polypeptide expressing nucleotide sequence isolated from the Sargasso Sea
catggataattttgatttagtagtaatcggcggaggtcctggaggttatgtttgtgcaatacgggctgcacaacttggtttaaaaacagcttgcattgagtccagaggagctttaggaggaacctgccttaatgttggttgtattccttcaaaaagtttacttaatttgtctgaaaatttccacaaagctaaaaaagactttaaccagcagggaattgagattgagggtattaaacttaatattgaaaagatgatgtcgaataagaataaatcagttcaagtgct

SEQ ID NO: 223121 - DNA, 550 bp, Unknown
  Bacterial polypeptide expressing nucleotide sequence isolated from the Sargasso Sea
catggataattttgatttagtagtaatcggtggaggtcctggcgggtacgtttgcgctataagagctgcacaattaggtttgagaacagcatgcgtagagtatagagggtctttaggtggaacctgtctaaatgttggttgtattccatcaaaaagtttgttgaatttgtcagaaaattttcagaaggcaaaaaaagattttaatcaacaaggaatagaaattgagggcattaaacttaatattgaaaagatgatgtcaaacaaaaataagtcaattcaagtgttgactaaaggtgtagagtttttatttaaaaaaaataaagtaacatacattaaaggaaagggcgcactgctttctaaaaatgatattgttgtttatgaaaacgataagaaaacaaattataaagcaaaaaatattgttattgctacgggatccgacatagtttctttaccaggcatagatatagatgaaaaaaatataatttcctcaactggagctttatcactaaaaaaagtaccaaaaaggcttgctgttattggagggggctat

SEQ ID NO: 223122 - DNA, 469 bp, Unknown
  Bacterial polypeptide expressing nucleotide sequence isolated from the Sargasso Sea
gatgagcaacgaaatcaaaactcaagttgtggtgttaggcgccggccctggtggatattctgcagcattccgcgctgctgacttaggtctggaagtgactttagttgaagcacgcagcacacttggtggtgtttgtttaaatgttggctgtatcccatctaaagctttattacatgtagccaaagtgatcgacgatgcccgcgagatggcctctcacggtgtgacttttggtgctccacaaattgatttagacaaaatccgcgcctggaaagacaaagttgtaggtcagttgaccaacggcttatctggcatgtctaaaatgcgtaaagtcaaagtagtgactggttacggtaaattcactggcccaaatacgctggttgttggtgataccactattacttttgaaagtgccattatcgcagctggctcagagcctgttgctctgccatttattccaaaagatgatgcc

SEQ ID NO: 223123 - DNA, 619 bp, Unknown
  Bacterial polypeptide expressing nucleotide sequence isolated from the Sargasso Sea
catgaatagttttgatttagtagttattggaggaggacctggaggatatgtctgcgctatcagagctgctcagcttggtcttaaaactgcctgtgtagaatcaagaggtacacttggaggcacatgccttaatgttggctgtataccttctaaaagtttattaaatttgtctgaaaattttcacaaagctaaaaaagattttaataatcaaggcatcgagattgaaggagtaaaattaaatattgaaaaaatgatgtctaataaaaataaatcagttcaggttttaacaaaaggcgtagagtttctatttaaaaaaaataaagtaacttatataagaggaaaaggagttctcttttccaagaacaatattatagtttatgataataataataaaacaagctataacgcaaaaaatattgtaatagcaactggctctgccgtttcttcattaccaggtatagaaattgatgaaaaaaatataatatcatcaactggcgcattatcactaaatagcgttccaaagaaattagctgttattggagggggttatataggtttagaaatgggatcggtttggtcaagactaggcgcagaagttacggtcatagaatacccttga

SEQ ID NO: 223124 - DNA, 485 bp, Unknown
  Bacterial polypeptide expressing nucleotide sequence isolated from the Sargasso Sea
gatggattatgatgttcttgtaattggaggtggtccagggggatatgtagcagctattaaggcctcccaactgggtttaaaatcggcatgtgttgagtttgactcaacaaaagacaataaagtcaaacttggtggtacatgtttaaacgttggatgcataccttcaaaatctttgcttgattcttcgtacaaattttatcaattgaaaaaagagcttttagtacatggaatcaaaacagggaaagcgtcaattgatcttgacgtcatgatgcatagaaaggaccaaattattgagaagcttacaggaggtgtaggacaactttttaagcacaacaaagttgaatcaatccatggtaaaggcaccttagtggaccaacacaccgttgaggtaaccaatgctaaaggtaagaaaaaaatatataaatctaaaaacattatacttgccactggatcacgaccaacatatatcccttctgtgccttgga

SEQ ID NO: 223125 - DNA, 319 bp, Unknown
  Bacterial polypeptide expressing nucleotide sequence isolated from the Sargasso Sea
tatgtcagaaaaatttgatgcagttgttataggtggtggaccaggaggttatgtttgtgcaattagacttgctcaattaggtcaaaagacggcttgtattgagtcgagaggatctctaggaggaacatgtttaaatgtaggatgcataccttcaaaaagtttattaaacttatctgaaaattttcataaagcaaaaaactttgataaaatcggtatagaggtaggctctttaaaacttaatcttccaaagatgatgaaaaataaagaaaaagctgtaaccgttttaactaaaggaatagagtttttgtttaaaaataaa

SEQ ID NO: 223126 - DNA, 188 bp, Unknown
  Bacterial polypeptide expressing nucleotide sequence isolated from the Sargasso Sea
tatgtttgatgtggttgttataggaagtggtccagcaggttatgttgctgccatcaaggcatctcaattaggattaaaaactttgtgtattgaagaatctagtgatgctaaaggaaatacaaatcttgggggcacatgtttgaatgttggatgcataccatctaaggcccttttagattcatctcata

SEQ ID NO: 223127 - DNA, 647 bp, Unknown
  Bacterial polypeptide expressing nucleotide sequence isolated from the Sargasso Sea
aatgtctaaacagttcgatttaatcgttattggtgctggaccaggtggctatgttgctgcaattcgtggtgcacaacttggtttatctgtagctataattgaaaaagaacctacattgggtgggacatgtctaaattggggatgtattccatcaaaagccttactggattcgtctgaactattttatttagcaaaagaaaaattccaaacacatggaatcgatattaataaaccaaaagtaaatatgaaacaaatgatgactagaaaacgtgatgttgtaattgcaacaacaaagggcattgattaccttatgtctaaaaataatatcactcgatttgaaggaatagcatcatttgtagatgaacattctatacttatttctggaaaagatagtgaaacaatttcaggtaaacatattatgatagcaacgggttctgaagtgacaccccttccacctgttcctgttgatggtaagcgagtcattacatccacagaagcattagaacttgaagaggtgccgaaaaagctaatcgttattggtggcggggttattggtgttgaaataggatctgtttatgctcgtttaggaacggaagttacagtagtagagtttatggatgggattattccaactatggataaagaat

SEQ ID NO: 223128 - DNA, 805 bp, Unknown
  Bacterial polypeptide expressing nucleotide sequence isolated from the Sargasso Sea
cttgacgggttgatggctggagccgaccgtgacctggttaaaccttttcaccgcatcgtttcacgtcagtacgataatatctggctggaaaccagggtcactcaagtcgaagctcagaaaaagggtttgaaagttagttttgagggaaaaaatgctcctgaaaaaccagttgtcttcgaaaaaatcctaagtgccgtgggaagaatcccgaacggattaaaaatcggtgcagaaaacgcaggggtttcgatggacgaaaaaggcttcattaaggtagactcccagatgcgcaccaatgtatcgaatatttatgccatcggagatatcgtcggccaaccgatgctggctcacaaagcaacccatgagggtaaggttgcctcggaagtgatttgcgggatgaaaagtcattttgacgctcggaccattccctctgttgcttataccgatcctgaagttgcatgggccgggatcaccgaagaggaagccaaaagccagggaattaattatggcaaagggattttcccgtgggctgccagtggacggagcctggcattgggacgagacgagggcatgacgaaaataatgtttgatgagggcaccaaaaaggtgattggtataggtatcgtggggccgaatgccggggaactgattgcagaaggaatgttagccattgagatgggggcagacgccaccgatatcggttccaccattcatcctcatcccacactttctgaaaccataggattggccgccgaggcttacgaaggaaccatcaccgacctctacctgccaaagcggaaataat

SEQ ID NO: 223129 - DNA, 855 bp, Unknown
  Bacterial polypeptide expressing nucleotide sequence isolated from the Sargasso Sea
aatggataataattttgatgttattgtagttggtgcaggtccaggaggatatgttgctgcaataagatctgctcaattaggtctcaaaactgcatgcgttgaatcaagaaaaacactaggcggcacatgtttaaatgttggttgcataccttcaaaaagtttactgaatatttcagaaatgtatcacaaggcacagaaagagtttaaaaatttaggaattgatacaacagatgtaaaattaaatttgcctaaaatgatggctaataaaaataagtcaattcttactcttactaaaggggtagaatttttatttaaaaaaaataaaatttctcatttaaaaggaaaaggtttaattttagatagtaacacagtaatagttactgaagattctaaaaaaaaattaacttacaaagccaaaaatataataatcgccacaggttcatccccaacatctttgccaaacataaaaattgatgagaaaattattgtttcttcaacaggagcgctatcttttgataaaccaccaaaagaattaattgttataggaggtggttatattggcctagaactttcaagcgtatggaaaaggttaggatcaaacgttactgtaattgaatatttagatcatattatccctggtatggatagagatatttcaagcgaatttttaaaaattcttaataagcaaggaattaattttaagttaaattctaaagtaacaggagtaaatattataaaaaataaagtaattgtagattttacaaataataaaagcacaaagaaagaaagagtcgaatgcgataaagttttagttgcagttgggaggaaacctaacatcggagaggatataaaaaa

SEQ ID NO: 223130 - DNA, 966 bp, Unknown
  Bacterial polypeptide expressing nucleotide sequence isolated from the Sargasso Sea
ggtggatatgtagctgcaattagagcagctcaacttggaatgaaggttgcttgtatagaaaaagagccatcacttggtggaacttgtttgaacattggatgcataccttctaaagcattattaaattcatctgaaaaatttgttgaaatttcaaatcatgctgcagagcatggtataaaaacatcaaagatagatttagacctaaatgttttgatggatcgcaaaactaagattgtaaaaaaacttacaacagggattggttttttatttaagaaaaataaaatcacgcacattcctggtacggcttcatttgtagataaaaatactatttctattataaatggaaaaaatgaaattactgctagtgctaaaaattttattatcgcaacaggttcatcttcgattgagataccaaatattcctgtcgatgaaaaacaaatagtatcttcaacaggtgctctatctctatctaaaataccaaaatcactcttagttattggtggtggatacattggattagaaatgggttcagtatggagtagattaggttcaaaggtaacagttgttgaagctctggacagaattgttccaactatggatgctgaaattgcaaaagagtttatgaaaatgttaactaaacaaggattagaattcaaactatcacataaagtgagttctgcaaaatctggtaagtctggtgtagatgttgaaatggaaacatcagataaaaagaaaataaaagaaaactacgaaatagttttaatgtcagtaggaagaaaaccaaacactgagggactgggtcttgaaaaaattggaattaaactaacggataaaaaatctattgaaattaaagataactttaaaacttctgttgagggaatctacgccattggtgatgtagtaccaggtccaatgctagcacacaaagctgaagaagaaggagtggcttgtgttgaatttataaat

SEQ ID NO: 223131 - DNA, 606 bp, Unknown
  Bacterial polypeptide expressing nucleotide sequence isolated from the Sargasso Sea
aatggaagaaaattttgatctattagttatcggtggagggcctggaggttatgtttgtgctataagggcagcacaactcggtttaaaaactggctgtatcgagtcaagaggaactcttggcggcacttgcttaaatgtgggatgtattccatccaaaagtcttctcaatttatcggatatgtatagaaaagcacaaaaagactataataatctcggcatagaagtaggtgaagtaaaattaaatttaaaaaaaataatgatgaacaaaagtaagtcagttcaagttttaacaaaaggtgtagaatttttatttaaaaaaaacaaagttacatacatcaaaggtaaaggagttttattttcaaaaaataatgtagtggtttatgaaaatggaaaaaaaacatcatatagctcaaaaaatatcgttatagccactggttcatcatcaagctctgttcctggtattgaaatcaatgaaaaaaatataatttcttcaacgggcgctatatctttagaaaaagttccaaaaagtatggttgttataggaggaggatatataggtcttgagatgggatctgtgtggtccagattaggctctgaagttacagt

SEQ ID NO: 223132 - DNA, 908 bp, Unknown
  Bacterial polypeptide expressing nucleotide sequence isolated from the Sargasso Sea
ttcgactggagcattggagcccaatgagattccatcaaatatcttaatcatcggaggaggaatcattggtcttgaaatggcaaccatatactctgccctaggcagcgaagtcacaatcgttgaactaaccaaggatttaatgcctggaacggatcgagatcttgtcagacctttagaaaaagttctgaaaaagaagtgcaataagatcatgaaatcaactcaggtgatttctgcagaggccacagatgatggcatcaatatatccttcaagcaggacgaagaagaattcagcgaggtatttcaaaatgtccttgttgcagttggaaggaaatcaaacggaaatcttctaggactgaatgagataggcgtgaacattgatgaccaaggcatcatcaaagtcgatcaacaattcaaaaccagtgtcgaatcaatcctagctattggcgatgtgataggggatccaatgttggcacataaagccagttatgaaggcaaagttgctgctgaggtaacagcgggtgaaagagttagcaatgatgccagatgcatcccttctgttgcctatactgatccagaggttgcttgggtagggctttcagaagatgaatgcaaagacaaagggatgaattatggaaaaggtgtctttccatggtcagccagcggaagatcacttgcaattggaagaaatgaaggcatgaccaagttgctttttaataattcaaccaaaaaagtcattggaggagggatcgttggaccgaatgctggtgacttgatatcagaaattgctttggctattgagatggatttgcgatgtgatgacgttgctttgactgttcatcctcatcccacgctatccgaaacagtcgccatggcggcagaagtttttgaggggactattacggatttaa

SEQ ID NO: 223133 - DNA, 889 bp, Unknown
  Bacterial polypeptide expressing nucleotide sequence isolated from the Sargasso Sea
tatggaaaataattttgatgttatcgttataggtggtggccctggaggatacgtatgtgctatcagatcttctcaattaggtttgaaaaccgcatgtgttgaaagcagaggaacattggggggcacttgtttaaacgttggatgcataccctcgaaaagtttgctgaacctttcagaaaattatcacaaagctaaaaaagactttaaaaatcaaggaatagaaataagtgatatcaaattgaatattgataaaatgatgcaaaacaaagccaaatctgttcaagtccttactaaaggagtagaatttcttttaaaaaaaaacaaggtctcttatttaagaggtaagggagtaatattttctcctaatgatgtagtagtttatgacggaagtgataaaaaatcgtataaaacaaaaaacattgttatagctactggctctgctcctttaactttgcccgggatagatattgatgaaaaaaatattttatcctcaactggagcattatcacttaacaaagtgcctaagtccctcgcgataattgggggaggttacataggccttgaaatgggttccgtctggtcaagattaggcactgaggtaacagttatcgaatacttggatcatattacacctggaatggatagagaaatttcaaaagaattccaaaagatattaacaaagcaaggaattaaatttaaacttaataataaagtaaaaagtgttatatcatcttctcagggatcaaccatagtatttgaggacaataattctaaaaaagaagaaaaacttattgcagacaaagttttattatcagtcggaagaaagccttatactgagggtttaaatctttcaaaaataggggttaaaaaagattctaaaagtagagtt

SEQ ID NO: 223134 - DNA, 160 bp, Unknown
  Bacterial polypeptide expressing nucleotide sequence isolated from the Sargasso Sea
atgagcgaacaatttgatttattagttattggtggtgggccgggaggttatgtttgcgcgatacgcgcagcacaacttggtcttaagacaggctgcatcgaatcaagaggaactcttggaggcacatgtttaaatgttggatgtattccatccaaaagcc

SEQ ID NO: 223135 - DNA, 151 bp, Unknown
  Bacterial polypeptide expressing nucleotide sequence isolated from the Sargasso Sea
atgattgctgataatatttatgatttaattgtaataggaggtggccctggtggttatgtagcggctattcgagcttctcaattagggcttaaggttctatgtattgaaaaaagaagtacgtttggaggaacatgccttaatgtaggatgta

SEQ ID NO: 223136 - DNA, 310 bp, Unknown
  Bacterial polypeptide expressing nucleotide sequence isolated from the Sargasso Sea
catggaaaataattttgacttagttgtaattgggggaggacctgggggttatgtttgcgctattagagcagctcaattaggattaaagacagcttgtatcgagtccaggggtgcgttgggtggcacatgtttaaatgtaggatgtataccatcaaaaagtttattaaatttatccgaaaattttcataaagcaaaaaaagattttaatcagcaaggtatagaaattgatggaattaaattgaatatcgaaaaaatgatgtctaataaaaacaaatcaatacaagttttaacaaaaggagttgagttttta

SEQ ID NO: 223137 - DNA, 749 bp, Unknown
  Bacterial polypeptide expressing nucleotide sequence isolated from the Sargasso Sea
agttctgaaaaagaagtgcaataagatcatgaaatcaactcaggtgatttctgcagaggccacagatgatggcatcaatatatccttcaagcaggacgaagaagaattcagcgaggtatttcaaaatgtccttgttgcagttggaaggaaatcaaacggaaatcttctaggactgaatgagataggcgtgaacattgatgaccaaggcatcatcaaagtcgatcaacaattcaaaaccagtgtcgaatcaatcctagctattggcgatgtgataggggatccaatgttggcacataaagccagttatgaaggcaaagttgctgctgaggtaacagcgggtgaaagagttagcaatgatgccagatgcatcccttctgttgcctatactgatccagaggttgcttgggtagggctttcagaagatgaatgcaaagacaaagggatgaattatggaaaaggtgtctttccatggtcagccagcggaagatcacttgcaattggaagaaatgaaggcatgaccaagttgctttttaataattcaaccaaaaaagtcattggaggagggatcgttggaccgaatgctggtgacttgatatcagaaattgctttggctattgagatggattgcgatgtgaatgacgttgctttgactgttcatcctcatcccacgctatccgaaacagtcgccatggcggcagaagtttttgaggggactattacggatttataccttaaatccagcaaatgat

SEQ ID NO: 223138 - DNA, 567 bp, Unknown
  Bacterial polypeptide expressing nucleotide sequence isolated from the Sargasso Sea
aatggaaaacaattttgacttagtagttattggaggtggacctggcggatatgtgtgcgcaatcagagcagctcaattaggattaaaaactgcatgcgttgagtcaagaggggcactaggagggacttgtctgaacgtaggttgtataccttcaaaaagtttgttgaatctgtctgaaaactttcataaagcgaaaaaagattttaatcaacaaggtatagaaattagcaatataaaactaaatattgaaaaaatgatgtcaaataaaaataaatctatccaagttttaacaaaaggtgttgaatttttatttaagaaaaataaagttacttattttaaaggcaaaggagttttattttcaaaaaatgatattgttgtttatgaggataataacaaaagaattaatataaaggctaaaaatattgtacttgctaccggatctgaagctacttcactgccaggtataaaaattgatgaaaacaatattgtttcatctacgggcgctttatcttttaataaagtgccaaaaagactagctgttattggtggtggttacatcggggtaga

SEQ ID NO: 223139 - DNA, 78 bp, Unknown
  Bacterial polypeptide expressing nucleotide sequence isolated from the Sargasso Sea
aatggacaataattttgatgtaattgtaatcggatctggtcccggcggatatgttgctgctataagatctttcgcatt

SEQ ID NO: 223140 - DNA, 181 bp, Unknown
  Bacterial polypeptide expressing nucleotide sequence isolated from the Sargasso Sea
atggaaaataattttgacttagtagtaattggtggaggacctggcggatatgtttgcgccattagagcagcacaattaggacttaaaacagcttgcgtagagtcaagaggcgcccttggagggacatgccttaatgttggatgcataccctctaaaagtttactaaatttatctgaaaatt

SEQ ID NO: 223141 - DNA, 287 bp, Unknown
  Bacterial polypeptide expressing nucleotide sequence isolated from the Sargasso Sea
aatgtcagataaatttcaagtagttgtaattggaggtggacctggaggttatgtttgtgcaatcagacttgctcaacttggactaagaacggcatgtatagaatctagaggttctttaggaggaacttgtttaaacgttggatgtataccctcaaaaagtttacttaatctttctgaagagtttcataaagttaagagtttatcaaataaaggcatagaaattggtgatgtaaaacttaatttagctaaactcatgaggagtaaagataaagctgttactgttctta

SEQ ID NO: 223142 - DNA, 234 bp, Unknown
  Bacterial polypeptide expressing nucleotide sequence isolated from the Sargasso Sea
aatgtcagaaaaatttcaagctgtagttattggaggtggaccgggtggttatgtgtgcgcaatcagacttgctcaattaggattaaaaactgcatgtatagagtctagagggtctttgggaggtacttgtttaaatgttggttgcatcccatcaaaaagcctacttaatctgtctgaagaatttcataaagtaaaaagttttagcaacaaaggtattgaagtgggtgaagtaaa

SEQ ID NO: 223143 - DNA, 709 bp, Unknown
  Bacterial polypeptide expressing nucleotide sequence isolated from the Sargasso Sea
atgtcagaaaaatttgatgtaacagttattggtggtggtcctggaggatatgtatgtgcaattagactttctcaacttggattaaaaactgcctgtatagagtctagaggatcattaggtggaacatgtttaaatgtgggatgtataccatcaaaaagtttattaaatttgtcagaaaattttaccagggctaaaaacttttcaaaattaggcatagaaatatctgatttaaaattaaaccttgataaaatgatgaaaaacaaagaaaaagctgttactattttaacaaaaggtgtcgaatttttatttaaaaaaaataaagtttcttactttaaaggggtaggaaaatttaaatcaaaaaataaaatatcaattattgatacaaataatgaagaaatttttattgaaactaaaagtacagttattgcaacaggttctgaaccaacttctataccaggagttaattttgacgaaaaccaaatattatcatcaacaggagcgttatctttaaaaaaagttccaaaaaaaatgatagtagtcggagggggttatattggtttagaaatgggttcagtttggtcacggttaggatcagaagttcatgttattgaatttttagactttataactccgggaatggatagagaaatttccaacgaatttatgaaaatacttaccaaacaaggtattaaatttcatttaaaaacaa

SEQ ID NO: 223144 - DNA, 244 bp, Unknown
  Bacterial polypeptide expressing nucleotide sequence isolated from the Sargasso Sea
catgggagcggagcaggaattcgacgtagtcgtgatcggggccggtccgggaggctatgtctgcgccatccgttgcgcccaactgggcatgaagactgccctagtggagaagaatccacgccttggcgggacctgcttgaacgtcggatgcatccccagcaaagcgctccttcactccacggagatctaccatgagctcaagcatggggcctccggtcatggtattgttgccaaggggatcagt

SEQ ID NO: 223145 - DNA, 838 bp, Unknown
  Bacterial polypeptide expressing nucleotide sequence isolated from the Sargasso Sea
actttaggtggcgtgtgtctgaacgtgggttgtatcccatctaaagccctgttacacgttgctaaagtcatcgaagaagccaaagccgttgctgcacacggtgttgtgttcggcgagccaacaatcgatttagacaagttacgcagcttcaagcaaaaagtgatcagccagttgactggtggcttaggcggcatgtctaaaatgcgtaaagtaaacgttgttaatggcttcggtaaatttactggccctaacagcttagaagtgactgctgaagacggtactgtgaccgttgttaagtttgaccaagcgatcatcgctgcgggttcacgcccaatcaaactgccattcattccccatgaagacccacgtatttgggattcgaccgacgcattagaactgaaagaagtgcctggcaaactgctggtaatgggcggcggtatcatcggtttagaaatgggtacggtttactcttctctgggcagtgaaatcgacgtggttgaaatgttcgaccaagttatccctgcggctgacaaagacgttgttcgcgtattcactaagcaaatcaagaagaaattcaacctgatcctcgaaaccaaagtgactgcggttgaagcccgtgaagacggtatctacgtttcgatggaaggtaagagcgcgccaactgagccagtacgttacgatgcagtgttagtggctatcggccgtacgccaaatggcaagctgatcgacgctgaaaaagcgggcgttaagatcgacgagcgtggtttcatcaacgtagacaagcaattacgtactaaaataccgcacatctacgctatcggtgacatcgttggtcaac

SEQ ID NO: 223146 - DNA, 985 bp, Unknown
  Bacterial polypeptide expressing nucleotide sequence isolated from the Sargasso Sea
tatgttgctgcaattaaagcttctcaacttggccttaaaacctttatgtattgaagaatcagttgataagaaaggcaatgctaattttggtggcacctgtttaaatgttggatgtattccttctaaagcccttcttgattcatctcacagatattatgaagctaacaagaatcttagtgaacatggcattgagattggtgaattaaaactagatcttagttcaatgatgaagagaaaagacgatattgttaataaacttacaggaggaattaatggattattttcctctaataaagttgaatcatgttctggaagaggaaagattattgatgcaaatacagttgaagttgtaaaagctgatggtactgttgagaaaattgaaactaaaaatataattatagctacaggatctaagcccatagagattccttcagcaccttttggtaaaaacattgtagatagtactggggcattaggttttactaaggtgccagagactcttggagtagttggtgctggaataattggtttagaacttggaagtgtatggtcacgacttggatctaaggtaactgtaattgaagctttagatgattttcttccgatggcagataaagatatttctaaagaatcttttaaagagtttaaaaaacaaggccttgatatcaagttaagttcatcagttacaaaatgctcagaacacaaagaatacgtttcagttagctatgaatgccaaggtaaagaaattgagaagaaatttgaaaaattaatagtcgcagtaggaagatatcccaactcctctggggttataggtgaaaaggtcaatatatcaattaataaaggcttcattgaagtaaatgaattttgtcaaacttcagtcccaaatatttgggctgttggtgatgttgtgagagggccgatgctcgctcataaaggaagtgaagaaggtattatggtcgcagaaagaatcgcagaaaaacaagct

SEQ ID NO: 223147 - DNA, 187 bp, Unknown
  Bacterial polypeptide expressing nucleotide sequence isolated from the Sargasso Sea
atgttagaaaaatttcaagcagttgttataggtggtggtccaggtggctatgtatgtgcaattagactttctcaattaggtttgaaaactgcatgcatagagtccagaggttctttggggggaacttgtttaaatgttggatgtataccttcaaagagtttactaaatttaactgaagaattgacaa

SEQ ID NO: 223148 - DNA, 808 bp, Unknown
  Bacterial polypeptide expressing nucleotide sequence isolated from the Sargasso Sea
atgtcagaaaaatttgatgtaacagtaattggtggtggccctggtgggtatgtctgcgcaataagactatcgcaactaggtctaaaaactgcatgcattgaatccagaggatcgcttggtggaacttgcttaaacgtagggtgtattccatcaaaaagcttattgaatttatctgaaaattttcacaaggcaaaaaattttgaaaagattggtatcgaaattggtgaaattaaattgaatcttggaaagatgatgaaaaataaagaaaaggctgtaactgttttaacaaaaggaatagaatttttgttcaaaaaaaataaggtttcttatttcaaaggcaaggggtcatttaaaagctcaaatgaaatagtagtttctggggatggaaaagaaacaattattaaaactggaaaagcaataatcagcactggttcagagcctgtatcaatacctggaatggaatttgatgaagaaaaaataatctcgtctactggagcattatccttagaaaaattaccaaaaaaaatggttgtagttggtggaggatatattggtttggaaatgggttcagtttggtcaagacttggaacagaagtagaagttgttgaatttctggatcatattacacctggtatggatcgtgagatatcaagtgaattcatgaagatacttaaaaaacaaggaataaaatttaaattaaatacaaaagttgaaaaaattacaaaaaatgaaaatggagttatcctagaggtaattgataaagaaaataagaaaaataatatagaagctgatgttgtccttatttcag

SEQ ID NO: 223149 - DNA, 142 bp, Unknown
  Bacterial polypeptide expressing nucleotide sequence isolated from the Sargasso Sea
atgagcgagaccagatttgacctgatcgtgattggcgcaggccctggcggctacgttgccgccatccgcgccgcacagctcggcatgagcgtggcctgcgttgaaaaacgcacgaccctcggcggcacctgcctgaatgtgg

SEQ ID NO: 223150 - DNA, 205 bp, Unknown
  Bacterial polypeptide expressing nucleotide sequence isolated from the Sargasso Sea
aatgatagataaatttcaagcagtagtaattggtggaggacccggaggttatgtttgcgcaataagattagcacaattaggccttaaaactgcatgtatagaatcaagaggttcactaggtggtacttgtttgaatgttggatgtattccttctaaaagtttattaatttatctgaagagtttcataacgcacaaagtttatcaa

SEQ ID NO: 223151 - DNA, 535 bp, Unknown
  Bacterial polypeptide expressing nucleotide sequence isolated from the Sargasso Sea
atggcagattttgatttaattgtaattggcgcaggtcctggtggatatgttgcggcaatcagaggtgctcaacttggaatgaaagttgcatgtattgaaaaagaaaaaacacttggtggcacgtgtctaaatattggctgtattccatcaaaagccctcttaaattcatcagaaaaatttatggaaatattaaaccatgctgaagaacatggtatctctactggtaaagttaatttagatctatcaaaactgatgcagcgcaaaaacaaaattgtcaaacaactgacatcaggtattggttttttatttaaaaaaaataaaattactcacctgcaaggtgcagcatcttttgttgataaaaaaacaatcaagttagcttcaagtgatggtgaaaaaaattactcagcaacaaactttattattgcaacaggatctagttccattgctattgatgcgatacccgttgatgaaaaacaaattgtaacatctactggagcactaacattagaagaggttcctaaatctcttttagtta

SEQ ID NO: 223152 - DNA, 656 bp, Unknown
  Bacterial polypeptide expressing nucleotide sequence isolated from the Sargasso Sea
aatgtcagaaaaatttcaagttgtagttattggaggtggaccaggtggttatgtgtgtgcaatcagacttgcccaattaggattaaaaactgcatgtatagagtctagagggtctttgggaggtacttgtttaaatgttggttgtatcccatcaaaaagcttacttaatctgtctgaagaatttcacaaagtaaaaagtttagcaaacaaaggtattgaagttggtgaagtaaaattaaatttagacaaaatgatgaaaagcaaagataaagctgtgacagttcttacaaaaggtgttgagtttcttttgaaaaaaaacaaagttacttactttaaaggacacggaagttttaaatctataaatgaaattttaattaaggatgataaaaataaagaaactatcatccaaactgaaaaaacggttattgctacaggatcagttccagtttcattaccaggaatagagatagatgagaaaataatcgtttcatcaacaggtgctttaaaattagagaaagttcctaaaaaaatggtagttgtaggtggaggctatataggattagagatgggatctgtgtggtcaagacttggggcagaggttcaagttgttgaatttttagatcatattacacctggaatggataaagaaatttctt

SEQ ID NO: 223153 - DNA, 820 bp, Unknown
  Bacterial polypeptide expressing nucleotide sequence isolated from the Sargasso Sea
aatggaagaaatgtttgatgtagtagttataggaagtggacctgctggttatgtatctgctataagatgctctcagctaggtcttaaaacgttatgcatagaggaatcgcatagtgacagtggcaagcctaattttggtggcacatgtcttaatgttggttgcattccttcaaaagctcttttagattcttcacatagatattatgaagcaaataaaaaactatctgagcacggaatacagatagaaagtttaaagttagacttaaaatctatgatgaaaagaaaagacgacatcgtaagtaaacttactggaggtataagtggtcttttttctgcaaataaggttgaatctatcataggtagaggcaagattatagatatcaatactgtagaagttacaaaatcagatggtagtacagaaacaatagatgctaaaaatattattgtagctacaggctctaagccaatagagataccatcagctaaatttagtaaacatatcgtagatagtactggtgcgctttgctttgactcagtccctaaaaagctaggtgtagttggtgctggtattattggactagaactaggaagtgtatggtctaggcttggttctgaggtaactgttttagaagcgcttgatgaatttctcccaatgacagatcatgacatttcaaaagaatccttaaaagaatttaaaaaacaggaccttgatataaaattgggttctaaggttactagtacaaaggaattaaaaaattcagttaaggtcaaatttgaaagtaatgatcaagaaaatgagatggaatttgataaattaatt

SEQ ID NO: 223154 - DNA, 930 bp, Unknown
  Bacterial polypeptide expressing nucleotide sequence isolated from the Sargasso Sea
tggtggactggaggttatgtttgtgcaattagactttctcagcttggaattattacagcctgcatagaatccagaggaactctcggaggcacatgcttgaatgttggatgtataccttcaaaaagtttattaagcctttcagaaaactattcaaaagctaaaaatttttcaaacttagggatagaaataggaaatattcagttaaatcttcaaaagatgatgaaaaataaagataaagcagtaactattttaaccaaaggagtagaatttttatttaaaaaaaataaaattactcactacaaaggaataggtagttttaaatcttccaatataatttcgataaatgatggaaagagtgtaattgaggtagaaacagaaaatacaataatttgtactggatcagaaccaattgcattgccaaatattaattttgatgaaaaaacaatcatttcatctactggagctctatctttaaatgctgtcccaaaaaaaatggttgtagttggaggaggttatataggtttagaaatgggatcagtgtggtcaagactaggaacagaagttcacgtagtcgagtttttagacaatattactccgggcatggataaagaaatttctatagaatttatgaaaattttgcaaaaacaaggaattaactttcatttacaaacaaaagtagattcaataaaaaaaaataataaagaagcaattgttgaaaccacaggaaaagatggaaaaaaaaacaattttaactgcgatgtagttctcgtatcagtaggtcgaagaccttacacagaaaatctaaacttagactcagtaggagttattttagacgataaaaaaagaattaaagttgataaaaattttaaaactagtgtagataatatttatgcaattggtgatgtaattaaaggaccaatgttagctcat

SEQ ID NO: 223155 - DNA, 268 bp, Unknown
  Bacterial polypeptide expressing nucleotide sequence isolated from the Sargasso Sea
gatgaagaacgaacacaccacactgctcatcatcggcggcggcccggggggctacgtcgccgcgattcgcgccggccagctcggcattccgaccgtgctcgtcgagcgcgaccggctcggcggcacgtgcctgaacatcggctgcattccgtcgaaggcgctgattcatgtggccgacgcattcgaacaggcgtgcggccacgcgggcgaaggcgcgatcggcatccgcgtgcgcacgcccgagatcgacatcgcgaaaagcgtcgcc

SEQ ID NO: 223156 - DNA, 502 bp, Unknown
  Bacterial polypeptide expressing nucleotide sequence isolated from the Sargasso Sea
tgcgcgacggctgtgccgaacgtgtacgcaatcggcgacgtggtgcgtggcccgatgctcgcgcacaaggctgaagatgaaggcgtgctggtcgctgaaatcatcgacggtcagaagccgcatatcgactacaactgcattccgtgggtgatctacaccgaaccggaaatcgcgtgggtcggcaagacggagcagcaactgaaggccgaaggccgcgagatcaagacgggccagttcccgttcatggcgaacggccgcgcgctgggcatcaacaaggcggatggtttcgtcaagatgatcgccgacgcgaagaccgacgaactgctcggcgtgcatatcatctcggcgaacgcatcggatctgatcgcggaagccgtggtggcgatggaattcaaggcggcttcggaagacatcggccgtatttgccatccgcacccgtcgctgtcggaagtcatgcgcgaagcggcactcgccgtggacaagcgcccgctgaacatgtaat

SEQ ID NO: 223157 - DNA, 544 bp, Unknown
  Bacterial polypeptide expressing nucleotide sequence isolated from the Sargasso Sea
atggacaataattttgatgtaatcgttatcggatcaggacccggtggttacgtatgtgcaataagatctgctcaattaggattaaagacagcttgcgtcgaatcacagaaaaccttgggtggcacttgtctaaatattggctgcataccatcaaaaagcttattgcactcttcagaaatataccacaaatcaatgaaagaatttggcaatcttggaatcgaatttggtaatataaaactaaacttatctaaaatgatgagtaataaaaataaatcaataataactcttactaaagggatagaatttttatttaaaaaaaataaagttactcacctaaagggaaaaggttcaatatcaggaaaaaattcagtaactgtatttgacgattctggtaaaaaaaataattataaagctaaaaatattgttatagctacaggatctgttccaagttctttaccaaatataaaaatagatgaaaaaactgttgtttcatcaacgggagcattatcttttaataaagttcctaaaaaactagttttatagg

SEQ ID NO: 223158 - DNA, 406 bp, Unknown
  Bacterial polypeptide expressing nucleotide sequence isolated from the Sargasso Sea
atgtcagaaaaatttgatgtaacagttattggtggtggtcctggtggatatgtttgtgcaattagactatctcaattaggtttaaaaacagcatgcattgagtcaagggggtctcttgggggcacatgtttaaatgttggatgtattccatctaaaaatttactcaatttttcagagaattttaacaaagctaaaaactttgaaaaaattggaattgaaattggagaagttaagctgaacttagataaaatgatgaaaaataaagaaaaagcagttacagttttaacaaaaggtatcgaatttttatttaagaaaaataaagtcacatattttaaaggcacaggttcatttaaaggtgtaaatgaaatatcaattttagatgaaggtaaagaaacgacagtcaatc

SEQ ID NO: 223159 - DNA, 313 bp, Unknown
  Bacterial polypeptide expressing nucleotide sequence isolated from the Sargasso Sea
atggaagattttgatctaattattataggtgcaggaccaggtggttatgttgcttcaattagagctgcacaacttggaatgaaagttgcttgtattgaaaaagaaacttcacttggaggtacttgcttgaatattggatgcattccttccaaagctctattaaattcttctgaaaaatttgtagaaatatcaaatcatgcagctgagcatggaattaaaacctctaaagtagatttagatttagatatattgatgcaaagaaagactaagattgtaaaaaaattaactactggaataggcttcttattaaaaa

SEQ ID NO: 223160 - DNA, 265 bp, Unknown
  Bacterial polypeptide expressing nucleotide sequence isolated from the Sargasso Sea
atgaagaacgaacacaccacactgctcatcatcggcggcggcccggggggctacgtcgccgcgattcgcgccggccagctcggcattccgaccgtgctcgtcgagcgcgaccggctcggcggcacgtgcctgaacatcggctgcattccgtcgaaggcgctgattcatgtggccgacgcattcgaacaggcgtgcggccacgcgggcgaaggcgcgatcggcatccgcgtgcgcacgcccgagatcgacatcgcgaaaagcgtcg

SEQ ID NO: 223161 - DNA, 838 bp, Unknown
  Bacterial polypeptide expressing nucleotide sequence isolated from the Sargasso Sea
gtccgtgatcggcaagctgaccggcgggctggccggcatggccaaggcacgcaatgtgcaggtcgtgcgtggcgtcggtgcgttcctggacccgaaccacctcgaagtgcaactgacggacggcgacggcaaggcaacgacgggcgagaagaaagtcatccgttttgccaaggcgatcatcgctgcaggcagcgaagccgtgaagctgccgttcattccggaagatccgcgcatcgtcgactcgacgggcgcgctggaactgcgcgaagtgccggccaagatgctggtcatcggcggcggcatcatcgggctggaaatggccacggtgtatagcacgctcggcgcccggatcgacgtggtggaaatgctcgacggcctgatgcagggcgctgaccgcgacctcgtcaaggtgtgggacaagatgaacaagggccgcttcgacaaggtcatgctcaagaccaagacggtcggggtggaagccaagccggacggtatttacgtcaagttcgagggcgaagccgcaccagcggagccgcaacgctatgacatggtgctggtggcagtgggccgcgcgccgaatggcaagcgcatcggcgcagaaaaggccggcgtggcagtgacggaccgtggcttcatcgacgtggacaagcagcagcgcacgaatgtgccgcacattttcgcgatcggcgacatcgtcgggcagccgatgctggcacacaaggccgtgcacgaaggccatgtggcggcggaagccgcgcacggcgagaaggcatacttcgacgccaagcagattccgtcggtcgcctataccgatccagaagtggcttgggcagggctg

SEQ ID NO: 223162 - DNA, 189 bp, Unknown
  Bacterial polypeptide expressing nucleotide sequence isolated from the Sargasso Sea
aatggctgattatgatttgatagttattggtgcagggccaggtggttatgttgcagctattcgggcagctcaactaggaatgaaagtagcatgtattgaaaaagaagcaacattaggaggaacatgtttaaatataggatgcatcccatctaaagccttattaaattcatctgagaaatatatagaatt

SEQ ID NO: 223163 - DNA, 577 bp, Unknown
  Bacterial polypeptide expressing nucleotide sequence isolated from the Sargasso Sea
atggcagattttgatttaattgttattggagctgggcctggaggatatgttgcggctatcagagcttcgcaattagggatgaaagtcgcatgtgttgaaaaggaaaaaacacttggaggtacttgcctaaacattggctgtattccctcaaaagctctattgaattcatcagaaaaatttgcagaaatatcaaaacatgcagaagagcatggtatctcaactggaaaagtttctctagatttggcaaaacttatgcaacgtaaaaacaaaatcgtaaaacaattaacttctggaattgggtttttatttaaaaagaataaaattactcacatacaaggatctgcatcttttttggacaccaaaacaataaaagtatcttcaagtgatggagagaaaaattataaagcaaaaaaatatattatcgcaactggatccacttctattgctattgatgcaatacccattgatgaaaaaaaaattgtaacatcaacaggtgcattagcattagaatcggtacctaaatcacttcttgtaattggtggtggttatataggattagagatgggctccgtatgaa

SEQ ID NO: 223164 - DNA, 737 bp, Unknown
  Bacterial polypeptide expressing nucleotide sequence isolated from the Sargasso Sea
cggtgcggaccgtgacttggttaaacctctggagcgcatgctcggaaaatcgcttgaggctgtttacactgggactagtgtcactcggatagaacccaacgaagatggtctgcttgttcatttcgatggcggtaaggcgcctgccacttcgattttcgataacgttttagtgtccgtcggcagaaaaccaaatggtgaccagatcggggcggagaaagcaggagttaaagttggtacgaatggttttatcgaggtagatagccagcagcgtactaatgtgccaaatatttttgccattggagatattgtcgggcagccgatgctagctcataaggccgttcatgaaggcaagatcgcggctgaagtaatagctggccacaaagtggcgtttgatgcgcgagtcataccttcggttgcgtatactgaccccgaggttgcctgggtgggaatgactgaaagagaagccaaagagagaggattggctatagggaagggcgttttcccttgggccgctagcggacgttctctgtcgctaggtcggaatgaaggcctgacaaagttaatcttcgaggaaaaaaccgatagaattattggtgctggtatagttggtcccgctgcaggggatctgattgctgaagtagcgttagcgatagaaatgggttgcgatgcagaagatctcgctttaactattcatccgcacccgactctttcggagactgtggctatgggtgccgagg

SEQ ID NO: 223165 - DNA, 439 bp, Unknown
  Bacterial polypeptide expressing nucleotide sequence isolated from the Sargasso Sea
atgacagaagaatttcaagcagtagttataggtggtggaccagggggatacgtttgtgcaataagattagcacaactgggattaaaaacagcatgtattgagtctagaggatcattgggtggaacttgtttgaatgtagggtgtatcccatcaaaaagtttactaaatttatctgaggaatttcataaggtaaaaaatttatcaaataaaggtatagaaattggagcagttaaactaaatcttgataaaatgatgaagagtaaggacaaagcagtgactgttcttacaaaaggagtagagtttttatttaaaaaaaataaagtaacttatttcaaaggtcatggaagttttaaaaataaaaatgaaatttcaattttagatgatcaaaacaaaacaaaagttataaaatcagaaaaagtaattatagctacgggttcag

SEQ ID NO: 223166 - DNA, 508 bp, Unknown
  Bacterial polypeptide expressing nucleotide sequence isolated from the Sargasso Sea
aatgtcagaaaaatttcaagctgtagttattggaggtggaccgggtggttatgtgtgcgcaatcagacttgctcaattaggattaaaaactgcatgtatagaatctagaggatctttgggaggtacttgtttaaatgttggttgtatcccatcaaaaagcttgcttaatctgtctgaagaatttcataaagtaaaaagtttagcaaacaaaggtattgaagttggtgaagtaaaattaaatttagacaaaatgatgaaaagcaaagataaagctgtaaccgttcttacaaaaggtgttgagtttcttttgaaaaaaaacaaagttacttattttaaaggacagggaagttttaaatctaaaaatgaaattttaataaaggatgataaaaataaagaaaccatcatccaaacagaaaaaacagttattgcaacaggatcagttccagtttcattacctggaatagaaatagatgagaaaacaattgtctcatcaacaggtgctttatag

SEQ ID NO: 223167 - DNA, 635 bp, Unknown
  Bacterial polypeptide expressing nucleotide sequence isolated from the Sargasso Sea
catggaaacaaaaagatgtaaagttttggtaataggtgcaggacctggtggatatgttgctgcaattaggtcagggcaactaggaatggatacaataatagtagaaggagaaagagcaggaggaacttgcttaattaggggatgcatcccctcaaaagcaatcattcatgctgcacataaatttcattcattaggaaaacattctactgaaaaggggcacatgggaattactttaccaagtccagcagaattaaatttagctaatctaatttcttggaaagaagacattgtagataaattaaacaaaggagttgaaggattattaaaagcagcaaaagtaaatcttgtttctggatgggctaaatttattgatgcaaaaacatgcatagtttctaattcaaacggagaaactagaattgaagcagaacatgtaattttagcaaatggttctattccaatcgagttaccattcatgccattcgatgagaatgtaatttcaagtagagatgctttagaattgaaagagttaccaaaacacctagttgttgttggcggaggctacattggacttgagttaggaattgcttacaaactattaggatcagaagttacaattattgaagcaatggatagtg

SEQ ID NO: 223168 - DNA, 112 bp, Unknown
  Bacterial polypeptide expressing nucleotide sequence isolated from the Sargasso Sea
gatggacaaatttgacgtcaccgtgattggttcaggcccagggggttatgtggctgccattcgatgtgcacaattaggaatgaagaccgcaatcattgaacgcttttcaacc

SEQ ID NO: 223169 - DNA, 511 bp, Unknown
  Bacterial polypeptide expressing nucleotide sequence isolated from the Sargasso Sea
tatggaagattttgatttaatagtaattggtgcgggacctggcggatatgtagctgcaatcagagcagctcaacttggaatgaaggttgcttgtatagaaaaagagccatcacttggtggaacttgtttgaacattggatgcataccttctaaagcattattaaattcatctgaaaaatttgttgaaatatcaaatcatgctgcagagcatggtataaaaacatcaaagatagatttagacctaaatgttttgatggatcgcaaaactaagattgtaaaaaaacttacaacagggatcggttttttatttaagaaaaataaaataacgcatattcctggcatggcttcatttgtagataaaaatactatttctattacaaatgaaaaaaatgaaattactgccagtgctaaaaattttattatcgcaacaggatcatcttcggttgagataccaaatattcctgttgatgaaaaacaaatagtatcttcaacaggtgctctttctctatct

SEQ ID NO: 223170 - DNA, 205 bp, Unknown
  Bacterial polypeptide expressing nucleotide sequence isolated from the Sargasso Sea
tatgagcgaacaatttgatttattagtaattggcggtggaccaggaggatatgtttgtgccatacgcgcagctcaattaggtttaaagacaggttgtattgagtcgagaggaacactaggaggaacttgtcttaatgtgggatgcattccatctaaaagtcttcttaatttatctgatatgtataaaaaggcacaaaaagactat

SEQ ID NO: 223171 - DNA, 856 bp, Unknown
  Bacterial polypeptide expressing nucleotide sequence isolated from the Sargasso Sea
ttcattaagtgaagtacctaataggctagttgttgttggaggcgggtatatcggtcttgaattaggctctgtttggtcaagattagggtctgaagttacagttatagaatatttagatagaattactcctggaatggataatgaggtttcagcagctttacaaaaaatattagcaaagcaaggattaagtttttctttaaattctcaagtagtatctgtgactgaaactggttcaaatgtctctattgcagtaaaaaatagagaaaataatgaggaagaaaatattgaggctgattatgttttggtttctaccggtaggaagccatatatagaaaatttatttagtgatggaattgatattgaaaaaactgaaaatggatttatcaaaactgactctcatttaagaacaaatttggacggtatttgggccattggtgatgttgtcgaaggaccgatgcttgctcataaagccgaagaggaaggaattgctgtagctgagcttatcgcaggtaagccaggtcatgttaattatgatataattccaagcgtgatttatacaaatccagaggttgcatcagttggtatgacagaggaacagctcaaagagaaatcgatcgactattctattggaaaatttccttttatggccaatggaagagcaaaagttaataatacaaccgagggatttgttaaaattttatcatcgacagacacggatcaaattttaggtgttcacataattggtgaccaagcaggtaatatgattggtgaggctgcagtagctatggaatttgaggctacatctgaggaccttgccagaaaatgtcatgcccatcctactctttcagaagccata

SEQ ID NO: 223172 - DNA, 471 bp, Unknown
  Bacterial polypeptide expressing nucleotide sequence isolated from the Sargasso Sea
tatggaaaataattttgatgtaattattattggtggaggccctggtggttacgtctgtgctattagggcggcgcaattagggcttaaaactgcatgtgtggagtcaagaggcgctttgggaggcacttgtttaaatgttggatgcattccatcaaaaagtttattaaatttatctgaaaattttcataaagctaaaaaagatttcaatcagcaaggtatagagattgaaggcattaagcttaatattgaaaaaatgatgtctaataaaaataagtctgttcaagtccttactaaaggagttgaatttttatttaaaaaaaataaagttacttatttaaaaggaaagggtgttcttttatcaaaaaatgacgtcgtggtttatgataacaataaaaaaacaaattataattctaagaatattgtaattgcaaccggctcagaagtaacatctttacctggcattgaaatcga

SEQ ID NO: 223173 - DNA, 286 bp, Unknown
  Bacterial polypeptide expressing nucleotide sequence isolated from the Sargasso Sea
atgtcagaaaaatttcaagctgtagttattggaggtggaccgggtggttatgtgtgcgcaatcagacttgctcaattaggattaaaaactgcatgtatagagtccagagggtctttgggaggtacttgtttaaatgttggttgtatcccatcaaaaagcttacttaatctgtctgaagaatttcacaaagtaaaaagtttagcaaacaaaggtattgaagttggtgaagtaaaattaaatttagacaaaatgatgaaaagcaaagataaagctgtaaccgttctta

SEQ ID NO: 223174 - DNA, 514 bp, Unknown
  Bacterial polypeptide expressing nucleotide sequence isolated from the Sargasso Sea
atgaataaaaataattttgatgttgttgttattggatctggtccgggtggatatgtatgtgccattaggctcgcccaattaggctttaatactggtatcattgaaaaatataactctttaggtggaacctgtttaaatgtaggttgtattccatcaaaatctcttttagactcctcacaccattatgaagatattattaaaaatgctgtaagtcatggtatagaaattaaaggaaaagttaatttaaatttcaataaaatgattgatagaaaaaacagtgttgtaaaccaaactgttaaaggaattgattttttaatgaataaaaataaaatatctgtatttaatggtaaggctagttttattgataaaaataatataaaaattgaaggatgtaatgatattattaattttaaaaaatgtgtaatagctactggttcaaaacctatatctcttccttttattaaggttgataaaaagagaattattacatcaactgaagcactctctcttaaag

SEQ ID NO: 223175 - DNA, 528 bp, Unknown
  Bacterial polypeptide expressing nucleotide sequence isolated from the Sargasso Sea
aatgtcagataaatttcaagcagtagtaattggaggaggccctggaggttatgtatgtgcaattagacttgcacaattgggtttaaaaacagcctgtatagagtcaagagggtctcttggtggcacttgtttaaatgttggatgtattccatcgaaaagcttattaaatttatcagaagaatttcataaagtaaaaaatttatctaataaaggtattgaagtaggtgaagtcaaactcaatttaagcaaaatgatgaaaagtaaagaaaaagcggtgacagttttgacaaaaggtgttgagtttttactaaaaaaaaacaaagtgacttattacaaaggtgttggaagttttaaatctaaaaacgaaatttctataaaagattcaaataacaatgagactttgatattttctgagaaaataataattgcaactggttcagtcccagtggctttaccaggaataagttttgatgaaagaacaatagtatcatcaacaggtgtattaaaattagataaagttccaaaaaa

SEQ ID NO: 223176 - DNA, 586 bp, Unknown
  Bacterial polypeptide expressing nucleotide sequence isolated from the Sargasso Sea
tatgagcgaacaatttgatttattagtaattggcggtggaccaggaggatatgtttgtgctatacgcgcagctcaattaggtttaaagacaggttgtatagagtctagaggaacgctaggaggaacttgtcttaatgttggatgcattccatctaaaagtcttcttaatttatcagatatgtataaaaaggcacaaaaagattataacaatctcggtattgaagttggagaagtaaaattaaatcttaaaaaaataatgatgaataaaagtaaatcagttcaagttttaacaaaaggtgtagagtttttatttaaaaaaaataaagttacgtacattaaaggtaagggagttttgttttcaaaaaatgatgtagttgtatacgaaaatggaaaaaaaacttcttataaatcaaaaaatattgttatagctactggttcatcatcaagttctgttccaggaattgaaattaatgaaaaaaatataatatcttcaacgggggctatatctttagaaaaggttccaaaaaatctagttgtaattggaggaggttatatcggtcttgagatggggtcagtatggtctaga

SEQ ID NO: 223177 - DNA, 436 bp, Unknown
  Bacterial polypeptide expressing nucleotide sequence isolated from the Sargasso Sea
atgtcagaaaaatttcaagctgtagttattggaggtggaccgggtggttatgtttgtgcgatcagacttgctcaattaggattaaaaaccgcatgtatagagtctagagggtctttaggaggcacttgtttaaatgttggctgcatcccatcaaaaagcttacttaatctatctgatgaatttcataaagtaaaaagcttagcaaataaaggtatcgaagttggtgaagtaaaattaaatttaaacaaaatgatgaagagtaaagataaagcagtaacagttctcactaaaggtgtcgaatttcttttgaaaaaaaataaagttgcttattttaaaggacatggaagttttaaatctaaaaatgaaattttaataaaggatgataaaaataaagaaactatcatccaaacagaaaaaacagttatgcaacaggatc

SEQ ID NO: 223178 - DNA, 875 bp, Unknown
  Bacterial polypeptide expressing nucleotide sequence isolated from the Sargasso Sea
ctatccaaaatgaaggaatggaaaaataacatcattggaggattgaccgggggattatcgggattggcgcaacaaagaggggttgatgtagttcatggtacagcaaaattttcttccaaaaatgagatagaggtcaaccatgaaatcgattctcaaagaatttcatctgatcagttcatcattgctgtagggtcagagcctgctgagctgagttttttgccagatgactcaagaatcattgactccactggagcattggaacccgatcagatacctaaaaatattctaatcatcggaggtggaataattggtcttgagatggccacaatatactcggcccttggtagcgaggtcacaattgttgaattaaccaaacaactgatgccaggaacagaccctgatcttgtgagaccgctcgaaaaaatcctcaataagaagtgcaaaaaaatcatgaaatcatctcaagtcacctctgcgactgcgtctgatgaagggattagcgtatcctttaaacaagatggtgaagaatccagcgaaatgtttcaaaatgtacttgttgcagttggacgaaaatctaacggatctctccttggtttgagtgagattggcgtgaatgtagatgaaaaaggaatcattggtgtcgataagcaattcagaaccactgtggaatcaatatttgcaatcggcgatgtgatcggtgacccaatgttagcccataaggcaagccatgaaggcaagattgctgctgaggtagcagcagggcataaatccacaaatgatatcaggtgtattccatctgttgcctatactgacccagaggttgcctgggttggtttttcagaagaagaatgcaaagcaaaaggaatagattatgg

SEQ ID NO: 223179 - DNA, 816 bp, Unknown
  Bacterial polypeptide expressing nucleotide sequence isolated from the Sargasso Sea
aatgtcagaaaaatttcaagcagttgttattggtggtggacctggcggatatgtttgtgcaataaggttagcacaattaggattaaaaacagcatgcattgaatcaagaggtactttaggaggtacttgtttaaatgtagggtgtattccatcaaagagtttactaaatttgtctgaggaatttcataaagtaaaaggtttagcaaagaaaggcatagaaattggaaatgttaaattgaatcttgataaaatgatgaagagtaaagataaagctgtcactgttcttacaaaaggtgttgagtttctattgaaaaagaacaaagttacatattttaagggcaaaggtagctttaagtcaaaaaatgaaattttaattaaagacaatcaaaataaagaaacattaataaaaacagaaaaaacagtgatagcgacagggtcagttcctgcctcattaccaggaatagtaatagatgaacaaataattgtatcttctacaggagctttaaagttagataaagttccaaagaaaatggtggtagtaggaggaggatatattggtttggaaatgggatctgtatggtcaagattaggttcagaggttcacgttattgaatttttagatcatattactcccggtatggataaagaaatttcttcagaatttatgaaaatcttaaaaaaacagggaataaaatttaatatgcaaaataaagtagaaagaattaaaaaaaataattcgggagcagttgttttaactgttgataaagatggaaaacaaaataatttagaatgtgatgttgttttaatttctgttgg

SEQ ID NO: 223180 - DNA, 688 bp, Unknown
  Bacterial polypeptide expressing nucleotide sequence isolated from the Sargasso Sea
tatgttagaaaaatatcaagtagttgtaattggaggcggccccggagggtatgtttgtgcaataagattatctcaacttggatataaaaccgcatgtatagatcacaatgatactcttggtggcacatgtttaaatgtaggatgtattccatcgaaaagtttattaaatctttcagaaaaatttcataatgcaaaaaatttatctgaaaaaggaattgagattggagaaataagactaaatttagaaaaaatgatgaaaaataaagaaaaagcagtttctacattaacgaaaggtgtagaatttttattaaaaaaaaacaaagtttttattattaaaggtcatgcaagttttaaagatgtaaacaaaattttaataactgataaaaataaaaatgaaaaaactattgaaacagaaaaaacagttatttgtagtggttcagagccaatatctttaccaaaagtaaattttgatgagaaaagaattttatcatctactggggcactatctttaaaatcggtaccaaaaaaaatggtaataattggtgcaggatatataggtttagaaatgggatctgtttggtctagacttggtagcgagattcatataattgaatttcttgatcatattactacacaggtatggatagtgaaatttcaaaaagagtttttaaagattttacagaaacaa

SEQ ID NO: 223181 - DNA, 865 bp, Unknown
  Bacterial polypeptide expressing nucleotide sequence isolated from the Sargasso Sea
aaattagttgaggtaaatgatgtgtctggtaaaacagtacaatacaaggcagatcatattatcattgcagcaggttctgttccaataaatatacctccagccccccttgttgatgatattgtagttgattctacaggtgcacttgagtttaaaaaagtacctccaagattaggcgtcattggtgctggtgttattggtttagaacttggtagtgtttgggctaggttaggttctaaagtcactgtgcttgaggctttagatgagtttttacccgcagcagataaaacaatttcaaaagaaacttttaaaacatttaaaaaacagggtttggatataaaactaggtactcgagtaacgggttcagaagttacaggtcaaggtgatgatagacaagtaaatgttaaatttactgattcatctggcacgacagaaatggtctttgatcgtttaattgtttgtgtaggtagacggccactaagtgaaaatttattatcacctgattcaggtgtcaccttagatgagaggggcttcatatttgttaatgagcaatgtgaaactgaggtcagggatatatatgctgttggggatattgttaggggtccaatgttggctcataaagcctctgaggaaggggtgatggtcgctgagagaattgctggtaagaaaccacagattaactatgaaaacattcctaatgttatttatacacaccctgaaattgcttgggttggtaaaactgagcaagaacttacagctgctggaatagaatgtaatattggaatctttccattttctgcgagtggacgtgctatggcggctaatgaaacaacgggtatggttaaaataattgctgatgctaaatcag

SEQ ID NO: 223182 - DNA, 290 bp, Unknown
  Bacterial polypeptide expressing nucleotide sequence isolated from the Sargasso Sea
tatggataattttgacttaatagtgataggtggaggacctggaggatatgtttgtgcaattagagcagctcaattgggattaaaaactgcatgtatagagtcaagaggggctcttggtggaacttgcttaaatgtgggttgtataccatcaaaaagtttgttgaacttatctgaaaattttcacaaagcaaaaaaagatttcaatcaacaaggaatagaaatagagggtataaaacttaatattgaaaaaatgatgtctaacaaaaacaaatccattcaagtacttacta

SEQ ID NO: 223183 - DNA, 190 bp, Unknown
  Bacterial polypeptide expressing nucleotide sequence isolated from the Sargasso Sea
atgtcagaaaaatttcaaacagtagtaattggtggaggacccggaggttatgtttgtgccattagactgtcgcagcttggaataaaaactgcatgcatagagtcgagaggcaccttaggcggaacttgtttaaatgttggatgtattccttcaaaaagtttacttaatttatctgaatcttatagtagat

SEQ ID NO: 223184 - DNA, 680 bp, Unknown
  Bacterial polypeptide expressing nucleotide sequence isolated from the Sargasso Sea
aatggataactattttgatgttattgtagttggggcaggtccaggaggatatgttgcagcaataagatctgctcaattgggacttaaaactgcatgcgtagaatcaagaaaaacattgggtggaacctgcctaaatgttggatgtataccttcaaaaagcttactaaatgcgtctgaaatgtatcataaggctcaaaaagaatttaaaaatctaggaattgaagttacagatttaaaactgaatttatctagaatgatggctaacaaaaataaatcagttctaactttaacaaaaggtgtagaatttttgtttaaaaaaaacaaaatttctcatttaaaaggcaagggttcaatattaaataaaaatacagtagtagtgatagatgaagcaaaaaaaaaggtcacttataaagccaaaagtattataattgcaacaggctcaacccccacatctttaccaggaataaaaattgatgaaaaaagcattgtttcttcaacaggagcgctaatgtttgataaagcgccaaaaaatttaattgttataggaggtggttatattggtctagaactttctagtgtttggaaaagattgggctcgaatgttatcgttattgaatatttagatcatattatttctggaattgacaaagatatatcaaatgaatttttaaaaattctta

SEQ ID NO: 223185 - DNA, 565 bp, Unknown
  Bacterial polypeptide expressing nucleotide sequence isolated from the Sargasso Sea
atgttagataaatttcaaatagtagtaattggtggcggtcctggaggttatgtttgtgctataagacttgcacaattaggttttaaaacagcatgtattgagtcaagaaatacccttggagggacttgtttaaatgttggctgtattccatcaaaaagcctgctcaatttatctgaagaatttcataaagttaaaaatctttcttcaaaaggaattgaaataggagaagtaaaattaaatttatcaaaaatgatgaaaagtaaagataaggcagttacagtattaactaaaggagttgagtttttatttaagaaaaataaagttacctatattaggggtactggtagctttaaatcaacaaatgaaattttaattaaagatgataaaaataaagaaactacaatacaaactgagaaaacaataattgccactggttcattgccaacaactttatctggaattgaatttgatgaaaaaataattgtttcttcaaacaggtgctctaaatttaaaccaagtcccaaagaaaatgattgtagtgggtggaggctatatagggcttgaa

SEQ ID NO: 223186 - DNA, 518 bp, Unknown
  Bacterial polypeptide expressing nucleotide sequence isolated from the Sargasso Sea
gatgtcagaaaaatttcaagctgtagtaattggtgggggtcccggcgggtatgtatgtgctattaggttagcacaattaggcctaaaaacagcctgtatcgagtcaagaggatcactaggtgggacttgtttaaatgtaggctgtattccatcaaaaagtttactaaatttatctgaagagtttcacaaagttaaaaatttatcaaataaagggattgaagttagtgaggttaaattaaatctcccaaaaatgatgaaaagcaaagaaaaggcagtcacagttttaacaaaaggggtagaatttttactaaagaaaaataaagtaacttactttagaggaattggaagttttaaatcaaaaaaagaaattttaataaaagataatacaaacaaagaaataacgattcaaacagaaaaagttattattgccacaggatcagttccagtgtctttaccaaatattaaatttgatgagaaatcaattgtttcatcaacaggagctttgaatttagaaaaag

SEQ ID NO: 223187 - DNA, 853 bp, Unknown
  Bacterial polypeptide expressing nucleotide sequence isolated from the Sargasso Sea
gatttaatagtaattggtgcgggacctggcggatatgtagctgcaatcagagcagctcaacttggaatgaaggttgcttgtatagaaaaagagccatcacttggtggaacttgtttgaacattggatgcataccttctaaagcattattaaattcatctgaaaaatttgttgaaatttcaaatcatgctgcagagcatggcataaaaacatcaaagatagatttagatctaaatgttttgatggatcgcaaaaataagattgtaaaaaaacttacaacagggatcggttttttatttaagaaaaataacataacgcatattcctggcatggcttcatttgtagataaaaatactatttctattacaaatggaaaaaacgaaattactgccagtgctaaaaattttattatcgcaacaggatcatcttcgattgagataccaactattcctgttgatgaaaaacaaatagtatcttcaacaggtgctctttctctatctaaaataccaaaatcactcctagttattggtggtggatatattggactagagatgggatcagtatggagtagattaggctcaaaggtaacagttgttgaagctcttgacagaattgttccaactatggatggtgaaattgcaaaagagtttatgaaaatgttaactaaacaaggattagaatttaaattatctcataaagttagttctgcaaaatctggcaagtctggtgtagatgttgagatggaaacatcagataaaaagaaaataaaagaaaacttcgaaatagttttaatgtcagtaggaagaaaaccaaacacagagggactgggtctcgaaaaattggtattaaattaac

SEQ ID NO: 223188 - DNA, 774 bp, Unknown
  Bacterial polypeptide expressing nucleotide sequence isolated from the Sargasso Sea
aatgtcagaaaaatttcaagcagtagttattggtggtggtccagggggctatgtttgtgcgattagattagcgcaattgggtcttaaaactgcgtgcattgagtctagaggttcactaggaggaacttgtttaaatgttggatgtattccctcaaaaagtttgttaaatttatcagaggaatttcataaagctcaacatttgtccaataagggtatcgaaattggtgaaataaaacttaatttaccaaaaatgatgaaaaataaagataaagcagttactgttttaactaaaggagtggagtttttattaaagaaaaataatgtgacttatttcaagggaattggaagctttaaatcaaaaaatgaaatctctatcaaagatgataaaaaaaatgaaatctctatccaaactgataaagtaattattgcaacagggtctgtaccagtatcactaccaggtgtcaattttgacgaaaaagttattgtttcttctacaggtgctttggaatttgagaaagtgcctaaaaaaatgattgttgtgggaggaggttatattggattggaaatgggatcagtttggtctagacttggcacagaagttcatgttatcgaatttctagatcatataactcctggtatggataaagaaatttcaaaggagtttatgaaaattctaaagagacaaaaaattaattttcatatgcaacataaagttgaaaagattgaaaaaaataatacaggtgttattgtatccacgaaagataaagatggtac

SEQ ID NO: 223189 - DNA, 196 bp, Unknown
  Bacterial polypeptide expressing nucleotide sequence isolated from the Sargasso Sea
aatggaaaataattttgatgtcattgtgataggagcaggtcctggaggttatgtttgcgctattaaatgtgctcaattgggattgaaaactgcatgtgtagaagtaaataagactttaggtggcacatgcttaaatgtaggttgcataccctcaaaaagtttacttaattcttcggaaatatatcataaagcatca

SEQ ID NO: 223190 - DNA, 196 bp, Unknown
  Bacterial polypeptide expressing nucleotide sequence isolated from the Sargasso Sea
aatgtcaaataattttgatctcatagtaattggagcgggacccggaggatatgtttgcgcaattagagctgcacaattaggattaaaaacggcatgcattgaatcccgcaagacattaggaggcacatgtttaaatgttgggtgcataccatcaaaaagtcttcttaatgcatcagaattgtatcataaggcacaa

SEQ ID NO: 223191 - DNA, 895 bp, Unknown
  Bacterial polypeptide expressing nucleotide sequence isolated from the Sargasso Sea
gcagttattggtggtggtccaggaggctatgtttgtgctattagattagcacaattaggtttaaaaacagcctgcatagagtctagaggatcattaggagggacttgtcttaacattggatgtattccttctaaaagtttattaaacttatccgaagaatttcataaggttaaaaatttatcaaataaggggatagaagttggtgaagtaaaattaaatttaagcaaaatgatgaagagcaaggataaagctgtaacagtattaactaaaggtgtagaatttctcttaaagaaaaataaagtcacttattttaaaggtcatggaagcttcaagtcaaaaaatgaaattaatattaaagatgctaataataaagaaacaataattagtgctgataaaatcataatagccacaggatcagttccagtttcacttcctggaattaattttgacgaaaaaataatattatcctcaacgggagctttaaaaattgagcaagttcctaagaaaatggttgttgttggtgggggatatattggcttagaaatgggctcggtttggtcaagactaggagcagatgtacatgtagtagaatttttagaacatattactcctggaatggatagagaaatttctcatgagtttatgaagattttaaagaaacaaggaatgaaatttcatatgcagcacaaagttgaaaaaattaaaaaaaataatatgggtgcaatagtttcaactgtagataaagatggaaataagacagattttgattgtgatgttgttttaatttcagttggtagaaagccaaataccaatggcttgaatattgaagcagcaggaattgaacttgataacaagcaaagaataaaaacagacaaaaattttaaaactaatcaaa

SEQ ID NO: 223192 - DNA, 448 bp, Unknown
  Bacterial polypeptide expressing nucleotide sequence isolated from the Sargasso Sea
atgagcaacgaaatcaaaactcaagttgtggtgttaggcgccggccctggtggatattctgcagcattccgcgctgctgacttaggtctggaagtgactttagttgaagcacgcagcacacttggtggtgtttgtttaaatgttggttgtatcccatctaaagctttattacatgtagcaaaagtgatcgacgatgctaaagaaatggcatcacacggtgtgacttttggtgctccacaaatcgatttagacaaaatccgcgcctggaaagacaaagttgtaggtcaattgactaacggcttagctggcatgtctaaaatgcgtaaagtcaaagtagtgactggttacggtaaattcactggccctaatactctggttgttggtgatactactattacttttgaaagtgccattatcgctgctggttctgagccagttgctctgccat

SEQ ID NO: 223193 - DNA, 778 bp, Unknown
  Bacterial polypeptide expressing nucleotide sequence isolated from the Sargasso Sea
acacggtgttgtgttcggcgagccaacaatcgatttagacaagttacgcagcttcaagcaaaaagtgatcagccagttgactggtggcttaggcggcatgtctaaaatgcgtaaagtaaacgttgttaatggcttcggtaaatttactggccctaacagcttagaagtgactgctgaagacggtactgtgaccgttgttaagtttgaccaagcgatcatcgctgcgggttctcgcccaatcaaactgccattcattccccatgaagacccacgtatttgggattcgaccgacgcattagaactgaaagaagtgcctggcaaactgctggttatgggcggcggtatcatcggtttagaaatgggtacggtttactcttctctgggcagtgaaatcgacgtggttgaaatgttcgaccaagtgatccctgcggctgacaaagacgttgttcgcgtattcactaagcaaatcaagaagaaattcaacctgatcctcgaaaccaaagtcaccgctgttgaagcccgtgaagacggtatctacgtttcgatggaaggtaagagcgcaccaactgagccagtacgttacgatgcagtgttagtggctatcggtcgtacgccaaatggcaagctgatcgacgctgaaaaagcaggcgttaagatcgacgagcgtggtttcatcaacgtagacaagcaattacgtacaaacgtaccgcacatctacgctatcggtgacatcgttggtcaaccaatgttggctcacaaaggcgtgcacgaaggccac

SEQ ID NO: 223194 - DNA, 339 bp, Unknown
  Bacterial polypeptide expressing nucleotide sequence isolated from the Sargasso Sea
aatggaagattttgatttaattgtaattggcgcgggacctggcggatatgtagctgcaatcagagcggctcaacttggaatgaaggttgcttgtatagaaaaagagccatcacttggtggaacttgtttgaacattggatgcataccttctaaagcattattaaattcatctgaaaaatttgttgaaatttcaaatcatgctgcagagcatggcataaaaacatcaaagatagatttagacctaaatgttttgatggatcgtaaaactaaaattgtaaaaaaacttacaacagggatcggttttttatttaagaaaaataaaataacgcatattcctgg

SEQ ID NO: 223195 - DNA, 610 bp, Unknown
  Bacterial polypeptide expressing nucleotide sequence isolated from the Sargasso Sea
atggatgaatttgatattatagtaataggtggtggtccaggtggttatgtagctgcgattagagcatcacaattaggaaagaaaactgcctgtatagagtcaaggggtgccttgggtgggacttgtcttaatatagggtgtataccttcgaaatccttattgcattcatctgaattattcaaaaaagccaattcggaatttaaatcgctaggaataaatactggtaatatatctatagatatttcaaaaatgatgcagcacaaaaaaaaatcagttgatactctaaccaaaggtgtagaatttctatttaaaaaaaataaggtcacttattttaaaggacatggaagtttcttagatactaatagtatagaaattaaattgaatgatgggacaaaaaaaagtattaaaggaaaaaacattgttgtcgcaacaggttcaagcgttttaagtttacctaatattactatagatgaaaaagtaatcgtatcttcaacaggtgcattatcattacctagaataccgaaaaaattgatagttataggaggtggatacatcggcctcgaaatggggtcagtctggtcgagacttggtgcacaagtgaagttataga

SEQ ID NO: 223196 - DNA, 475 bp, Unknown
  Bacterial polypeptide expressing nucleotide sequence isolated from the Sargasso Sea
atgtcagaaaaatttgatgtaacagtaattggtggtggccctggtgggtatgtctgcgcaataagattatcacaactaggtctaaaaactgcatgcattgaatccagaggatcgcttggcggaacctgcttaaatgtagggtgtattccatcaaaaagcttattgaatttatctgaaaattttcacaaagcaaaaaattttgaaaaaattggtatagaaattggtgaaattagattgaaccttggaaagatgatgaaaaataaagaaaaggctgtaactgttttaacaaagggaatagaatttttgttcaaaaaaaataaggtttcttatttcaaaggtaagggatcatttaaaagctcaaatgaaatagtagtttctggggatggaaaagaaacaattattgagactggaaaagcaataattagcactggctcagagcctgtatcaatacctggaatagaatttatgaggaaaa

SEQ ID NO: 223197 - DNA, 808 bp, Unknown
  Bacterial polypeptide expressing nucleotide sequence isolated from the Sargasso Sea
atgtcagaaaaatttgatgcaattgttataggtggaggacctggtggatatgtttgtgcaatcagactatcacaattaggtttaaatactgcatgtgttgagtctagaggagctttaggaggaacatgcctaaatgtcggatgtataccttcaaaaagccttttaaatttatcagaaaactatcaaaaagctaaaaactttggaaaaatgggcatagaacttggagagattaaattaaatttagataaaatgatgaaaaataaagataaagcggtgagtatattgacaaagggagtcgagtttctttttaagaaaaataaaattaaatattttaaagggactggtagttttaaaaataaaaatcaaattttagttatagataatgaaaaaaaggaaacaattttagaaacaaaaaatataataatttgtactggatctgaaccagtttcgttgccaaatataaaatttgatgaagataaaatactttcatcaacaggagctttaaaaatttcaaaagttccaaaaaaaatggttgttgtaggaggaggttatattggtttagaaatgggatcagtttggtcaagacttggatcagaagtacaagttgtagaatttttagatcaaattacaccgggtatggataaagaagtttcaaatgaatttttaaaaattttaaaaaaacaaggaattaaatttaatttaaaaactaaagttgaaaaaatatcaaaaacaaactcaggtgtttctatagacgttatcgacaatgaaggtaaaaaaagtaaaatcgaatctagtgttgtattaattt

SEQ ID NO: 223198 - DNA, 826 bp, Unknown
  Bacterial polypeptide expressing nucleotide sequence isolated from the Sargasso Sea
ggtcatcggaggtggaatcatcggtctcgagatggcaactgtttatagggcgatggggaccaaaatcacggttgttgaaatgcttgacgggttgatggctggagccgaccgtgaccttattaaaccctttcaccgcatcgtttcacgtcagtacgataacatctggctggaaaccagagtcactcaagtcgaagctcagaaaaaaggattgaaggtccattttgagggaaaaaatgctcctgaaaaaccagttgtcttcgaaaaaatcctaagtgcggtgggaagaaccccgaacggattaaaaatcggtgcagaaaacgcaggggtttcagttgatgaaaaaggcttcattgcggccgactcccagatgcgcaccaatgtaccgaatatttatgccatcggagatatcgtcggacaaccgatgttggctcataaggcaacccatgagggcaaggttgccgcggaagtgatttgcggaataaaaagtcattttgacgctcgggccattccttctgttgcttataccgaccctgaagtcgcatgggccgggatcaccgaagaggaagccaaaagccagggaattaactacggtaaagggattttcccctgggctgccagtggacggagcctggcattgggacgagacgagggaatgacaaaaataatgtttgaagaggataccaaaaaggtgattggtataggtatcgtggggccgaatgccggggaactgattgcagaaggaatgttagccattgagatgggtgcagacgccaccgatatcggttccaccattcatcctcatcccacactttctgaaaccctcgga

SEQ ID NO: 223199 - DNA, 714 bp, Unknown
  Bacterial polypeptide expressing nucleotide sequence isolated from the Sargasso Sea
tctgctgccttccgtgcggctgacttaggtctggaaaccgttatcgttgaacgttttagcactttaggtggcgtgtgtctgaacgtgggttgtatcccatctaaagccctgttacacgttgctaaagtcatcgaagaagccaaagccgttgctgcacacggtgttgtgttcggcgagccaacaatcgatttagacaagttacgcagcttcaagcaaaaagtgatcagccagttgactggtggcttaggcggcatgtctaagatgcgtaaagtaaacgttgttaatggcttcggtaaatttactggccctaacagcttagaagtgactgcgcaggacggtactgtgaccgttgttaagtttgaccaagcgatcatcgctgcaggttctcgcccaatcaaactgccattcattccccatgaagacccacgtatttgggattcgaccgacgcattagaactgaaagaagtgcctggcaaactgctggttatgggcggcggtatcatcggtttagaaatgggtacggtttactcttctctgggcagtgaaatcgacgtggttgaaatgttcgaccaagtgatccctgcggctgacaaagacgtcgttcgcgtattcactaagcaaatcaagaagaaattcaacctgatcctcgaaaccaaagtgactgcggttgaagcccgtgaagacggtatctacgtttcgatggaaggtaagagc

SEQ ID NO: 223200 - DNA, 422 bp, Unknown
  Bacterial polypeptide expressing nucleotide sequence isolated from the Sargasso Sea
aggggatcccatgttggcacataaagccagttatgaaggcaaagttgctgctgaggtaacagcgggtgaaagagtcagcaatgatgccagatgcatcccttctgttgcctatactgatccagaggttgcttgggtagggctttccgaagatgaatgcaaagccaaagggatgaattatggaaaaggtgtctttccttggtcagccagtggaaggtcacttgcgattggaagaaacgaaggaatgaccaagttgctttttaataattcaaccaaaaaagtcattggaggagggatcgttggaccgaatgctggtgacttgatatcagaaattgctttggctattgagatggattgcgatgtgaatgacgttgctttgactgttcatcctcatcccacgctatccgaaacagttgccatggcgg

SEQ ID NO: 223201 - DNA, 916 bp, Unknown
  Bacterial polypeptide expressing nucleotide sequence isolated from the Sargasso Sea
tgaagttttatgcgtagaaaaacgtggtcgaagcacttattcagacgctggtatctggaataattcacacattaaacagcttaagaagattgcagcatatattcgctcacaaggaagcattccagctgcgcaaattggacattgcggcccaaagtcctcaagacaaaggccttacgatggattacagcccctcaaaaactttcacaacaaagaagagccgggttggcggattgtctcgtgcagtggtattccagcagcacctggctacgatactccaagcgcactttcaacgtcaggcgtaaaatcgttggttaagaagtttggacttgccgcaaaaagatgtgatgaagcgggcttcgatgttctagatgtacatgcagcacacggctacttgatacattcttttttgtcgccattaagtaactttcgaactgatgaatatgggggtagccaagaaaaccggaacaggtttgcgattgagattgctcttgaaattcgagagttttggcccgcaaacaagcctttatttttcagactgtcttgcattgatcggtttccaggtgggctagaaattgaagacacaatttcactctcaaaagccctcaaaaaagcgggtgtggatttaatagattgctcgtccggggggattaaaggaccaaattctctattcagccttgcggcaaaagaagtgccaaaaccaggttttcaagtgggtttttccgaggcaatcaagctaaatgcaaatgttgcgactatggcagttgggatgatttctgaaccgcaacatgcaaatgacatcattgaacaaaaaaaggcggacctaattgcccttggcagggaggctttggtaaatccaaattggccgctttacgcgatgcgtgaccttagtaaggataaaaactttaacgattggcca

SEQ ID NO: 223202 - DNA, 733 bp, Unknown
  Bacterial polypeptide expressing nucleotide sequence isolated from the Sargasso Sea
aatgtcagagaaatttcaagctgtagttattggaggtggaccgggtggttatgtatgcgcaatcagacttgcccaattaggattaaaaactgcatgtgtagagtccagagggtctttgggaggtacttgtttaaatataggttgtattccatcaaaaagcttacttaatctatctgaagaatttcacaaagttaaaagtttagcaaataaaggtattgaagttggtgaagtaaaattaaatttagacaaaatgatgaaaagcaaagataaagctgtaaccgttcttacaaaaggtgttgagtttcttttgaaaaaaaacaaagttacttactttaaaggacatggaagttttaaatctaaaaatgaaattttaataaaggatgataaaaataaagaaactatcatccaaacagaaaaaacagttatagcaacaggatcagttccagtttcattaccaggaatagaaatagatgagaaaacaattgtctcatcaacaggtgctttaaagttagaaaaggtacctaagaaaatggttgtagtaggaggaggctatataggattggagatgggatctgtatggtcaagacttggagcagaggtgcaagttgttgaatttttagatcatattacacctggaatggataaagaaatctcttcagagtttatgaaaattttaaaaaaacagggaatgaaatttaatatgcaaaataaagttgaaacaattaaaaaaaat

SEQ ID NO: 223203 - DNA, 829 bp, Unknown
  Bacterial polypeptide expressing nucleotide sequence isolated from the Sargasso Sea
atgtcagataaatttcaagctgtagtcatcggaggtggacctggtggttatgtgtgcgcgatcagacttgcacaattaggtttaaaaacagcatgtatagagtctagagggtctctagggggaacttgtttaaatataggttgcatcccatcaaaaagcttacttaatctatctgaagaatttcataaagttaaaagcttagcaaataaaggtattgaagttggcgaagtaaaattaaatttagacaaaatgatgaagagcaaagataaagctgtaacagttcttacaaaaggtgttgaatttcttttgaaaaaaaacaaggttacttacttcaaaggacatggaagttttaaatctaaaaatgaaattttaataaaggatgataaaaataaagaaactatcatccaaacagaaaaaacagttattgctacaggatcagttccagtttcattaccagggatagaaatagatgaaaaaacaattgtctcatcaacaggtgctttaaaattagaaaaggtacctcagaaaatggtagttgtaggaggaggctatataggactggagatgggatctgtatggtcaagacttggagcagaggtgcaagttgttgaatttttagatcatattacacctggaatggataaagaaatctcttcagaatttatgaaaattttgaaaaaacagggaatgaaatttaatatgcaaaataaagttgaaacaattaaaaaaaatgcagcaggtgtagtggtttcaacagtagataaagatggtaataaaaataattttgagtgtgatgttgttttaatttctgttgggagaaaacctaata

SEQ ID NO: 223204 - DNA, 628 bp, Unknown
  Bacterial polypeptide expressing nucleotide sequence isolated from the Sargasso Sea
atgattatagcaattggaagaaagcccaatactcaagatttattcaataatgatttagtttccatagatgataaaggctttatcgaagtagatgaacattgccagactaagactaagaacatatgggcaattggagatgctgtgagaggaccaatgctagctcataaagcttcggaagaaggaattatggttgcagagagaatatctggtgaagattccctaatcaattatgcacacattcccaatgttatttatactcatccagaagtggcttgggttggtagaagtgaaaatgagcttaagaagcttaaggtagattacaaatctggatctttcccttttgctgctagcggaagagcactcgcatctggagattcaataggttctgttaccattcatgccgataatcaaacagatcaaatactagggattcaagtctttggaacttccgcatctgagatcatgcaacaaggcttgattgcaatggataataaagttacatcggaagaatttagtacaactattttcagtcaccccaccgtttcagaggcgcttcatgaagcgacactagcgatgaatcaaaaggctattcatattcaaaatagaaagaagaaaataagcatctagg

SEQ ID NO: 223205 - DNA, 791 bp, Unknown
  Bacterial polypeptide expressing nucleotide sequence isolated from the Sargasso Sea
agaagagttaatcaattccgacccaactacccaaaaatcattagaggaaaaaacaccttttcctgtagaaaacatcaatccttcaaaaacttctgcaaccccattttcccagaaagtaagtaaagcagatttgaactgtgaagtcctggttttgggtgctggtccagggggatatactgcagcattcagggcggctgatctggggaaaaaagtaattctagtggaacgctatgaaagtctgggaggagtctgcctgaatgttggatgcataccctccaaagctttgcttcatgctgcgaaagtcatcgatgacgcacacgccatgaaagaccacggaatcgattttggcaacccgaaaatcgaccctatcagactttcagcatggaaaaactctgtcgttggcaaactgaccaacggtctgaaatcactggcaaaacagcgtaaagttgaatgcctgactggaaaagggactttccttgattcccatcatctccagattgaatcaaaaagcggagcaaccaccgtccgatttgaaaatgccatcatcgccgccggttcggaaccggttaaactcccattccttccagatgatcccaggatcatggattccacgggagcattaaatcttcagcaaatcccggaaacgatgctggtcatcggaggtggaatcatcggtctcgagatgggcaccgtttacaggtcaatggggaccaaaatcacggttgttgaaatgcttgacgggttgatggatggagccgaccgtgatctggttaaaccctttcaccgccacg

SEQ ID NO: 223206 - DNA, 604 bp, Unknown
  Bacterial polypeptide expressing nucleotide sequence isolated from the Sargasso Sea
catgaaagactacaaagacaaatttaacatcatgcttgagaccaaagttactgcggttgaagctaaagatgatggtctatatgtaacgtttgaaggcaagaaagcgcctgcagagccagtacgctacgacaaagtacttgttgctgttggccgtaagccaaacggcaagctagttggcgcagatgcagctggcgtaaacgttgacgaccgtggctttatcaatgttgataagcaaatgcgtactaacgttgaccacatctttgcaattggtgaccttgtaggtcagcctatgcttgcgcacaaagcggttcacgaaggtcacgttgctgcagaagtaattgctggacagaagcactacttcgaccctcgtgctattccttcagtagcgtacactgagccagaagttgcttgggttggtctaactgaaaaagaagcgaaagagcagggcgtaagctacgaaacagcaacgttcccatgggctgcttcaggtcgtgccattgcatctgatgcaactaacggtatgaccaagatgatcttcgaaaaagatacgggccgtgttatcggtggcgcaatggttggtacaaatgcgggcgaaatgcttggc

SEQ ID NO: 223207 - DNA, 420 bp, Unknown
  Bacterial polypeptide expressing nucleotide sequence isolated from the Sargasso Sea
tatggccaataactatgatgtagcaatcataggctcgggtcctgcaggttatgtttcagctatacgctgtgctcagcttggattaaaaactgtttgcgtagaaaaggtgactcaagagaaagaggttgctttaggaggtacttgtttaaacgtaggttgcattccttctaaagctcttttggagagctcgttagttcttttaaatgctaatgaaaatcttaaggttcatggcataaaagcttcgaaaatctcgtttgatcttaatcaaatgcatgaaagaaagaatggcatagtttcgacaatgagcaaaggagtagctggattattcaagcttaacaaaatagatgtaatccaaggtcaagcatacgttgcagatgaacacactttacaaataattagtgaaagtgatgattcaaatat

SEQ ID NO: 223208 - DNA, 862 bp, Unknown
  Bacterial polypeptide expressing nucleotide sequence isolated from the Sargasso Sea
aatgcaaaagaagtattagaaacaaaaaatataattattgctactggatcttcgcctattcaattaaataatattaaattaagtacacatgtagtcgatagtgaaggcgctctaaaatttgaagaagttcctaaaacgcttgtaattattggggcaggagtcataggcctcgaacttggaagcgtgtgggccagattaggctctgaagtagtaattcttgaggctcaggacgacttcttgcctatgctagataaaagaatttctagacaggttctaaaagaattccaaaaccaaggcttagacatcagattagggtctaatgtattgaaagcagaagaagatcaagaagggatgaaacttacttattcaaatggagataaggaaacctctttgcgcactgaaaaaatcatacttgctgttggaaggaaaccaaatctagataatttgttcgatgaaacgttattaaatctcaacaaacaaggattaattgatgtaaatgagttttgtcagacttctgtagataatgtttgggcaataggtgatgtagttagggggcctatgctggcccataaagcatctgaagaaggggtaatggtggcagagaggattgcagacaatgatgtaagattaaactacgaccatgttccaaatgttatctatacccatccagaggtagcttgggtaggtttaaatgaaagtcagttaaaagaacaagagatagatttcaaatcaggttcttttccttttctagcaagtggaagagctcttgcttctggtgaatcagcaggttcagtattcataacagcagataaccaaacggataagatattaggtattcaagtttttggtccttcagcagcag

SEQ ID NO: 223209 - DNA, 535 bp, Unknown
  Bacterial polypeptide expressing nucleotide sequence isolated from the Sargasso Sea
aatggaaaataattttgatgtaattattatcgggtctggtcccggaggttatgtttgtgcaataagatgtgcacaattaggacttaaaactgcctgcgtcgagtcaagaaaaacccttggaggaacttgcttaaatgtgggctgtataccatctaaaagtttacttaatctttcggaagcgtactcaaaggcacgaaaagaatttagtaaatttggtattgatgttggtgatgttaaattaaatttacccaaaatgatggataacaaaaataaatcagtaataacccttaccaagggagtagagtttctatttaaaaaaaataaaattactcacttaaaaggtaaaggttctgtagtttcaaataatacagtgagtgttattgatgattcaggaaagaaaaataattacaaaactaaaaatatcgtaataagcacaggttcaattacaacttctttatcgggaataaaaattgatgaagaaactattgtctcctcaactggagcactaacttttagcaaagttccgaaagaacta

SEQ ID NO: 223210 - DNA, 652 bp, Unknown
  Bacterial polypeptide expressing nucleotide sequence isolated from the Sargasso Sea
atgagcaactatgacgtgctgatcatcggtggcggccccggcggctataacgccgccattcgtgccgggcaactgggcctgagagtcgcctgtatcgaggggcgcgagacgctgggcggcacctgcctgaatgttggctgcatgccgtcgaaggccttgctgcatgcctcggagttgtatgaggcggcgaccagcggcgagctgaataacctcggcatcgaggttacgccgacgctcaatctggcgcagatgatgaagcagaaggatgagagcgtaacggcgctgaccaagggcatcgagtttctgtttcgcaagaacaaggtcgagtggatcaagggctggggccgtttgaatgggccgggcaaggtcacggtgaccctcgccgatggcagcgtgcgcgagctgcaggccaaggacatcgtgatcgccaccggctcggagccgacgccgttgcctggggtgacgattgataatcagcgcatcctcgattccaccggtgcactggccctgccgcaagtgcccaagcacctggtggtgatcggcgccggggtgatcggcctggagctgggttcggtgtggcggcgtttgggcagcgaagtgacggtggtggagtacctcgaccgcatctgcccaggcttggataacgaaacgg

SEQ ID NO: 223211 - DNA, 904 bp, Unknown
  Bacterial polypeptide expressing nucleotide sequence isolated from the Sargasso Sea
cctggcgcagatgatgaagcagaaggccgagagcgtgaccgcgctgaccaagggcgtggaattcctcttccgcaagaacaaggtggactgggtgaagggctggggccgcatcgacgggccgggcaaggtggaagtgaccgccgccgacggcagcaagagcagcctcaccgccaaggacatcatcatcgccaccggttccgagccctccccgctgccgggcgtggaagtcgacaacaagcgcatcctcgactccaccggcgcgctgtcgattcccgaggtgcccaagcacctggtggtgatcggcgccggcgtcatcggcctggagctgggttcggtatggcgccgcctgggtgcggaagtcacggtcatcgaatacctcgaccgcatctgccccggcatggacctggaaacggccaagaccttccagcgcgcgctgaccaagcagggcatgagcttcaagctgggctcgaaagtcacccaggccaaggtcagcggcaagcaggtgacgctgagcgtggagccggctgctggcggcgcggcggagtcgatccaggcggattacgtattgctcgccatcggccgccgcccttatacgcagggcctgggactggaaagcgtgggcctggctaccgacaagcgcggcatgctggagaaccacgaacaccgcagcagcgtgccgggcatctgggtgatcggcgacgtgacctccggcccgatgctcgcgcacaaggccgaggacgaggccatcgcctgcgtcgagctgattgccggcaaggccggggaagtgaactacgacgtcatccccagcgtgatctacacccatccggaagtggccaccgtgggcaagaccgaggaacagctcaaggccgagggccgcgcctacaaagtgggcaagttccccttc

SEQ ID NO: 223212 - DNA, 482 bp, Unknown
  Bacterial polypeptide expressing nucleotide sequence isolated from the Sargasso Sea
catggaaaaaatatttgacgtcttagttattggtggagggcccggtggatatgtatgtgctattagggcagcgcagcttggattaaaagttggatgcattgaacttaggggaacactcggaggcacatgtctaaacgtaggatgtattccatcaaaaagtcttttaaattcttctgagcttttctcaaaagccaaaaataattttgcaaatattggaatagaaactagcgatataaaattaaacctaaaaaaaatgatgataaacaaactgaaatctgttcaagttttaactaaaggagtagagtttttgtttaaaaaaaataaagttacatatattaagggtaagggagttttgttatcaaaaaataacgtagtagtttataatgaaggaaaaaaaacttcttataacacaaaaaatattgttgtcgctactggctcatcttcagtatctcttcccggtatcaatatagatgaaaaaaaca

SEQ ID NO: 223213 - DNA, 731 bp, Unknown
  Bacterial polypeptide expressing nucleotide sequence isolated from the Sargasso Sea
gatgtcagaaaaatttcaagcagtagtgattggtggaggacctggaggttatgtatgtgctatcagacttgcacagttgggtataaaaactgcctgcatagagtcaaggggatcacttggtggaacctgtttaaatgtagggtgtatcccatcaaaaagtttactaaatttatcagaagagtttcataaagttaagaatttatcaaaaaaagggatcgaagttggtcagataaaattaaatttatcaaaaatgatgaaaagtaaagaaaaggcagtcactgtattaacaaaaggtgtagaatttttatttaagaaaaataaagtaacttactttaaaggaactggaagctttaaatccaaaagtgaaatttctattaaagatgataaaaataaagaaataacaattcaaacagaaaaagttgttattgctactgggtcagttccagtctctttaccaaacattgaatttgatgagaagtttattgtgtcatctacaggagctttaaatttagaaaaagtacccaaaaaaatggttgttgtaggtggtggttatattggattagaaatgggatctgtctggtctcgattagggtcagaagtacatgtggttgaattcttggatcatataacacctgggatggataaagagatttcaaaagaatttataaaaattttaaaaaaacagggaattaattttcatttacaacataaggtcgaaaaagttgaaaaaa

SEQ ID NO: 223214 - DNA, 152 bp, Unknown
  Bacterial polypeptide expressing nucleotide sequence isolated from the Sargasso Sea
aatgtctgaaaaatttcaagcggtagtaattggtggtggccctggaggctatgtgtgtgcaataagattatctcaattaggttttaaaacagcctgcgtcgaatctcgaaatacacttggtggcacttgtcttaatgtgggatgtataccct

SEQ ID NO: 223215 - DNA, 888 bp, Unknown
  Bacterial polypeptide expressing nucleotide sequence isolated from the Sargasso Sea
gatgtcagaaaaatttcaagctgtagtaataggaagtggtcccggaggctatgtttgcgcaataagattatctcaattaggaattaaaacagcttgtgttgaatctagagaatcgttaggggggacttgcttgaatattggatgtattccgtcaaaaaacttattatatttttcagaaaattttcataaagcaaaaaaattaacaaatttaggaattgaagttggtgaggttaaatttaatttagaaaaaatgatgaaaaataaggaaaaagcagtatccactttaacaaaaggagtagaatttttatttaaaaaaaataaagttactcacttaaaaggcgttgcatcttttagatcaaaaaatgaaatttctatagttaataaagaaaaaaaagaaacaattattgaaactgataatgttattattagtactggttcggaaccagtttctttaccaggcactaaatttgatgaagaaacaatagtttcttctacgggagctttatcattaaaaaaagttccaaaaaaaatggtagttattggtggaggatatataggtttagagatgggatcagtttggtcgagattaggttcagaagttcatgtaattgaatttcttgatcatattactcctggtatggataaggaaatttcaaaagaattcatgaaaattttgcaaaagcaaggaataaaatttcatatgcaaactaaagtagagtctataaaaaaaaataaagaaggagctagtattctaacagttaataaggaaggaaaaaaagtcaattttgagtgtaatgtagtattagtatcagttggaagaaaatcatatacaaaaaatttaaatttagacgcagcgggagtcgcattggataataaaaaaagaattaa

SEQ ID NO: 223216 - DNA, 301 bp, Unknown
  Bacterial polypeptide expressing nucleotide sequence isolated from the Sargasso Sea
atgtcagaaaaatttcaagctgtagttattggaggtggaccgggtggttatgtgtgcgcaatcagacttgctcaattaggattaaaaactgcatgtatagagtccagagggtctttgggaggtacttgtttaaatgttggttgcatcccatcaaaaagcttacttaatctgtctgaagaatttcataaagtaaaaagtttagcaaacaaaggtattgaagttggtgaagtaaaattaaatttagacaaaatgatgaaaagcaaagataaagctgtaaccgttcttacaaaaggtggttgag

SEQ ID NO: 223217 - DNA, 820 bp, Unknown
  Bacterial polypeptide expressing nucleotide sequence isolated from the Sargasso Sea
ttaggattaaaaacagcatgtattgagtctagaggatcacttggtggaacttgtttgaacgttggatgtattccttcaaaaagtttactaaatttgtcagaagaatttcataaagttcaaaatttatcaaataagggaattgagataggagaagtaaaattaaatttatcaaaaatgatgaaaagtaaagataaagctgtcacgatactaacaaaaggtgtcgagttcctacttaaaaaaaataaggtaacttattttaaggggactggaagttttaaatcgaaaaatgaagttttaatcaaagatgagaaaaataaagaaacaataataagttctgaaaaaacaattattgctacaggttctgtcccagtttcattgcctgggattgattttgatgaaaaagtgattgtttcttcgactggagctttaaaattagaaaaagttccaaaaaaaatggttgttgtgggtggaggttatatcggacttgaaatgagttcagtttggtcaagattaggttcagaagtgcatgtaattgaatttttggatcatattacacctggaatggataaagaagtttctcataaatttatgaaaattttaaaaaaacaaggaattaattttcatatgcaacacaaagttgagtcagtaaaaacaaatggttctggagctatagtttcaacaaaagataaagatggaaataaaaaagattttaatactgatatagttctagtttctgtggggagaaaacctaatacaaaaaatttaaatttagaaaaaataggtgtcgaattagatgataaaaaaagaataaaaactaata

SEQ ID NO: 223218 - DNA, 807 bp, Unknown
  Bacterial polypeptide expressing nucleotide sequence isolated from the Sargasso Sea
tttgggaggtacttgtttaaacgttggatgtatcccatcaaaaagcttacttaatctatctgaagaatttcataaagttaaaagcttagcaaacaaaggtattgaagttggtgaagtaaaattaaatttaaataaaatgatgaagagcaaagataaagctgtaacagtccttacaaaaggtgttgaatttcttttgaaaaaaaacaaagttacttatttcaaaggacacggaagttttaaatctaaaaatgaaattttaataaaggatgataaaaataaagaaactatcatccaaacagataaaacagttattgcaacaggatcagttccagtttcactaccaggaatagaaatagatgagaaaataattgtttcatcaacaggtgctttaaagttagaaaaggtacctcagaaaatggtagttgtaggaggaggctatataggattggagatgggatccgtatggtcaagacttggggcagatgtgcaagttgttgaatttttagatcatattacacctggaatggataaagaaatctcttcagaatttatgaaaattttaaaaaaacagggaatgaaatttaatatgcaaaataaagttgaaacaattaaaaaaaatccagcaggtgtagtggtttcaacagtagataaagatggtaataaaaataattttgattgtgatgttgttttaatttctgtcggcagaaaaccaaatacggatggtttaaatttagaatctgtaggagtaaatcttgatgaaagaaatagaattaaaactgacaaaagttttaggacaaacgttgaaaa

SEQ ID NO: 223219 - DNA, 532 bp, Unknown
  Bacterial polypeptide expressing nucleotide sequence isolated from the Sargasso Sea
tatgagcgaacaatttgatttattagtaattggcggtggaccaggaggatatgtttgtgctatacgcgcagctcaattaggtttaaagacaggctgtatagagtcgagaggaacgctaggcggaacttgtcttaatgtgggatgcattccatccaaaagtcttcttaatttatcagatatgtataaaaaggcacaaaaagattataacaatctcggtatagaagttggagaagtaaaattaaatcttaaaaaaataatgatgaataagagcaaatcagttcaagttctaacaaaaggtgtagagtttttatttaaaaaaaataaagttacatacatcaaaggcaagggggttttgttttcaaaaaatgatgtagttgtatacgaaaatggaaaaaaaacttcttataaatcaaaaaatattgttatagctactggttcgtcatcaacttctgttccaggaattgaaattaatgaaaaaaatataatttcttcaactggggctatatctttaggaaaggttcaaaaagtctag

SEQ ID NO: 223220 - DNA, 157 bp, Unknown
  Bacterial polypeptide expressing nucleotide sequence isolated from the Sargasso Sea
aatgacagataaatttcaagcagtagtaattggtggaggacctggtggttatgtttgtgcaataagattggcacaattaggccttaaaactgcatgtatagagtctagaggttcactaggtggcacttgtttgaatgttggatgtattcccttctaa

SEQ ID NO: 223221 - DNA, 976 bp, Unknown
  Bacterial polypeptide expressing nucleotide sequence isolated from the Sargasso Sea
caagcagtagtaattggtggtggtcctggtggctatgtttgtgctattagattggcgcaattaggattaaagactgcttgtatagagtctagaggttcactgggaggaacttgccttaatgttggatgcattccatctaaaagtttattaaatttatcagaggaatttcataaagttaaaaatttatctaataaagggatagaagttggtgaagtaaaactaaatttaagcaaaatgatgaaaagtaaagataaagctgtaacggttttaactaaaggagttgagtttcttttgaagaaaaataaagttacatattatcaaggccatggaagctttaagtcaaaaaatgaaattaatataaaagatatcgataacaaagaaattacaattaaagcagaaaatattgtaattgcgacagggtcagtaccagtgtcacttcctggaattaactttgatgaaaaaataatattatcttcgacaggagctttgaaaattgaacaagttccaaaaaaaatgattgttgttggtggaggatatattggtttggaaatgggatctgtttggtcaagactaggagcagaagttcatgtagtagaatttttagatcatattacccctggaatggataaggaaatttctcaagagtttatgaaaattttaaaaaaacagggaatgaagtttcatatgcagcacaaagttgaaaaaatccaaaaaaataataaaggcgcaatagtttcaactacagacaaagatggaaataataaagattttgactgtgatgttgttttaatttcggttggtagaaaaccaaatactaatggtttgaatattgaaactgcaggaattgaacttgatgataaacaaagaataaaaacagataaaaattttagaaccaatcaaaataatatttatgccattggggacgtaatagttggtcctatgctagcacataaagctgaggatgagggaatagcag

SEQ ID NO: 223222 - DNA, 471 bp, Unknown
  Bacterial polypeptide expressing nucleotide sequence isolated from the Sargasso Sea
tatggaacaatttgatctcattgttattggaagtggaccaggtggctatgtttgtgcaatcagagctgcacagttaggtttaaaagtatgttgtgttgaaaagcgtcagacattgggaggaacatgcttaaatattggctgtattccgtcaaaatctctattgcatgcctcacaaatttattatgacactaaaaactatgcagatataggaattaacattgataatgtaaagttagacttgtctaaaatgatgtcctccaaagataaatctgttgaaggcttaaccgacggcattcaatttttatttaaaaaaaataaggtaagccatatccaaggctttggaaaaattactggaaaaaatgaggtaacaattttaaatgatgatggtgatcaaatcataaatggaaaaaatattgtcattgcaactggatcagaagtagcagttccagataatgttgtaattgatgaaaa

SEQ ID NO: 223223 - DNA, 208 bp, Unknown
  Bacterial polypeptide expressing nucleotide sequence isolated from the Sargasso Sea
atggaaagtaattttgatttagttgttattggcggtggtccaggtggttacgtttgtgcaataagagcagctcagttagggttaaaaacagcttgtatagaatcaaggggagctcttggcggcacatgtttaaacgttggatgcataccatctaaaagcttattaaatttatctgaaaattttaataaagcaaaaaaagacttcaata

SEQ ID NO: 223224 - DNA, 554 bp, Unknown
  Bacterial polypeptide expressing nucleotide sequence isolated from the Sargasso Sea
ggatgaaaaaggcttcattgcagccgactcccaaatgcgcaccaatgtatcgcatatttatgccatcggagatatcgtcggccaaccgatgctggctcacaaggcaacccatgagggtaaggttgccgcggaagtgatttgcgggatgaaaagtcattttgacgcacgggccattccctctgttgcttataccgaccctgaagtcgcatgggccgggatcaccgaaggggaagccaaaagccagggaatgaactatggcaaagggattttcccctgggctgccagtggacggagcctggcactgggacgagacgagggcatgacgaaaataatgtttgaagaggataccaaaaaggtgattggtataggtatcgtggggccgaatgccggggaactgattgcagaaggaatgctagccattgaaatgggggcagacgccaccgatatcggatccaccattcatcctcatcccacactttctgaaaccctcggattggccgccgaggcttacgaaggaaccatcaccgacctctacctgccaaagcgcaaataat

SEQ ID NO: 223225 - DNA, 155 bp, Unknown
  Bacterial polypeptide expressing nucleotide sequence isolated from the Sargasso Sea
aatgtcagaaaaatttcaagctgtagttattggaggtggaccgggtggttatgtttgtgcgatcagacttgctcaattaggattaaaaactgcatgtatagagtctagagggtctttgggaggtacttgtttaaatgttggctgcatcccatcaa

SEQ ID NO: 223226 - DNA, 178 bp, Unknown
  Bacterial polypeptide expressing nucleotide sequence isolated from the Sargasso Sea
catgttatcagattcttttgatattattattattggcggaggaccaggaggctatgttgcctcaataagagcagcgcaacttggttttaaagttgcatgtatagaaaaaaaacaaacacttggtggcacctgcctaaatgagggttgtattccctcaaaagcattacttaactcttca

SEQ ID NO: 223227 - DNA, 730 bp, Unknown
  Bacterial polypeptide expressing nucleotide sequence isolated from the Sargasso Sea
ggtttagatatacatttaggatcaaaacttacttcagctaaagataatggtaaatgtgtagaaatttcttatgaatcaaaaggtgaggagcttaaagcctcttttgataagttgattgtggctgtggggagaaaacctaatacagctgatatctcagatgagtcatttccaatagagttggatgaattaggaagagtccaagttgatgatttttgtaaaacaaattatgaaaatatttatgctgttggtgatatcgttaggggaccaatgcttgctcacaagggttcagaggaaggagtaatggttgctgagagaattgcaggcaaaaaggctagaatgaattatgatcttgtacctaacgttatttatactcatcctgaagttgcttgggttggaaagactcagcaagagctagaagatcatggtgtggagttcaagattggaagttttccatttgctgcaagtggaagagctttagctgcagctgattcagtcggttctgttaaggttttagctgataagaaagatgacacaatattaggagttcatgtatttggtccttctgctgcagatattgtccaacaagcagttatagcaatggagtttggatctagtgctgaagatataggactaactgtatttagccaccctacagttagtgaggcatttcatgaagctgcattagctgtgaataattctgcaattcatataggcaataaaagaaaatgaa

SEQ ID NO: 223228 - DNA, 1273 bp, Unknown
  Bacterial polypeptide expressing nucleotide sequence isolated from the Sargasso Sea
aatggataataattttgatgtagttgtaattggtggaggtcctggtggatatgtttgtgctattcgcttatctcaactaggtctcaaaactgcatgtattgagtctagaggatcccttggtggaacatgtttgaatgtaggctgcataccatctaaaaatttattaaatttatctgaaaatttctacagagcaaaaaattttcataaaattggtattgaaatagataatttaaaattaaatttaaataaaatgatggaaaataaaaataattcagtagagactctgacaaaaggagttgcatttcttctaaaaaaaaacaaagtttcttatttcaaaggcacaggatcttttaaaagtaaaaacgaaatatctctaattgatgacaaaaaaaaagaaactattattaaaacaaaaagtacggtaattagctctggctcaaaacctacacaatttccagggtctaaatttgatgaaaaattaatactttcgtccactggagttctcaatttagaaagtgtaccaaaaaagctaattatagtcggaggtggttatattggtttagagatgggatcagtttggtcaagattaggctcagaagtacatgtcatagaatttatggatcatattacatctggtatggatcgtgaaatctcaaatgagtttatgaaaattttggccaagcaaggaattaaattttcacttgagacaaaagtaaataaaattttaaaattaagtaattctgtaaaacttgaaacaaccaacaaagatgggaaaaacaatatcttagaagcagataaagttctcatttctataggcagaaaaccaaatacagagagtcttcaattagataaaataggtgttaaacttgataaaaagggatcaataagtgtacaaaataattatgaaactagtgttaagaatatttttgctataggagatgttatatctggaccaatgttggcacataaagctgaggaagaagggattgcggttgcagaaataatcgctggtcagtctggtcatgttaattatgatatcataccatcagtaatttatacatcaccagaggttgcatctgtaggaaaaacggaagaagacctagtgtcgaaaggtcaatcatacaaagttggaaaatttccttttatggcaaattctagagctaaagcaattaatgatacagagggatttgtaaagatacttgccgatagcaaaacagataaagtccttggtgtccatataataggtcctcatgccggtgaaattatttgctga

SEQ ID NO: 223229 - DNA, 537 bp, Unknown
  Bacterial polypeptide expressing nucleotide sequence isolated from the Sargasso Sea
tatgacagatgtaatagttatcggaagtggtcctgcaggttatgttgctgccattagatgtgcacagcttggactagaaacaatttgtattgaaaaagaatcttccagtgacggcaaagaagttcttggtggcacatgtctcaacgtaggctgcattccttcaaaagcattgcttgattcgtcacataaattttatgctacaaaaaacaactatcaagaacatggtatttcagtaactaaccttaaactagatcttccaaaaatgatggaaagaaaggaaggaatagtaaataaattaacttctggaattcagggtctttttaaacttaataaagtaaacagtatacaaggcactgcaaaagttgtgtctgcaaatcaggtagaagtaacaaatggagataataaagaaattatcgaaggtgcaaatatcattattgcatcagggtcacgacctatcgaaatcccctctgcaaaatgggatcaaaatattgttgatagcacgggcgcactagaatttgattcagtacctaaaaaact

SEQ ID NO: 223230 - DNA, 1273 bp, Unknown
  Bacterial polypeptide expressing nucleotide sequence isolated from the Sargasso Sea
atgatagaaaaatttgactcagtagtgatcggtggcggacctggtggatatgtttgtgctataaggttagctcaattaggtcaaaaaactgcctgtatagaagccagaggtgctctgggtggaacttgtttaaacattggatgtattccttcaaaaagcttattaaatttgtctgagaattttaaaaaggctaaaaatttttctaaacttggaatcgaaacaggagacgtaaaacttaatttagataaaatgatgaaaaacaaggaaaaagcagtttcaatcttgaccaagggtgttgaatttttatttaaaaaaaacaaggtaacttacttaaaaggtttcggcagttttatttctgacaagaaaatatcagtaaaaggcgaagatggtaaaaaaaaagagattgaggcaaaaaatattattattgcgactggatctgaggcaatgcctatgcctaacgtagaatttgatgaaaaaacaattgtctcttcgacaggcgccctatctttaaaagaagttccaaaaagtctagttgtcgttggtgggggttatataggtttagaaatgggctctgtctggtctagactaggggctgaagtaaatgtaatcgaatttttagatcatattacacctgggatggatagagagatttcagaagagtttatgaaaatattgaagaaacaaaatattaagtttcacttaaatagaaaagtaactagcattaaaaaaactaacaatggtgtacaaatttcaacgtcagataagaatggagatagtaaagattttaattgtgatgtagctctaatttcaattggaagaaaaccgttcacatctaatttaaatttgagttctgcaggagtaaaatcagatgaaaaaggaaggattaaaattgacaaaaaatttcaaacttcagcaaaaaatatttacgctattggagatgtaattgatggcccaatgttagctcacaaagctgaagaggaagggatcgcagttgcagaaataattgcaggccaatctggccatgtaaactacgacttaattccaggggtaatttacactactcctgaggtagcaagtataggcttaactgaggagcaactaaaagaaaaaaataagtcttataaaattggaaagtttccctttatggctaactcaagagctaaagcaattgatgagcccgaaggattcgtaaaaattttagccgataaagacactgataaagttttaggagtacacatgatagggcctcatgtaggagaaatgatcgcagaaa

SEQ ID NO: 223231 - DNA, 550 bp, Unknown
  Bacterial polypeptide expressing nucleotide sequence isolated from the Sargasso Sea
tttgtcagattttgatattgcaattataggaagtggccccggtggatatgtatgtgctattcgcgctgctcaactaggacttagtgtttgttgtgttgaaaaaagtgagactcttgggggtacttgtttaaatgtaggttgtataccctcaaaatccttacttcatacttcttatctttttaagcaaacaaaagatctgaataaaattggaattacagtttcagatgttcagattgatatcaaaaaaatgataaactcaaaaaatgagagtgttgtagggcttacagatggaattaaatatttatttaaaaaaaataaaataattcataaaaaaggttttggaagaattattaattcgaatgagattgagattttgtcagataacaattctgaaactattaaagctaaaaatatagttattgcaacaggatcagaagtttcaacacctaaagatattcttttagatgaaatagatatcttatcatcaacgggagcattaaacttaagcgaagtaccaggtgaattaattataattggtgcaggttatata

SEQ ID NO: 223232 - DNA, 1151 bp, Unknown
  Bacterial polypeptide expressing nucleotide sequence isolated from the Sargasso Sea
aagaaaagacgatatcgtaggcaaacttactggaggcataagtggtcttttttctgcaaataaggttgaatctatgataggtagaggcaagattatagatatcaacactgtagaagttacaaaaccagatggcagcacagaaactatagatgctaaaaatattattgtagctacaggctctaagccaatagagataccttcagctaaatttagtaaacatattttagatagcactggtgcgctttgcttgaactcagtccccaagaagctgggtgtagttggtgctggtattattggactagaactaggaagtgtatggtctaggcttggttctgaggtgactgtaatagaagcgcttgatgaatttcttccaatgacagatcatgacatttctaaagaaaccttaaaagaatttaaaaaacagggcttggatataaaattgggttctaaagttaccagcacaaaagaattaaaaaattcagttaaggtcaaatttgaaagtaatgatcaagaaaatgagatggaatttgataaattaattgtggctgttggcagggcaccaaattcctcaaacgtaattagcgatgaattaaatatcgagatagaagatggttttatcaaagttaatgatttttgccaaactagcgtaaataacatatgggcaattggtgatgttgttagaggtcccatgcttgctcataagggtagtgaagagggaattatggttgcagaaagaattgcagaaaaacatactgaagtaaattatgatttggttccttcagtaatatatacccatcctgagatagcatgggtgggtcaaaatgaaaaagaattaaaagataataatattgattataaagtaggtaagtttccttttgcagcgagcggaagggctctagcagttgatcaatcagttggttttgtaaaagtcttgtctcatgcaaaaactgacactattctgggagttcatgtttttggtcctgcagctgctgaaatagttcaacaggcccttatttcaatggaatttggttccagttctgaagatattgcactaactatgttcagtcatccgactgtatcagaggcatttcatgaagcagctttatctgctaataatctagcaatccatataggaaataaaaagaaatgaa

SEQ ID NO: 223233 - DNA, 901 bp, Unknown
  Bacterial polypeptide expressing nucleotide sequence isolated from the Sargasso Sea
gatgaaagatattttcgttcctaatattggtgatttcgatgaagtagagatcattgaaatacatgtttcactaggtgaaaaagttgagattgagcaatctttaattacattggaaagtgataaagcaacaatggatattccatcaccaaatgcaggtattgttaaagaaattaatatcgtgcaaggtcaaaatatttctcaaggagatttaatacttaaacttgaaataaaagaaaccacgaccaaaaataaattagaggaaaaaccaaagcaaaaagaagaaaacataaataaaaatactaaaaaaggtttagatgcggaagtcgttgtattaggtgctggtccaggtggctacacagctgcctttcgtgccgctgatcttggtttaaaaacaattttaatagaacgttatccttccttgggtggtgtttgtctgaatgttggttgtattccatctaaggcattgcttcatgtaagcaaggtaatatcggaaattgaagaacttaaagaacaaggagttgaattaggatcaaataaccccgatgcaaaatctgtacgtcactggactgaatcaattattaataaactcacatcgggtttaaaaagtatggcaaaaaaaaggaatgttcaggtaatagagggtgacggacgttttagttctccaaacacaattgaaataaataataatggtgagactaaaactataacatttaactcggctattattgcagctggttctcaggcatcaaaattgccttttcttcccgaggatccgcgtatcatggactcgacagacgcattactactaaaagatattccagaccgtatgcttgttattggcggggggattattggtttggaaatggccactgtttatgcgtccatgggaacaaaaattacc

SEQ ID NO: 223234 - DNA, 913 bp, Unknown
  Bacterial polypeptide expressing nucleotide sequence isolated from the Sargasso Sea
atgtcggaaaaatttcaagcagttgtaattggtggggggcctggcggatatgtttgtgctattagacttgctcagcttggattaaaaacagcatgcattgagtctagaggatctcttggaggaacatgtttaaatgtaggatgtataccttcaaaaagtttactaaacttgtctgaagaatttcataaagttcaaaatttatctaataaaggaattgaagttggagaagttaggctaaatcttgaaaaaatgatgaaaagtaaagataaagcggtaactatacttactaagggagtcgagtttttgcttaagaaaaacaaggtaacttattacaaaggaactggaagcttcaaatctcaaaatgagatcataattaaagatgatcaaaataaagagactattattgaagctgaaaaaactgtgatagcaacaggttctgtaccagtatctttgcctggaatagaaattgatgagaaagtaattgtatcttcaacaggtgcattgaaattggacaaagttccaaaaaagatggttgtagtagggggtggctacattggattagaaatgggatcagtttggtcaagattgggatctgaagtgcaggtggtagaatttttagatcatattactcctggcatggataaagaaatttcattggaatttatgaagattttaaagaaacaaggtatcaaatttaatatgcaaaataaagttgaagctattaaaaataataaatcaggcgctgttgtttcaacagttgataaagatggaaataaaaataattttgattgtgatgtcgttcttatttcagttggtcgaaaagcaaatacgaatggtttaaatctagaagctgctggagttaaactggatgaaagaaaaagaattaaaacagataatacatttaaaactaata

SEQ ID NO: 223235 - DNA, 1402 bp, Unknown
  Bacterial polypeptide expressing nucleotide sequence isolated from the Sargasso Sea
aatgaataattttgacttagtagtaattggtggaggtcctggaggatatgtttgtgcaatacgtgcagcacagttagggttaaaaactgcttgtgtcgagtccagaggagctctaggaggtacttgtttaaatgttggatgtattccctcaaaaagtttgttaaatttatctgaaaattttcacaaggcaaaaaaagattttaatcagcaaggtatagaaatcgaaggcatcaaacttaatattgaaaaaatgatgtctaataagaataaatcaattcaagttcttacaaaaggcgtagaatttttattcaaaaaaaacaatgtcacatatattaaaggcaaaggcgttctcttttcaaaaaatgatatagtagtttacgataataataaaaaaaataattttaaagcaaaaaatatcgtaattgccactggttctgaagtagcatctttacctggtatagatattgatgaaaaaaatattatttcttccactggagcactatctcttaaacaagtcccaaaaaagttagcaattataggtggtggatatattggtttagaaatgggttcagtttggtctagattaggttctaaagttacagttttcgaatacctagaatacataacaccaggtatggacagagaaatatctaatgaatttaaaaaaattctaacaaaacaaggcatcaattttaaaatgggatctaaagtaagttcagtgaaaaatataggagatattgtatcgataaattatacagatattaaaaattcaaaaaatgaaaaagatgaattcgacaaagtattggtttctgttggccgaaaaccgtacacagaaggtttaaatttaacaaaattaggtgttaaaaaagataacaaagggagaatcgaagttaacgataagttacaaacatcagtgaaaaatatttatgctataggtgatgtaattaaaggacctatgttagcgcataaagctgaagaagagggaatcgcagttgcagaaattttagctggacaagcaggacatgtaaattatgatgtaattccaggagttatttatacctcgccagaggttgcaaccgtcggaaagactgaagaacaattaaaagaggaaaatagatcctataaagtaggaaaattcccctttttagcaaactctagggcgaaagttaataatgaaacagacggttttgtaaagattcttgctgatagtaaaactgacaaggttttaggtgtacatataattggcccacattgtggaaatatgattgcggaaatggccttagcaatggaatttggagcaagcgctgaagatattgcaagaacatgccatgctcatcccacacacacagaagcaataaaagaagcagctttagctgttgataaaagaccaattcatttttaa

SEQ ID NO: 223236 - DNA, 967 bp, Unknown
  Bacterial polypeptide expressing nucleotide sequence isolated from the Sargasso Sea
tttgggaggcacttgtcttaatataggatgtattccctctaaaagcctattaaatatgtctgaaagttttcataaagctaaaaatttctctaatattggcattgaaactggtaaaattaagctaaatttagaaaaaatgatgagcaataaagaaagctctgttgcaacacttacaaaaggagtggagtttttatttaaaaaaaacaaagttacttacattaaaggtgtgggatcttttaatgaaaaaaatgaaatattagtcaaaaatgataaatcagaaataaaaattaaaactgataaaactataataagcacaggatcagaacctttatctcttccaggaatagattttgatgaaaaaaaaattctttcatcaacaggggctcttaatatttctaagcttccaaaaaaaatggttgttgttgggggtgggtatattggattggagatgggttctgtttggtcaagattgggaactgaggttcacgtcgtagaatatttagatcatattaccccagggctcgataaagaaatttcaaatgaatttatgaaaattttaaaaaaacagaatattaaatttgaattaaatactaaagtcgaaaaaattactaaaaatgacaaaggagtagttatagaaacgacaaacaaagattcaaaaaataatattgaagctgatgtagttttgatttctgtcggaagaaaaccctacacagataaattaaatttagaaaaaattggagtaaatcttgataaaaaaggaaaaataaaagttaataaaaattttgaaaccaatgtaaaaaatgtttacgcgataggagatgttatagatggacctatgttggctcataaagctgaagaggaaggaatagctgttgcagagctaattgctggacagtcaggtcatgtgaattatgatatcataccaggtgtaatttatacttcaccagaggtagcgtatgttaggtaa

SEQ ID NO: 223237 - DNA, 575 bp, Unknown
  Bacterial polypeptide expressing nucleotide sequence isolated from the Sargasso Sea
tatgtcacaaaaatttgactcagttgttataggaggtgggccagggggttatgtttgtgccatcaggctagctcaacttggacaaaaaatagcatgtgtagagtcacgaggttctctaggtggaacctgcttaaatgtaggatgtattccttcaaaaaatttattaaatttatccgagaattatcacaaagcaaaaaactttgaaaaaattggcatagaagtaggttctttaaaacttaatcttccaaaaatgatgaagaacaaagaaaaagcagtaacagttttaactaaggggatagaatttttattcaaaaaaaataaagttacatactttaaaggaactggatcaataataggaagtaatcaaatatccataaaatctgctgataataaaaacgaaagtatagaggcaaaaaatattattatagcgacaggttctgatgctgtgtcattgccaggtattgaatttgatgaagaaaaaatagtttcatctacaggagctctttccttaaaagaagttccaaaaaaattagttatcgttgggggcggatatattggattagaaatgggatcag

SEQ ID NO: 223238 - DNA, 787 bp, Unknown
  Bacterial polypeptide expressing nucleotide sequence isolated from the Sargasso Sea
aatgtctgaaaaatttaatgtagttgtaatagggggaggtcctggaggatatgtttgtgctattagattagctcaattaggttttaagactgcatgtgtagaatctagaggatctttgggaggaacttgtttaaatgttggctgtataccatcaaaaaatttattaaatctttctgaaaattttcataaagcaaaaaatttctcaaaccttggaatagaaacaggcaaactaaaacttaatatagaaaagatgatgaaaaataaagacaaagcagttactgttttgactaaaggtgtagaatttttatttaaaaaaaataaagttacctattttaaaggcacaggaagttttaaatcacctaaccaaatatcaataattgatgataaaaaaaaagaaactattttagaggctgaaaaaattattattagcacaggatctgagcctgtttctttaccaaatgtaaaatttgatgagaaaattattttatcttcaacgggagctttgtctcttaattctgttccaaaaaaaatgattgttgtaggtggtggttatattggcttagaaatgggctcggtatggtctagactagggtctgaagtccatgttattgaatttttggatcatattaccccagggatggataaagaggtatctaaagaatttatgaagattttaacaaaacaaggaattagttttcatatgcaaacaaaagtagaatcaattaagaataacaaaacatcagcgaaggtttttctgacggataaagatgaaaaaaaaaagagttag

SEQ ID NO: 223239 - DNA, 1399 bp, Unknown
  Bacterial polypeptide expressing nucleotide sequence isolated from the Sargasso Sea
atgtcagaaaaatttgatgtaactgtaattggtggtggtccaggtggttatgtttgtgcaattagattatctcaactaggtctaaaaacggcatgtattgagtttagaggatctcttggaggaacatgtttgaatgttggatgcattccatctaaaaatttattaaatttttctgaaaattttcataaagctaaaaattttacaaatattggaattgaagttggtgaagttaagctaaatttaagtaaaatgatgaaaaataaagacaaagctgttgctgacttaacaaaaggaatcgaatttttatttaaaaaaaataaagttacttattttaaaggaaaaggatcatttaaaagctctaatgaaatctcaattttagctgataacaaagaaactgttattcaaacagacaaaacaataattagtactgggtcagaacctgtttcattaccaggaatagattttgacgaagaaaaaatactttcttcaacaggagccttatcaatttcaaaattaccaaaaaaaatgattatagttggaggaggatacattggtttagagatgggatctgtgtggtcaagattaggaacccaagtagaagttgttgaatatttagatcatattactcctggtatggataaagaaatttcaaaagaatttgaaaaaattttaaaaaaacaaggaattaaatttcatttaaacactaaagtagaaaaaataaataaaaataaaaatggtgtcagtattaatacgttagataaaagtaataaaaaaaatactattgaagcagatgttgttttaatttctgttggaagaagaccatttacaaaatatttaaacttagaaaaaattggagttcaaactgacaaaaaagggatggtaaaagttaataaaagttttgaaacaaatataaaaaatatttacgcaatcggcgatgtaattgatggaccaatgttagctcacaaagcagaagaagaaggaatagcagtcgctgaaataattgcgggtcaatctggacacgtaaattatgatgtaattcctggagttatttatactactcctgaagttgcatatgttggaaaaacagaagaacaattaaaagtaaataaaacaaattataaagttggaaaatttccatttttggcaaattcaagggctaaagcaattaatgaaccagagggattcgtaaagattctcgcagacacaaaaactgacaaggttttaggcgttcatataattggacctcacgctggagagatgattgcagaaatgtcagttgctatggaatttggtgctagttctgaggatattgcaagaacttgtcatgctcatccaactttttcagaagcaatcaaagaagccgcattatctgtagataaaagacaaattcattcgtaat

SEQ ID NO: 223240 - DNA, 712 bp, Unknown
  Bacterial polypeptide expressing nucleotide sequence isolated from the Sargasso Sea
gatggcagattttgatttaattgttattggagctggacctggaggatatgttgcggctatcagagcttcacaattaggaatgaaaattgcctgtgttgaaaaggaaaaaacactcggaggtacttgtttaaatattggctgcattccatcaaaagctctattgaattcatcagaaaaatttgcagaaatatcaaaacatgcagaagagcatggtatctcaactggaaaagtttctatagatttagcaaaacttatgcagcgtaaaaacaaaattgtaaaacaattaacttctggaattgggtttttatttaaaaaaaataaaattactcacatacaaggtgctgcatcttttttggacaccaaaacaataaaagtatcctccagtgatagagataaaaattattcagcaaaaaattatattattgcaactgggtctacttctattgctattgatgcaataccaattgatgaaaaacaaattgtaacatcaacaggtgcattagcattagagtcggtacctaaatcacttcttgtaattggcggtggttatataggattagagatgggctccgtatggaatagacttgggtctaaagttacagttgttgaagcgctggatagaatagttccaacaatggatgaagagatagcaacagagtttatgaaatctcttaaaaagcaaggattagaatttaaacttctcacaaagtaa

SEQ ID NO: 223241 - DNA, 1399 bp, Unknown
  Bacterial polypeptide expressing nucleotide sequence isolated from the Sargasso Sea
aatgtctgaaaaatttcaagcagttgtgattggcggaggtccaggaggttatgtttgcgcaatacgattatcacaattaggtataaaaacagcttgtatagatgctagaggagcattaggtggaacatgtctaaatataggatgtataccatctaaaagtttactgaacttatctgaaaattttgaaaaaacaaaaaattttcctaatcttgggatagaagttggtcaagttaaattaaatttagatagaataatgaaaaataaaaataaggcagtagatactttgacaaaaggagtggaatttttatttaaaaaaaataaagtttcttactacaaaggtactgcaagttttaagactgcaaaaaaaatttcaataaaagacgaaaaaaaagaaattataattgaaacagaaaaaacaattataagtactggttctgaaccaatctcattgccaggtgcagaatttgatgaaaaaaaaattttatcttcaacaggtgcattatctttagaaaaagtaccaaaaaaaatgttagtggttggtggaggttatattggattagaaatgggctctgtttggttaagatttggttcagaggtacatgtaatagaatctctagatcatattaccccaggaatggatagagaaatttcaaaagagtttatgaaaatattaacaaaacagggaatgaagtttcatttacaaaccaaactagagagtattaaaaaaaatgatagtggagttatagttacatcaagtagtaaagatggaaaaaaaattgattttaattgtgacgcagtactaatttctattggtagaaaaccaaatacaaaaaatttaaatttagaaaaaataaatattattttagatgataaaaaatgtataaaaactaacaaaaattttgaaacaagtgtaaaaaacatttacgcaattggagacgttatatctgggcccatgttagcgcataaagctgaagaagaaggtatagcagttgctgaattaattgcaggacaatcaggacatgttaattacgatgttataccaggagttatttatacatctcctgaagttgcatcagttggaaaaacagaggaacaattaaaagaattgaacaaaaagtataaaataggaaagtttccttttttagccaattcaagagcaaaagctatagatgtacccgaaggttttgtaaaaatacttgcagatgataaaacagataaaatattgggcgctcatatgataggacctcacgcaggtgaaatgattgcagaaatagggatagctatggaatttggagcaagcgcagaggatatagctagaacttgccatgcccacccaactttttctgaagctgtaaaagaggccgctttatctgtagataaaagagcaatacactcttag

SEQ ID NO: 223242 - DNA, 1402 bp, Unknown
  Bacterial polypeptide expressing nucleotide sequence isolated from the Sargasso Sea
atggcagataaatttgatgttacagtaataggtggtggcccagcaggctatgtttgtgcaattagattgtcacaactaggatttaaaactgcctgtatagagtcaagaggtgcactaggaggcacatgtttaaatgttggctgcatcccatcaaaaagcctacttaacttgtccgaaaactttcaaaaagcaaaaaactttcaaaaagtaggaatagaaattgaaggtctaaaattaaatttagataaaatgatgaaaagtaaacaaaaatcagtaactgtactaactaaaggtgtagaatttctatttaaaaaaaacaaaataacttattttaagggtctaggaattcttaaatcaaaaaatttaatatcaattcttgatgaaaaaaataaacaaacctcaattgagtctaaaaatataatattatgcactgggtcagaacctacatctttgccaggaattaaatttgatgaagataaaattgtatcatccactggtgctctttctttaagtaaagtcccacctaagatggtagtggtaggaggtggatatataggtttggaaatgggatctgtatgggcaaggcttggatctgaagttcacgtaattgaatatttagatcatattactcctggtatggataaagaaatttcaaatgaatttatgaaaattttaattaaacaaggaattaaatttagtcttcaaacaaaagtaaattctataaaaaaaacaaataattcagtaattgttaatgctgaggacttaaaaaaaggtaaaaagagttatgagtgtgatgttgtgttgatatctgttggacgaaaaccatatacaaaaaatttgaatttagaagggctaggtatagaaaaagataaaaaaggaacaataaaagttaataataaatttcaaacaaatatttctaatatttatgctataggagatttaatcagtggacctatgttagcacataaagccgaagaagaaggtatagctgtggcagagataattgctgggcaatcaggacatgtaaattatgatgtaataccaagtgtaatttatacattccccgaagttgcatcgatagggaaaactgaggagcaattaaaagaaaaaaatagcgaatataagattggaaaatttccttttatggctaattcgagagcaaaagcaatagaccaacctgagggctttgtaaaaatacttgcagacagcaaaactgataaggttttaggtgtacatataattggacctcatgccggtgaaatgattgcagaaatggcaattgctatggaatttggtgcaagttctgaggatatagctagaacttgtcatgctcatccaacattttctgaagctattaaagaggctgcattatcagtggataaacggacaatacactcataat

SEQ ID NO: 223243 - DNA, 1129 bp, Unknown
  Bacterial polypeptide expressing nucleotide sequence isolated from the Sargasso Sea
atgttagaaaaatttgatgcaacagtaattggaggaggaccagctggctacgtatgtgcaattagattatctcaattaggtttaaaaactgcttgtatagaatcaagaggatcacttggaggaacttgtttaaatgttggatgcattccttcaaaaagtttactgaatttgtcagaaaattttcataaagcaaaaaattttgaaaaaattggaatagaggttggagaagtaaaattaaacctcgacaaaatgatgaaaaataaagaaaaggcagtaacagttttaacaaaaggtatagaattcttatttaagaaaaataaaattacatattttaaaggaaaaggttccctaaaaagtgcaaatgcaatatcaattatatcaaatggcaaagaaacaactatagaaacagagaaaacaataataagtacaggatctgagcctatttcaatacctggaatggaatttgatgaagaaaaaatactttcttcaactggtgctttgtcaatttctaaactaccaaaaaaaatggttgttgtaggtggtggttatattggtttagaaatgggatcagtttggtcaaggttaggaacagatgtagaggttatagaatttttagatcacatcacccctggaatggatagagaaatttcaaatgaatttatgaaaattttgaaaaaacaaggaattaaatttcagttaaatacaaaagtagaaaaaattataaaaactcaaaatggagttactattgaaacaaaagataaagaaaataagaaaaataagattgaagctaatgttgtattgatatctgtcgggagaaaaccaaatacttacggtttaaatctagaaaatattggggttcacatggatgaaaaaggaagaattaaagtaaataaaaattttgaaacgaatgttaaaaatatttatgcaattggagatgtcatcgagggccctatgttagctcacaaagcagaagaggaaggaatagcggttgctgaattaatcgcgggccaatcaggacatgtaaattataatgttattccaggtgttatttatacatctcccgaagttgcatccattggtaaaacagaggaacaattaaaaaataataatactaattataaagtaggaa

SEQ ID NO: 223244 - DNA, 1402 bp, Unknown
  Bacterial polypeptide expressing nucleotide sequence isolated from the Sargasso Sea
aatggcagaaaaatttcaagcaactataattggaggtggtccaggaggttatgtttgtgcaataagattagctcaattgggtattaaaactgcatgtattgaatccagaggaactctaggagggacctgtttaaatattggatgtataccttcaaaaaatttgctaaatctctcagaaaattttcataaagccaaaaatttctcaaaaattggaattgaagtgggcgaagtgaagctaaatcttcaaaaaatgatggaaaataaggataaagcggtaacgactttgacaaaaggcgtagaatttttattcaaaaaaaataaggtaacttattttaaaggaattggtaaattaaaatcaccgactgaaataacaattgtagataaagaaaataaagaaacaaatattcaatctgataatataattataagcactggctcagaacctatgcctcttccaggtatagaatttgatgaagaaaaaataatatcttctactggtgcgttatcattaaaatcagtaccaaaaaaaatgctagttgtgggtggtggttatattggtttagaaatgggatctgtttggtcacgattaggctcagaagtgcatgttgttgaatttttagatcatattacaccaggtatggataaagaaatttcaaatgaatttatgaaaattttgaagaagcaaggtttaaattttcatctagaaacaaaagttgaaaaaatatcaaaatcaaaaaatggggttataattgaaacttcagacaaaaaaggaaaaaaaataaaatttgaaagtgatgtagttttgatttctgtgggtagaaagccttatacaaaaaatctgaatttagaaaaagtagggatagaattagacgaaaaaaaaagaattaaagtcagcaaaaattatcaaacaaacataaaaaatatttatgctattggtgatgttattgaaggcccaatgttagcccacaaagctgaagaagaaggaatagctgttgcagaattaatttcaggtcaatctggtcatgttaattatgaagttatacctggtgttatttatacaacaccagaagtagcttcagttggcaaaactgaagaacaacttaaagaaaaaaatcaaaaatataaaattggaaaatttccttttatggctaattcaagagcaaaagcaattgatgaaccagatggttttgtaaaaattttagctgatgcaaccacagataaagttctaggtgttcatttgataggcccacatgcaggagaattgattgcagaaatggctatagcaatggaatttggcgctagctccgaagatattgctagaacttgtcatgctcatcctactttttctgaagctgtgaaagaagcagctttatcagtagaaaaaagacaaattcactcgtag

SEQ ID NO: 223245 - DNA, 1402 bp, Unknown
  Bacterial polypeptide expressing nucleotide sequence isolated from the Sargasso Sea
aatggcagataaatttcaagcagtagtaattggaggaggcccaggtggctatgtatgtgcaattagactagctcaactaggatttaagactgcttgtattgagtctagaggttctttaggtggtacatgtcttaatataggctgtatcccatctaaaagtttgctcaatctctcagaaagttttcataaggccaaaaatttttcaaaaataggaattgaagttggggaaataaaattaaatctccaaaaaatgatggaaaataaggataaagcagtaagtgttttaacaaaaggagtagagtttttatttaaaaaaaacaaagttacatattttaaaggaataggaaaattaaaatcaaataaagaaataaatattattggtttggataattcacaaacaacaattgaaagtgataatataattataagcacaggttcagaacctgtctcaatacctggagtagagattgatgaaaaaataatagtttcttcaaccggagctttatcacttaaaactgtcccaaaaaaaatggttgttgttggaggtggatatataggattagaaatgggatcagtttggtcaaggttaggatctgaagtacatgttgtagaatttttagaccatataacacctggaatggataaagaaatttcaagtgaatttatgaagattttaaaaaaacaaggtttaaaatttcatttgaatactaaagttgaaaaaatagttaaaaataataatggtgtgagaattgatacaatagataaaactggaaaaaaagaggaattagatagtgatgttgtattaattgctgttggaagaaaagcattcacaaaacatttaaatcttgaaaaattgggtatagaactagatgaaaagaaaagaattaatgtaaataaaaaatttcagacaaatattgaaaatatttatgcaattggagatgtcattcaaggaccaatgttagcacataaagcggaagaagaaggaatagctgttgccgaattaattgctggtcaatctggccatgtaaattacaatgttattcctggtgtaatttatactacacctgaagttgcagcaattggtgatactgaagaacaacttattgaaaaaaatttaaaatataaagttggaaaatttccttttatggctaattcaagagccaaagcaattgatgagccagagggatttgtaaaaattttagcagattcaactacagataaagtattaggagtacatttaattggaccccacgcaggtgaacttattgcagaaatggcaattgctatggaatttggtgcaagttctgaagatatagcaagaacttgtcatgctcatccaacgttttctgaagctgttaaagaagcagctttatcagtagataaaagacaaattcattcgtaa

SEQ ID NO: 223246 - DNA, 790 bp, Unknown
  Bacterial polypeptide expressing nucleotide sequence isolated from the Sargasso Sea
atgtttgatgtggtagttataggaagtggaccagcaggatatgttgctgccataaaagcctctcaattaggcctaaaaactctttgcattgaagaatcgattgataaaaaaggtaaggttaatcttggaggcacatgtttaaacgtaggatgcattccatctaaggctcttttagattcatctcatagatattatgaagcacataaaaatcttagtgaacatggtatcaaaattgaaaaattgggtttagatcttagttcgatgatgaaaagaaaggatgatattgtaaataaactaactggtggaattagcggacttttttcagccaataaagttaaatctttatcaggaagaggtaaagttatttctcctaatacgatagaggtaacaaaagctgatggctcgatagaaaatattgaagcaaaaaatataatcatagcaaccggctcaaaaccaattgaaattccttcagctaaatttagtaaaaatattgttgatagcactggagcactttcttttgacaaggtaccaaaaactctgggggttgttggggctggtattattggtctagaacttggaagtgtatggtcaagacttggttcagaggttactgtgattgaggctcttgatgattttcttccaatagctgataaagatatttcaaaagaatcacttaaagaatttaagaaacaaggtttagatattcaattaggctcaaaagtaacaaagtcttctcaagaaaaagattgcgttactgttacttatgagaatcaaggtaaagagatttgaa

SEQ ID NO: 223247 - DNA, 1405 bp, Unknown
  Bacterial polypeptide expressing nucleotide sequence isolated from the Sargasso Sea
atgtctaataaatttcaagcagttgtaattggtggaggtccagccggatatgtttgtgcaatcagactgtcgcaattgggaattaaaacagcatgtgttgaggccaaaaatacattgggcggaacctgtctaaatatagggtgtataccttctaaaagtttattgaatttatctgaatattttcttaaagcaaaaaagctttctagccttggaattgaagtaggcgagataaagcttaatttagataaaatgatgaaaaataaagataaagctgtaacaattttaactagaggtgtagaatttttgtttaaaaaaaataacattacacattttaaaggaattgctagctttaaaacatctaataaaattttaataactgatacacaaaacaagaaagaaacctccatcgaggctgaaaaatttattatttgcacaggctctgaaccaatatctttaccaggaattaattttgatgaaaaaattattgtatcttcaactggagctttatcattaaattcagttccaaaaaaaatgttagtagttggtggagggtacataggtttagaaatgggatcagtgtggtcaagacttggatctgaagtgcatgtaatagaatttttagatcatataactcccggaatggatagagaagtttcaaaggaatttatgaaaatattacaaaaacaaggtatgaaatttcatttagaaacaaaagttgaaaagattaaaaaaaaaaataattcagcaattgtatcaacatcaaatagagaaggaaaaaaaattgattttgaatgtgatgctgtattagtttcaataggcagaagacctaacacaaaaaatttaaatttggaaaaattaggtattaaaactaataaaaatatgaggataattgttaataaaaattttcaaacaactgtaaaaaacatctatgcgataggagatgttattgatggcccaatgttagcacataaggcagaagaagagggaattgcaactgctgaattgatagcaggtcaatcaggacatgttaactatgacgttattcctggagttgtttatacctctcctgaagttgcatcaattggaaaaacagaggagcaacttaaggaaaataatataaaatataaagtcggaaaattttcatttatggcaaattctagagccaaagctataaatgaggctgagggttttgtgaaaatgttatcagattatgaaactgataaggtattaggtgtgcatattattggatcacatgctggcgaaatgattgccgaggcaggtgttgcaatggagtttggagcaagttcagaagatattgctagaacttgtcatgctcatcctactttttcagaagctattaaagaagctgctttatcagtagataaaagagcaatacactcttagt

SEQ ID NO: 223248 - DNA, 1393 bp, Unknown
  Bacterial polypeptide expressing nucleotide sequence isolated from the Sargasso Sea
aatggaagaatttgatattacggttataggtagcggacctgcaggatatgtttgtgcaattagagctgcacagttaggctacaatgtttgttgcattgaaaaaggtcagactttaggaggaacatgccttaatattggctgtattccatcaaaatctcttcttcactcctcacatttatttgatcaggcatcggatctaaagaaattgggaatcaatttcgataatgtttcctttgatctgagtaaaataatggaaaaaaaatcagaaagtgttgaatcgctaactaaaggagttgaatttttgtttaaaaaaaacaaaatcaatcgtaagtctgggtttgcaaaactaaagaatattaatgaaatagaaattttatcaggtgaaaaatcagagacgattaaatctgcaaaaataattattgctactggatctgaggtatctagtcctgatggagtagtgatcgatgaaaaagatattttatcatctactggtgcattaagtctgcaatcagttcccaatcacttagttgtcattggcgcaggttatataggcctggaaatgggatccgtttggtcacgacttggttctaaagtaacagtcattgaatatgcagatagaattcttccaggaatggatacagaagtatcaagcagttttcagaaaatactcattaaacagggttttgactttaaactttctacggcattaagatcagtaagcaaagaaggtgattctttagctgtctcagtggaaaacaaggggcaaactatggatatagactgtgacaaggttctaatttctacaggcagaagaccttatacctttggattaaatcttgaagaattgggagttaaattaaatgataaaggttttataattactgataatcattttaaaacttcgatcgataatatttatgcagtgggtgattgcaaattaggtccaatgctagcccataaagcatccgaagaaggaactgccgttgcagagattattgatgggcaggcaggacatgtgaattatagtgcaattccatcagtaatatatacagccccagaagttgcttcagtaggcaaaacagaagatgaattaaaggctgcgggcattacctataaagtcggtaaatttccttttactgcaaatgcaaaagcaaaagtaatgaatgatacaggtggatttgtaaaaattttatccgacaataaaaccgatgaagtattgggtgttcatataattggtgctgacgcaggcaatatgataggtgagcttacggttgctatggaatttggagcatcggctgaagatatagccagaacgtgccatgctcatccgacattaactgagtcaataaaagaagcagctcttaatgtagaaaatcaagctatacatatttag

SEQ ID NO: 223249 - DNA, 1735 bp, Unknown
  Bacterial polypeptide expressing nucleotide sequence isolated from the Sargasso Sea
atggctgagataagaattcccgatcttggtgattttgaggaagttgaagtggtcgaggtgcatgtaaaagaaggagacagtattaaggaaggagatccaattttaacccttgagaccgaaaaggccgcgatggatgttcaaagtaatgtttccggtgtcatagagaaagtttctgtaagcctcggggaaaaagtttcgaatggtgatttggtgagcactgtatcatctgaatcagagactgatcaaaagcatgaatccatcgagaaggaagaagaactaaataaaaaaattgaattcaccgattcagtaaatacaccaatgggctcagaacacgattatcatctcattgtggtcggtgctggaccaggcggctatgcggcagcgttcagagcatccgacttaggcctaaaagtcgcattggttgataaaaattctgatttaggtggggtttgccttaatgtaggatgcattccttccaaagcttttcttcatgcggcaaagattttagatgactcaaaagacgcagcggttagtggaataaaattcaatgaaccagaaatcgatctatccaaaatgaagggatggaaaaataaaatcattggaggattaaccaatggactggaaggtttagcaaaacaaagaaatgtcgatgtgattcaaggcacggcaacattctcatcaaggaatgagattacaattaaacaccggggcgaatcgcagacaatttcatctgagcaattcatcattgctgtcggatctgaaccagctgagctcaattttatgcctgacgatcctaggattatggattcgactggagcattggagcccagtgagattccatcaaatatcttaatcatcggaggaggaatcattggtcttgaaatggcaaccatatactctgccctaggcagcgaagtcacaatcgttgaactaaccaaggatttaatgcctggaacggatcgagatcttgtcagacctttagaaaaagttctgaaaaagaagtgcaataagatcatgaaatcaactcaggtgatttctgcagaggccacagatgatggcatcaatatatccttcaagcaggacgaagaagaattcagcgaggtatttcaaaatgtccttgttgcagttggaaggaaatcaaacggaaatcttctgggactgaatgagataggcgtgaatattgatgatcaaggcatcatcaaagtcgatcaacaattcaaaaccagtgtcgaatcaatcctagctattggcgatgtgataggggatccaatgttggcacataaagcaagttatgaaggcaaagttgctgctgaggtaacagcgggtgaaagagtcagcaatgatgccagatgcatcccttctgttgcctatactgatccagaggttgcttgggtagggctttcagaagatgaatgcaaagccaaagggatgaattatggaaaaggtgtctttccttggtcagccagtggaaggtcacttgcaattggaagaaacgaaggcatgaccaagttgctttttaataattcaaccaaaaaagtcattggaggagggatcgttggaccgaatgctggtgacttgatatcagaaattgctttggctattgagatggattgcgatgtgaatgacgttgctttgactgttcatcctcatcccacgctatccgaaacagtcgccatggcggcagaagtttttgaggggactattacggatttataccttaaatccagcaaatgat

SEQ ID NO: 223250 - DNA, 598 bp, Unknown
  Bacterial polypeptide expressing nucleotide sequence isolated from the Sargasso Sea
atggaatatgatgtaatcgttattggaggaggtccaggaggatatgtagcagcaataaaagcatctcagcttggcctaaaaactgcttgtatagagtttgatgaggacgatcaagggaaacaaaagctaggtggaacttgtttaaatgttggatgcataccatcaaaatctctcctcgactcttcttataaataccatcaaatatcagaaagttttgatgagcatgggataaaagtatctaaacctaactacgatttaaaaaagatgatggaaagaaaaaatgatattgtaaaaaaacttacaggcggagtaagtcacttattttcacacaataaagtagaagcaattcatgggaaaggaaagctattaaatcaaaatgaagttgaagtcacagacctaaaaggaaagaaaaagaaatacaaaggaaaaaatattgttttagcgacaggctcgagaccaattaatataccatcagttccatggaatggtacgacagtagttggaagtgctggagccttagagtttactgagacaccaaaaaagcttggaataataggagcaggtgtcataggtttggaacttggtagtgtgtggtctc

SEQ ID NO: 223251 - DNA, 430 bp, Unknown
  Bacterial polypeptide expressing nucleotide sequence isolated from the Sargasso Sea
gatgttagaaaaatttgatgtaactgtaattggtggaggtccaggaggctatgtatgtgctattagattatctcaattaggattaaaaacggcatgtattgaatcaagaggatctcttggaggaacatgtttaaatgttgggtgtattccatctaaaaatttactaaatttttctgaaaattttcataaagctaaaaactttgaaaaaattggaattgaagttggtgaagttaagttgaatttagacaaaatgatgaaaaataaagaaaatgcagttacagttttaacaaaaggtatcgaatttttatttaaaaaaaataaagttacatattttaaaggcaaaggttcatttaaaagcacaaatgaaatatcaattttagctgaaggcaaagaaactacaattcaaacggacaaaacaataattagtact

SEQ ID NO: 223252 - DNA, 242 bp, Unknown
  Bacterial polypeptide expressing nucleotide sequence isolated from the Sargasso Sea
tatgtacgatgtcgtagttataggtagtggtccaggcggttatgttgctgcaattagatcttctcaacttggacttaagactgcttgcatagaaaaggaatcagacactgaatctaaatctcaacttggaggaacatgcttaaataaaggatgtattccttctaagtctctactagattcatcccaagaatatatagaagctcgaaataaactttcaggtcacggtattaaaatagatgaac

SEQ ID NO: 223253 - DNA, 331 bp, Unknown
  Bacterial polypeptide expressing nucleotide sequence isolated from the Sargasso Sea
agctgctcaactcggtttaagagtaatatgtgtagataaaagaggtagccacggaggaacttgcctaaatgtaggttgtattccatctaaagcattgttacatgcatctgagctatttattgaaaaaactaaattttcttcaatgggtattgaagccgacaatatatcattgaacctagaatcaatgatgtcttataaggatgaaggagtgcaaggtaatgttaagggaatagatttcctttttaaaaaaaataagattgaagcggtttatggagaagcaaaaattattgatgcgaataagatttctatcacacttgatgatgggcaataa

SEQ ID NO: 223254 - DNA, 1282 bp, Unknown
  Bacterial polypeptide expressing nucleotide sequence isolated from the Sargasso Sea
gaggcccagcggggttatgtgtgcgcaattagattatcccaattaggattaaaaactgcatgtatagaatcaagaaaaactttaggtggaacttgtttaaatgtgggatgtattccttctaaaagtttacttaatctttcagaaaattttagtaaagcaaaaaattttcaaaaattaggaattgaaatagaaggattaaaattaaatttagataaaatgatgcttagtaaagaaaaagcagtaacaaatttgacaaaaggcgtagaatttctttttaaaaaaaataaaattaaatattttcaaggcactggaagtttaaaatcaaaaaattcaatttctatatttgatgaaaagaataatgaaactttaattgaaagtaaaaatataattttatgcacaggatcagagccactatcattaccaggaattaagtttgatgaagaaaaaattgtatcttcaacaggcgctctgtctttaaaaaaagttccaaaaaaactggtaattgttggaggaggctatattggtttagaaatggggtctgtgtggtctagacttggttctgaagttcaggtaattgaatatttagatcatattacaccaggcatggataaagaaatatctatggaatttatgaaaattttatctaagcaaggtataaaatttaatcttaaaacaaaagtcaaatcgataaaaaaaacaaaaaaaaatttgattattgagacatcagactccaatggtaaacttgataatattgaatgtgatgttgtattagtatctgttggccgtaaaccttttacaaacaaattaaacattgaaaatttgggcatagaaattgacaaaaaaggcagaattaaagttaacaataaatttcaaacaagtatttcaaatatatatgctataggtgacgtcattgatggaccaatgttagcacataaagctgaagaagagggtatagcagttgcagaaataattgcagggcaatcaggacatgtgaattatgaggtaataccaggagtaatttatacatttccagaagttgcttcagttggcaaaactgaagaacaattaaaaaatgataatattaattataaaatagggaaatttccttttatagctaattcgagagctaaagctattgatcaacaagaaggatttgttaaaattttagctgatagcaaaactgataaagttcttggagttcatataataggaccgcatgctggagaaatgattgctgaaatgtctgttgctatggaatttggagctagctcagaagatatag

SEQ ID NO: 223255 - DNA, 223 bp, Unknown
  Bacterial polypeptide expressing nucleotide sequence isolated from the Sargasso Sea
gatgtttgatgtagtcgttataggaagtggaccagctggatatgtttcagctattagagcttcacaattgggtttaaaaactttgtgtgtagaacaatcagttgatgaaaaaggcaaagcaaatcttggtggcacatgtttaaatgttggatgtattccatctaaagcacttttagattcatcgcagagatattatgaagctaataaaaatcttggcgatcac

SEQ ID NO: 223256 - DNA, 790 bp, Unknown
  Bacterial polypeptide expressing nucleotide sequence isolated from the Sargasso Sea
aatgtcagataaatttcaagcagtagtaatcggaggtggtccaggtggttatgtttgtgcaattagactagcgcaattaggttttaaaactgcatgtatagaatcaagaggttcattaggtggaacttgtttaaatgtaggctgtattccttcaaaaagtttattaaatctatcagaagaatttcataagcttaaacatttaggtaataaaggaattgaaattggagaagtaaaattaaatttaagtaaaatgatgaaaagtaaagataaggcagttacaatacttactaagggagttgagtttttattgaagaaaaataaagtagtttattttaaaggtgttggaagctttaaatcaaaaaatgaaattttaattaaagatgatcaaaataaagaaagtttaatacaagctgaaaaggtaataattgctacaggttcagtaccagtttctttgcctggaattaattttgatgaaaaagtaattgtttcctcaacaggtgctttaaaattaaatcaggttccaaaaaaaatgattgtagttggaggaggttacataggattagaaatgggatcggtatggtcaagacttggtgctgatgttaatgtagttgaatttttagatcatattactcctggtatggataaagaaatatcaaatgagtttatgaaaattttaaaaaaacaaggaattcattttcatatgaagcataaggtagaaacaattaaaaaaaataattcaggagttattgttaaaacagatagacaaccaatggaaataaaaaagatttga

SEQ ID NO: 223257 - DNA, 910 bp, Unknown
  Bacterial polypeptide expressing nucleotide sequence isolated from the Sargasso Sea
atgagtgaacaatttgatttattagtaattggtggtggacccggaggttatgtttgtgcgatccgggcagcgcaacttggtctccagacaggctgtatagagtcaagaggtactcttggaggtacatgtttaaatgttggatgtattccatctaaaagtcttttgaatctatcagacatgtataaaaaagcacaaaaagattacaataatcttggtatagaagtcggagaagtaaaattaaatttgaaaaaaataatgatgaataaaagcaagtcagttcaagtattgacaaaaggtgttgagtttctatttaaaaaaaataaagtcacttatataaaaggtaaaggagttttattttcaaaaaatgatgtggttgtatacgaaaacggaaaaaaaacctcatacaaatctaaaaacattgtcatagctactggttcatcatcaagttctgtaccaggtatcgaaattaatgaaaaaaatataatttcttcgacaggagctatatccttagagaaagttccaaaaagcatggtcgttataggaggtggttatatcggtcttgagatgggttctgtatggtcgagactagggtctgatgtaacagtaattgaatatttggatcatattacaccaggtatggatagagaagtttcaaaagagtttcaaaagattttaactaaacaaggtataaaatttttattaaacaacaaagttacaaatgtaaaggatgaaaacaataaagttattgttgaatttgaagataaaaataccaaaaataaaaacaaaattgaatgtgaaaaagttttagtctctgttggtagaaagccttacacagaaggtttaaatctttcaaagattggtataaacaaggataaaaagggcagaattgatgttgataaagaatttagga

SEQ ID NO: 223258 - DNA, 1242 bp, Unknown
  Bacterial polypeptide expressing nucleotide sequence isolated from the Sargasso Sea
cgaagtaatcgatattctgatacaatccggagaccgtattcaggaagaagacccgttgatcactttggaaagcgacaaggcttccatggatgttccatcacctttctcaggaacgatttcgagtattcatcttaaggttggtgataaagtttccgaaggaaatctgattctggaattggatgaagagttaatcaattccgagccaactacccaaaaatcattagagaaaaaaacacctccctatgaagaaaacatcaatccttccaaaaacactgcaaccccatcttcccggcaagtgagtaaatcagatttgaactgtgaaatcctggttttgggtgctggaccggggggatatactgccgcattcagggcggctgatttggggaaaaaagtaattctagtggaacgctatgaaagtctgggaggagtctgcctgaatgttggatgcataccctccaaagctttgcttcatgctgcgaaagtcatcgatgacgcacacgccatgaaagaccatggaatcgattttggcaccccgaaaatcgatcccatcagactttcagcatggaaaaactctgtcgttggcaaactgaccaacggtctgaagtcacttgcaaaacagcgtaaagtagaatgcctaaccggaaaaggaactttccttgattcccatcatcttcagattgaatcaaaaagcggaacaaccaccgtccgatttgaaaatgccatcatcgccgccggttctgaacctgttaaactcccattccttcaagatgatcccaggatcatagattccacaggagcattaaatcttcaggaaatcccggaaacgatgttggtcatcggaggtggaatcatcggtcttgagatggcgaccgtttacaggtcaatggggaccaaaattacggttgttgaaatgcttgacgggttgatgactggagcagaccgtgacctggtaaaaccctttcaccgcaacgtttcacgtcagtacgataacatctggctggaaaccagggtcactcaagtcgaagctcaaaaaaagggtttgaaagtccattttgagggaaaaaatgctcctgaaaaaccagttgtcttcgaaaaaatcctaagtgcggtgggaagaactccgaacggattaaaaatcagtgcagaaaacgcaggggtttcggtggatgaaaaaggcttcattaaggtagactcccagatgcgcaccaaatgtatcgaatatttatgccatcggagatatcg

SEQ ID NO: 223259 - DNA, 1402 bp, Unknown
  Bacterial polypeptide expressing nucleotide sequence isolated from the Sargasso Sea
atggataactttgatttaattgtaattggtgggggtcccggtggctacgtttgtgctattagagctgctcaacttggtttaaagactgcttgcatagagtcaagaggaactctaggaggaacatgccttaatgttggttgtattccctcaaaaagtcttttgaatttgtctgaaaattttcacaaagctaaaaaggactttaaccatcaaggaatagaaattgagggtattaaattaaatattgaaaaaatgatgtctaataaaaataaatcagtccaagttttgacaaaaggagtcgagtttttattcaaaaaaaataaagttacttatataaaaggaaaaggggtacttttctcaaaaaatgacatagtggtttatgataataataaaaaaactaactacaaagctaaaaatatagttatagctacaggatcatctgtagcctcattaccaggtatagaaattgatgaaaaaaatattatttcatcaactggtgcattatctttgaaaagcgttccaaaaaaattagctgtaattggtggaggttatattggtttagaaatgggctcggtttggtcaagattaggtgcagaagttacagttttagaataccttgattatataaccccaggtatggatagagaaatttcaaacgaatttaaaaagattttatctaaacaaggaattattttcaagatgggctctaaggttaataaagtaaattcttccggatcaactgtcataataaattacactgatttaaaaagttcgaaggatgaaactttggaattcgataaagtactcgtatcagttggtcgaaaaccttatacagaaggtcttaaccttacaaaaattggtgtgaaaaaagatgaaaaaggaagaatagaagtcaatgctaaattacaaacctcaattaaaaatatttatgctataggcgatgttatcaaaggcccaatgttagctcataaagctgaagaggaaggtatagcagtcgcagaaatattagcgggtcaggcaggacatgtaaattatgacgtgattcccggagttatttatacctccccagaagtagcaacagttgggaaaacagaagagcaacttaaagaagaaaagaaatcttacaaagttggaaaatttcccttcttagcaaactcaagagcgaaggtaaataatgaaaccgagggttttgtaaaaattttagctgatagcaaaactgataaagttttaggggtgcatatcattggtccccattgcggagatatgattgccgaaatggcgttagctatggaattcggagcaagtgcagaggatattgctagaacctgccatgctcatccaacacatactgaggcaataaaagaagcagcattagctgttgataaaagaccaattcatttttaat

SEQ ID NO: 223260 - DNA, 1248 bp, Unknown
  Bacterial polypeptide expressing nucleotide sequence isolated from the Sargasso Sea
tatgtttgatgtagttgttattggtagcggtccagcgggatatgttgctgcaattagagcctctcagctaggcctcaaaactttatgtattgaagaattatcaaatgataaaggtaagcctaactttggtggaacatgtctaaatgtaggatgcataccctcaaaatctttattagattcgtcacatagatattatgaagctaaaaaaaatctaagcgatcatggaattcaacttggtgatgtgaaattagatttaaaaacaatgatggagcgaaaggataacattgtttcaaaactaactggcggaatagatggattatttttaacaaataaagttgaaagtatttgtggcaaaggaaaagtaatttcaaaaaatactgttcaaattgataaggcagatggttcttctgaaaaagtagacgctaagaatataattatcgccacaggatcctctcctatagaaattcctgctgcaagttttggtaagcatatcgttgatagcactggagctttagctttcggtagtgttcctaaaagattgggtgttgttggtgctggaattattggcctagagcttggaagtgtttggtctagactaggttctgaagtaactgttatagaggcactagaggactttttgccgatgactgatacagatatctctaaagaatctctcagagaatttaaaaaacagggattagatattcaattagcttcaaaggttacaagtacaaaagagctaaagaattcagtaaaagttaaatatgaacataaaggaaaagaaatcgaggttgaattcgataagttaatagttgctgtaggtagaaagccaaactcagataaggttcttccaaaaaatctaggtatcaaaattgaaaatggttttattcaagtcaatgaatactgtcaaacttccgtagaaaatatttgggccgtaggtgatgttgttaggggtccaatgcttgctcataaaggtagtgaagagggaattatggttgctgagagaattgcgaataaacaagcagaagttaactatgatttagttccaaatgtaatctattcacatcctgaaatagcctgggttggaaaaaatgaaaatgaattgaaatctagtggtatcaaatacaaagtgggtaaatttccatttgctgctagcggtagagcccttgcggtagatcaatcagttggttttgtaaaagtgatctcagatgaaaaaacagactctattctaggagttcatgtttttgg

SEQ ID NO: 223261 - DNA, 612 bp, Unknown
  Bacterial polypeptide expressing nucleotide sequence isolated from the Sargasso Sea
gatgtcagataaatttcaagctgtagttattggtggtggccctgggggttatgtttgtgcaataagattagcacaattaggtctcaaaacagcatgcatagaatctaggggttccttaggtggaacttgtttaaatgttgggtgtattccttccaaaagtttactaaatttatcagaggaatttcataaagttaaacatttgtctaacaaagggatcgatgttggggagataaaactcaatttatcaaaaatgatgaagaataaagaaaaagcagtcactgttttaactaaaggagtagagtttttattaaagaaaaataaagtgacttactttaagggaactggaagctttaaatcaaaaaatgaaatttctatcaaagatgataaaaaaaaagaaactatgatacaagctgataaggtaattattgcaacaggttcattaccagtatcactacctggcattgaatttgatgaaaaagttattgtttcttctactggcgctttagaattagagggagtgccaaaaaaaatgattgttgtgggaggaggttacattggattagaaatgggatcagtttggtcaagactggaacagaagttcatgttattgaa

SEQ ID NO: 223262 - DNA, 1306 bp, Unknown
  Bacterial polypeptide expressing nucleotide sequence isolated from the Sargasso Sea
attgaaaaagaaacttcacttaggaggtacgtgtttaaatataggatgtattccatcaaaagctttattaaactcttctgaaaaatttgtagagatatcgagtcatgtagccgagcatggaattaaaacttctaaagtagatttagatttagatgtattgatgcaaagaaagactaagattgttaaaaaattaacaactggtattggtttcttatttaaaaaaaataaaattacccatattccaggttcagcatcatttgttgattctaaaacagtttcaattgaaagtggaaaacaagaaattacagcgtcagcaaaaaactttattattgctaccggatcatcttctatagagatcccaaacattcccgtagatgaaaaacaaattctatcttcaactggggcactttcattaacgaaagttcccaaatcacttctcgttattggaggggggtatatcggattagaaatggggtctgtatggagcagacttggatctaaagttactgttgttgaagcgctagatagaattgtaccaacaatggatggggaaatagctagagagtttatgaaaatgcttcaaaaacaaggtttggaatttaaactttcacataaagtgagttcagctaaatctagcaaattaggagtagatgttgaaatagaaacatctgataaaaaagtaatcaaagaaaattatgaagttgttttaatgtcagttggcagaaaacctaatattgaaggattaggtttagaaaaaattggagttaagttaacggataaaaaatcaattgagattaaagataactttcaaacatcagtaaagggaatttttgctataggtgatgtagtacctgggccaatgctagcacataaagctgaagaagaaggagtggcttgcgttgaatatataaacggtcaaaagcctcatataaactatgatgctatacctgcaattgtatacactaaccctgagatagcatcagttggtaaaacagaagaacaacttaaagaagaaaataaagaattcaaaactggaaaattcccttttatggcaaatggtcgtgcattaacaacctcggcttctgaaggttttgttaaaattttagtagataaaaaaacagacgaaattttaggtgctcatataattggtcatgacgcaggtcagttaattgcagagatagttaccactattgaatttggtggaagtgcagaagatattgcgagagtatgtcatgctcatccaacaactagtgaagcggtaaaagaagctgctctaagtgttgatggtagagcaattcatatttaa

SEQ ID NO: 223263 - DNA, 1393 bp, Unknown
  Bacterial polypeptide expressing nucleotide sequence isolated from the Sargasso Sea
tatgaataagtcatatgatatagcaattttgggtggagggcccggtggttatgttgctgcaattaaagcttctcagttaggtttaaagactgcgattattgatcaagatgaattaggtggtatttgccttaattggggatgtataccaacgaaagctttattaaaaaatgctgaaatgattgaatcaataaaaaatgcagatcaatatggtatttcaatatcatcatattcaatagactttgataagattattaatagaagtagacaaatttctgaaagattgtctaagggaatttcttatttgatgaaaaagaataatataacccatattcaaggtaggggagtttttacaaaaaagaataatatcgaagtttctaaaggaaaaaaagttactaatgttgaagcaaaacattttattattgctacaggaggtaggccaagaactataccagaacttaagatagatggtaaacagattatcagttcaaaagaagcgatgattcttaaaacccctcctaaagatatggtaattattggcggtggagctattggttgtgaatttgcatatttttacaattcctgtggatcaaaaattactatgattgaaatgctggaaagagttttgccaatggaggatgaagatatttctaaagaattaagaaaacaatttgtcaattctgggattcagataaatactaatacaattgttgaaaaggttgaaaaattaaaaacaaaagtaaaagttcatattaaaagtggtaataaaaggactattatagaatctaaggtagttcttgttgctattggtataacgggaaatatcgaggatattggcttagattcaattggtgtaagtacaaataatggatctattgaaaccgatgattattgtcaaactagtataccaaatatttttgcaattggagatgtctctggccccccttggttagcgcatgtagcatcagctcagggacatattgcaatagaaaaaataaaaaatgtcagcacacatccaattgattataataatataccagcctgcacatactgtcagcctcaagttgcatcactaggcttaacagaaattcaagcaaaagaagcgggacataatattaaagtaggaaaatttcactttaaatcaagtggtaaggctctatctattggaaagccggaaggttttgtaaagataatttttgattcaaagtatggagaattgcttggatgtcatattatagggtcagaagctacagaactaattcaggaattagttttagcaaaaaatcttgaggctacctgggaaaatcttgcctacactatgcatccgcacccaactctttcggaggcgatcatggaagcagctatggatgcttatggtagcggggttcatcaatga

SEQ ID NO: 223264 - DNA, 1402 bp, Unknown
  Bacterial polypeptide expressing nucleotide sequence isolated from the Sargasso Sea
atggataattttgatttaatagtaataggtggaggcccaggaggctatgtttgcgctatacgagcagcacaacttggtttaaagacagcttgcgtagagtctagaggagctctaggaggaacttgcctaaacgtaggctgcattccttcaaaaagtttactaaatttgtctgagaactttcataaagctaaaaaagattttaaccaacaaggaattgagattgagggcattaagcttaatatcgaaaagatgatgtcgaataaaaataaatcaattcaagttcttacaaaaggagtagaatttttatttaaaaagaacaaggtaacttatttaaaaggaaaaggtgtaatattttctaaaaatgatgttgtagtttatgataataataaaaaaactaactataagacaaaaaatattgttattgccactggttccgaggtagcttctttaccaagtataaaaatagacgaaaaaaatataatttcttcaactggtgctttatcattaaacaaagtaccaaaaaaattagccgtgattggtggtggttacattggtctagaaatgggttctgtatggtctagattaggttcggaagtcactgtgattgaatatcttgattttattactcctggaatggataaagaaatttctaacgaattcaaaaaaattttaaccaaacaaggaataaaatttaagatgggttcaaaagttaattcagtaaaaaatattagctcaaaggtattaataaattatacagatattaaaaattcaaaagatgaaactttagaagttgataaggtgttagtttccgtgggacgaaagccatacactgaaggacttaatctaacaaaagtaggcgttaaaaaagacaataaaggaagaattgaaactaatgaaaaattacaaacatcaattcagaatatttatgctattggtgatgttataaaaggaccaatgttagcacataaagcagaggatgaaggaatagcagtagcagaaattttagctggtcaagcaggacacgttaattatgatgttataccaggtgtgatttatacctctccagaagtagctacagtaggtaaaactgaggaacaactaaaaaaggaaaatatagattataaagttggaaaatttccatttttagctaactcaagagcaaaagttaataatgaaaccgagggttttgtgaagattttagctgatagtaaatctgataaagttttaggtgtacatattattggccctcattgcggagatatgattgcggagatggctttagcaatggaattcggggcaagtgcggaagatatagccagaacctgtcatgctcatccaactcacacagaagcaataaaagaagctgcattagctgttgataaaagaccaattcatttttaat

SEQ ID NO: 223265 - DNA, 639 bp, Unknown
  Bacterial polypeptide expressing nucleotide sequence isolated from the Sargasso Sea
catgtcagaaaaatttgatgcagttattataggtggcggaccaggaggttatgtttgtgcaattagacttgctcaactcggtcaaaaaacagcttgtattgaatctagaggatctctaggtggaacatgtttgaatgtaggatgtataccatcaaaaagtttattaaacttatctgaaaattttcataaagcaaaaaactttgataaaattggtatagaggtaggttctttaaaacttaatcttccgaagatgatgaaaaataaggaaaaagcagtaactgttttgactaagggaatagagtttttgtttaaaaaaaataaagttacctattttaaaggaactggctcaattacaagtgccaacaaaatatcgataaaatctaatgataataagaacgaaacaattgaagcaaaaaacatagttattgcaacaggatctgaccctgtttctttgccaggtgttaaattcgatgaagaaaaaatagtttcgtctactggtgcactctctttaaaagaagttccaaaaaaattagttgtagttggtggtggatatattggactagaaatggggtcagtttggtcaaggttaggatctgaagtccaagttgtggaattcttagatcatataactccaggcat

SEQ ID NO: 223266 - DNA, 584 bp, Unknown
  Bacterial polypeptide expressing nucleotide sequence isolated from the Sargasso Sea
aatgtcagaaaaatttcaagctgcagttattggaggtggacctggtggttatgtgtgcgcgataagacttgctcaactaggattaaaaacagcctgtatagagtctagaggttctttgggaggtacttgtttaaatatcggttgtatcccttccaaaagcttactaaatctatctgaagaatttcataaagttaaaagcttagcaaataaaggtattgaggttggtgaagtaaaattaaatttaaacaaaatgatgaagagcaaagataaagctgtaacagttcttacaaaaggtgtcgaatttcttttgaaaaaaaataaagttagttatttcaaaggacatggaagttttaaatctaaaaatgaaattttaataaaggatgataaaaataaagaaactatcatccaaacagaaaaaacagttattgcaacaggatcagttccagtttcgttaccaggaatagaaatagatgagaaaataattgtttcgtcaacaggtgctttaaaattagagaaagtaccccaaaaaatggtggttgtaggaggaggctatataggattggagatgggatcagtatggtcaa

SEQ ID NO: 223267 - DNA, 1090 bp, Unknown
  Bacterial polypeptide expressing nucleotide sequence isolated from the Sargasso Sea
aatggctgaaaaatttgatgttactgtaattggaggaggacctgcaggatatgtatgtgcaattagattatcacaattaggattaaaaactgcatgtatcgagtctagaggatctttaggaggcacttgtcttaatataggatgtatcccttctaaaagcctattaaatatgtctgaaagttttcataaagctaaaaatttctctaatattggcatcgaaactggtgaaattaagctaaatctggaaaaaatgatgagcaataaagacagctctgttgcaacacttacaaaaggagtggagtttttatttaaaaaaaacaaagttacttacattaaaggggtgggatcttttaatgaaaaaaatgaaatattagtcaaaaatgataaatcagaaataaaaattaaaactgataaaactataataagcacaggatcagaacctttatctcttccaggaatagattttgatgaaaaaaaaattctttcatcaacaggagctcttaatatttctaagcttccaaaaaaaatggttgttgttgggggtggatatattggattggagatgggttctgtttggtcaagattaggaactgaggttcatgtcgtagaatatttagatcacatcaccccaggactcgataaagaaatttcaaatgaatttatgaaaattttaaaaaagcagaatattaaatttgaattaaataccaaagttgaaaaaattactaaaaatgaaaaagggataataatagaaacttctaataaaaattcaaaagataaaattgaagccgacgtagttttgatttctgttggaagaaaaccctacacagataaattaaatttagaaaaaattggagtaaatcttgataaaaaaggaaaaataaaagttaataaaaattttgaaaccaatgtaaaaaatatttacgcaataggagatgttatagatggacctatgttggctcataaagctgaagaggaaggaatagccgtagcagagctaattgctggacagtcaggtcatgtgaattatgatgtaataccaggtgtaatttatacttcaccagaggtagcctatgttggtaaaaatgaggaa

SEQ ID NO: 223268 - DNA, 1110 bp, Unknown
  Bacterial polypeptide expressing nucleotide sequence isolated from the Sargasso Sea
gagtagaatttttatttaaaaaaaacaaagtaacttactttaagggaactggtaaattaaagtcaaaatctgagatagtaattatagataaagaaaataaagaaataaatattgaatcagaaaatataataattagcactggctcagaaccagtgccacttcctggtattgaatttgatgaagaaaaaataatatcttctactggtgcattatcactaaaatctgtaccaaaaaaaatggttgttgttggtggtggctatattggcttagaaatgggatcagtttggtctaggttggggtcagaggttcatgtagttgaatttttagatcatattactcctggaatggatagtgaaatatctaatgaatttatgaagattttaaagaaacaaggtataaattttcatttagaaactaaagttgaaaaaatatctaaatcatcaaatggagtattgattgaaacccaaaataaaaatgggaagaaaattaaatttgaaagtgatgtagttttaatttctgtaggaagaaaaccttatactaaaaatttaaatttagaaaaaataggtattaaattagacgaaaaaaaaagaataaaaattaataaaaattatcaaactaatgtaccaaatatttatgcaattggagatgtaattgaaggtccaatgttagctcacaaagctgaagaagaaggtatagcagttgctgaactaatttcaggacaatctggacatgtaaactatgatatcattcctggtgtgatttacacaaaaccagaagttgcctctattggaaaaactgaagagcaactgaagaaaaaaaatcaaaaatataagattggaaaatttccttttatggccaattcgagggcaaaagcaattgatgaaccagaaggttttgtaaaaattttagctgatgcaactacagataaagtactaggtgttcatttaataggtccacatgcaggtgaattaatcgcagaaatggcaatagcaatggaatttggagctagttctgaagatattgctagaacttgtcatgcacatccaacattttcagaagctgttaaagaagcagctttatcagtagaaaaaagacaaattcattcgtagt

SEQ ID NO: 223269 - DNA, 1402 bp, Unknown
  Bacterial polypeptide expressing nucleotide sequence isolated from the Sargasso Sea
aatggctgaaaaatttcaagcagtagtaattggaggtggccccggtggttatgtgtgtgcaataagattatctcaattaggttttaaaacggcatgtgtagaggcacgaaatacacttggtggtacttgtcttaatgtaggatgtataccttcaaaaagtttactgaacttgtcagaaaattttcaaaaagcaaaaaaattacaaaatctaggaattgaagtaggtgaggttaaattaaatttagaaaagatgatgaaaaataaggaaaaatcagtctccattcttacaaaaggagtcgaatttttattcaaaaaaaataaagtctctcatttcaatggaactggctctatagcatctgcaaacgaagttttagtaacaacaaaggataataaaaaaatttctttagatacagacaatataattatttctacaggttcaataccggttgagttgccaggaatgaagtttgatgaaaaaattattctatcttcatctggtgctcttgatcttaagagtgtaccaaaaaaaatgattatagtgggaggtggatatattggtcttgaaatgggatctgtatggtcgagactgggctcggaagtacacgtagtcgaagcattaaactatattacaccaggaatggataaagaaatctcctcagagtttttaaaaattctgaaaaagcaaggtattatttttcatcttgagacaaaagtacaaaacatcaaaaatgaaaaaaattctgcaaaagtttcaatacaagataaaactggcaaaaatagtgaattaattgcagatgttgttttgatttctgttggtagaaaagcaaatacgaaaaatcttaatttagaaaaaattggtgtgagcttagataataaaaaaagaattaaagtaaataaagaatttagaactagtacaaaaaatatttttgcaataggtgatgtgatctcaggtccaatgttagcacacaaggctgaagaagaaggtatagcggttgcagaattgatagcgggtcaatcaggccatgtaaattatgatttaatacctggggtaatttacacatctcctgaagttgctgttatcggaaaaactgaagagcaattaaaagaaggtaatataaaatacaaagtcggcaaatttccttttatggctaactcaagagctaaaactgttaataatgcagaaggttttgttaaaatattagcagatgaaaagactgacaaggtattaggtgttcacatgattggatcgcacgttggagaaatgattgcagaaatggcagttgctatggaatttggtgcaagttcagaagacattgctaggacttgccatgcccatcccactttttcagaagcaattaaagaagcagctttatctgtagaaaaaagagcaatacactcttaa

SEQ ID NO: 223270 - DNA, 278 bp, Unknown
  Bacterial polypeptide expressing nucleotide sequence isolated from the Sargasso Sea
aatgaaagatgttttaattattggaagtggtcctgctggctatgttgcagcaattcggtgtgctcaaaatggtttggatactgcgattattgaatcaaaagctgagtttggaggcacttgcctaaatgttgggtgtattccatcaaaagctcttttagattcatcaaataaatattatcaagccaaagagcatttttcagagcatggaatttcttttacagaacaaagtttcgacctaggaacaatgatgactagaaaggatgacgtcataaaaaaat

SEQ ID NO: 223271 - DNA, 1480 bp, Unknown
  Bacterial polypeptide expressing nucleotide sequence isolated from the Sargasso Sea
tttcgaaactaaggtttcaggatccatttatacaaaaatttctgctgattcatccacagtttcagatatcaactgcgaagttttggtgctgggttctggacctggcggatacacagctgcctttagagcagcagacttgggtctgcgggtagtgttggtagaacgacacgaacaaattggaggagtttgccttaatgttgggtgcattccatctaaaagcctgcttcatgttgcaaaaattatttttgaagctcaagaaattgatacacatggtatttcgtttggaaaaccgaccattgatcttgataaacttcgtgaatggaaaaattcaacaattaggcagttaacgggtggactgaaaagcatggccaagcagcgtaaagtgaaaataataaacggttttggcgagtttgctgattctaataatcttacagtaacagataagaatgacaaaatttctagaatcaatttttcaaatgctgttattgcagcaggttcaagaccagttaagttgccttttcttccagaggatcctcgtataattgattcaaccggttcattagagcttgcctatattccaaaaaatctactggtgattggaggaggaataattggcctcgaaatggcaacagtttatcatgctttgggatcaaaaattactattgttgaaatgcttgatggactgatggctggagcagatcgtgatctggtccgtccttttcaaaagcgtattgctaaacaatataatgatatttttcttgaaacaagagtgaccgaagttgaagctctcaagaaaggtcttagagttcatttcgaaggaaaaaattctccagatgaaccgcatatgtatgattgtatactctcttctgttggacgtgtccccaatggtttaaacattggagcagaaaaagcaggagtagaagttgatgaaaaaggttttatcagcactgattcgcaaatgcgcactaatgtatctcatatctttgctattggtgatcttgcgggacaacctatgcttgcccataaggcatcacatgaagcaaaagttgctgcggaggctatttcaggaatgaaaagtttttttgatgcccgagccgttccatcagttgcatatacagatcctgaagttgcttggactggcattactgaagaagaagccaaaacgcaaggcattgcttatggaaagggaagcttcccctgggcagccagtggaaggagcttgtctatgggcagaagtgagggacttactaaagtgatattcgaagaagtctcaaaaagagttataggtcttggcatcgtcggaccgaatgcaggggatttaattgctgaaggaactctagccattgaaatgggatgtaacgcaattgatataggatctacaattcatccccatcctactttatctgaaactgtggcattcgcagcagaagcatacgagggaacaattacagatttatatattcctggtaaaaaaaaataa

SEQ ID NO: 223272 - DNA, 1399 bp, Unknown
  Bacterial polypeptide expressing nucleotide sequence isolated from the Sargasso Sea
tatgtcagaaaaatttgatgttacagtaattggtggtggtcctggtggttatgtttgtgcaattagattgtctcaacttggacttaaaactgcatgcatagagtctagaggatctctaggggggacatgtttaaatattggatgcatcccatcaaaaagtttacttaatttatctgaaaaatttcacagtgctaaaaattttgaaaaaattggaatcgagactggagaaataaaactcaatttagataaaatgatgaaaaataaagacaaagctgtaacagttttgactaaaggagttgaatttttattcaaaaaaaacaaggtcacttattttaaaggcaaaggttcatttgagaacgagaattcaataaaaattgaaggcttggaaggcactaaaataattcaaactgataaaacaataatcagtacaggatcagagccagtttcattgcctggagtagattttgatgaagagagaattctttcttcaactggagccctatctattcccaaactcccaaataaaatgattgttgttggtggaggatatatagggttggaaatgggatcagtttggtcaagacttggcactgaagtcacagtcgttgaatttttagatcatatcacgcctggaatggatcgagatatttcaaatgaatttatgaaaatattaaagaaacaaggtataaaattcaaccttaatactaaagttgataaaataactaaaaactctaacggtgtgacggttgagacttcacaaaatgatggccaaaaagttaaacatgatgttgatgttgttttaatttctgtaggaagaagaccttatactaaaaacttaaatttagataaagttggtgtaaagttagatgaaaaaggaagagttaaagtaaataaaaattttgaaacgaatgttaaaaatatttatgcaataggtgatgttattgatggcccaatgttagcccataaagctgaagaggaaggaattgctgttgcagaattaatagcaggtcaatcaggtcatgttaattatgatattattcctggagttgtttatacatctcccgaagtcgcttatgttggcaaaagcgaagagcaattaaaaaaagaaaacatagggtacaaaattggtaaatttccttttatggcaaattcaagagccaaagcaattgatgagccagagggttttgtaaaaattttggcagaccaatcaactgataaagtgcttggtgtacatattattggtcctcatgcaggagaaatgatagctgagatggctgtcgcaatggaatttggagctagttccgaagatattgcaagaacatgtcacgcacacccaacattttctgaagctataaaagaagcagcattatcagtagataaaagacaaattcactcttaa

SEQ ID NO: 223273 - DNA, 1402 bp, Unknown
  Bacterial polypeptide expressing nucleotide sequence isolated from the Sargasso Sea
atgtcggaaaaatttcaagcagtagttataggaggtggcccaggaggttatgtttgcgcaattagacttgcccaattaggtttaaaaactgcatgtatagagtccaggggatctcttggtggtacatgcctaaatattggttgtatcccttcaaaaagcttgcttaatttatctgaggaatttcacaaagttaaaggtttggcaaataaaggtattgaaataggagaagtaaaactaaatcttgataaaatgatgaagagcaaggacaaagcagtcactgttcttacaaaaggtgtagaatttcttctaaaaaaaaacaaagttacctattttaaaggtcatggaagttttaaatcaaaaaatgaaatcttaataaaagatgatcaaaaaaaagaaaccataattcaaactgaaaaaacagttatagccacaggatctgtaccagtatctctaccgggcatcgaaatagatgaaaaaataatagtttcatcaactggagctttaaaattagaaaaagtgcccaataaaatggttgttgttggtggaggttatatcggcttagagatgggatcagtgtggtcaagacttggtgcaaaagtagaagttgttgagtttttggatcatataacacctggtatggataaagaaatttcgtctgagtttatgaaaattcttaaaaagcaaggaatgaagtttaatatgcaaaataaagttgaaacaattcaaaaaaataattcaggcgcagtggtctcaacaattgataaagatggaaataaaaataattttgaatgtgatgtagttttaatttcagttggtagaaagccaaatacagatggtttaaatttaaaaaatgccggggtgagtttagatgaaaaaaatagaataaaaactgataagaaatttaaaacaaatgttgaaaatatttatgcaataggtgatgtgattgttggacccatgcttgcacataaggctgaagatgaaggtatagcagttgcagaaaatattgtaggtcaatcaggtcatgtaaactatgatacaataccaggtgtggtttatacgtcaccagaggttgcctcaattggtaaaacagaggagcaattaaaagaattaaataaaagttataaggttggtaaattttcgttcatggccaactctagagctaaagctatagatgatgcagaaggttttgtgaaaattcttgcagatgctgagacagataaagttttaggtgcacatataattggtccccatgctggagaattaatagctgaaatcggtgttgcaatggaatttggtgcaagcgccgaggatatcgcaagaacctgccatgctcacccaactttttctgaagctgtcaaagaagctgcgttatcagtagataaaagagcaatacactcttaat

SEQ ID NO: 223274 - DNA, 1305 bp, Unknown
  Bacterial polypeptide expressing nucleotide sequence isolated from the Sargasso Sea
tgaaaaagaaacttcacttgggaggcacatgtctaaacataggatgcattccctccaaagctctattaaattcttctgaaaagtttacagagatatcaaatcatttagcagagcatggaattaaaacctctaaagtagatttagatttagatgtattgatgcaaagaaagactaagattgtaaaaaaattaacaactggaataggcttcttatttaaaaaaaataaaattactcatattccaggctcagcatcatttgttgattccaatacagtttcaataataaatggtaaacaagaaattacagcgtcagcaaaaaactttattattgcaactggatcatcttctatagagataccaaacattcccgtagatgaaaaacaaattgtatcttcaactggggcactatcattaacgaaagttcccaaatcacttcttgttattggaggtggttatattggattagaaatggggtctgtatggagcagacttggatctaaggttactgttgttgaggcactagatagaattgtaccaacaatggatggcgaaatagctaaagagtttatgaaaatgcttcaaaaacaagggttggaatttaaactatcacataaagtgagttcagctaaatctagcaaatcaggagtagatgttgaaatggaaacatctgataaaaaagtaatcaaagaaaattatgaagttgttttaatgtcagttggtagaaaacctaacactgaaggattgggtttagaaaaaattggagttaatttaacggataaaaaatcaattgaaattaaagataactttcaaacctcagtaaaaggaatttttgctataggtgatgtagcaccaggaccaatgctagcacataaagctgaagaagaaggagtggcttgcgttgaatatataaacggtcaaaagcctcatataaactatgatgctatacccgcaattgtttatactaaccctgagatagcatcagttggaaaaacagaagaacaactcaagcaagaaaataaagatttcaaagttggaaaatttccttttatggcaaatggtcgtgccttaaccacatctgcatcagaaggatttgttaaaattttggttgataaaaaaacagatgaaattttaggtgctcatataatcggtcatgatgcaggtcagttaattgcagagatagttactactattgaatttggaggaagtgcagaagatattgccagagtatgtcatgctcatccaacaactagtgaagcagtaaaagaagcagctttaagtgttgatggtagagctattcatatttaat

SEQ ID NO: 223275 - DNA, 651 bp, Unknown
  Bacterial polypeptide expressing nucleotide sequence isolated from the Sargasso Sea
tatgagcgaacaatttgatttattagtaattggcggtggaccaggaggatatgtttgtgctatacgcgcagctcaattaggtttaaagacaggttgtatagagtctagaggaacgctaggaggaacttgtcttaatgttggatgcattccatctaaaagtcttcttaatttatcagatatgtataaaaaggcacaaaaagattataacaatctcggtattgaagttggagaagtaaaattaaatcttaaaaaaataatgatgaataaaagtaaatcagttcaagttttaacaaaaggtgtagagtttttatttaaaaaaaataaagttacgtacattaaaggtaagggagttttgttttcaaaaaatgatgtagttgtatacgaaaatggaaaaaaaacttcttataaatcaaaaaatattgttatagctactggttcatcatcaagttctgttccaggaattgaaattaatgaaaaaaatataatatcttcaacgggggctatatctttagaaaaggttccaaaaaatctagttgtaattggaggaggttatatcggtcttgagatggggtcagtatggtctagactaggctcagaagttacagtaattgaatatttagatcatattacaccaggaatggacagagaagt

SEQ ID NO: 223276 - DNA, 290 bp, Unknown
  Bacterial polypeptide expressing nucleotide sequence isolated from the Sargasso Sea
aatgacagataaatttgatgtaacagtaattggtggtggacccggtggttatgtctgcgctattagattatctcaattaggtttaaaaactgcatgcatagagtcaaggggatctctcggaggaacatgtttaaatgtaggatgtattccttcaaaaagtttactaaatttgtcagaaaattatcataaagcaaaaaattttgaaaaaattgggattgaagttggcgaagtcaaattaaaccttggtaaaatgatgaaaaataaagaaaaagctgtaacagttttaacaa

SEQ ID NO: 223277 - DNA, 1426 bp, Unknown
  Bacterial polypeptide expressing nucleotide sequence isolated from the Sargasso Sea
tatgtctgaaaaatttgatgcaattgttataggtggtggcccaggtggatatgtttgcgcaataaggcttgctcaattaggaaaaaaaactgcatgtgtagaatataggggcactttaggcggaacgtgtttaaatattggatgtatcccctcaaaaaatttattgaacctttctgaaaattttcaaaaagcaaaaaatttttcaaaagtaggaatcgagataagtgatattaaattaaatcttgataaaatgatgaaaaataaagataaagcggtaactgtattaactaaaggagtagagtttttatttaaaaaaaataaggtttcttatttcaaaggttttggaagctttctttcagacaaaaaaataaaaatcaaaagttctgacggcaaagagtcagaaattgaaggggaaaatataattattgctactggctcagagccctctaaaatgccaaatattaactttgatgaggaaagaattgtatcttcaacaggtgctctttctttaaaaaaagttcctaaaaaaatgattgtaatcggtggtggatacatcggactagaaatgggttctgtttggtcaagattaggttctgatgttcatgtaattgaatttttagatcacattacacctggtatggataaagaaatttcaaatgaatttatgaaaattttaaaaaaacaaaacataaaatttcatatgagcacaaaagttgagaaaattataaaaaaaggagaaaatgtagagatagagacttataatattaaaggagaaaaaagctctcacgattgtgacgttgctctaatctcaataggtagaaaggcatttacagataagctaaatttagagaaaataaacttaaaaactgacgaaaaaggtagagttagagtagataaaaattttaagacagaccaaaaaaatatttttgctataggtgatgtaattcaaggaccgatgttagcgcataaggctgaagaagaaggtattgcagtggcagaaattattgcaggtcaatctggacatgtaaattatgatttaattcctggagttatttacacttccccagaagtagcaactattggaaaaacagaggaacaattaaaaaaacaaaatataagttataaaataggaaagtttccattcatggcaaactctagagctaaagcaattgatgagcccgaaggttttgtaaaaattctagctgacaactcaactgataaagtgttaggggtacatattataggcccccatgctggtgaaatgattgctgaaatggcagttgcgatggaatttggtgcaagttatgaggacattgcaaggacttgtcatgcacatcctacgttttatgaggcaattaaagaagatgcattatcagtagataaaagcacagattcattcgtaatatatatcttatattacaaatga

SEQ ID NO: 223278 - DNA, 1402 bp, Unknown
  Bacterial polypeptide expressing nucleotide sequence isolated from the Sargasso Sea
atggcagaaaaatttcaagcagtagtaattggaggaggtcctggtggttatgtatgcgcaattagacttgcccaacttggatttaagactgcatgtattgagtcgaggggtactctaggaggtacatgtcttaatattggttgtataccatctaaaaacctgcttaatttgtcagaaaacttccataaagctaaaaatttttctgaaataggaattgaggtcggagaagtaaagttaaatcttcaaaaaatgatgcagaataaagataaagcagttaaggttttaaccaaaggtgtagaatttttgtttaaaaaaaataaagttacctattttaaaggaacagggaaactaatatcaaacacacaaattaatattttaagttcagataattcagaaataaaaatagaaagtgaaaatataattataagtactggatcagaacctgtatcaattcctggagttgacttcgatgaaaagacaatagtttcatctacaggagccttatcacttgaaactgtacctaaaaaactcgttgttattggtggaggatatataggtttagagatgggatctgtttggtctagactgggttcagaagtacatgttatagaatttttagatcatataactcctggtatggataaagaaatttcaagtgaatttttgaaaattttaaaaaaacagggtctaaaatttcatttaagcactaaagttgaaaaagtaataaaaaataaaaatggtgttaatattagcactatagataaatctggaaaaaaaaatacaatagattgtgatgttgttctaattgctgttggaagaaaagcttatacaaaaaatttaaatcttgatggactaggaattgatttagatgataaaaaaagaattaaggttaataaaaaatttcagactaacataaaaaatatttatgctattggagatgttatagagggaccaatgttggctcacaaagcggaagaagaaggaattgctgtagctgaattaattgcaggtcaatctggtcatgtaaactataatattattcctggggtaatttatacaacccctgaagttgctgtaattggagagacagaagagcagctcataaaaaaaaatttaaaatataaagtaggaaagttcccttttatggctaattcaagagctaaagcaatcgatgagccagatggatttgtaaaaattttagctgatgcaacttctgataaagtattgggagttcatttaataggacctcatgcaggtgaacttatagcagaaatggcaatagcaatggaatttggcgcaagttcagaggatatagctagaacttgtcatgcacatccaacattttctgaagctgttaaagaagcagctttatcagtagataaaagacaaattcactcgtaat

SEQ ID NO: 223279 - DNA, 466 bp, Unknown
  Bacterial polypeptide expressing nucleotide sequence isolated from the Sargasso Sea
atgacagataaatttcaagcagtagtaattggcggaggacctggaggttatgtttgtgcaataagattggcacaattaggccttaaaactgcatgtatagagtctaggggttcactgggtggtacttgtttgaatgttggatgcataccttctaaaagtttattaaatttatctgaggagtttcataatgcacaaagtctatcaaataaaggaattgaaattggtgaggtaaaattaaacttgtcaaaaatgatgaagaataaggataaagcagttacgattttgaccaaaggagtagaattccttcttaaaaaaaataaagtcacatattttaaaggtaccggaagtttcaaatctaaaaatgatattgtaatcaaagataacgataataaagagacaattatacaaactgaaaatactataattgctactggttcagttcccagtatcattaccaggcattgaa

SEQ ID NO: 223280 - DNA, 367 bp, Unknown
  Bacterial polypeptide expressing nucleotide sequence isolated from the Sargasso Sea
gatgtctaaatatgatgttatagtcataggaggcgggccaggaggttatgtcgcatctattcgttgcgctcagatgggtcttcaaactgcgtgcgttgaaggccgtgaaaccctcggcggaacctgtttaaatataggttgcataccatcgaaggcgttattacacgccagtcaccaactccacgaggctgaacacaattttgaaaaaatgggattaatagcaaagccaccctctatagactgggctaaaatgcaaaattataaaactgaaacaattgaggcgaataccaaaggcatcgaatttttattcaaaaaaaataaaatagatcatttaaaagggtgggcctcgatatccgccaaaggaaaa

SEQ ID NO: 223281 - DNA, 597 bp, Unknown
  Bacterial polypeptide expressing nucleotide sequence isolated from the Sargasso Sea
aatgggagattttgatttaatagtaattggcgctggacctggtggatatgtagctgcaatcagagcagctcaacttggaatgaaggttgcttgtatagaaaaagagccatcacttggtggaacttgtttgaacattggatgcataccttccaaagcattattaaattcatctgaaaaatttgttgaaattttaaatcatgctgcagagcatggtataaaaacatcaaagatagatttagacctaaatgttttgatggatcgcaaaactaagattgtaaaaaaacttacaacagggataggttttttatttaagaaaaataaaatcacacatattcctggcatggcttcatttgtagataaaaatactatttctattacaaatggaaaaaatgaaattactgctagtgctaaaaattttattatcgcaacaggatcatcttcgattgagataccaaatatccctgtagatgaaaaacaaatagtatcttcaacaggtgctttatctctatctaaaataccaaaatcactcttagttattggtggtggatacattggattagagatgggttcagtatggagtagattaggttcaaaagt

SEQ ID NO: 223282 - DNA, 1435 bp, Unknown
  Bacterial polypeptide expressing nucleotide sequence isolated from the Sargasso Sea
atggtcgaatcaagaaaatgccaagtcttggtggtcggcgccggaccgggaggatatgtggcggggatcagggctgcccagttgggccttgataccgtgatagttgagggtgacaaggcgggtggtacctgccttattcgtggttgtatcccaagtaaggcaattattcatgctgctgagaggttcgagaatcttcgacttcactcagaaggaggacacatggggctttctgtcacgggtgagcccgaagttgatatgatggccctggtatcttggaaagactccatcgtcgataggctgaacaaaggagttgaaggactcctaaaggcggccggcgcagaattagttcagggttgggcaaagttcgatggccccaagacctgtaccgtggaaaatgatggtgaagtagtaaaaatcgaagctgaaaacgtgatcatcgcaacgggctccagtcacatcgacctcccattcatgccatgtgacgaggagttcatcctatcttctacaggggctctagatatggaatctctacctaagagcgttgcaataattggaggggggtacatagggctcgaactgggttgcgccctttcaaaactcggtaccgaagtaactgttatcgaaggcatggaaaccattctcgcaataatggataaggaaatacgcaggccattggatctatggctaaagaaaaacaacgtgacgattcataccgaatctctagccaggggtgctgagattaaaggcaaaggagcatccaggaaggtcgagataacattcgagaaagatggctctgaacagaccttgaaagtggacaaggtactagtcaccgttggaaggaaacccaacacgaagggttggggcctggagaacatcggagccaggatggacggttcaggtaggttcatcagaacggatagacaatgcagaacatcagtaccaggagtttacgcgattggggacgtatctggggagcccatgctggctcacaaggccagtgctgagggagagatggtcgcggagattattgctggacacaagagggagttcgacaaggtcgcaattcctgcaatagttttcactgagcctgagattgtttcagtagggctgactcccgatgaagccaaagagaggggggaggatatcatagttggaaaattccctcttgctgctaatggaagagccttgagtcttgaagctgaaaagactgggggattcatcagagtgactgctagggagtccgaccatgtcatcctaggtgttcaggccgttggcagccacgtagccgagttacactcagaattcgttctcgctctagagatgggcgcattactggaggacgtggccgggacggtccatgcccatcccaccatgtcggaggcattccatgagagcgttctcaagacattaggccatgctatccacataagttgag

SEQ ID NO: 223283 - DNA, 1402 bp, Unknown
  Bacterial polypeptide expressing nucleotide sequence isolated from the Sargasso Sea
atgacagaaaaatttgactcggtagtaataggcggcggaccaggtggatatgtttgcgctataagattagctcagctaggtcaaaaaactgcttgtatagaagctagaggtgctttgggtggcacttgtttaaacattggatgtattccttctaaaagcttattaaatttgtctgagaattttaaaaaggctaaaaatttttctaaacttggaattgagacaggagatgtgaaactcaatttagataagatgatgaaaaataaggataaagcagtttcaatcttgaccaagggtgtagaatttcttttcaaaaaaaacaaggtaacttacttaaaaggttttggtagttttatttctgagaagaaaatatcaataaaaggcgaagatggtaaaataaaagaaattgaggcaaaaaatattattattgcaactggatctgaagcgatgcctatgcctaacgttgaattcgatgaaaaatcgatcgtttcttcaactggcgccttatctttaaaagaagttccgaaaagtctggttgtcgttggtgggggttacataggtttagaaatgggctctgtctggtctcgtctcggggctgaagtcaatgtaatcgaatttttagatcacatcacacctggaatggatagagagatttcagaagagtttatgaaaatattgaagaaacaaaatattaagtttcacctaaatagaaaagtaacaagcatcaaaaaaactaatagtggggtacaaattacaacttcagataagaatggagataataaagattttaattgtaatgtagctttaatatcaattggaagaaaaccatttacatccaatttaaatttaagttctgcaggagtaaaatcagatgaaaaaggaaggattaaaattgacaaaaaattccaaacttcagcaaaaaatatttatgccattggagatgtaattgatgggccaatgttagcccataaagcagaggaggaagggattgcagttgcagaaataattgcaggtcaatctggtcatgtaaactacgatttaattccgggagtaatatacaccactcctgaggtagcaagtataggcttaacagaagaacaactaaaagaaaaaaacaagtcttataaaattggaaagtttccttttatggctaactcaagagctaaagcgatcgatgagcctgaaggttttgttaaaattttagccgataaagacactgataaagttttaggagtacatatgataggacctcacgtaggagaaatgattgcagaaatggcagttgcaatggagtttggagcgagttctgaagatatcgcacgaacgtgtcatgctcatccaacattttctgaagcaataaaagaggcagctttatctgttgaaaaaagacaaatacactcttaaa

SEQ ID NO: 223284 - DNA, 1432 bp, Unknown
  Bacterial polypeptide expressing nucleotide sequence isolated from the Sargasso Sea
aatggcaaacaaagaaagttacgatattgccgtcattggatctgggccaggcggatacgcagcagcttttagagccgcagaccttggtaaaaaagtggttctgatcgatagagacaaagacctgggtggcgtctgtttgaacagggggtgcataccatcaaaagcgctcttacatatttcaagagtgatcaatgaggtagagcacttgtcaggcattggagtttcgtttggtagtccaaatattgatattgaagctgtccgctcttacaaagagaggatcgtatcacagctaaacaaaggcatcgttcaacttgcaaaagttagaaaagtaaaaacgctgaatggactagctacttttttgtcaaacacagaacttttggttgataacggagaggaaagtaaaaatattgaatttgaacggtgcattattgcggcgggatcaacatcctcaaggcttccaaatatgccagagaaccacccatcggtccttacttctcgcacggcgcttgaattgccagatgttcccgatactctacttattgttggtggtggggtgattggcctagagcttggacaggtatactcatctctaggttcaaaggtctctgtcgtggaatttttaccaaatctaattccaggggccgacccagatattgtaaaaccactacaaaggaagataaacaaacaatttgaaaagatattgttatcatcaaaagtggaaagcgtgacccccgcagataataacaggttaaaagtttctataaaaaccagtaaagatgaaatggtagaagaggtgtttgataaaatattgttatctgttggaagaaaaccaaacacaggtttactaaaactggaaaacacagatatcaatattgataagaggggttttatagatgtagatgtttaccagcgcacttccgtaaaaaacatatttgccataggagatattattggcaacccaatgcttgcacacaaggcaacctatgaagggaaggttgctgcggaggtcgcctgcggacaccctgctgcaatggatgtgactgccataccaagcgttgtttatacagacccggaaatagcctgggcaggcttaaccgaaaccgaagcaaaagaaaaaggaataccatatgaaaagggagagtttccttgggccgcaagtggaaaagccatgatcttgaatgcctcacaaggaaagtctaaactgttatttgatccagagtcaaaaaagattttaggggccggaatagttggcccctctgccggagaccttatatcagaagctgttcttgcaattgaaatgggtgccgattgtgaggacattgccttaacaatgcaccctcacccaacacttggtgaaacatttgcggctgcatctgaagtgtatactggaacaataacagatctttatattccaaaaaagggagaaagataa

SEQ ID NO: 223285 - DNA, 1195 bp, Unknown
  Bacterial polypeptide expressing nucleotide sequence isolated from the Sargasso Sea
aatgtcagaaaaatttcaagctgtagttattggaggaggacctggtggctatgtatgtgcaataagacttgctcaattaggaattaaaacagcatgtattgaatcccgaggatctttaggggggacttgtttaaatattggttgcattccttctaaaagcttacttaatctttctgaggaatttcataaagttaaaggattagcaaataagggtatagaggttggagaagtaaaattaaatttagagaaaatgatgaaaagtaaagataaagctgtaacggtacttacaaaaggtgtcgaatttcttttgaaaaaaaacaaagttacttactttaaaggacacggaagttttaaatctaaaaatgaaattttaattaaggatgataaaaataaagagactgtcatacaaactgaaaaaacagttatcgccacaggatcagttccagtttcattaccagatatagaaatagatgagaaaataattatttcatcaacaggagctttaaaattagaaaaagttcctcagaaaatggtagtcgtaggaggaggttatataggattagaaatgggatctgtatggtcaagacttggagcggaggttcaagttgttgaatttttagatcatattacacctggaatggataaagaaatctcttcggaatttatgaaaattttaaaaaaacaaggaatgaaatttaatatgcaaaataaagttgaaacaattaaaaaaaattcagcaggcgcagtagtttcaacattagataaagatggaaataaaaataattttgagtgtgatgttgttttaatttcagttgggagaaaacctaatacggatggtttaaatttagaatcagttggagtagatcttgatgaaagaaatagaattaaaactgataaaagttttaagacaaatgttgaaaatatttatgcaataggagacgtaattgttggtccaatgcttgcacataaagcagaggatgagggtatagcagttgcagaaaacatagttggtcaatcaggacatgtaaattatgatacaattcccggtgtaatttatacaacaccagaagtagcatcaatcggaaagactgaggaacaattaaaaaaattggacaaaaaatataaagttgggaaattttcatttatggctaattcaagagccaaggcaatagatgatgcagagggttttggttaa

SEQ ID NO: 223286 - DNA, 1360 bp, Unknown
  Bacterial polypeptide expressing nucleotide sequence isolated from the Sargasso Sea
gctgctgcttttcgtgctgctgatcttggtaaaaatgttgtgttaattgattgtgatcctactcttggaggagtgtgtctaaatcgtggctgtattccatcaaaagcacttcttcatatttcaaaaattatggatgaagcacatagtctttctaaaatgggggtattatataataaacctagtattaatctagatcaaataagatcacataaaaataaaattgtatcacaactcaaccaaggtattgataaaatggctaaggctcgaggtgttgaaacaattcaagggttagcaagcttcaaaaataataacgagttaaacgtaaaaacaaaatcatccgtttcaactataaaatttcaaaaatgtattattgctgcaggttcaacttcaagtatgataccaggtatatccgtagaacacgagtcagtcttaaattctagaacggcgcttgaattaaatgatataccaaaaaacttacttgtcatcggaggtggtgcaattggcttggagcttggacaggtatattcatcgctgggatctaaggttacgctggtcgaattcatgcccaatataattccaggtgctgatgaagatattgtaaaaccactttacagaaaattaaataagcaatttgattcaattttattatcatcaaaggtcacaaagttagaggtacaaaaaaataactcaataaatgtaacaattgaaaatggaagcagtgtaactaggtctaattataataaggtattaattgctattggaagaaaacctaatctggaattattgaaaattgaaaatacagatataaaattaaatgttgatggttatatcgatgttgatgtttatcaaagaacatctgtagaaaatatttttgcaattggtgacattgtaggaaatccaatgttagctcataaggccactcatgaggggaaagttgcagctgaagtatgtgctggacatccggctgccatggattgccaagcaattccatctgtggtttatacagatcctgaagttgcctgggcagggcttaatgaggtagaagctaaacaaaataaaataaaatataataaaggagagtttccctgggcagcaagtggaagggcaattgccatgggtgcaaatcaaggaaaaacaaaaatcctctttgatccagataataaaaaagtgctaggtgttggaatagttggcccgggtgccggtgatatgatatctgaagcaatgatatctattgaaatgggggttgatgcggaagatatagcattaactgttcatccacacccaacagttggtgaaacttttgctatggcagctgaagcatttcttggaactattactgatctatatgtcccaaaataat

SEQ ID NO: 223287 - DNA, 1142 bp, Unknown
  Bacterial polypeptide expressing nucleotide sequence isolated from the Sargasso Sea
aatgacagataaatttcaagcagtagttatcggtggaggcccaggaggttatgtatgtgcaattagactctcacaattaggtcttaaaactgcatgcatagagtctagaggttctctaggcggaacttgtttgaacataggctgtataccatcaaaaagcttattaaatttatctgaggaattccataatgctaaaaatttatcaaataaaggtattgaagtaggagaaataaaattaaatttatcaaaaatgatgaaaaataaagataaggcagttacagttttaactaaaggagtagaatttttattgaagaaaaataaagtaacttattttaagggtactggaagtttcaaatcaaaaaatgaaattctgattatagaaaacgaaagtaaaaaagagatatcaataaaagcagataaaattgtaattgcaacaggttcattaccagtttctttaccaggaattgaatttgatgaaaaagttattgtttcctcaactggcgcattgaaatttgagcaagtccctaaaaaaatggttgtggttggaggaggatatattggtttagagatgggatcagtttggtcaaggttaggtaccgaagttcatgtaattgagtttttagatcatatcacaccaggtatggataaagagatctcgaatgaatttatgaagattttaaaaaaacaaggaataaattttcatatgcaacataaagtagaggaaattaaaaaaagcaacagtggagcaatcgtttccacaatagataaagatggaaacaaaaaagattttaattctgatatagttttagtttctgtaggaagaaagccaaatacaagtggtttgagtttagaaaaagttggtattgagatagataaaaaaaagagaattaaaactgataagtactttaaaaccaatcaaaataatatttatgctattggagatgttatagcgggaccaatgttagcacacaaagcagaagacgaaggtattgctgtagcagaaaatattgctggtcagtcaggtcatgtaaattatgatactattccaggggtcatttatacaacccccgaagttgcttctattggcaaaacagaagagcaattaaaagaatcaaagattaaatataaaattggtaaatttt

SEQ ID NO: 223288 - DNA, 716 bp, Unknown
  Bacterial polypeptide expressing nucleotide sequence isolated from the Sargasso Sea
aatgtctgaaaagttcgatattacagtaattggaggtggtcctggaggatatgtttgtgcaataagactgtctcaacttggatttaaaactgcctgtattgagtccagaggatctctcggaggcacatgtttaaatattggatgtattccatctaaaaatttactaaatttttctgagaattttcataaagctaaaaactttgagaagattggaattgaagttggtcaagttaagttaaacttagataaaatgatgaaaaataaggaaaaagcagtagaaattctaacaaaaggtatagagtttttattcaagaaaaataaagtcacatattttaaaggtacaggcgcatttaaaagtgcaaatgaaatatcaattttatctgagggtaaagaaaccacaattctatcagataaaacaattattagtacaggttcagagcctacttcaatacctggcatagaatttgatgaagaaaaaataatttcttcaactggtgcattatctctttctaagttaccaaaaaaaatggttgtcgtaggaggtggttatattggactagaaatgggatctgtttggtcaagattaggtacccaagtagaagttattgaatttttagatcatataacaccaggtatggatagagaagtttcaagtgaatttgagaaaattttgaagaagcaaggaataaaatttcaattgaatactaaagtagaga

SEQ ID NO: 223289 - DNA, 979 bp, Unknown
  Bacterial polypeptide expressing nucleotide sequence isolated from the Sargasso Sea
atggaaaataaatttgatgtaatcatcattggtggagggcctggaggttatgtttgtgctataagagctgcccaacttggcttaaaaactgcatgtgtagagtctagaggaactttaggcggaacttgcctaaatattggatgcataccatctaaaagtcttttaaatttatctgaaaattataataaagctcaaaaagagttcaagcaacaaggaattgaaattagcgagatcaaactaaatattgaaaaaatgatgtcaaataaaaataaatcagttcaagttcttacaaagggtgtagagttcctttttaagaaaaacaaagttacatatattaaaggaaagggaataccattttcaaaaaatgatgtagtcgtttatgatggagacaaaaaaaactcttataaaactaaaaatatcgtaatagctactggttccacagtttcatcgttaccgggaattaaaatagatgaaaaaaatataatatcctcaactggtgctctttctttaaataaagttccaaaaaaacttgtagtaataggtggaggatacataggtttagagatgggttcagtttggtcaagacttggatctgaggtaactgttgtagaatatcttgattatataactccaggtatggatagagaaatttctaaagaatttcaaaaaattttatcaaaaaaaggaattatttttagattaaactcgaaggtcacttcagttaaaaaaaaaggaaattcgtcgattgttgagttcgttaacaattcatcctctaaaaaagaaacaattgaagctgacaaagttttagtatctgttggtagaaaaccatacacagaaggattaaacctatcaaaaattggaattaatagagatagtaagggtagaattgaggtaaataataagtttcaaacttcagtaaaaaatatatatgcaatcggagatgttattaaaggaccaatgttagctcataagggctgag

SEQ ID NO: 223290 - DNA, 532 bp, Unknown
  Bacterial polypeptide expressing nucleotide sequence isolated from the Sargasso Sea
tatgtcacaaaaatttgattcagttgttattggtggagggccgggcggttatgtctgtgcaattcgacttgcacaacttggacaaaagacagcctgtatagagtcacgaggttcattaggtggaacatgtttaaatgtagggtgtattccatcaaaaagtctattaaatttatctgaaaattttcataaagcgaaaaactttgaaaaaattggaatagaagtgggttctttaaagctgaatctaccaaaaatgatgaagaacaaagaaaaggcagtaacggttttaaccaaaggtatagagtttttgtttaaaaaaaataaagttacttatttaaaaggaactggttcaattactggaactaatcagatttcattaaaatcagttgataataaaaatgagacaattgaggctaaaaatataattattgcaaccgggtctgatccaacatctttaccagggattgaatttgatgaagaaaagatagtttcatctacaggagcactttctttaaaagaaagttccaaaaaaatt

SEQ ID NO: 223291 - DNA, 1402 bp, Unknown
  Bacterial polypeptide expressing nucleotide sequence isolated from the Sargasso Sea
aatgtcagaaaaatttgatgtaacaattattggtggtggtcctggaggatatgtatgtgcaattagactttctcaacttggattaaaaactgcctgtatagagtctagaggatcattaggtggaacatgtttaaatgtgggatgtataccatcaaaaagtttattaaatttgtcagaaaattttaccagggccaaaaacttttcaaaattaggtatagaaatatctgatttaaaattaaaccttgataaaatgatgaaaaacaaagaaaaagccgttactattttaacaaaaggtgtcgaatttttatttaaaaaaaataaagtttcttactttaaaggggtaggaaaatttaaatcaaaaaataaaatatcaattattgataacaataaccaagaaatattgattgaaactaaaagtactgttattgcaacaggttctgaaccaacttctataccaggagttaattttgacgaaacccaaatattatcatcaacaggagcgttatctttaaaaaaggttccaaaaaaaatgatagtagtcgggggaggttatattggtttagaaatgggttcagtttggtcacggttaggatcagaagttcatgttattgaatttttagactttataactccgggaatggatagagaaatttctaatgaatttatgagaatacttaccaagcaaggtattaaatttcatttaaaaacaaaagttgaaaaagtatcaaaatcaaatgaatcagttttaatagatgttttaaatagtgaaggtaaaaaagaaaaacttgattgtgatgtagttttgatatcaataggaagaaaaccgaatacaaaaagtttaaatttagatgaggctggcatcaaaattgatgaaaaaggaaagattaaagtaaacaaaaaatttcaaactaatatttctgatgtttatgctataggagatgttatagatggtccaatgttggctcataaagctgaagaggaagggatagcagttgcagaattaattgctggtcaatcaggtcatgtaaactacgatgtgataccgggtgtaatatataccacacctgaggttgcgtatgttggaaagacagaagaagaattaaaaaattctaataagatttataaaattggcaaatttccatttatggcaaattcaagagctaaagctattgatgaagcagagggtttcgttaaaatattagcagatagttcaacggataaggttctgggggttcatataatcggtcctcatgcaggggaaattatagccgaagttgcagtagcaatggaatttggagcaagttctgaggatatagcacggacatgtcatgctcatccaacattttcagaagctattaaagaagcagcattatctgtagataaaagacaaattcactcataa

SEQ ID NO: 223292 - DNA, 1039 bp, Unknown
  Bacterial polypeptide expressing nucleotide sequence isolated from the Sargasso Sea
agcagcacaattaggtctgaaactgcttgtgtagagtccagaggaacattaggcgggacttgcctgaatgttggttgcataccatcaaaaagtctacttaatttatctgaaaacttccataaagcaaaaaaagatttcaacaagcagggaatagaaattgatggtattaaattaaatatcgaaaaaatgatgtcaaataaaaacaagtcagttcaagtgctaacaaagggtgtagagtttttatttaagaaaaataaagttacatatatcaaaggcaaaggtgttctgttttctaaaaatgatattgtagtttatgaaaataacaagaaaacgaattataaagcaaaaaatattgttatagccacagggtctgctgttgtttctctaccaggcatagaaatcgatgaaaaaaatataatttcttcaactggagcattatctttgaacgaggtaccaaagaaattagcagttattggtggaggttatataggtttagaaatgggttcagtatggtcaagattaggctcagaggttactgtaattgaatatctcgatcatataacccctggaatggatagagaaatatctgacgaatttaaaaagattttaactaaacaaggaataaagtttaagatggggtcaaaagtgaatactgttaagactaacggaacaggaattttaataaattttacagatgtaaaaacgtcaaaagctgagtcgttagaatttgataaggttttggtctcggttggaagaaagccatacacagaaggattaaatttgacaaaagttggaataaaaaaagacaacaaaggtagaatcgaagttaatagcaagcttcaaacatcgattaaaaatatttatgcgataggagatgtgattaaaggaccaatgttagctcacaaagcagaggaggaaggaatcgcagttgctgaaattttggcaggtcaagcaggtcatgtaaactatgatgttattccaggagttatctatacatctcccgaagtagctacggttggcaaaacagaagaacaactaa

SEQ ID NO: 223293 - DNA, 1045 bp, Unknown
  Bacterial polypeptide expressing nucleotide sequence isolated from the Sargasso Sea
gttattgaaataacaaaaccagatggctcaaaagaaaatcttgacgctaaaaatattattattgcaacaggatcgaaaccaattgaaataaatgttgctccatttagtaagaatatagttgatagtacaggcgcattgtctttcaagaaagtaccaaaaaaattgggtgttgttggcgctggaattattggcttagaacttggaagtgtttggtcaagactaggatctaatgtaactgttttagaagctcttgatgattttcttccaatgtctgaccctgatatttctaaagactctttaaaagaatttaaaaaacaaggattagatattcagcttggatcaaaggtaatcagcacgaaagatatgaagaattctgtaaagttatcctattccaaagaagataatgaaatagagatggaatttgataaattaattgtggcagctggtcgctcatcaaatgtagacaatattttaaacgacgatcttggagtatcaataaaaaatggcttaattgaagttgatgaatattgtcaaacctctgtgtcaaatatttgggcagttggtgatgttgttagaggtcctatgcttgcgcataaaggaagtgaagaaggtattatggttgcagaaagaatcgctgataaacataccgaggtaaactatgatcttgtaccttcagttatatatactcatcctgaaattgcttgggttggaaaaaatgagaatgaattaaagcaaagtggagttaagtataatgttggtaaatttccatttgctgccaatggaagagctttagctgtttctgaatccataggttttgtaaaattattgtctgacaaaaaaactgatgccattcttggggttcatgtttttggaccatcagcagctgacattgttcaacaagcattaattgcaatggaatttggagcaagcgcagaggatatatctttaacaatgtttagtcatcccactgtttctgaggccttacacgaagctgcattagcttcaaacaatcaagcgattcatataggaaataaaaaacaatgaa

SEQ ID NO: 223294 - DNA, 199 bp, Unknown
  Bacterial polypeptide expressing nucleotide sequence isolated from the Sargasso Sea
aatgagtaacatagttgaatatgatctaattgtaataggcggtggacctggtggttatgttgcagctataagagctgcccaattaggaattaatgttatgtgtatagaaaaaagaaaatcttttggaggtacgtgccttaatgttggctgcattccctcaaaaacattattacactcgtcacatctatacgagcaaagc

SEQ ID NO: 223295 - DNA, 217 bp, Unknown
  Bacterial polypeptide expressing nucleotide sequence isolated from the Sargasso Sea
atgtcagaaaaatttcaagcagtagttattggtggtggtcccggtggttatgtttgtgcaattagacttgctcaattaggtttaaaaactgcctgtatagagtctagaggatcattaggaggcacttgtttaaatgtaggatgcattccttcaaagagtttattaaatttgtctgaagaatttttaaaagctaaaggttggcaaataaaggtataga

SEQ ID NO: 223296 - DNA, 646 bp, Unknown
  Bacterial polypeptide expressing nucleotide sequence isolated from the Sargasso Sea
catgtatgacgttgtagttattggaagcggtccagcaggatacgttgctgcaattcgggctgctcaacttggactaaaaacagtttgtattgaacagtcatccaatgatgatggaaaaccaaattttggagggacttgtttgaacgttggatgtattccttcaaaagctcttcttgattcatcccatagattctatgaagcgaataaaaatttatctgatcatggaatagatattaaagatatgaaacttgacctgtctgcaatgatgaaaagaaaagatgatattgtttcaaaacttacgggaggcatatcgggattatttgctgctaataaagttgattctatttctggatctggaaaggtagtaggcagtaatcttgtagaggtcaccaaaagtgacggctctactgaggaattggaagcaaaaaatataataattgctactggttcgttacccattgaaattccggctggtaagtttggagataaaattgttgatagtactggcgcactagcatttaataaagttcctaaatctttagggattgtaggcgctggaataataggtctcgagcttggaagcgtatggtcaagacttggctctaaagtgactgtaattgaagcgctagatactttttgccaatga

SEQ ID NO: 223297 - DNA, 1030 bp, Unknown
  Bacterial polypeptide expressing nucleotide sequence isolated from the Sargasso Sea
atgtcagaaaaatttcaagctgttgtaataggaggtggcccaggaggctatgtatgtgcaatacgacttgctcagttaggtttaaaaactgcatgtatagagtctagaggatctcttggaggtacatgcttaaatgttggttgtattccatcaaaaagcttactcaatttgtcagaggaatttcataaagtaaaaggtttagcaaaaaaaggtatagagattggagaagtaaaactaaatcttgataaaatgatgaaaagcaaagataaagcagtgacagttctcacaaaaggagttgagtttcttttaaaaaaaaacaaggttacttactttaaaggccatgggagctttaaatctaaaaatgaaattttaattaaggatgatcaaaataaagagacagtaatacaaactgaaaaaacaattatagccacagggtctgtgccagtctctttgcctggaattgaaattgatgaaaaagtaatagtttcatcaacaggtgctttaaaattagaaaaagttcctaataaaatgttagttgttggaggtggatatattggtcttgagatgggatctgtatggtcaagacttggtgcaaatgtagaagttgttgagtttttagatcatataactcctggtatggataaagaaatttcatctgaatttatgaaaattttaaaaaaacagggaataaaatttaatatgcaaaataaagttgaatcaattaaaaaaaataataatgccgcagtagtttcaacagtagataaagatggtaaaaaaaataattttgaatgtgatatcgttttaatttctgtaggaagaaaacctaatacagatggtttaaatttagaggctataggagtaaatattgatgaaagaaatagaattaaaaccgataaaacatttaaaacaaatgttgaaaatatttatgctataggtgatgtgattgttggtccgatgcttgcgcataaggcagaggatgaaggtatagctgttgcagaaaacatagttggtcaatcagggcatgtgaatt

SEQ ID NO: 223298 - DNA, 505 bp, Unknown
  Bacterial polypeptide expressing nucleotide sequence isolated from the Sargasso Sea
atgaaaaaaatgtttgatgtagtagttgtaggaagcggaccagctggttatgtatccgctattagatgctctcagttaggtcttaaaacgttatgcatagaggaatcgcatagtgacaatggcaagcctaattttggtggtacatgtcttaatgttggttgtataccgtcaaaggctcttttggattcttcacataggtattatgaagcaaataagaagctatctgaccatggaatacagatagaaagtttaaagttagacttaaaatctatgatgaaaagaaaagacgatatcgtaggcaaacttactggaggcataagtggtcttttttctgcaaataaggttgaatctatgataggtagaggcaagattatagatatcaacactgtagaagttacaaaaccagatggcagcacagaaactatagatgctaaaaatattattgtagctacaggctctaagccaatagagataccttcagctaaatttagtaaacatatttaga

SEQ ID NO: 223299 - DNA, 778 bp, Unknown
  Bacterial polypeptide expressing nucleotide sequence isolated from the Sargasso Sea
aatgactgatcctgatatttcaaaagaaacatttaaagaatttaaaaaacaaggcttagatatcaaattaaattctaagttagttgcctcaaaggagcttaaaaatactgtaaaagtaacctttaatgaaaatggaactgacgttgaggaagagtttgataagttaattgttgcagtgggaagaaagccaaactcatcaaatataattgatgaaagtttaaatattgcaatcgaagaaggcttcataaaagtagacgaacattgtcaaacgtcagttaaaaatatatgggcaattggagatgttgtaagaggtccaatgttagctcataagggaagtgaagaaggaataatggttgctgaaagaattgccgataagcatgctgaagtaaattatgatcttgttccctcggttatctattcgcatcctgaaatagcttgggttggtaaaaatgagactgagcttaaggataaaaaaattagttataaggtaggcaaattcccatttgctgctagcggaagagctcttgctgtcgaccagtcggtcggtttcgtaaaagttctttctgattctaaaacggataccatattaggtgttcatgtttttggacctgctgctgctgaaattgttcaacaagcacttatttctatggagtttggtgcgagcgcggaagatattgccttaactatgtttagtcatccaactgtatctgaagcatttcatgaggccgcattagcagccaacaatcaagctatacatattggtaataaaacaagatga

SEQ ID NO: 223300 - DNA, 811 bp, Unknown
  Bacterial polypeptide expressing nucleotide sequence isolated from the Sargasso Sea
gttgaactaaccaaggatttaatgcctggaacggatcgagaccttgtcagacctttagaaaaagttctgaaaaagaagtgcaataagatcatgaaatcaactcaggtggtttctgcagaggccactaatgatggcatcaatatatccttcaagcaggacgaagaagaattcagcgaggtatttcaaaatgtccttgttgcagttggaaggaaatcaaatggaaatcttctaggactgaatgagataggcgtgaatattgatgatcaaggcatcatcaaagtcgatcaacaattcaaaaccagtgtcgaatcaatacttgctattggcgatgtgataggcgatccaatgttggcacataaagccagttatgaaggcaaagttgctgctgaggtaacagcgggtcaaagagtcagtaatgatgccagatgcatcccttctgttgcctatactgatccagaggttgcttgggtagggctttcagaagatgaatgcaaagccgaagggataaattatggaaaaggtgtctttccctggtcagccagcggaaggtcacttgcaattggaagaaacgaaggcatgaccaagttgctttttaataattcaaccaaaaaagtcattggaggagggatcgttggaccgaatgctggtgacttgatatcagaaattgctttggctattgagatggattgcgacgtgaatgacgttgctttgactgttcatcctcatcctacgctatccgaaacagtcgccatggcagcagaagtttttgaggggactattactgatttatacattaaacctagcaaatgat

SEQ ID NO: 223301 - DNA, 1171 bp, Unknown
  Bacterial polypeptide expressing nucleotide sequence isolated from the Sargasso Sea
ctgtatagagtccagaggatctttgggaggtacatgtttaaatgttggatgtatcccttcaaaaagcttacttaatctatctgaagaatttcataaagtaagaggcttagcaaacaaaggtattgaagttggcgaagtaaaattaaatttagaaaaaatgatgaaaagcaaagataaagccgtaacagttcttacaaaaggcgttgaatttcttttgaaaaaaaacaaagtttcttatttcaaaggacacggtagttttaaatctaaaaatgaaattttaataaaggatgataaaaataaagaaactatcatccaaacagaaaaaacagttattgccacaggatcaatcccagtttcattaccaggaatagaaatagatgagaaaataattttatcatcaacaggggccttaaaattaaataaagtgcctaaaaaaatggtagttgtaggaggaggctatataggactggagatgggatcagtatggtcaagacttggagcagaggttcaagttgttgaatttttagatcatattacacctggaatggataaagaaatctcctcagaatttatgaaaattttgaaaaaacagggaatgaaatttaatatgcaaaataaagttgaaataattaaaaaaaattcattaggtgcagtggttttaacagtagataaagatggtaataaaaataattttgagtgtgatgtcgttttaatttctgttgggagaaaacctaatacagatgggttaaatttggagtctgtaggagtagatcttgatgaaaaaaatagaattaaaactgataaaagttttaagacaaacgttgaaaatatttatgcgataggcgatgtaattgttggtccaatgcttgcacataaagcggaggacgaaggtatagcggttgctgaaaatatagttggccaatcagggcatgtaaattacgatacaatcccaggagtagtttatacatcaccagaagtagcatcaatcggtaaaactgaggaacaactaaaagaattgaataaaaaatataaagtagggaaattttcgtttatggctaattcaagagctaaggcaatagatgatgcagaaggttttgttaaaattttagctgatgagcaaactgataaagtattaggtgcacatataattgacctcatgcaggagaattaa

SEQ ID NO: 223302 - DNA, 879 bp, Unknown
  Bacterial polypeptide expressing nucleotide sequence isolated from the Sargasso Sea
tcggaggaggaatcattggtcttgaaatggcaaccatatactctgccctaggcagcgaagtcacaattgttgaactaaccaaggatttaatgcctggaacggatcaagatcttgtcagacctttagaaaaagttctgaaaaagaagtgcaataagatcatgaaatcaactcaggtaatttctgcagaggccacagatgatggcatcaatatatccttcaagcaggacgaagaagaattcagcgaggtatttcaaaatgtccttgttgcagtcggaaggaaatcaaatggaaatcttctaggactgaatgagataggcgtgaatattgatgatcaaggcatcatcaaagtcgatcaacaattcaaaactagtgtcgaatcaatcctagctattggcgatgtgataggggatccaatgttggcacataaagcaagttatgaaggcaaagttgctgctgaggtgacagcgggtgaaagagtcagcaatgatgccagatgcatcccttctgttgcctatactgatccagaggttgcttgggtagggctttcagaagatgaatgcaaagccaaagggatgaattatggaaaagggctctttccctggtcagccagcggaaggtctcttgcaatcggaagaaacgaaggcatgaccaagttgctttttaataattcaaccaaaaaagtcattggaggagggatcgtaggaccaaatgctggtgacttgatatcagagattgctttggctattgagatggattgcgacgtgaatgacattgccttgactgttcatcctcaccccacgctatccgaaacagtcgcaatggcagcagaagtttttgagggaaccatcacagatctgtaccttaaacccagcaaatgat

SEQ ID NO: 223303 - DNA, 1120 bp, Unknown
  Bacterial polypeptide expressing nucleotide sequence isolated from the Sargasso Sea
tatggaggtacttgccttaatgtaggctgtattccatcaaaatctcttttggattcatctcacaaatacttcgaagctcaaaaagattttgcatctcatggaatagatctaaaagatttatcagtcaatattccttcaatgatgaaaagaaaggatgaagttgttaataaacttacaactggaataactggactgtttaaagcaaatggtgttgaagcaatatcaggaagagggaaagttattaatgagaaccttgtagaagtttcaaataatggagataaaacaagcttggagacaaaattcataatattagcaacaggctcaaatccaattgaaattccagttgcaaaatggtctgaaaatatagtcgatagcacaggagctcttaattttgatagggttccagaaagacttggaataattggagctggagtaattggtttagagcttggtagcgtatggtcaagacttggagctgaggttacagtcatagaggcgatggatgatttcttacctattgtcgacaaacaaatttctaaagaatgccatcgagagtttaaaaaacaaggtctagatatacatttaggatcaaaactcacctcagctaaagataatggtaaagatgttgaaatttcttatgaatcaaaaggtgaggagcttaaagcctcttttgataagttgattgtggctgtggggagaaaacctaatacagctgatatctcagatgagtcatttccaattgagttggatgaattaggaagagtccaagttgacgatttttgtaaaacaaattatgaaaatatttatgctgttggtgatattgttagaggaccaatgcttgctcacaaaggttcagaggaaggagtaatggttgctgagagaattgcaggcaaaaaggctagaatgaattatgatcttgtacctaacgttatttatactcatcctgaagttgcttgggttggaaagactcagcaagagctcgaagatcatggtgtggagttcaagattggaagttttccatttgctgcaagtggaagagctttagctgcagctgattcagtcggttctgtcaaggttttagctgataagaaagatgacacaatattgggagttcatgtat

SEQ ID NO: 223304 - DNA, 295 bp, Unknown
  Bacterial polypeptide expressing nucleotide sequence isolated from the Sargasso Sea
atgagtgattttgacgtcgtcgtaatcggcgcagggcctggcggatatgtcgctgccatccgctgcgcccaactgggactgaagacggcctgcatagaccgctgggtgggcaaaaatggcaagccctctgtcggcggaacctgccttaatgtcggatgcatcccttccaaagccctgctgaattcttcagagcgctatgaagacatacagctgcatgcggcagatcacgggatccacagcggcgacgtgtcgatcgatgttgaaaagatgctggcccgtaaagacaagatcgtct

SEQ ID NO: 223305 - DNA, 253 bp, Unknown
  Bacterial polypeptide expressing nucleotide sequence isolated from the Sargasso Sea
aatggaaaaattcgatgcgatagttattggcagtggcccaggcggatatgtgtgcgcaataaaactcgcgcagctaggaataaaagttgcttgtgtggaagggaatacttcacttggaggtacctgtttaaatgtagggtgtattccatcaaaagcacttctaaacgcttcccacaactatcataactcagtagagaatttttctaaaatgggaatagaggtagaccctcctgttgtgaactggggtaaaatg

SEQ ID NO: 223306 - DNA, 718 bp, Unknown
  Bacterial polypeptide expressing nucleotide sequence isolated from the Sargasso Sea
gatgtcgaaatatgatgttatagtcatagggggagggccaggaggttatgtcgcctctattcgttgtgctcagatgggtcttcacactgcatgcgttgaaggccgtgacactctcggcggaacatgtttaaatgtaggttgtatcccatccaaggcgttattgcatgctagtcatcaactccatgaggcggaacacaattttgaaaaaatgggattaatagcaaagccaccgtctatagactgggctaaaatgcaaaattataaaactgaaacaattgatgcaaataccaagggtatcgaatttttatttaaaaaaaataaaatagatcatttaaaaggttgggcatcgatacccgcgccaggaaaagttcaaataaacaaaacaatttatgatgctaagaatataattatcgcttcaggatcagagccaagtacaatccctaatgtgaaaattgacgaaaagacaattgtgtcatcaactggagcactgtcattatctaaaataccaaaaacaatgacggttatcggcgcaggcgttattggcttggagcttggctctgtttatgcgcgtctcggaacaaaagttaccattattgagtatctagattatataactcccggcatggataaagaggtacaaaaaacctttcaaagaattttaaaaaaacagggtatctcttttattatgggagctgctgttcagtcggccacaaaatcc

SEQ ID NO: 223307 - DNA, 824 bp, Unknown
  Bacterial polypeptide expressing nucleotide sequence isolated from the Sargasso Sea
catgagtaacgaaatcaaaactcaggtagtggtattaggtgcaggtcctgctggatattctgctgccttccgtgcggctgacttaggtctggaaaccgttatcgttgaacgttttagcactttaggtggcgtgtgtctgaacgtgggttgtatcccatctaaagccctgttacacgttgctaaagtcatcgaagaagccaaagccgttgctgcacacggtgttgtgttcggcgagccaacaatcgatttagacaagttacgcagcttcaagcaaaaagtgatcagccagttgactggtggcttaggcggcatgtctaagatgcgtaaagtaaacgttgttaatggcttcggtaaatttactggccctaacagcttagaagtgactgcgcaggacggtactgtgaccgttgttaagtttgaccaagcgatcatcgctgcaggttctcgcccaatcaaactgccattcattccccatgaagacccacgtatttgggattcgaccgacgcattagaactgaaagaagtgcctggcaaactgctggttatgggcggcggtatcatcggtttagaaatgggtacggtttactcttctctgggcagtgaaatcgacgtggttgaaatgttcgaccaagtgatccctgcggctgacaaagacgtcgttcgcgtattcactaagcaaatcaagaagaaattcaacctgatcctcgaaaccaaagtgactgcggttgaagcccgtgaagacggtatctacgtttcgatggaaggtaagagcgcgccaactgagccagtacgttacgatgcagtgttagtggcaatcggtcgta

SEQ ID NO: 223308 - DNA, 1003 bp, Unknown
  Bacterial polypeptide expressing nucleotide sequence isolated from the Sargasso Sea
tgctgccttccgtgcggctgacttaggtctggaaaccgttatcgttgaacgttttagcactttaggtggcgtgtgtctgaacgtgggttgtatcccatctaaagccctgttacacgttgctaaagttatcgaagaagccaaagccgttgctgcacacggtgttgtgttcggcgagccaacaatcgatttagacaagttacgcagcttcaagcaaaaagtgatcagccagttgactggtggcttaggcggcatgtctaaaatgcgtaaagtaaacgttgttaatggcttcggtaaatttactggccctaacagcttagaagtgactgctgaagacggtactgtgaccgttgttaagtttgaccaagcgatcatcgctgcgggttctcgcccaatcaaactgccattcattccccatgaagacccacgtatttgggattcgaccgacgcattagaactgaaagaagtgcctggcaaactgctggttatgggcggcggtatcatcggtttagaaatgggtacggtttactcttctctgggcagtgaaatcgacgtggttgaaatgttcgaccaagtgatccctgcggctgacaaagacgttgttcgcgtattcactaagcaaatcaagaagaaattcaacctgatcctcgaaaccaaagtcaccgctgttgaagcccgtgaagacggtatctacgtttcgatggaaggtaagagcgcaccaactgagccagtacgttacgatgcagtgttagtggctatcggtcgtacgccaaatggcaagctgatcgacgctgaaaaagcaggcgttaagatcgacgagcgtggtttcatcaacgtagacaagcaattacgtacaaacgtaccgcacatctacgctatcggtgacatcgttggtcaaccaatgttggctcacaaaggcgtgcacgaaggccacgtagcggccgaagtgatcgctggcatgaagcactacttcgatccaaaagtcatcccatcaatcgcctacaca

SEQ ID NO: 223309 - DNA, 826 bp, Unknown
  Bacterial polypeptide expressing nucleotide sequence isolated from the Sargasso Sea
tatgaaaaagtatgacgttatagttatcggatctggacctggaggatatgttgctgctattagatgtgcacaacttggtttaaaaactgccattgttgaaaaatacaatactcttggaggaacatgtttaaatgttggatgcattccatccaaggcactgcttgattcttcagaacatttctataatgccaaacatacttttgctgatcatggaatccaaaccggagaaatcaaagctgatttgacccaaatgattgcaagaaaaaataaagttgttgaacaaacttgttcaggagttaaatatttaatggacaaaaataaaatcgaagttctcgagggtattggatcatttaaagataagaacattgtgattgttcaatcaggcaaaaataaagatgaaattgaaggtaaaaatataataattgcaactggatctaaaccaaattactttccaggaatggagccagacaaaaaaagaatcattacatcaactgaagcacttagtttaactgaaataccaaagaaaatgctagtcattggagctggagtaataggacttgagttgggagctgtatataaaagattgggttcagaagttgaagtaattgaatttgcacctaagattcttccaacaatggatggtactatatcaaaagaattcacaaaagttcttaagaaaagtggatttaaacttcatatggagcataaggtgcaaaaagtagaaaacaaaggaaaagaagtaattgtaaaagcgcttaacaaaaagaatgaagaagttgagcttaagggtgattactgtttggttgctgttggaagaaaagcatat

SEQ ID NO: 223310 - DNA, 373 bp, Unknown
  Bacterial polypeptide expressing nucleotide sequence isolated from the Sargasso Sea
atggaaaaatttgatattatagtgattggcggcgggccgggaggatacgtgtgtgctatcaaagcagctcaattaggatttcgggtcgcttgcatagaaggaagaaagaaattaggtggaacatgccttaatgttggatgtattccatccaaagcactgctgcacgcatcagaagcctatcacgacagtatcgagaacttctcgagaatgggtcttgaaattggtaagccaaaaataaattggcctaatatgctcacttacaaacaaaatatgataaaacagaatactcaaggaattgaatatctttttaagaaaaacaaagtcgaccacattcaaggctgggccaccattattgacacaaaccaggtcaagg

SEQ ID NO: 223311 - DNA, 811 bp, Unknown
  Bacterial polypeptide expressing nucleotide sequence isolated from the Sargasso Sea
gccaataaatttgatcttgtcgtgataggcgcgggcccaggaggttatgtggcggctataagggccgctcagcttggccttaaagtagcatgcgttgataaaagagaaacgcttggtggtacttgccttaacgtggggtgtataccatctaaagcgttattgtcggcctccgaaaaatacatcgaggcttcgaagaatttctccgaaataggaattgagttatcaggacttaaaataaatttggaaaaaatgctgtccaagaaggatagaattgttgcggaactaacaaagggaatccagtttttatttaaaaagaataatgtaatgcggtttcatggtgaagcagtaattaaatctgcttcagaaattgaagttacttcagttgatggtaaagcgacgcaactccaaaccgacaaaataataattgcggtcgggtcagagccaatctgtctgcctaatttagcttttgatgaaaaaaagattgtctcgtccaccggagcgcttaaccttgatcgcgtacctaagcgtcttgttgttatcgggggaggttatattggtcttgaaatgggctctgtttggtcacgtcttggatctaaagtaacggtcgtggagtttcttaataaaatagttccaaatgttgacgttgaaataggaaaacaatttcaaaaaaatcttgaaaaacaaggtattgttttcatgcttgaaacaaaagttgtcgaagtgagtgttaaagataagaagttggaaattatcgctgagcaaataaatagggaagatcgagaaacgatagaatgcgacgtcgttttaatag

SEQ ID NO: 223312 - DNA, 187 bp, Unknown
  Bacterial polypeptide expressing nucleotide sequence isolated from the Sargasso Sea
aatgactaaatttgacaccatagtaatcggttcaggtccaggaggatatgtagcggcaattcgttgtgcacagctaggtatgaaaacagcaataattgaacgctatcctactcttggaggtacttgtctgaacgtaggttgtatcccttcaaaagccttgcttgattcaagtgaacattttaataat

SEQ ID NO: 223313 - DNA, 847 bp, Unknown
  Bacterial polypeptide expressing nucleotide sequence isolated from the Sargasso Sea
atggcgaagagttatgacctcgttgtgattggcggtggtccaggcggatatgtggcagctattcgagcggcacaattgggccttaaaacagtttgcgtggaaaagcgcggaacccttggtggcacatgtctcaatgttggctgcattccgtctaagacgttgttgcaaagctccgaaaagtttgctgaggcgcagcatgaattgaaggagcatggcgtagacgtcaaaggtgtctcgctaaacctagaagcgatgatggcgcgtaaggaccgaatagtcagcaacttgaccaaagggattgaattcttatttaagaaaaatgaggtggaatatatcgttggtcacggcacattgtctggtccaaacagcgtaacggtcagcctaaataaaggcggaaacaagacgttagaggcgaaggcaattctgttggcaaccggatctgagagtacctttttgccgggaataaaggtggatgaaaagcagattgtcacctccaccggtgcgctgacgctgggcagggtgccgaagcatctcgtggttattggtggaggttatattggtctcgaattgggttcggtctggcggcgtttaggggctgaggtaacggtcgtagaatttctggatcgtatcacaccgggtatggatggcgatgtcgcaaaaaacttccaacgcatacttaagaaacaaggttttaaatttcggcttggcactaaagtcactaacgtaaaaaagcgcaaaggctcggttacgctttctttggagcctgctataggtggtgaagcggaaagcttaaaatgcgatacagtgctactgtccgttggtcgccggccttatacggataagctcg

SEQ ID NO: 223314 - DNA, 794 bp, Unknown
  Bacterial polypeptide expressing nucleotide sequence isolated from the Sargasso Sea
aatggaatatgacgttgtaataattggaggaggtccagggggctatgtagctgctattaaagctgctcagcttggtcttaaaacagcttgtatagaattcgatgaggacgcatccggtaaagtaaagctagggggcacatgtttaaatgttggctgcataccttcgaaatcacttctagattcctcatataaatttaaacaaataagtgaaagttttgatgatcatggaattaaggtttcaaaaccgtcatatgatctaaataaaatgatgctgagaaaagatgaaattattcaaaaacttacgggtggtgtcggacatttatttaaacataataaagttgagtcaatacatggaagaggaaaattgatatcagctaatgaagtggaggtaacgaaccctaaaggtaagaaacaaatagttaaagggaaaaatattattctagcagcaggttctagaccaataaatatcccatctgttccgtggaatggatctacggtagtaggaagttcaggtgctctagaatttaatcaaacacctaaaaaacttgcaataattggtgctggcgttattggattggagcttggaagtgtatggtcaaggctcggatcaattgttgatatatatgaggccgagcaaacattattaccaatgttagatgaggatgtttctagattaattgaaagagaatttaggaagcagaacctaaatattcaacttgggacttttgtgaaaggttctaaaaaatcaagaaaaggaatctcgcttgaattagaaataaacggtaaaacaagct

SEQ ID NO: 223315 - DNA, 586 bp, Unknown
  Bacterial polypeptide expressing nucleotide sequence isolated from the Sargasso Sea
gacgcaggcaaagcgggcgttgaagttgacgaacgcggctttatccgtgttgacaagcagctgcgtaccaacgtgccgcacatcttcgctatcggcgatatcgtcggtcagccgatgctggcgcacaaaggtgttcacgaaggtcacgttgccgccgaagttatctccggtctgaagcactacttcgacccgaaagtgatcccgtcaatcgcctacaccgagccagaagttgcctgggttggcctgaccgagaaagaagcgaaagagaaaggcatcagctatgaaactgccaccttcccgtgggcagcttctggtcgcgcgatcgcttcagattgcgcagacggtatgaccaaactgatcttcgacaaagagacccaccgtgttatcggcggcgcgattgtcggcaccaacggcggcgagctgctgggtgaaatcggcctggctatcgaaatgggttgtgatgcagaagacatcgctctgaccatccacgcgcacccgactctgcacgagtccgttggcctggcggcagaagtgttcgaaggtagcattaccgacctgccgaacgcgaaagcgaagaaaaagtaag

SEQ ID NO: 223316 - DNA, 821 bp, Unknown
  Bacterial polypeptide expressing nucleotide sequence isolated from the Sargasso Sea
tatgactgaatatgacgtcgtggttattggaagtggccctggaggttacgtggcttccataagagcagcacaattaggcttgaaggtagcttgtattgaaggacagtcaactcttggcggaacctgccttaatgtgggctgcataccatcgaaggccttattacactgttcacaaaattttttcgatagcattaataaattcagtaaaatgggtatagatatctcgagacccaccataaattggtctaaaatgcaagattacaagcaatcaatgattgatcaaaatacccaagggatatcctatctattcaaaaaaaataatgttgtacatattaagggttgggccaggataaaaaataaccacacaatagaggtcaatagccaactcattcaaactcgtaacgttattattgctaccggatcagaaccgtcttcacttggtgaaataaagattgatgaagaaaaaatcgttagttcgactggtatattaaatttaaaaaaaataccaaataaactcactatagtaggcgctggtgtaatcggaattgaactgggttcagtattttcgcgactgggcaccgaggttaacataattgaatatcttgaccatattataacaggttttgatcaagaactatcaaagaactttaaaagaattcttaaaaagcagggccttaattttattttgaattctgctgtaaaaacaattgagaatgtaaaaaaaggtgtattagtgacctattccaatcaacgtgacggaaaaaaagaggtcttgggaagcgatgttgtgcttattgcaaccggtcgaaaactttatacgg

SEQ ID NO: 223317 - DNA, 316 bp, Unknown
  Bacterial polypeptide expressing nucleotide sequence isolated from the Sargasso Sea
atgatgagcactgaaatcaaaactcaggtcgtggtacttggggcaggccctgcaggttactctgctgccttccgttgcgcagatttaggtctggagaccgtcatagtagaacgttacagcaccctcggtggtgtttgtctgaacgtcggctgtatcccttctaaagcgctgctgcacgtagcaaaagttatcgaagaagccaaagcgctggctgaacacggtatcgtttttggcgagccgaaaaccgatatcgacaagattcgtacctggaaagaaaaagttatcactcaactgactggcggtctggctggtatgg

SEQ ID NO: 223318 - DNA, 172 bp, Unknown
  Bacterial polypeptide expressing nucleotide sequence isolated from the Sargasso Sea
tatgacccagaaattcgacgtggtagtcatcggtgccggccctggtggctatgtagccgccatcaaagcagcgcagctcggcctgaagactgcctgcatcgagaaataccagggcagcgacggcaaggtcgctctcggcggcacctgcctgaacgtcggttgcattccgtcc

SEQ ID NO: 223319 - DNA, 383 bp, Unknown
  Bacterial polypeptide expressing nucleotide sequence isolated from the Sargasso Sea
gatggacaaatttgacgtcaccgtgattggttcaggcccagggggttatgtggctgccattcgatgtgcacaattaggaatgaagaccgcaatcattgaacgctattcaaccctagggggaacctgtctcaatgtaggctgtattccttctaaagctcttttggattcaagcgaacattatcacaacgccttaaagaattttgggaagcacggtattgaaactgatggagtgcgcttgaattggccaggaatgcttggcagaaaggatgatgttgtcggtcaaacctgttctggtgttgaatacctgatgaaaaaaaacgagatccaggtcatccacggacatggctcctttgaaaccaatcagaaaatgttggttcaaggtg

SEQ ID NO: 223320 - DNA, 787 bp, Unknown
  Bacterial polypeptide expressing nucleotide sequence isolated from the Sargasso Sea
gtatcgattcctcccgcaccaattgacggggatgcaatagttgattcgactggcgcgctcgagttccaggcggccccaaaacggatgggtgtgataggcgccggtgtcattggtttagagcttggcagtgtatggtctcgccttggttctgaggtgatcattttagaggcgctaaacgaatttttgccatcaacagatggccgcgtttccaaagatttactacggactttaaaaaaacaaggcctggatatacgacttggaacgagggttgttgctaccgaggtcaagggtaagggtgccaagaaaacggtttcggtaacttatgaaaaagatggagaggagaataagatagaggtcgacaagctcattgttgctgtaggacgaagaccctacacggagggccttctttctcctgactctggtgtgaatctggatgagagaggtttccttttcgtgaatgacatttgtgcgactgacgcgcctaacgtttacgccgttggtgatgttgtgcgcggtcctcaactagcgcacaagggaatggaagagggaattatggtagcggagcgtatcgccggcaagaaaccactagtcaactatgacgtcgtgcctagtgtcatttacactcacccggaggtcgcttgggtaggtaaaactgaggagcaattgaaagcagcgggggagccttataacgttggtagctttccctatgcggcaaatggtagggctttagcagcgcatgagaacgaggggtttatcaagatattgtcggatgcggaaagtgaccgta

SEQ ID NO: 223321 - DNA, 301 bp, Unknown
  Bacterial polypeptide expressing nucleotide sequence isolated from the Sargasso Sea
atgagcgagaccagattcgacctgatcgtcattggcgccggccctggcggctatgttgccgccatccgcgccgcgcagcttggcatgagcgtcgcctgcatcgagaagcggccgacgctcggcggcacctgcctgaatgtgggctgcatcccatcaaaggcgctgctgaacgcgtccgaacattatgctggcgctgcgggcggcgggcttgccggtctcggaatcgacatcggcagtgtcaggctcgacctgccgaagatgatgcagggcaaggacaagatcgtcgacagcctgaccaccg

SEQ ID NO: 223322 - DNA, 250 bp, Unknown
  Bacterial polypeptide expressing nucleotide sequence isolated from the Sargasso Sea
atgactaaatttgacaccatagtaatcggttcaggtccaggaggatatgtagcggcaattcgttgtgcacagctaggtatgaaaacagcaataattgagcgctatccaactctgggaggtacttgtctgaacgtaggttgtatcccttcaaaagccttgcttgattcaagtgaacattttaataatgctaaacataattttgagaaacacggaataattacccagaagctggagcttaattggccctagg

SEQ ID NO: 223323 - DNA, 195 bp, Unknown
  Bacterial polypeptide expressing nucleotide sequence isolated from the Sargasso Sea
aatgactaaatttgacaccatagtaatcggttcaggtccaggaggatatgtagcagcaattcgttgtgcacagttaggtatgaaaacagcaataattgaacgctatcctactcttggaggtacttgtctgaacgtaggttgtatcccttctaaagccttgcttgattcaagtgaacattttaataatgccaagca

SEQ ID NO: 223324 - DNA, 736 bp, Unknown
  Bacterial polypeptide expressing nucleotide sequence isolated from the Sargasso Sea
aagtgcaaaaaaatcatgaaatcgtctcaagtcatctctgcgagtgcatctgatgaagggattagcgtatcctttaaaaaagatggcgaagaattcagcgaaatgtttcaaaatgttcttgttgcagttggacgaaaatctaacggatctctccttggtttgaatgagattggcgtgaatgtagatgaaagaggaatcattaatgttgataagcaattcagaaccactatggaatcaatatttgcaatcggtgatgtgattggtgacccaatgttagcccataaggcaagccatgaaggcaagattgctgctgaggtagcagcagggcataaatccacaaatgatatcaggtgtattccatctgttgcctatactgacccagaagttgcctgggttggtttttcagaagaagaatgcaaagcaaaaggaatagattatggtaaaggaatattcccttggtcagctagtggtagatcattgacgattggaagaagtgagggcatgaccaagctgatatttaataattcaacaaagaaaatagttggtggtggaattgttgggccaaatgcaggtgagttaatatcagaaattgctttagcgatcgaaatggattgtgatgtgagtgatattgcactcactattcatcctcatcctactttatctgaaacggttgggatggctgcagaagtatttgagggaactgtcaccgatttatatgtaaagcctcgcaactgat

SEQ ID NO: 223325 - DNA, 805 bp, Unknown
  Bacterial polypeptide expressing nucleotide sequence isolated from the Sargasso Sea
atgtcatacgacgtaatagttattggtagtggacccggaggatatgtagcagcgatacgttgcgctcaacttgggctaaagacggcttgcgtagagggccgagaaactctcggtggtacctgcttaaacgtagggtgtattccatccaaggcactattacatgcgtcacatcaattacatgaagcacaacataacttttccaaaatgggcctcaaatcagaaaaaatttcagttgattgggatcaaatgcaaacatacaaaaaagaggtaatagagggaaataccaaaggaattgaatttttattcaagaaaaacaaaatagactggataaaaggttgggccacaatcccctccgtaggcaatgttaaagtaaatgacaaaacttacgagacaaaaaatataataatcgcttctggatctgaaccctcttcgcttccaggattagaaattgacgaaaaaataattgtaagttccactggtgctctcgaactcagaaaaatacctaagaaaatggtaataattggggctggtgtaatcggtttagaactaggatcagtttattcacgattaggatcggatgtaactgtacttgagtacctggataatattacaccaggcttggattcagagcttcaaaaatcctttcagcgtatattaaaaaggcaaggaattaaatttgtaatgggtgcggcagtaaagtctgcaatatgcaaaaaaaacaaagcgcacgttttatatcaaaaaaattcagatgaaagtgagcactccatagaagctgatattgttttagtcgcaacaggcagaa

SEQ ID NO: 223326 - DNA, 534 bp, Unknown
  Bacterial polypeptide expressing nucleotide sequence isolated from the Sargasso Sea
gatggacaaatttgacgtcaccgtgattggttcaggcccagggggttatgtggctgccatccgatgtgcacaattaggaatgaagaccgcaatcattgaacgcttttcaactctagggggtacctgtctaaatgtgggctgtattccttccaaagctcttttggactcaagcgaacattatcacaacgccttaaagaatttcgggaagcacggtattgaaactgatggtatccgcttgaattggcctgggatgcttggcaggaaggatgatgttgtcggccagacctgttctggtgttgaatatctgatgaaaaaaaatgagatcaaggtcattcacggacatggctcctttgaaacaaatcagaaaatgttggtccaaggtgaagacagatcgaatatttctgttgaaacagacaaagtcatcattgcgacaggttcgaagccatccagcattcctggggttcacattgataagcagcgaatcattacttccacggaagctctgaaattagctgaaatccccaaaaaaatggt

SEQ ID NO: 223327 - DNA, 718 bp, Unknown
  Bacterial polypeptide expressing nucleotide sequence isolated from the Sargasso Sea
atgtctgcatatgacgttgttataattggaagtgggcctggaggatatgtcgcagcaataaaggcagcacaacttggcttaaaaactgcttgcattgaaggcagggaaacacttgggggaacatgtcttaatgtgggttgtataccctcaaaggcgttactgaatgcttcagaaaaattttcggacagtattaataaattttctaagatggggatcgaaatctccactccaacattggattggacaaagatgctacaatataaacaaacaatgattgatcaaaatactcaaggcatttcttttctatttaagaaaaataagattgattggataaaaggatgggcaagaataaaaaataaaaccacaatagaggtcaacaaaaaaattatcgaggcagagaatattattttggcaaccggttccgaaccttcaagttttggaaaaataaaatttgatgaaaaaaagattgtaagctcaacaggtattttagagttaaaagagatcccacaaaaacttactattgtgggtgctggcgtaattggaatcgaaatgggttcagtattttcaagactaggttctgaagtcacagtaattgaatatctggaccatattatcccaggattcgataaagaaatttccaaaacatttcaaagaattttgaaaaggcagggtctgaaatttattatgaattctgctgttaaagatattaaggattcga

SEQ ID NO: 223328 - DNA, 1327 bp, Unknown
  Bacterial polypeptide expressing nucleotide sequence isolated from the Sargasso Sea
aatgagcgaaattaaaacgcaattggtggtactgggcggcggccctggcggttattcagcagcattccgtgcggctgacttaggtattgaaacagttatcgtagactcacgcgacacgcttggtggtgtttgtcttaacgttggttgtattccttcaaaagcccttcttcacgttgctaaagtgatgaaagaagcgaagcaccttgcaagtcacggtgtatcgtttggcgagcctaccatcgatttagacaaaatccgtgaatacaaagacggcgttgttaagcagttaacaaacggccttagcggtatgtctaaaatgcgtaaaaccaagcatgtacaaggctttggtaaattcacaggcgcaaacaccctagaagtaaaaaatggtgacgacgttactactattacttttgaaaaagcaattattgctgcgggctcagagccagtaagtctaccgttcatccctgaagatgaccgcgtaatcgactcaactggcgcactggaaatgaaagacattccagagaagatgctagtactaggcggcggtatcatcggtctagaaatgggtactgtgtatgaagcactaggctcaaaaattgatgtagttgaattcttagatcagctaattccagcagctgacaaagacatcatgaaagtgttcatgaaagactacaaagacaagtttaacatcatgcttgaaaccaaagtgactgcggttgaagcaaaagacgatggcttgtacgtaacatttgaaggtaagaacgcacctgctgagccagtgcgctacgacaaagtacttgttgctgttggtcgtaagccaaacggtaagctagttggcgcagatgcagctggcgtaaacgttgacgagcgtggcttcatcaacgttgataagcaaatgcgtactaacgttgaccacatctttgcaattggtgaccttgtaggtcagccaatgcttgcgcacaaagcggttcacgaaggtcacgttgcagcagaagttattgctggacagaagcattacttcgacccacgtgctattccttcagtagcgtacactgagccagaagttgcttgggttggtctaactgaaaaagaagcgaaagagcagggcgtaagctatgaaacagcaacgttcccatgggctgcttcaggccgtgcaattgcatctgatgcaactaacggtatgactaagatgattttcgaaaaagaaacgggccgcgtaatcggtggtgctatggtaggtaccaacgcgggcgaaatgcttggcgaaatcggcctagctattgagatgggagctgatgctgaagacgtagcattgactatccatgct

SEQ ID NO: 223329 - DNA, 1420 bp, Unknown
  Bacterial polypeptide expressing nucleotide sequence isolated from the Sargasso Sea
atggattacgatgtagttgtaataggaggcggccctggtggttacgtcgctgcaataaaatcagctcagctaggaatgaaagttgcttgcgtagagtatgacgaagattcaaatggtaaacaaaaaatgggcgggacctgcctgaatgtaggttgtattccatcaaaatcattgctagattcctcttataaatttaaacaaatttctgcaagcttacctgagcacggcatcaacgtatcaaaagcaaattatgatctatcaaaaatgatggatagaaagaacgatatagtaaaaaaattaacctcaggcgtatcacaacttttaaaacataataaagttgagagtatctttgggaaggggaaattaattagtaaaaatgagatagagatatctgattcaaaaggaaagaaaaaaacacttaaagcaaaatatattgttttagctacaggatctagaccaatttatctggattcagtgccttggaatggaacaaatattgttggaagtgctggagctcttgagtttagcaaaactccgaaaaaactggcaatcataggggctggagtaattggtttagaactaggtagtgtttggtcaagacttggctcagaagtcgaaattttcgaagcagaaaaaacctttttaccaatgctagatgatgatatatcaagacttattgaacgagaatttaaaaaccagaacataaatattaatcttggtgctatggttaaatcatcaaaaaacaacagaagtagtgtcactttggagattgattttgctggccaggttgaaaaacgaaagttcgataaagttatagttgctgttggaagaaaacctttttcagagaatttattagcaaaaggatgtgggcttgatgtcgatgagaaaggctttattgaggtaaacaatttttgccaaaccaaacttgagaatatttatgcaattggagatttagtgagaggaccaatgttggctcacaaggcaatggaagagggtgttatggcagctgaacgaatagcaggtaaaaaaatggaagttaactatgatctagttccaagtgtaatatacacacaccctgaaattgcgtgggttggaaaaacagaaaaacaacttaagcaagagaatatagaatttaaaaagggtagctttccttttgctgcaagtggaagagcactagcggctggagactcagttggtgcagtaaaaattcttgcagataaagaaagcgatcaagttttaggagttcaaatatttggaaattccgcgtcagaaatattgcaacaaggactcatagggatggaattttcagcaagttcagaagattttggattaacaatgttcagccatcctactgtttctgaagcattgcacgaagctgcacttgcagttaataagcaagcaattcacataggaaattaat

SEQ ID NO: 223330 - DNA, 598 bp, Unknown
  Bacterial polypeptide expressing nucleotide sequence isolated from the Sargasso Sea
atgtcagaaaaaaaatatgatttagttgttattggagctggtcctggtggatatgttgcttctattgtagcagcacaaaaaggaatgaaagttgcaaatattgaaaagagagaaactttagggggcacatgcttaaacgtaggatgtattccttctaaagctttacttcatgcatcagaacaatacgaaaataatgtaaaaaataatgctaatttatcgtggggaataaaaacatctgacgtaagcattgatgttcaacaattaatgaaaaaaaaatcaaccattgttgatgaattaacaaaaggtattaattttctatttaataaaaataaaattgataaatatgtaggtgaagcaactttagttaacaaaaatgaaattcagattaatggaagaggtaagactgaaaaaatatttgctgagaagattattattgctactggttctgagccttcaaatttaaataatattaaaattgatgagcaaaaaattgttacttccacaggtgctttggacttaaagtccgttccaaaaaaagtaattgtgattggagctggcgtaataggattagaattaggtactgtttggagaagattag

SEQ ID NO: 223331 - DNA, 1402 bp, Unknown
  Bacterial polypeptide expressing nucleotide sequence isolated from the Sargasso Sea
aatgtcagaaaaatttcaagctgtagttattggaggtggaccgggtggttatgtgtgcgcaatcagacttgctcaattaggattaaaaactgcatgtatagagtctagagggtctttgggaggtacttgtttaaatgttggttgtatcccatcaaaaagcttacttaatctgtctgaagaatttcataaagtaaaaagtttagcaaacaaaggtattgaagttggtgaagtaaaattaaatttagacaaaatgatgaaaagcaaagataaagctgtaaccgttcttacaaaaggtgttgagtttcttttgaaaaaaaacaaagttacttattttaaaggacacggaagttttaaatctaaaaatgaaattttaataaaggatgataaaaataaagaaaccatcatccaaacagaaaaaacagttattgcaacaggatcagttccagtttcattaccaggaatagaaatagatgagaaaacaattgtctcatcaacaggtgctttaaagttagaaaaggtacctaagaaaatggttgtagtaggaggaggctatataggattggagatgggatctgtatggtcaagacttggagcagaggtgcaagttgttgaatttttagatcatattacacctggaatggataaagaaatctcttcagaatttatgaaaattttaaaaaaacagggaatgaaatttaatatgcaaaataaagttgaaacaattaaaaaaaatgcagcaggtgtagtggtttcaacagtagataaagatggtaataaaaataattttgagtgtgatgttgttttgatttctgttggcagaaaacctaatacagatggtttaaatttagagtctgtaggagtagatcttgatgaaagaaatagaattaaaactgataaaatttttaagactaacgttgaaaatatttatgcaataggcgatgtaattgttggtccaatgcttgcacataaagcggaggacgaaggtatagcagttgcagaaaacatagttggtcaatctggacatgtaaattacgatacaatcccaggagtagtttatacaacaccagaagtagcatcaattggtaaaactgaggaacaattaaaagaattaaataaaaaatataaagtagggaaattttcgtttatggctaattcaagagctaaggctatagatgatgcagaaggttttgttaaaattttagctgatgagcaaacagataaagtattaggtgcacatataattggacctcatgcaggagaattaattgcagagatcggtgttgcaatggaatttggtgcaagtgcagaagatatcgcccgaacttgtcatgctcatccaacgttttccgaagcagttaaagaagctgctttatcagtagataaaagagcaatacactcttaa

SEQ ID NO: 223332 - DNA, 1399 bp, Unknown
  Bacterial polypeptide expressing nucleotide sequence isolated from the Sargasso Sea
aatggaagattttgatttaatagtaattggtgcgggacctggcggatatgtagctgcaatcagagcagctcaacttggaatgaaggttgcttgtatagaaaaagagtcatcacttggtggaacttgtttgaacattggatgcataccttctaaagcattattaaattcatctgaaaaatttgttgaaatttcaaatcatgctgcagagcatggcataaaaacatcaaagatagatttagacctaaatgttttgatggatcgcaaaacaaaaattgtaaaaaaacttacaacagggatcggttttttatttaagaaaaataaaataacacatattcctggcatggcttcatttatagataaaaatactatttctattacaaatggaaaaaatgaaattactgccagtgctaaaaattttattatcgcaacaggatcatcgtcggttgagataccaaatatttctgttgatgaaaaacaaattgtatcttcaacaggtgctctatctctatctaaaataccaaaatcactcttagttattggtggtggatacattggattagaaatgggttcagtatggagtagattaggttcaaaagtaacagttgttgaagctctggatagaattgttccaactatggatggtgaaatagcaaaagagtttatgaaaatgttaactaaacaaggattagaattcaaactatcacataaagtgagttctgcaaaatctagcaagtctggtgtagatgttgaaatggaaacatcagataaaaagaaaataaaagaaaactacgaaatagttttaatgtcagtaggaagaaaaccaaacactgagggactgggtctcgaaaaagttggaattaaactaacggataaaaaatctattaaaattaaagataactttaaaacttctgtagaaggaatctatgcaatcggtgatgtagcaccaggtccaatgctagcacacaaagctgaagaagaaggagtagcttgtgttgaatttataaacggtcaaaaacctcatataaactatgacgctataccagcgattgtttatactaatccagaaattgcatctgtaggtaaaacagaagaacagctcaagcaagaaaagaaagacttcaaggttggtaaatttccttttatggcaaatggtcgtgctttaactacttctgcatcagagggatttgttaaaattttggttgataaaaaaacagatgaaattttaggtgctcatataatcggtcatgatgctggacaactgattgcagaaattgttactacaatcgaatttggtggaagtgcagaagatattgcaagagtatgtcatgctcatccaacaactagtgaagcagtaaaagaagcagctctaagtgttgatggtagagcaattcatatttaa

SEQ ID NO: 223333 - DNA, 1402 bp, Unknown
  Bacterial polypeptide expressing nucleotide sequence isolated from the Sargasso Sea
atgtctcaaaaatttgatgcagttgttataggaggtggacctggtggttatgtttgtgccataagactagcacaacttggccaaaagactgcatgtatagagtctagaggatctttgggaggtacatgcttaaatgtaggatgtattccatcaaaaagcttattaaatttgtctgaaaactatcataaggcaaaaaactttgaaaaaattgggatagaaattggttccttaaaacttaaccttccaaaaatgatgaagaataaagaaaaagctgtaacagtcttgactaaaggtgtcgagtttttgtttaaaaaaaataaagttacttatttcaagggaactggttcaattactggaactaatcaaattaccgtaaaatcaaatgaaaataaaaatgaaactatagaatcaaaaaatataattatagctacaggttccaatgctgtatcactgcctggtattgaatttgatgaagaaaaaatagtttcatctacgggtgctctttctttaaaagaggttcctaaaaaattagttgtagttggtggcggatatattggattagaaatgggatctgtatggtcaagattaggatctgaagttcaagttatagaatttcttgatcatattactccaggcatggacaaagaaatatccatcgaatttcagaaattgcttaaaaaacaaggaattaattttaatttgaaaatgaaagtagaatctatttcaaaaagtaatgatggaattacgttgaatacagttgacgagcaaggaaatcaaaagaaatttaattgtgatgtagttctagtttctgttggcagaaaacctaatactagtaatttaaacttagataaaattggagttgaaaaagataaaaaaggaagaattaaagtaaataatcattttcaaacaaatgttaaaaatatatatgctattggtgatgtaattgagggcccaatgttggcacacaaagctgaggaggaaggtatagctgttgcagagatcattgcgggtcaatcaggtcatgtaaattatgatataatcccaggtgtgatttatacttcaccagaagtagcttctattggtaaaacagaagaacagcttaaagaaacgaaagtagattacaaagttggaaaattcccttttatggcaaactcaagagcaaaagcaatagatgaaccagagggatttgtaaaaattttggctgactctaaaacagataaagttttaggggtacatatgattggtcctcatgcaggagaattgatagcggaaatggcaattgccatggaatttggagctagttcagaggatattgcacgaacttgtcacgcacaccctactttttcagaggcagtgaaagaagctgcattatcagtagaaaaaagacaaatacactcttaac

SEQ ID NO: 223334 - DNA, 1429 bp, Unknown
  Bacterial polypeptide expressing nucleotide sequence isolated from the Sargasso Sea
atgagtaacgaaatcaaaactcaggtagtggtattaggtgcaggtcctgctggatattctgctgccttccgtgcggctgacttaggtctggaaaccgttatcgttgaacgttttagcactttaggtggcgtgtgtctgaacgtgggttgtatcccatctaaagccctgttacacgttgctaaagtcatcgaagaagccaaagccgttgctgcacacggtgttgtgttcggcgagccaacaatcgatttagacaagttacgcagcttcaagcaaaaagtgatcagccagttgactggtggcttaggcggcatgtctaagatgcgtaaagtaaacgttgttaatggcttcggtaaatttactggccctaacagcttagaagtgactgcgcaggacggtactgtgaccgttgttaagtttgaccaagcgatcatcgctgcaggttctcgcccaatcaaactgccattcattccccatgaagacccacgtatttgggattcgaccgacgcattagaactgaaagaagtgcctggcaaactgctggttatgggcggcggtatcatcggtttagaaatgggtacggtttactcttctctgggcagtgaaatcgacgtggttgaaatgttcgaccaagtgatccctgcggctgacaaagacgtcgttcgcgtattcactaagcaaatcaagaagaaattcaacctgatcctcgaaaccaaagtgactgcggttgaagcccgtgaagacggtatctacgtttcgatggaaggtaagagcgcgccaactgagccagtacgttacgatgcagtgttagtggcaatcggtcgtacgccgaatggcaagctgatcgacgctgaaaaagcgggcgttaagatcgacgagcgtggtttcatcaacgtagacaagcaattgcgtactaacgtaccgcacatctacgcaatcggtgacatcgttggtcaaccaatgttggctcacaaaggcgtgcacgaaggccacgtagcggcggaagttatcgctggtatgaagcactacttcgatccaaaagtcatcccatcaatcgcttacacagaccctgaagtggcctgggttggtctgactgagaaagaagcgaaagagcaaggtattgcttacgaaacagcgactttcccatgggctgcctctggccgtgctatcgcttctgattgcagcgaaggtatgactaagctgattttcgataaagacactcaccgtgtaatcggtggtgctatcgtgggtgttaacggtggcgaactgttaggcgaaatcggcctagcaattgaaatgggttgtgatgctgaagatttagcattaactatccacgctcacccaacgctgcacgagtcagtgggtctagcggctgaaatctacgaaggttctattactgacctgccaaacccaaaggcaaagaaaaagtaag

SEQ ID NO: 223335 - DNA, 1009 bp, Unknown
  Bacterial polypeptide expressing nucleotide sequence isolated from the Sargasso Sea
ttgcatagtgacaatggcaagcctaattttggtggtacatgtcttaatgttggctgtataccttcaaaggctcttttggattcttcacataggtattatgaagcaaataaaaagttatctgaacatggaatacagatagaaggtttaaagttagacttaaaatctatgatgaaaagaaaagacgatatcgtaggcaaacttactggaggtataagtggccttttttctgcaaataaggttgaatctatgataggtagaggcaagattatagatatcaatactgtagaagttacaaaaccagatggcagcacagaaactatagatgctaaaaatattattgtagctacaggctctaagccaatagagataccatcggctaaatttagtaaacatattgtagatagcactggtgcgctttgctttaactcagtccccaaaaagctgggtgtagttggtgctggcattattggattagaactaggaagtgtatggtctaggcttggttctgaagttactgtaatagaagcgcttgatgaatttcttccaatgacagatcatgacatttctaaagaaaccttaaaagaatttaaaaaacaagacttggatataaaattgggttctaaggttactagcacaaaagaattaaaaaattcagttaaggtcaaattcgaaagtaatgatcaagaaaatgagatggaatttgataaattaattgtggctgttggcagggcaccaaattccacaaatgtaataagcgatgaattaaatatcgaaatagaagatggttttatcaaagtaaatgatttttgccaaactagcgtaaataacatatgggcaattggtgatgttgttagaggtcccatgctggcacataagggtagtgaagagggaataatggttgcagaaagaattgcagaaaaacatactgaagtgaattatgatttggttccgtcagtaatatatacccatcctgagatagcatgggtgggtcaaaatgaaaaagatttaa

SEQ ID NO: 223336 - DNA, 1402 bp, Unknown
  Bacterial polypeptide expressing nucleotide sequence isolated from the Sargasso Sea
atgtcagaaaaatttcaagcagttgttatcggcggtggacctggaggatatgtttgtgcgattagacttgctcagcttggtattaaaactgcatgtatagaatctagaggaactttaggaggaacatgtctaaatgttgggtgcataccttcaaaaagtttattaaatctttccgaaaattattttagagcaaaaaatttttcaaatttgggaatagaaattcaaaaaattaaactaaatcttaaaaaaatgatgcaaaacaaagatcaagcagtgaatactttaactaaaggaatagaatttttatttaaaaaaaataaagttacctattataggggaatagcaagcttcaaatcagttaatcaaatttctatagttgatgataaaaataaaaaaacagttatagagacagataaaacgataattagtacaggttccgaagcagtttcattgccaggtattaaatttgatgaaaaagtaattatttcttcaacaggcgccttgtcattaaattcagttcctaagaaaatggtcgtagtgggaggaggttatataggtttagaaatgggatctgtatggtccaggttaggagccgaagttcatgtgattgaatttttagatcatattattccaggcatggataaaggaatctcaaaagaatttataaaaattttagaaaaacagggaataaattttcatttagaaacaaaggtaaattcaattaaaaaaaataataatactgctaaagtattaactacgagcaaaaatggaaaagaaattaattttgattgtgatgttgttttaatttctgtaggtagaaaacctaataccaaaaatttaaatttagaagcagtaggtgtactgcttgataataaaaaaagaattaaagttaataataattttcaaacaaatgtagataatatttatgcaattggtgacgttataaaaggacctatgttagctcataaagctgaagaagaaggaatagcaatagccgaattaatagcaggccaatctggccatgttaactatgatattattccaggagttatttatacttttcctgaagttgcttctattggaaaaactgaagaacaactaaaagatctcaatataaaatataaaattggaaaatttacatttatggcaaattcaagagctaaggcaataaatgaaacagaaggttttgtaaaaattcttgcagatgaaaaaacagacaaagttttaggtgcacatataataggaccaaatgcaggagaaatgattgctgaaatagcgattgctatggaatttggcgcgagttctgaggatatcgccagaacatgtcatgctcatccgactttttcagaggcaataaaagaagcagcattatcagtagataaaagaccaatacactcttaat

SEQ ID NO: 223337 - DNA, 975 bp, Unknown
  Bacterial polypeptide expressing nucleotide sequence isolated from the Sargasso Sea
aatgtcagaaaaatttcaagctgtagttattggaggagggcccggtggttatgtttgtgcaattaggcttgcacaattaggtttaaaaacagcttgtatagaatcgagaggttcattaggaggaacttgcttaaatgttggctgtataccctcaaaaagtttattaaatctttctgaagaatttcataaagtaaaaaatctgtccaataagggtatcgagataggtgaggtgaaacttaaccttgaaaagatgatgaaaagtaaagataaagctgtaacaatattgaccaaaggtgttgaatttcttttaaaaaaaaacaaagttacttattttagaggtcacggaagctttaaatcaaaaaatcaaatctcaattaaagatgataagaataatgagacaattattgagtcagaaaaaacagttatagcaaccggatctgtgccagtttcattacctggaattgatattgatgaaaaagtaatagtttcctcaacaggggctttaaaattagagaaagtaccaaataaaatggttgtagttggaggtggatacattggtttagagatgggttcagtttggtcaagattaggctcagaagttcaggtcgtagaattcttagatcatattacgcctggaatggataaagaaatttcttcagagtttatgaaaattttaaaaaaacaaggtattaaatttaatatgcaaaacaaagttgaaacaattcagaaaaataacaacggagcagttgtttcaacagtagataaagacggcactaaaaacaattttgaatgtgatgtagtgttaatttctgttggaagaaagccaaatacagatggattaaatttagataaagtaggaattgatttagatgaaagaaaaagaataaaaactgataaaacttttaaaacaaatgtcgaaaatatttttgctattggcgatgttatagtaggaccaatgcttgctcataaagcaaa

SEQ ID NO: 223338 - DNA, 1405 bp, Unknown
  Bacterial polypeptide expressing nucleotide sequence isolated from the Sargasso Sea
aatggacaaatttgacgtcaccgtgattggttcaggcccagggggatatgtggctgccattcgatgtgcacaattaggaatgaagaccgcaatcattgaacgctattcaaccctagggggaacctgtctcaatgtgggttgtattccttctaaagctcttttggattcaagtgaacattatcacaacgccttaaagaatttcaggaaacacggtattgaaaccgatggagtccgcttgaactggcctgggatgcttggcaggaaagatgatgttgtcggtcagacctgttctggtgttgaatacctgatgaaaaaaaacgagatcaaggtcattcacggacatggctcctttgaaacaaatcagaaagtgttggtccaaggtgaagacggatccaatatttctgttgaaacagaaaacgtcatcattgcgacaggttcgaagccatctagcattcctggggttcaaattgataagcagcgtatcattacttccacggaagctctgaaattagctgaagtccccaaaaaaatggtggtcatcggtggaggaatcatcggattggaacttggatccgtttattcacgtttgggtactgaagtacaagtggtggaatatctggaccgtttgattccttcgatggatggaagcttgggcaaggaaatgctgcgtaccttgaaaaaacaggggattcagtttttcctcacccacgcagtacaagaagctaaaaattttggagataaggtggttgtcaaggcgttgaacaaaaaagatcaggaggttgaatttgatgctgattattgcctcgttgcggttggtagacgcccctataccgaggggctaaatctgaatgccgcaggtcttgaaattgatgagaaaggaagggttccagtcgacgaaaatcttaaaactcaaactcctggaatttatgcgatcggcgatgtggtgaggggggccatgctcgcacataaagcagaagaagagggagtgtttgttgctgaagttattgctggagaaaagcctcacatcaattaccgaaatattcctagtgtgctttatacctggcctgaagccgcaggagtaggtttcaccgaagaagaactgatttccgaagagagatcttacaaatccggaagtttccccttcagggctcttgggcgggctcgtgctgcaatggaaaccgatggtctggtcaaaatccttgctgacccagatactgatgaaattctaggtgtgcacatgatgggagcgcgaattgcggatttgattgctgaagccgttgttgccttggagtatcgtgccagcgcagaagacctttcaagaatgtcccatgcccatcctacttttgcagaggcagtcaaagaagccgctcttgatgctactgcaaagcgaccgctgcatctttaa

SEQ ID NO: 223339 - DNA, 1402 bp, Unknown
  Bacterial polypeptide expressing nucleotide sequence isolated from the Sargasso Sea
atgtcagaaaaatttcaagcagtagtaattggtggtggacctggcggatatgtttgcgcgattagactttctcaattaggattaaaaacagcatgcatagagtctagaggttctctaggaggtacttgtttaaatgttggctgtataccatcaaagagcttgttaaatttatctgaggaatttcataaagttaaaggtttagcaaataaaggaatagaagtaggagatgttaaactaaatctagataaaatgatgaaaagcaaagataaagcggtaactgtacttacaaaaggagttgaatttttatttaagaaaaacaaggtaacttatttcaaaggttatggaagtttcaaatctcaaaacgaaattttaattaaagataatgaaaataaagagaccattatacaatctgaaaaaactataatagcaactggatctgtggctacttctttaccaggaattgaaatcgatgagcaaaaaatagtttcttccacaggtgcattaaagcttgaaaaagttcctaataaaatggtcgttgtaggtggtggttatattggattagaaatgggatcggtttggtcaagattgggagccgaagtagaagtggtagagtttttagatcacatcactccaggtatggataaagaaatatcctcagaatttatgaaaattttaaagaaacaaggcataaagtttaatatgcaaaataaagttgaaacaattaaaaaaaacaaatctggagttgtagtatccactgtagataaagaaggaaataaaaataattttgaatctgatgttgttttaatttctgttggtagaaaggcaaatactgagggcttaaatttagagactattggagttgaactggatgatagaaaaagaattaaaactgacaaatcttttaaaacaaatttagagaatatatatgcaatcggtgatgtaatatcaggacctatgcttgctcataaagccgaagatgaaggtattgctgttgccgaaaacattgcaggacaatcagggcatgtcaattatgatactattccaggggttgtatatactactccagaagttgcagcgattggaaaaactgaggaacaattaaaagactctaaaatgaaatataaagttggaaaattttcattcatggccaactcaagagcaaaagctattgatgatgcagaaggattcgttaaaattttagctgatgaaaagacagataaagtattgggtgcccacataataggtccacatgcaggagaactaattgctgaaattggtgtcgctatggaatttggcgctagttcagaggatattgcacgtacttgtcacgctcacccaactttttcagaggcagtaaaagaagcagctttatcagtagataaaagagcaatacactcttaat

SEQ ID NO: 223340 - DNA, 1399 bp, Unknown
  Bacterial polypeptide expressing nucleotide sequence isolated from the Sargasso Sea
gatggcagattttgatttaattgttattggagctgggcctggaggatatgttgcggctattagagcttcacaattagggttgaaagttgcctgtgttgaaaaggaaaaaacacttgggggtacttgtttaaatattggttgtattccttcaaaagctctattgaattcatcagaaaaatttgcagaaatatcaaaacatgcagcagagcatggtatttcaactggaaaagtttctctagatttggcaaaacttatgcaacgtaaaaacaaaattgtaaaacaattaacttctggaattggatttttatttaaaaaaaataaaattactcacatacagggcgctgcatcttttttggataccaaaacaatcaaagtatcttccagtgatggagataaaaattattcagcaaaaaattatattattgcaactggatctacttctattgctattgatgcaataccgattgatgaaaaacaaattgtaacgtcaacaggtgcattagcattagagtcggtacctaaatcacttcttgtaattggtggtggttatataggattagagatgggctccgtatggaatagacttgggtctaaagttacagttgttgaagcgcttgatagaatagttccaacaatggatgaagagattgcaactgagtttatgaaatctcttaaaaagcaaggattagaatttaaactttctcacaaagtaatatccactaaagcaagtaagtctggcgtggaagtatcaatggagtcatcagataaaaaacaaattactgaaaagtatgatgttgttttaatgtctgttggtcgtaaaccaaatactgaaggattaaatttagaaggtattggtgtcaaattcaatgagaaaaaatccattgaaattaacagtaaattcaaaacaaacattaatggaatttttgcgattggcgatgtagtgccaggaccaatgttagcccataaagctgaagaagagggagtagcatgcgtggaatttattaatggtcaaaagccacatctgaactatgatattattcctgctattgtttatactaatccagaagttgcctctgttggaaaaacagagagtcaacttaaagatgcaaagattgattacaagattggtaaatttccttttatggcgaatgggagagcattaacaacttcatccccagaaggttttgttaaaattttagccgactctaaaacagatgaactattaggagctcatattataggtcatgatgccggtcagttaattgcggagatagtaactactatggaatttggtggaagctctgaagatattgcacgtatatgtcatgcacatccaactacaagtgaagctgttaaagaggcagcgatgaatattgtaggaagagctattcatatttaa

SEQ ID NO: 223341 - DNA, 1636 bp, Unknown
  Bacterial polypeptide expressing nucleotide sequence isolated from the Sargasso Sea
agtattaaccctagagactgaaaaggctgcaatggatgttccaagtccctttactggtgttgtagagaatatttccgtaggtccaggtgatagcgtctcccaaggagacttgatctctattgtgtcatccgagtcaaaacccaatgaagaagatgaatctataactgaagaaaaagaaacagaacaagcgattcaagagagtgaagatcccagtgaatcttcacaatccgaacatgattatgacttgattgtagtgggtgctggaccaggtggttatgcagcagcatttagagcatctgatttgggtttaaaagtcggtttggttgagcgaaattcagatttaggtggtgtttgtcttaatgttggatgcattccatcaaaggcttttctgcatgcggcaaagatcttggatgattcaaaagaggcagaggtcagcggtatcgtttttaaagagccagaaattaatctatccaaaatgaaagaatggaaaaataacatcatcggcggattgaccggaggattatcaggattggcaaaacaaagaggtgttgatgtgattcatggtacagcaaagttttcttccaaaaatgagatagaggtcaaccatgaaagtgattctcgaagaatttcatctaatcaatttattattgctgttgggtcagagcctgctgagctgagtttcttgccagatgacccaagaattattgactccactggagcattagaacctgatcagatacctaatgatattctaatcattgggggaggaataattggtcttgagatggccacaatatactcggctcttggtagtgaggtcacaattgttgaattaaccaaacaactgatgccaggaacagaccctgatcttgtgagaccgctagagagaatcctcaataagaagtgcaaaaaaatcatgaaatcgtctcaagtcatctctgcgagtgcatctgatgaagggattagcgtatcctttaaaaaagatgacgaagaattcagcgaaatttttcaaaatgttcttgttgcagttggacgaaaatctaatggatctcttcttggtttagatgagattggcgtgaatgtagatgagagaggaatcattaatgttgataagcaatttagaaccactgtggaatcaatatttgcaatcggcgatgtgattggtgacccaatgttagcccataaggcaagccatgaaggcaagattgctgctgaggtagcagcagggcataagtcaacaaatgatatcaggtgtattccatctgttgcctatactgacccagaagttgcctgggttggtttttcagaagaagaatgcaaagcaaaaggattggattatggaaaagggatattcccttggtcagccagtggtagatcattgacgattggaagaaatgagggcatgaccaaactgatatttaataattcaacaaagaaaatagtcggtggaggaattgttgggccaaatgcaggtgatttaatatcagaaattgctttagcgattgaaatggattgtgatgtgagtgacattgcactcactgtccatcctcatcctacgttatctgaaacggttgggatggctgcagaagtatttgagggaacagtcaccgatttatatgtaaagcctcgcaactga

SEQ ID NO: 223342 - DNA, 1722 bp, Unknown
  Bacterial polypeptide expressing nucleotide sequence isolated from the Sargasso Sea
gatggacaaacgctccgttcaggttcctgacatcggcgatttccaggaagtcgaagtaatcgacattctggtccaatccggggaccgaattcaggaagaagacccgctgatcactctggaaagcgacaaggcttccatggatgttccatcacctttctcaggaacgatttcgagcattcatcttaaggttggtgacaaagtttccgaaggaaatctgattctggaattggaagaagagttaatcaattccgagccaactacccaaaaatctttagaggaaaaaacacctccctctgaagaaaacatcaatccttccaaaaccactgcaaccccatcttcccggcaagtgagtaaagcagatttgaactgtgaagtcctggttttaggtgctggtccagggggatatactgccgcattcagggcggctgatctggggaaaaaagtgattctggtggaacgttatgaaagtctgggaggagtctgcctgaatgttggatgcataccttctaaagctttgcttcatgctgcgaaagtcatcgatgacgcacacgccatgaaagaccatggaatcgattttggcaccccaaaaatcgaccctatcagactttcagcatggaaaaactctgtcgttggcaaactaaccaacggtctgaagtcattggcaaaacaacgtaaagttgaatgcctgactggaaaaggaactttccttgattcccatcatctccagattgaatcaaaaagcggaaaaaccactgttcgttttgagaatgccatcatcgccgccggttctgaaccggttaaactcccattccttccagatgatcccaggatcatggattccacgggagcattaaatcttcagcaaatcccggaaacgatgctggtcatcggaggtggaatcatcggtctcgagatggcgaccgtttacagggcgatggggaccaaaatcacggttgttgaaatgcttgacgggttgatggctggagccgaccgtgaccttgttaaaccctttcaccgcatcgtttcacgtcagtacgataacatctggctggaaaccagagtcactcaagtcgaagctcagaaaaaaggtttgaaggtccattttgagggaaaaaatgctcctgaaaaaccagttgtcttcgaaacaatcctaagtgccgtgggaagaatcccgaacggattaaaaatcggtgcagaaaacgcaggggtttcggtgaatgaaaaaggcttcattgaggtagactcccagatgcgcaccaatgtatcgaatatttatgccatcggagatatcgtcggccaaccgatgctggctcacaaagcaacccatgagggtaaggttgcctcggaagtgatttgcgggatgaaaagtcattttgacgctcggaccattccctctgttgcttataccgatcctgaagttgcatgggccgggatcaccgaagaggaagccaaaagccagggaattaattatggcaaagggattttcccctgggctgccagtggacggagcctggcattgggacgagacgagggcatgacgaaaataatgtttgatgagggcaccaaaaaggtgattggtatgggtatcgtggggccgaatgccggggaactgattgcagaaggaatgttagccattgagatgggggcagacgccaccgatatcggttccaccattcatcctcatcccacactttctgaaaccgtaggattggccgccgaggc

SEQ ID NO: 223343 - DNA, 1390 bp, Unknown
  Bacterial polypeptide expressing nucleotide sequence isolated from the Sargasso Sea
atgtctaaatatgatgttatagtcataggaggcggtccgggaggatacgtcgcgtctattcgttgcgcccaaatgggtcttcacactgcatgcgttgaaggccgagataccctcggtggaacttgtttaaacgttggttgcatcccatccaaggcgttattacacgccagccaccaactccacgaggctgaacacaattttaaaaaaatgggattaatagcaaagccaccgtctgtagactggtctaaaatgcaaaattataaaactgaaacaattgatgcgaataccaaaggcatcgaatttttattcaaaaaaaataaaatagatcatttaaaaggatgggcctcgatatccgctccaggaaaagttcgagtagacaaaacaacttatgaggctaagagtataattatagcttcagggtcagagccgagtacaatccctaatgtcgaaattgacgaaaagataattgtgtcatcaactggagcactgtcgttatccaaaataccaaaaacaatgacagttatcggcgcaggcgttattggcttggagctcggatccgtttatgcgcgtcttggtacaaaagttacgattattgagtacctagattatataactccgggtatggatacagaggtacagaaaacttttcaaagaattttaaaaaaacagggcatctcttttattatgggtgctgccgtgcagtcggccagcaaatcaaagtccgtaggaaaagttaaatacaagcttaacaaagatgctagcctccacgaactagatggggatattattttagtcgcaaccgggagaaaaccaaatactcatggacttgggctagataagttgaatatggaattaactgagcgcggtcaaatcaaaaccgatagcggatggcaaacaaacataccaaacatatacgcgattggagatgttgtcgaaggaccaatgttggcgcataaagcagaagatgagggtatggcagtcgcagagcaaatcgctggcaaaaatggacatgttaattatcaagtaattccaagtgtcatttatactgctccagaggtcgcttcagtaggattaactgaacaacaagccaaagaaagtgaccgttctgttaaaattggaaaatttatgtttatgggcaatggcagagcgaaggcaaattttgcagcagatggttttgtgaaaattatagctgataaagatagtgaccgtattttaggagcacatatcgtcggcccagcagctggagacctcattcacgagctttgcatagcaatggaatttggggcgtcagctcaagatgttgccctcacttgccatgcccatccaacctactcagaagcagtccgagaagctgccttggcatgcggaagtggagcaattcacgcttaac

SEQ ID NO: 223344 - DNA, 1060 bp, Unknown
  Bacterial polypeptide expressing nucleotide sequence isolated from the Sargasso Sea
aatgactgattacgatttaattattatcggagctggaccaggaggatatgtagcagcaataaaagcagctcaattaggtatgaaagttgcttgtgttgaaaaagaaaaaacacttggtggaacatgtctaaatataggttgtattccgtctaaagcattattgtattcatcagaaaaatattatgaaacatcaaataagataagcgaacatggaattaaagttggcaatattaatgttgatattagcaaaatgatgcagcgtaaaaataatatagttaaaaaattaacaaccggtataagttttctttttaaaaaaaataaaatcacacacattgcaggtcatgcatcatttatcgatactaaaacaattttagtaaaagatgaaaatgaagagagaagatattctgctttaaattttattattgctactggatcatcttcaatggaaagaccaggaataagcgttgatgaaaaacagattgtaacatcaacaggggctttatccttaccagagattccgaaggctatgttggtaataggaggtggttacattggcttagaaatgggctctgtttggtcaagattgggcacaaaagttacagttatagagaagttagaccgcattcttcctgctatggatagcgaagtagcatctgagtttaagaagtctttagaaaaacagggaatagaatttaaactatcacataaagttattgcagcaaaaccagtctctaaatacgttgaagtaacaatggaatctgagaaagataaaaaacaaacaatagataaatttaatatagttttaatgtctattgggagaaaaccaaatacagagggattaaatttagaaaaaattggtattaaattaaatgatcaaagatttatagaagttgataagtactttaaaacatccattgataatatttatgcaataggtgatgttgcaccagggcctatgttggcccataaagctgaagaagaaggtgttgcttgtgtagaaattattaaaggtcaaaaagctcatttaaattatgataacatacccgcaattgtatatacc

SEQ ID NO: 223345 - DNA, 670 bp, Unknown
  Bacterial polypeptide expressing nucleotide sequence isolated from the Sargasso Sea
atggaatatgatgttgtagttattggaggaggcccaggcggatatgttgctgccattaaagcttctcagcttggtttaaagacagcttgtatagaatttgatgaggataaatctggaaaagtaaaacttggaggcacttgcctaaatgtcggctgcataccttcaaaatcactcttagattcctcatataaatttaaacaaatcagcgaaagttttgatgatcatggaataaaagtttcaaaaccttcatatgatctaagcaaaatgatgcaaagaaaagatgaaattgttcaaaaacttactggaggggtaggtcatctatttaaacataacaaagttgagtccatacatggaaaagggaagttagtttcagctaacgaagttgaggtgacaaattcaaaaggaaaaaaacaaacagtcaaaggtaaaaatataattttagctgcaggctctagaccaataaatattccatctgttccttggaacggatctacagttgtgggaagttccggtgctcttgaatttaacgaaaccccaaaaaaacttgcaataataggcgcaggtgtaattggattagagctgggaagtgtatggtcaagacttgggtcagttgttgacatttatgaagctgaaaaaacacttttacctatgctagatgacgatgtttcaa

SEQ ID NO: 223346 - DNA, 1182 bp, Unknown
  Bacterial polypeptide expressing nucleotide sequence isolated from the Sargasso Sea
aatgactaaatttgacaccatagtaatcggttcaggtccaggaggatatgtagcggcaattcgttgtgcacagctaggtatgaaaacagcaataattgaacgctatcctactcttggaggtacatgtctgaacgtaggttgtatcccttcaaaagctttgcttgattcaagtgaacattttaataatgccaagcataattttgagaaacacggaataatcacccagaagctggagcttaattggcctaggatgcttgagcgtaaagatgatgtggtaagtcagacctgtgatggactacagtacttaatgaaaaaaaataaaatcacattttttaatggtcatggaacatttaaagacaaaaatacaatcattgtgaaaaagggcaatgatgagcatacatttaaaactgaatatacaattgttgcaactggttctaagccgtcaaacattaccggagtaaattgtgataaaaaacgaatcatcacctcaacggaagcactcagtctgccgaaagttccagagaaactagttgtgattggtggtggcatcataggtcttgaacttggatcagtttttaatcggcttggttcaaaagttcaggttgtggaatatttagatcgattggttgctggaatggatatttcattgggcaaggagattctgagggttttaaaaaaacagggtattgaattttttctcagtcatgctgttcaaaaagcagttgtcaatggaaaaaatgttgaagtaattgcaaaaaataaacaggatcaagaagttaaattcagtggtgattactgcctggtagcagtggggcgaagaccatataccgaaaatctgggtttacaagatattggaattccccttgatgagcagggaagaatcacagttaatgaaaatctggaaacattggttcctggaatatatgcaataggagatgtgattaaaggtgcaatgcttgctcacaaggcagaggaagaaggagtttttgtcgcagaaacaattgtagggcaaaaaccttacatcaattacaaatcaattccagaagtgctttacacatggccggaagcagcaggtgtaggatttactgaagacgaactgaaatctgaaaattataactactccacaggtaacttcccatttaaagcacttggtcgtgcccgtgtatcaatggatactgaggg

SEQ ID NO: 223347 - DNA, 1405 bp, Unknown
  Bacterial polypeptide expressing nucleotide sequence isolated from the Sargasso Sea
atgaatgattttgatcttactgttattggggcaggacccggtggatatgttgcggctataagagcgtctcaattggggatgaaggtagctgttattgaagaacgtaaatcacttggaggtacatgccttaatattggttgtatcccatcaaaggcattattaaactcatctgaaaaatatgaaagtatcaattctgctcaattagaagattttgggattaatctgtcttctgtaaaacttaatatctcaaagatgatggaaaataaggataatattgtttcagatttaactaaaggaatagaatttttgtttaaaaaaaataaaatttcttcctttgaaggcaatggatatatttcatctcccaatgaaattattgtgtctaagaatggaaaagaagaagttattaaaagtaataaaattttaattgcaacaggaagtgttgtagcacctttgaataatattaaaattgatgagaaaaatattgtttcatcaacaggggctttagagctcaaaaaagttccaaaaagattaattgttgtaggcggaggatatattggccttgagatgggaacggtctggcgaagattaggatctcaagtaacagttattgaatatttggatagaattttaccaggaatggatagtgaagttgcaaaaaaatttaagttaattttgcagaaacaaggtattgattttaaattaaatacggcaattaaagatgcaagagttgacaaaggctcagtatatctttctgctaacaataattcaacaaatgaaaatctttcttttgaagcagatgttgttttgattgcaacaggaaggatacccaacacacaaaaccttggattagatacattgggtattaaactttctcaaaaaggtgaaattttagtcaataataattttgaaacaaatgttagtaatatttatgcaattggtgatgtgattccaggaccaatgctagctcataaagctgaagaggacggaattgcagccgttgagataatgaatggtgtcgcaggtcatgtcaattatgacctcgtacctggcatagtatatacctcacctgaagtagctactttaggcaaaacagaagatgaattaaaagaaagtcaaataaactataataaaggagttttcccttttagtgccaatagcagagctagagcaataaatcatacagatggttttgttaaaattttaagtgataaaaattctgataaagttttaggtgtacacataattgggcacgaagcgggtaatctggtccatgaagtagctacagctatgtcatttggaggaagtgctgaagatatagctagaacatgtcatggtcacccaactttaaatgaagcagtaaaagaagctgcgttagcagctggaaccggcgcaattcatatataaa

SEQ ID NO: 223348 - DNA, 1165 bp, Unknown
  Bacterial polypeptide expressing nucleotide sequence isolated from the Sargasso Sea
atgtttgatgtagttgttataggaagtgggccagccggatatgttgctgcaattagggcatcacaacttggttttaaaacattatgtattgaagagtcgattgatgatgatggaaagccaaatcttggtggaacgtgtttaaatgtagggtgtattccctcaaaagctcttttagattcatctcataaatactatcaagcaaataagaatttaagtgatcatggtgttcagattgataaacttaaactggatttagatgcaatgatgtctagaaaggatgcaattgtatctcaattaactggaggtgtatcaggattatttaaagcaaataaagttgaatcaataactggtaggggaaaagtaatttcaaagaatgttattgaaataacaaaaccagatggctcaaaagaaaatcttgacgctaaaaatattattattgcaacaggatcgaagccaattgagataaatgctgctccatttagcaagaatatagttgatagtacaggtgcattatcttttaagaaagtaccaaaaaaattaggtgttgttggcgctggaattatcggtctggaacttggaagtgtttggtcaagactgggttctaatgtaactgttttagaagctctggatgattttcttcctatgtctgatcctgatatttctaaagactcttttaaagaatttaaaaaacaaggattagatattctgctaggatcaatggtaactagcacgaaagatatgaaagattctgtgaaattatcatataccaaagaagataatgaaatagagatggagtttgataaattaattgtcgctgttggtcgctcatcgaattcagaaaatattctaaatgatgatcttggagtatcaataaaaaatggcttaattgaagttgatgaatattgtcaaacttcagtatcaaatatttgggcagttggcgatgttgtgagaggtcctatgcttgcgcacaaaggaagtgaagaaggtattatggttgcagaaagaattgctgaaaaacatactgaggtaaactatgatcttgtaccttcagttatatatactcatcccgaaattgcttgggtaggaaaaaatgaaaatgaattaaaggaaagtggaattgattataatgtaggtaaatttccatttgcagctaatggaagggctc

SEQ ID NO: 223349 - DNA, 1405 bp, Unknown
  Bacterial polypeptide expressing nucleotide sequence isolated from the Sargasso Sea
tatgagttcatttgacgtagtcattataggttcaggaccaggcggatatgtgtcagcaattcgttgtgcacaattaggtttcaaaactgctattattgaaaaatattcaacccttggcggaacatgcttgaatgtggggtgtattccatctaaggcattattagcttcttctcatcattacagtgaaattgctcattttgctgattatggtattgaactttcaggagaagtaaaagtaaatctagaaaaaatgattgctcgcaaacaagctgttgttgatcagacttctggtggagttaaatttttaatggataaaaacaatattactgttttagaaggtttaggatcatttgttgatgaaacgcacgtagcagtagcaaaaggagacggtacttctgaaacgatcgaagcaaaaaatattatcatagcaactggttcaaagccatcctctttaccttttatcaaaattgacaaggaaagaattatcacttcaacagaagcattgaagcttaaagaagtgccaaaacatttggtaattattggtggtggagttattggtattgagcttggtcaagtatacttgagattaggagctcaagtttcagttgttgaatatttagacagaattattccgggaatggatgcgtctttatctaaagaattaacaaaagtattgaagaaacaaggtatgaaattctatgtttcgcacaaagttcaatcggttgatagaaatggagatgctgttgttgtgcaagctgagagtgcaaaaggagaaacaataacacttgaaggagattacgcattagtttctgtaggtcgtcgtccgtacactgatggattgaatgcagataaagctggcgttaaagtaaccgaaagaggaatggttgaagtaaacgatcatttacagaccaatgttcctaatatttatgcaattggtgatgttgttcgtggagcaatgttagcacataaagcagaagaagaaggtgttatggttgctgaaattttagcaggtcaaaaacctcatatcgattataatttaattccgggtgtggtttacacttggccagaggtagcagcagtgggtcaaacagaagagcaattaaaagcaaatggcgtagcctacaaagctggaagttttccttttaaagcgttaggtcgtgcaagagcaggtggagatacggatggtttcgtgaaaatcttggcagactcaaaaacagatgaagttctgggagttcacatgattggtgctcgttgcgctgatttaattgccgaagcagttacggctatggagtttaaagcatcggctgaggatatttctagaatgtctcatgcacatccaacttttgcggaagcaattaaagaggcagctctagcagctactgacaatagagctttacacgtataa

SEQ ID NO: 223350 - DNA, 659 bp, Unknown
  Bacterial polypeptide expressing nucleotide sequence isolated from the Sargasso Sea
aatgccagattatgatttgattgtaattggaagtggccctggcggctatgttgctgctattagagctgcacaattaggaatgaaagttgcatgtgtggaaaaagaaaaagcgttaggtggaacatgtcttaatattggatgcattccttctaaagcacttttagcctcaacagaaaaattttctgaaatagaaaaccacattgatgaacacggaatttctgccgacaaaattaatattgatattagtaaaatgatgattcgtaaaaataagattgtcacaaaacttacaactggaataggatttctgtttaaaaaaaataaaattactcaactcatcggacaagcctcatttattgatagtaaaacaatacaagtaaaaaatgataaagatgaaagaagacatactgcttcaaattttattattgcaacaggatctagttctaaaaagatcccatcgattaccattgatgaaaaaaaaatagttacatctacaggtgcactatctttagatgcggttccagagtcaatgttagtaattggtggtggatatataggtttagaaatgggttcagtatggtcacgattgggcacaaaagttactgtagtagaagcattggatagaatcgttcctactatggatggtgagattgctttagaat

SEQ ID NO: 223351 - DNA, 1212 bp, Unknown
  Bacterial polypeptide expressing nucleotide sequence isolated from the Sargasso Sea
aatgacagataaatttcaagcagtagtaattggtggaggacctggaggttatgtttgcgcaataagattggcacaattaggcctcaaaactgcatgtatagaatctagaggttcactaggtggtacttgtttgaatgttggatgtattccttctaaaagtttattgaatttatctgaggagtttcataaagcacaaagtctatcaaataagggaattgaaattggtgaggtaaaattaaacttatcaaaaatgatgaagaataaggacaaagcggttacaattttgactaaaggagtggagtttcttcttaaaaaaaacaaagtcacctattttaaaggcaccggaagtttcaaatctaaaaatgatattgtaatcaaagataacgataataaagagacaattatacaaactgaaaatactataattgcaactggttcagttccagtatcattgccaggaattgaaattgatgaaaaagtaattgtttcatccactggagcacttaaattagaacaagtcccaaaaaaaatggtcgttgttggtggaggatatataggtttagagatgggatcagtatggtctagacttggtgcagaagtccatgtagttgagtttctagaccatataacaccaggcatggataaagagatttctagtgagtttatgaaaattttaaaaaaacaaggaataaattttcatatgaagcataaagtagagaaaattaaaaagaataacgataatgcaattgtctcaactttaaacgaaaatggtaccaaaaaagattttgaatgtgatgtagtattaatatctgttggtcgaaagccaaatacagagggactaaatcttcaaaaaattggtgtggaattagatgaaaaaaagagggttaaaacagacgaaaattttaaaactaatcaaaataatatttatgcgataggagatgtaattagtggtcctatgttggctcataaagctgaggatgagggaattgcagttgcagaaaatatagcaggtcaatcagggcatgttaactatgatactattcctggtgtgatttatactagtccagaagttgcctctattggaaaaacagaagaacaattaaaagaactgaaaataaattataaaattggaaaattttcatttatggctaattctagagcaaaagccattgacgacaccgagggttttgtaaaaattcttgctgatgaaaa

SEQ ID NO: 223352 - DNA, 1399 bp, Unknown
  Bacterial polypeptide expressing nucleotide sequence isolated from the Sargasso Sea
gatggtagattttgatttaatagtaattggagcaggtccaggtggttacgtggcagcaattagagctgcacaactcgggatgaaagttgcgtgtgttgaaaaaggacaaacacttggcggcacttgtttgaatattggctgtattccatctaaagctctattaaattcgtctgaaaaatttgctgaaatttctaaacatagtgaagagcacggtatcagcacaggaaaagttgagcttgatttatctaaactcatgcaacgtaaaaataaaattgtaaaacaacttacatctggaattggttttctttttaaaaaaaataaagttactcatattcaaggattagctagctttacagacaagaacacaattaaaatttcgtcatctgatagtgaaaaaaattattcagcaaaaaattttattattgcaacaggatcttcttcaattgctatagatgcaattcctattgatgaaaaacaaattgttacttcaactggcgctcttgctttagagtcagtgccaaaatcacttcttgtcattggtggtgggtacattggtttggagatgggatctgtgtggagtagacttggatctaaagtaactgttgtcgaagctctggatagaattgtaccaacgatggatgaagaaattgctaaagagtttatgaagtcacttaaaaagcaaggcttagattttaaactttcacaaaaagttacttcaacaaaagctagcaaagacggcgttgatgtaataatggagtcttcagataaaaaaacagttacagaaaaatatgatgtagtacttatgtcggttgggcgtaagccaaacacagaagatctcaacctagaggcaattggcgtaaaactgaatgaaaaaaaatcaattgaaataaatagtaaatttaaaactagtgtagatgggatttatgccatcggtgatgtggtaccaggaccaatgcttgcacataaagcggaagaagaaggtgtggcatgtgtggaattaataagtggtcaaaaacctcatatcaattatgagatgatccctgcaattgtctacacaaatccagaagtggcttcagttggaaaaacagaaactgaattaaaagcaaaaaagattgattataaaattggaaagtttccttttatggcaaatggtagagcactaaccacttcttcaccagaaggctttgttaaaattttagcggatagtaaaacagatgctattcttggcgctcacattatcggtcatgatgcaggccagcttattgcagaaattgttacaacaatggaatttggtggaagttcagaagatatagcacgtatatgtcatgcacatcctacaacaagtgaagcggtcaaagaagctgcaatgaatattgaaggaagagctattcacatatag

SEQ ID NO: 223353 - DNA, 1420 bp, Unknown
  Bacterial polypeptide expressing nucleotide sequence isolated from the Sargasso Sea
atggaatatgatgtaattgttattggaggaggccctggtggctatgtagcagcgataaaagcatctcagctaggcctaaaaactgcttgcatagaatttgatgaggatgatcaaggaaaacaaaaattgggtggcacttgtttaaatgttggctgcataccttcaaaatctttacttgattcttcttataaatatcatcaaatttcagaaagttttgatgagcatgggataaaagtatcgaaacccaattatgatttagcaagaatgatggaaagaaagaatgagattgtaaaaaaacttacaggcggagtaagccatttattttcacataataaagtagaagcaattcatggaaaaggaaaactacttaatcaaaatgaagttgaagtcacagatctaaaaggaaagaaaaagaaatacaaaggaaaaaatattgttttagcaacaggttcaagaccaattaatataccatcagttccatggaatggtacaacagtagttggaagtgctggagctttagaatttaccgagacaccaaaaaagcttggaataataggcgcgggtgttataggcctcgaacttggaagtgtctggtcccgtcttggttctgaagtaagtatctatgaagctgaaaaagatttattgccaatgttagacagtgatatgactagaactatcgaaagagaattcaaaaaacaaaatttaaatattcatttaggttgttttgtaaaaggatcaaaaaaatatagaaaaggtataaaccttgaagtagaaatagatggaaaaattgagaaaaaatactttgataaagtaatagtcgctgttggaagaagaccattcacagacaatctcttagatgaaggttgtgggctaactctcgatgaaaaaggtttcatacctgttgatggatactgccaaacagatcttaataatgtttatgcagttggagatcttgtaagaggcccaatgcttgcacataaggcaatggaagaaggagtaatggttgccgagagaattgccggcaaaaaaatggaagtaaattatgatttggttccaagtgttatatacactcatccagaaatagcatgggttggaaagacagagaaacaattaaaagatgaaggaattgattttaaaaaaggaaattttccatttgcagcaagtggtagagctttagctgctggcgatgcggttgggtcagtaaaagttttggcagataaagaaacagatcaagttctgggagtgcaaatattcggaaactcagcatcagaaatactacaacaaggtctcattggcatggagttctctgctagttcagaagattttggtcttactatgtttagtcaccctactgtttcagaagctctgcatgaagctgccttagctgttaataaacaagcaattcatatagggaactgat

SEQ ID NO: 223354 - DNA, 1282 bp, Unknown
  Bacterial polypeptide expressing nucleotide sequence isolated from the Sargasso Sea
aatgtcagaaaaatttgatgtaactgtaattggtggtggtccaggtggctacgtatgcgcaattagattatcacaattaggcctaaaaacagcgtgcatagagtccagaggatcacttggaggaacatgtctaaatgttggatgtattccgtctaaaaatttattaaatttttcagagaattttcataaagctaaaaactttaaaaatattggaattgaagtcggtgaagtgaagttaaacttagataaaatgatgcaaaataaggaaaaagcagtcacagttttaacaaagggtatcgaatttttgtttaagaaaaataaagtctcatattttaaaggaatgggtgcatttaaaaaggttaatgagatatcaattttagcaaatggcaaagaaactataattcaaacaaacaaaacaataatttgtactggttcaggaccagtttcattacctggtatggaatttgatgaaaaacaaatactttcttcaactggcgccctatcactaagagaagtaccaaaaaaaatggttgtagtaggtggtggttatattggtttagaaatgggttcagtttggtcaagattgggaacacaagtagaggttattgaatttttagatcgtataactccaggtatggataatgaaatttcaaaagaatttgagaaaattttaaagaaacaaggaataaaatttaaattgaataccaaagtagagaaaattacaaaaagtaataattttgtaagcattgatactgttgataaggaaaaaaataaaaataaaatacaggcggatgttgttttaatttctgttgggagaaaaccaaatacaaaaagtttaaatttaaagaatgttggagttcaaactgacgaaaaaggaagggtaaaagtaaataaaaaatttgaaactaacataaaaaatatttatgcaattggagatgttatagatggtcctatgcttgctcacaaagcagaagaggaaggaattgccgttgcagaattaattgcaggtcaatcaggacatgtaaattatgatataataccaggtgttatctatacttccccagaagttgcatctgttggcaaaacagaagaacagttgaaaacaaataagtcaaattacaaaattggaaaatttccttttatggcaaactcaagagcaaaggcaattgatgaatctgaaggatttgtaaaaattcttgctgacgcaaaaactgacaaggtattaggagttcatattataggttctcatgcaggagaaatgatagctgaaatggctgttgca

SEQ ID NO: 223355 - DNA, 1393 bp, Unknown
  Bacterial polypeptide expressing nucleotide sequence isolated from the Sargasso Sea
atgaagaacgaacacaccacactgctcatcatcggcggcggcccggggggctacgtcgccgcgattcgcgccggccagctcggcattccgaccgtgctcgtcgagcgcgaccggctcggcggcacgtgcctgaacatcggctgcattccgtcgaaggcgctgattcatgtggccgacgcattcgaacaggcgtgcggccacgcgggcgaaggcgcgatcggcatccgcgtgcgcacgcccgagatcgacatcgcgaaaagcgtcgcctggaaggacggcatcgtcgaccggctgacgcgcggcgtcggcgcgctgctcaagaagaacggcgtgcgcgtgctgcacggcgacgcgcacgtggtcgacggcaagaccgtcgacgtcgtcgccggcggccacgcggcgcgaatcagctgcgagcatctgttgctcgcgaccggttccgagccggtcgcgctgccgtcgatgccgttcggcggacacgtcgtgtcgtccaccgaggcgctgtcgcccgcgacgttgccgaagcggctggtcgtcgtcggggccgggtatatcgggctcgaactcgggatcgtctatcgcaagctcggcgtcgacgtgagcgtcgtcgaagcggcggagcgcgtactgcccgcgtacgacgccgaactcgcgcggccggttgccgattcgcttgcgcggctgggcgtgcggctgctgctcggccacaaggtgctcgggctcgcggaacacggcgcggtgcgcgtacaggccgccgacggcgcggagcagacgctgccggccgatcgcgtgctggtcgcggtgggccgccggccgcgggtcgacggtttcgggctcgagtcgctgccgctcgatcgcaacggccgcgcgctgtggatcgacgacgaatgtcggacctcgatgcgcaacgtctgggcgatcggcgacgtcgccggcgagccgatgcttgcgcatcgtgcgatggcgcagggcgagatggtggccgagctgatcgccggcaagcgccgcaagttcgtgcccgcgtcgatcccggccgtgtgcttcaccgatccggagatcgtcacggccggctggtcgccggacgacgcgcgggcggccgatgtcgattgcgtacacgcggcgttcccgttcgcggcgaacgggcgcgcgatgacgctgcaggcgaccgacggcttcgtgcgcgtggtcgcgcggcgcgacaaccacctgatcgtcggctggcaggcggtcgggcgcggcgtgtcggaactggctgccgcgttctcgcagtcgctggagatgggcgcacggctggaggacatcggcggcacgattcacgcgcacccgacgctcggcgaagcgctgcaggaagccgcgctgcgcgcgctcgggcacgcattgcacgtctgac

SEQ ID NO: 223356 - DNA, 1311 bp, Unknown
  Bacterial polypeptide expressing nucleotide sequence isolated from the Sargasso Sea
gatgtcagaaaaatttgaagcagtagtaattggcggtggacctggtggatacgtttgtgcgattagactttctcaattaggattaaaaacagcatgcatagagtctagaggttctttaggaggcacttgcttaaatgttggctgtataccatcaaagagtttgttaaatttatctgaggaatttcataaagttaagggtctagcaaacaaaggaatagaagtaggaaatgttaagttaaacttagataatatgatgaaaagcaaagataaagcggtaactgttcttacaaaaggggttgaatttttatttaaaaaaaacaaggtaacttatttcaaaggttatggcagttttaaatcgccaaacgaaattttaattaaagataacgaaaataaagagaccattatacaatctgaaaaaactataatagccacaggatctgtggctacttctttgccaggaattgaaattgatgagcaaaaaatagtttcttcaacaggtgcattaaagcttgagaaagtcccaaataaaatggttgttgtaggtggtggttatattgggttggaaatgggatcagtttggtcaagattgggcgccgaagtacaagtagtagagtttttagatcatattaccccaggtatggataaagaaatatccttagaatttatgaaaattctaaagaaacaaggcataaaattcaacatgcaaaataaagttgaaacaattgaaaaaaataaatctggagtagtagtatctactatagataaagaaggaaataaaaataattttgactgtgatgtagttctaatttcagtgggtagaaaagcaaatactgagggattaaatttagaagctataggggttgagttagacgatagaaaaagaattaaaactgacaaattttttaaaacaaatttagaaaatatatatgcaataggtgatgtaattgtaggaccaatgcttgctcacaaagctgaagatgaaggtattgccgttgctgaaaacattgcaggtcaatcagggcatgtcaattacgatactattccaggagttatatacactactccagaagttgcagcgattggaaaaactgaggaacaattaaaagattctaaaatgaaatataaaattggaaaattttcatttatggccaactcaagagcaaaagctattgatgatgcggagggctttgttaaaattttggctgacgaaaaaacagataaagtactaggtgcgcatattataggtccacatgcaggtgagctaatcgctgaaattggtgtcgctatggaatttggtgctagctcagagga

SEQ ID NO: 223357 - DNA, 1390 bp, Unknown
  Bacterial polypeptide expressing nucleotide sequence isolated from the Sargasso Sea
aatgtcagattatgatgttatagttgtcgggtcgggcccaggtggatatgtatgtgctattaggtgtgctcaacttggattaaaaacagcatgcattgagggaaaagatactctaggtgggacctgtttaaatataggatgcattccatctaaagcattattacatgcgtcagagctttttgaagaaagtaatcataacttttccaaacttggaatagaaacaggaaaaatgactgttaactggagtaaaatgcttgaatataaaaatgatattgtaaatcagaatactaaaggaatagagtttctttttaaaaaaaataagatagatttaatcaacggatgggcatccataaaagaacctggtttattaatagtaaataatcaaaacttaaagtctaaatctataataattgcaacaggatcagaaccttctcaattaaaaggaatacaagttgatgagaaaactatcgtctcttcaacaggagctttgtctctaacaaagataccaaaaaaattaataatagttggagctggggttataggattagaacttggttccgtatattcaagattaggtacagatgtgacagttttagagtacttagaagaaattacccctggactcgataaagaaacagcaaaaatgtttagaagaattttaagtaagcaagggataaaatttatcttaggagcaggtgttcaagctacaaaaaagttaggagatcgtcttattgtcgaatattcattaagaaatgataaaaaaagagaagaacttgatacagatatcattttggttgcaacaggaagaaaaccttttactgatggacttaatcttaaaaaagtaggaattgaattaaatcaatttggtcaaattttgactgatgaaaatttaaagacgaatatcgatggaatatacgcaataggtgatgttacaagtggaccaatgctagctcataaagcagaagatgaaggaatagcgcttgcagaaatgcttgctggtcaatcggggcatgtaaattatgatattattccttcagttatatatacatctcctgaggtagcaagcgtaggtaaaacagaagaacaactaaaaaaagaaaataagagttataacgttggaaaattttcatttatgggaaatggacgtgcaaaagcttgtctttcagcagacggttatgcaaaaattttatcggacaaaactacagatagaattttaggaggtcatataataggtccatctgctggggatttaatacatgagatttgtgtagcaatggaatttggggcaagtgctgaagacttggctagaacttgtcatgcacaccctactttttccgaagcagtaagagaagcagctttggcttgtggcgacggagctatacattcataa

SEQ ID NO: 223358 - DNA, 1414 bp, Unknown
  Bacterial polypeptide expressing nucleotide sequence isolated from the Sargasso Sea
gatgagcaacgaaatcaaaacgcaagttgtggtgttaggcgccggccctggtggatattctgcagcatttcgcgcagctgacttaggtctggaagtgactttagttgaagcacgcaacacacttggtggtgtttgtttaaatgttggctgtatcccatctaaagctttattacatgtcgccaaagtgatcgatgatgcgaaagaaatggcatcacacggtgttacttttggtgcaccacaaatcgatttagataaaatccgtgcctggaaagacaaagtagttgctcagctgaccaacggcttagctggcatgtcgaagatgcgtaaagtcaaagtcgtgactggttacggcaaattcactggcccaaatacgctggtggtgggtgatactactattacttttgaaagcgctattatcgctgctggttctgagccagtggctctgccattcattccaaaagatgacccacgtgtgatcgactctaccggcgctttggaattaaaagacattccaggcgaaatgctggtgttaggtggcggcatcattggtttagagatgggtactgtgtaccgtgctttaggctctaaagtctctgtggttgaatttgctgaccagttggttcctgctgcggacgctgatttggtcaaggtgtacaccaagtacaacaaagacaacttcaacattatgctgtcgactaaagtgacagctgttgaagctaaagctgatggcttgtatgtgaccttcgaaggcaaaaatgcaccagcaacacctgtacgttacgacaaaattttagtggcagtaggccgtcgtccaaacggttctctgttagatgctgccaaagctggtgtgaacgtggatgagcgtggttttatcaatgtagataaacaactacgtactaacgtgccacacatctacgccatcggtgatgtaattggccagccaatgttagcgcacaaagctgtacacgaaggtcatgtggctgctgaagtgatttctggtctgaagcacttcttcgacccacgttgcattccttctgtggcttacacagatccggaaatggcatgggttggtatcactgaaaaagaagctaaagaaaaaggcgttgctgttgaaactgcaactttcccttgggcagcttctggccgtgctatcgcttcagcccgcactgaaggcttcactaagttaattttcgacaaagaaacacaccgcattttaggtggcgctattgttggtattaacgctggtgaaatgttaggtgaaatctgcttagcagtagaaatgggtgcagatgctgaagacatcgctctgaccatccatgctcacccaaccttaaacgagtctattggtttagctgctgagatgtacgaaggttctatcactgacctgccaaatccaaaagcgaagaaaaaataa

SEQ ID NO: 223359 - DNA, 1420 bp, Unknown
  Bacterial polypeptide expressing nucleotide sequence isolated from the Sargasso Sea
atgtttgacgtagttgtaataggaagtggtccagctggatatgttgctgcaattagagcatcccaacttggcctaaagaccttatgtatcgaggaagctctcgacaagaaaggaaaaccaacatttggtggaacttgtttgaatgttggatgtattccatcgaaagcattgttagattcatcacatagatatcatgaagctaaaaaaaatcttggttcacatggtgtcaaaattgaaggcattaaattagatcttcaatcaatgatgaaaagaaaaaatgatatcgtttcaaaattgaccggcggaattgatggtctttttgcatctaacaaagttgagactatttctggaaaaggaatgatagtttcatctaataaaattagagttgaaaaaattgatggatcgtatgaggaaattgatactaagaatattattattgccactggctcaactccaatagaaataccatcagcaagttttagtgaaaatattgtaaatagtactggggcactttcatttgaaactgtgcctaagacattaggaattgttggtgctggaataattgggttagagctgggaagtgtttggtcacgacttggttcagatgtaacagttttagaagcaatgaatgattttttaccaatgacggatccagatatctcaaaagatgctttcaaggagttcaacaatcaaggtctcaatattcaattaggagcaaaggttacaggcacgaaagatttaaagaattctgttaaagttaaatacgatcttaaagataaagaagttgaagtagattttgaaaaattaattgttgcagttggaagaaaaccaaattcatcagaagtatttttaaatgatttagatattaaaataaataatggatttattgaagtaaatgaattttgtcagacatcaatcgataatatttgggcggttggagatgttgttagaggaccaatgcttgctcataaagggagcgaggagggtattatggtggcagaaagaatagcaaataaatttatgcaggtaaattatgacttagtaccgtctgttatctactcacatccagaaatagcttgggttggtaaaaatgaaaatgaacttaaatctgaaggtgtaaattataaagttggtaaatttccatttgctgcaagtggaagagctttggctgtagatcaatctgttggatttgtaaaagttttatctgaagagagaacagacactattcttggtgttcatgttattggacctgctgctgccgaaatagtacaacaggctttaatatctatggaatttggatctagtgccgaagatattgctcttacaatgtttagtcatccaacagtatcggaagcatttcatgaggctgctcttgctgcaaataaccaggcaattcatatcggaaataaaagaagatgaa

SEQ ID NO: 223360 - DNA, 1405 bp, Unknown
  Bacterial polypeptide expressing nucleotide sequence isolated from the Sargasso Sea
tatgacagatagttatgatattgcagttattggctcaggaccaggtggttatgtttgtgctataagggctgcacaacttggtttaagtgtaatatgtattgataaaagaggaagccacggaggaacctgcttaaatgttggttgcattccatctaaagctttacttcatgcatctgagttatttatagaaaagagtaaattttcctctatggggattgaagctgataatatttctttaaacttaagttcaatgatgacttataaggaagaaggtgttcaaggaaatgttaaaggaatagattttctctttaaaaaaaataagattgaaaatatttatggcgaggcgcagattatcgaaaataataaaatttcaatcaatttgaatgatggcgataataaagagattgaagctaaaaatattgttattgctactggatcaattccaacatcaatacctggtgtagaaattactggtaataaaattatttcatctactgaagcgctttcattaagtgaagtacctaataggctagttgttgttggaggtgggtatatcggtcttgaattaggctctgtttggtcaagattagggtctgaagttacagttatagaatatttagatagaattactcctggaatggataatgaagtttcagcagctttacaaaaaatattagcaaagcaaggattaagtttttctttaaattcacaagtagtatctgtgactgaaactggttcaaatgtctctattgcagtaaaaaatagagaaaataatgaggaagaaaatattgaggctgattatgttttggtttctaccggtaggaagccatatatagaaaatttatttagtgatggaattgatattgaaaaaactgaaaatggatttatcaaaactgactctcatttaagaacaaatttggacggtatttgggccattggtgatgttgtcgaaggaccgatgcttgctcataaagccgaagaggaaggaattgctgtagctgagcttatcgcaggtaagccaggtcatgttaattatgatataattccaagcgtgatttatacaaatccagaggttgcatcagttggtatgacagaggaacagctcaaagagaaatcgatcgactattctattggaaaatttccttttatggccaatggaagagcaaaagttaataatacaaccgaaggatttgttaaaattttatcatcgacagacacggatcaaattttaggtgttcacataattggtgaccaagcaggtaatatgattggtgaggctgcagtagctatggaatttgaggctacatcagaggaccttgccagaatatgtcatgcccatcctactctttcagaagccataaaagaggccgcattatctgtagatggtagagcattgcatatgtaa

SEQ ID NO: 223361 - DNA, 985 bp, Unknown
  Bacterial polypeptide expressing nucleotide sequence isolated from the Sargasso Sea
tttgtccgataaatatgatctcgtcgttatcggtgcggggccgggaggatacgtggcggctataagggcagcccagctaggtttacatgtggcctgtatcgataaaagagacactttaggtggaacgtgcctcaatgtagggtgtatcccatcgaaagcattattatccgcctctggaaaatacgtagaggcgtcgaagaaatttgctgatataggaatcgaagtatcaggacttcaagtaaatttgacgcaaatgctgtcaaaaaaagattcggttgtttctgaactcacgaaaggtatcgaattcctatttaaaaagaacaaagtggaatggttatctggagaggccttcataagatctaatacagaagtggaggttacgtttaatagcggaaaaaaaactcgaatagtggcagataaaataatgattgcggtgggatcagaacctgtctgtctgcccaacttagcctttgacgagaagcaaatagtctcatctactggcgcgctttcgctcgaaagggtgccagaacggcttgtagtggttggtgcggggtatattggtcttgagatgggatcggtgtggtcgcggctcggctcgtctgttacagttgtagaatttttagacaacatcgttccaaatgttgacttagaagttgcaaaacatttttacagaaatcttcaaaagcaaggccttaactttatgcttggaacaaaagttatccaagccgacctaaatgacaaaggcgttgcccttcttgctgagtccgtcaacggagggagacaacaaaaaatagactgcgacgtcttattagtagctgttggaagaaaaccttcgacagataatctcggtttggacgagcttggtgtaaagcgagataaaaacggctttctttgtgtcaatgacaagctcgaaacctccgtcgcgaatatcctagccattggcgactgtattcctggtcccatgctggcgcataaggcggaggag

SEQ ID NO: 223362 - DNA, 1426 bp, Unknown
  Bacterial polypeptide expressing nucleotide sequence isolated from the Sargasso Sea
gatgtctgatcactatgatgtagctgtcataggttctggcccgggagggtattcagctgctataagaagtggccaacttggtaaatcagtaatttgtattgaaaagtgtggtgaagatcagactcccattttaggtggaacttgtcttaatgtcggttgtattccttcaaaggcacttctggatagttcctatgaataccataaagctattaatcaatcgtctgaccatggaataaaaattaatgatatttctctagatcttaatcagatgctaaccagaaaagaaaaagtagtagatgatctaaccaaaggagtatctggtttattcaagctaaataaagttaagagccttaagggctttgcaaaaattaaaaaagatctatccattgaagttacagataaagaaggatctttaaatttaattaccgctgataatattgttttagcaacaggatccaaacctgcagagttagatttctcacccacagatcaaaagtacatcattacctcgaaagaagccctaaatcttaaacaaattcctagtcagatcatcataataggttcgggagcgattggacttgaaataggaagcatctggtcaagattaggctccaaagtaattcttctggaggaattggaacaacttttacctcaagctgatacgcaagtatcaacttcagccatgaagatttttaagaatcaaggcttagatattaggttaggtacaaaaattgaatccgcggaaaaaaaagaagagaaagtcctaattagatttggagaggagagcttagaggctgataaattaattgtagcagcaggtagagtttcttattttgaggatttattagatgaaggtattgatttggagttagattcaaatggttcaattaatgttaatcaattttgcgaaactaatttaaaaggcttatatgccataggcgatgtcgtgagaggcccaaaactagctcacaaagcgtcagaggagggcatcatggtagctgaaaatatagctggtcttaatagtagtttagattatgaacttatcccttttgtaatctatactcatccagaaatagcttgggtagggaagaacgaagatcaggctaaaaaaatgggaatagattacgaatcagctagcttccccttctctttaaatggaagaagcttagctaataaggaagaatcaggatttgtaaaaatgatagttgataaaaaaaatgatgcaattttaggggttcacataatagggtctaatgcatcagaacttatacaacaggctataattgcaattaaaacggaattgtcagctgaaaaattaggatcattgatctttagtcacccgactcagtcagaagcaattaaggagacagcttcacttataaatagtaaagccattcatataagtaataggaaacgaaagaaatga

SEQ ID NO: 223363 - DNA, 1405 bp, Unknown
  Bacterial polypeptide expressing nucleotide sequence isolated from the Sargasso Sea
atgtcagaaaataagtttgatgttgttgttatcggctcagggcctggaggatacgtatgtgcgataagattagcacaattaggattcaagacagcaataatagaaaaatataaatcacttggtggtacgtgcctaaatgtcggttgtattccatcaaaatcacttttagattcatctcatcattatgaagatattataaaacatgcagaaaatcatggtatagaaatttcaggaaaaattaacctcaactttaaaaagatgattgaaaggaaagacggggtagttcagcaaaccgttaaaggggttgattatttaatgaataaaaacaaaatcactgtatttgaaggtaaagcatcttttgttaatagtaatacattaaaaattgcagaaaagaaagtcaatgtaatgttcgataaatgtattattgcaacaggatctaagccaatatctttaccatttataaatattgacaaaaaaagagttatcacttcaacagaagcactttctttgaatgaaattccaaaacacttagttattattggcgggggtgtgattggtttagagcttggacaggtttataaaagattaggttctgaggttagtgtaatagaatattctgataaaatcacaccttttatggatagtgatatttctaaggaactactaaaaattttaaagaaacaaaaaataaatttttacttatctcacgaggtttttgaagttgaaaataaaaaaaacataatctctgttaaagcaaaaaataaaaatgatgaaataaaaacttttgaatgtgactattgtttagtttcggtaggtagaaaagcatatacagaaggtttaggtttggataatgttggaattgagatagattctgctggaaaaattgtgactgattcaaaatttaagacaaatgccgaaaacatatatgctattggagatgttattaatggtccaatgttagctcacaaagcagaggaagaaggtatagcagtagctgaaattttaaaaggcgaaaagcctcatattgattataacttagtgcctaatgttatttatacatggcctgaagtttcctctgttggtagaacagagcaacagctaatcgatgataatgtagactataaagttggaaaatttccaatgagagccttaggaaggtcaagagctagttcagatctcgatggttttgttaagattattgcagataaaaaatctgatgagattcttggtatacacattatcggagcaagagcagctgatttaatcgttgaaggcgttactgctatggaatttagagcctcttgcgaagatatttcaattatgagtcatccacatccaacctactcagaagcaatgaaggaagctgctttagctgcattagataataggccattacatatttaga

SEQ ID NO: 223364 - DNA, 1402 bp, Unknown
  Bacterial polypeptide expressing nucleotide sequence isolated from the Sargasso Sea
atgtctgagaaatttcaagctgttgtgatcggtggtggaccgggtggttatgtttgtgcaataagacttgcccaactaggattcaaaactgcatgtgttgagtcaagaggtacgttgggaggtacatgcctaaatgtaggatgtattccttctaaaagtcttttaaacctatctgaaaatttccataaagctaaatcatttgatcaattaggtatagaggttggtcaaataaagttaaatttagaaaaaatgatgaaaaataaagataaggcagttgatgttttgacaaaaggagtagagtttttattcaaaaaaaataaagtctcatattttaaaggaacaggtagtcttactaaaaataatcaagttaaaataatagatttaaataataaagaaatattattagatactgataaaattataatttccactggatcagaagcatcggaattaccaggtgcaaaatttgatgaaaaaattatagtttcttctactggagcattatctttaaaaagtgttccaaaaaaaatgcttattgtgggtggaggttatattggattagagatgggttcggtttggtcaagacttggttcagaggttcacgttgttgaatttttagatcatattacaccaggaatggataaagaaatttcaaaggaatttatgaaaattttaaagaaacaaggaataaatttccatatggagactaaagttgagaatattaaaaaaaatagtgactctgctaccgttacaattcaaggcaaagatggaaaaaaaactcaaatggaaacagatgtagttttggtttctgtaggtagaaaaccaaatacaaaaaatttaaatttagataatgtcggagtaaaattagatagcaaaatgagagttcaggtaaataaaaactttgagacaagtattaaaaatatttatgctattggcgatgttattgatggaccaatgcttgcacataaggcggaagaagaaggtattgcagttgctgagctaattgcaggacaagctgggcatgtaaattatgatgttataccaggagtaatttatacaacaccagaggtagcaacagtaggagaaacagaggaaaagctaaatgaaaagaaaattaaatataaagttggcaaattttcttttatggcaaactctagagcaaaagcgattaacgaggccgagggatttgtaaaaatacttgcagatgaaaaaactgataaggtgctcggagtacatttaataggtccacatgcaggagaattaattgcggagatggcagttgcaatggaattcggcgcaagttctgaagatattgctagaacttgtcatgcgcaccctactttttcagaagctgtaaaagaggcagccttatctgtggataaaagagcaatacactcttaaa

SEQ ID NO: 223365 - DNA, 1420 bp, Unknown
  Bacterial polypeptide expressing nucleotide sequence isolated from the Sargasso Sea
tatgtatgatgttgttgtaattggaggcggtcctgctggttatgttgcagcgattaaagcatcccaattaggtctaaatacagcttgtgtagaatttgcctctgatgaaaaaggaaatcaaaaatatggaggcacttgccttaatgtaggttgtattccatcaaaatctcttctggattcatctcacaaatattacgaagctcaaaatgattttgcatctcatggaatagatctaaaagatttatcagtcaatattccttcaatgatgaaaagaaaggatgaagttgttaataaacttacaactggaataactggattgtttaaagcaaatggtgttgaagcaatatcaggaagagggaaagttattaatgagaaccttgtagaagtttcaaataatggagatataacaagcttggagacaaaattcataatattggcaacaggctcaaatccaattgaaattccaattgcaaaatggtctgaaaatatagtcgatagtacaggagctcttaattttgatagggttccagaaagacttggaataattggagctggagtaattggtttagagcttggtagtgtatggtcaagacttggagctgaggttacagtcatagaggcgatggatgatttcttacctattgtcgacaaacaaatttctaaagaatgccatcgagagtttaagaaacaaggtttagatatacatttaggatcaaaacttacctcagctaaagataatggtaaagatgttgaaatttcttatgaatcaaaaggtgaggagcttaaagcctcttttgataagctgattgtggcggtagggagaaaacctaatacagctgatatctcagatgagtcatttccaatagagttagatgaattaggaagagtccaagttgacgatttttgtaaaacaaattatgaaaatatttatgctgttggtgatattgttagaggaccaatgcttgctcacaaaggttcagaggaaggagtaatggttgctgagagaattgcaggcaaaaaggctagaatgaattatgatcttgtacctaacgttatttatactcatcctgaagttgcttgggttggaaagactcagcaagagctcgaagatcatggtgtggagtttaagattggaagttttccatttgctgcaagtggaagagctttagctgcagctgattcagtcggttctgttaaggttttagctgataagaaagatgacacaatattaggagttcatgtatttggtccttctgctgcagatattgtccaacaagcagttatagcaatggagtttggatctagtgctgaagatataggcctaactgtgtttagccatccaacagttagtgaggcatttcatgaagctgcattagctgcaaataattctgcaattcatataggcaataaaagaaaatga

SEQ ID NO: 223366 - DNA, 1432 bp, Unknown
  Bacterial polypeptide expressing nucleotide sequence isolated from the Sargasso Sea
atgtccaaggaatttgacgtcgtcgtgatcggcgccggcccaggcggttacatcgccgcgatccgcgctgcgcagctcggcaagacggttgcgtgtatcgagaagtggaagaatccggccggcgcgctgaagctcggcggcacgtgcctgaacgtcggctgcatcccgtcgaaggcgctgctcgcgtcgtcggaagagttcgagaacacgtcgcaccatctggccgaccacggcatcacggtcgacggcgtgaagatcgatgtcgcgaagatgctcggccgcaaggacgcgatcgtcgagaagatgacgagcgggatcgagttcctgttcaagaagaacaagatcacctggctgaagggccatggcaagttcaccggcaagaccgacgccggcgtgcagatcgaagtgagcggcgagggtgaaaccgaagtcgtcaccgcgaagaacgtgatcatcgcgacgggctcgaaggcgcgtcacctgccgggcattccggtcgacaacaagatcgtgtcggacaacgaaggtgcgctgacgttcgactcggtgccgaagaagctcgccgtgatcggcgcaggcgtgatcggtctcgagctcggctcggtgtggcgtcgcctcggcgccgaagtgacggtgctcgaagcgctgccggccttcctcggcgcagctgacgaagcgctcgcgaaggaagcagccaagctgttcaagaagcagggcctcgacatccatctcggcgtgaagatcggcgaagtgaagacgaccgcgaacggcgtgtcgatcgcctacacggacaaggacggcaacgcgcagacgctcgacgccgaccgcctgatcgtgtcggtcggccgcgtgccgaacaccgacaacctcggcctcgaggcaatcggcctgaaggcgaacgagcgcggcttcatcgacgtggacgaccactgccgcacggcggtgccgaatgtgtacgcgatcggcgacgtggtgcgtggcccgatgctcgcgcacaaggcggaagacgaaggcgtgctggtcgcggaagtgatcgacggccagaagccgcacatcgactacaactgcattccgtgggtgatctacacgtacccggaaatcgcatgggtcggcaagacggagcagcagctgaaggcggaaggccgcgagatcaagtcgggcaagttcccgttctcgatcaacggccgcgcgctcggcatgaacgctccggacggcttcgtgaagatgatcgcggacgcgaagaccgacgaactgctcggcgtgcacgtgatcgctgcgaacgcgtcggacctgatcgcggaagccgtggtggcgatggaattcaaggcggcgtcggaagacatcgctcgcatctgccatccgcacccgtcgatgtcggaagtgatgcgcgaagcggcgctcgccgtcgacaagcgctcgctgaacagctgag

SEQ ID NO: 223367 - DNA, 1408 bp, Unknown
  Bacterial polypeptide expressing nucleotide sequence isolated from the Sargasso Sea
atgtacgacattttaataattggaagcggaccggcaggatatgtcgctgcaataagagctgcgcaactcggactgaaagtagggtgtgttgagcaatcatctattggtggaacttgcttaaatattggctgtattccatcaaaatcgttactagattcttcatataagcattatcaattggaagaccagtattcaaaacatggtatagaaataaaggatgtaagtattgacttgaaaaagatgatgtccaggaaagatgaagtcgtgaagcagctgactaatggagtgagtgcgttatttaagtctaataatattgatctgatcgaaggcaaagcaaaagttacatctcatacatcagttgaagtatctaaagttagtgaaagtcatatttatgaaaccaagaatataattattgctactggttctagccctacagaattaaataatatcaacttcacaagcaacatcgtcgatagtgagggagctttgaagtttgaaagaatacccaaacaattaatagttgttggagcaggaataatcgggctggaattaggaagtgtttgggcaagattagggtccgaagtaacaattttggaagctcaacaagagttcttgccaatgttggatgcaaggatgtctagacaaattcttagagaattaaatagacaagggttagatataagatttgggtctaacattttagatatttcagacacaacgaatggtgtggaagtcaagttccaagaaaatggagaagatattgatctgaaggctgaaaaaatgattgtagcaatcggaagaaagcccaatactcaagatttattcaataatgatttagtttccatagatgataaaggctttatcgaagtcgatgaacattgccagactaagactaagaacatatgggcaattggagatgctgtgagaggaccaatgctagctcataaagcttcggaagaaggaattatggttgcggagagaatatctggtgaagattccctaatcaattatgcacacattcccaatgttatttatactcatccagaagtggcttgggttggtaaaagtgaaaaagagcttaagaaacttaaggtagattacaaatctggatctttcccttttgctgctagcggaagagcactcgcatctggagattcaataggttctgttaccatccatgctgataatcaaacagatcaaatactagggattcaagtctttggaccttccgcaactgagatcatgcaacaaggcttgatagcaatggataataaagttacatcggaaaaatttagtacaactatattcagtcatcccaccgtttcagaggcgcttcatgaagcgacactagcgatgaatcaaaaggctgttcatattcaaaatagaaagaagaaaataagcatctagg

SEQ ID NO: 223368 - DNA, 1399 bp, Unknown
  Bacterial polypeptide expressing nucleotide sequence isolated from the Sargasso Sea
atggaagattttgatttaatagtaattggtgcgggacctggcggatatgtagctgcaatcagagcagctcaacttggaatgaaggttgcttgtatagaaaaagagccatcacttggtggaacttgtttgaacattggatgcataccttctaaagcattattaaattcatctgaaaaatttgttgaaatttcaaatcatgctgcagagcatggcataaaaacatcaaagatagatttagacctaagtattttgatggatcgcaaaactaagattgtaaaaaaacttacaacagggatcggttttttatttaagaaaaataaaataacgcatattcctggcatggcttcatttgtagataaaaatactatttctattacaaatggaaaaaatgaaattactgccagtgctaaaaatttcattatcgcaacaggatcatcttcgattgagataccaaatattcctgttgatgaaaaacaaatagtatcttcaacaggtgctctttctctatctaaaataccaaaatcactcctagttatcggtggtggatatattggactagagatgggttcagtatggagtagattaggttcaaaggtaactgttgtcgaagctcttgacagaattgttccaactatggatggtgaaattgctaaagagtttatgaaaatgttaactaaacaaggattagaatttaaattatcgcataaagtgagttctgcaaaatctggtaaatctggtgtagatgttgaaatggaaacatcagataaaaagaaaataaaagaaaactacgaaatagttttaatgtctgtaggaagaaaaccaaacacagagggactgggtctcgaaaaaattggtgttaaattaactgaaaaaaaatccattgaaattaaagataactttcaaacttctgttgaaggaatctacgcaattggcgatgtagctccaggaccaatgctagcacacaaagctgaagaagaaggagttgcttgtgttgaatttataaacggtcaaaaacctcatataaactacgacgctataccagctattgtttataccaatccagagatagcatctgtaggtaaaacagaagaacaactccagcaagaaaagaaagacttcaaggttggaaaatttccttttatggcaaatggccgtgccttaactacctcagcatcagaaggatttgttaaaattctggttgataaacaaacagatgaaattttaggtgctcatataatcggtcatgatgctggacaactgatcgctgaaattgttacgacaatagaatttggtggtactgcagaagatattgctagagtatgtcatgctcatccgacaactagtgaagcagtaaaagaagcggctttaagtgtagatggtagagcaattcatatttaaa

SEQ ID NO: 223369 - DNA, 1429 bp, Unknown
  Bacterial polypeptide expressing nucleotide sequence isolated from the Sargasso Sea
atgagtaacgaaatcaaaactcaggtagtggtattaggtgcaggtcctgctggatattctgctgccttccgtgcggctgacttaggtctggaaaccgttatcgttgaacgttttagcactttaggtggcgtgtgtctgaacgtgggttgtatcccatctaaagccctgttacacgttgctaaagttatcgaagaagccaaagccgttgctgcacacggtgttgtgttcggcgagccaacaatcgatttagacaagttacgcagcttcaagcaaaaagtgatcagccagttgactggtggcttaggcggcatgtctaaaatgcgtaaagtaaacgttgttaatggcttcggtaaatttactggccctaacagcttagaagtgactgctgaagacggtactgtgaccgttgttaagtttgaccaagcgatcatcgctgcgggttctcgcccaatcaaactgccattcattccccatgaagacccacgtatttgggattcgaccgacgcattagaactgaaagaagtgcctggcaaactgctggttatgggcggcggtatcatcggtttagaaatgggtacggtttactcttctctgggcagtgaaatcgacgtggttgaaatgttcgaccaagtgatccctgcggctgacaaagacgttgttcgcgtattcactaagcaaatcaagaagaaattcaacctgatcctcgaaaccaaagtcaccgctgttgaagcccgtgaagacggtatctacgtttcgatggaaggtaagagcgcaccaactgagccagtacgttacgatgcagtgttagtggctatcggtcgtacgccaaatggcaagctgatcgacgctgaaaaagcaggcgttaagatcgacgagcgtggtttcatcaacgtagacaagcaattacgtacaaacgtaccgcacatctacgctatcggtgacatcgttggtcaaccaatgttggctcacaaaggcgtgcacgaaggccacgtagcggccgaagtgatcgctggcatgaagcactacttcgatccaaaagtcatcccatcaatcgcctacacagaccctgaagtggcctgggttggtctgactgagaaagaagcgaaagagcaaggtattgcttacgaaacagcgactttcccatgggctgccagcggccgtgcaatcgcttcagattgcagcgaaggtatgactaagctgattttcgataaagacactcaccgcgtaatcggtggtgctatcgtaggtgtgaacggtggcgaactgttgggcgaaatcggcctagccatcgaaatgggttgtgatgctgaagatttagcattaaccattcacgctcacccaacgctgcacgagtcagtaggtcttgcggctgaaatctacgaaggttctattactgacctgccaaacccaaaggcaaagaaaaagtaat

SEQ ID NO: 223370 - DNA, 1378 bp, Unknown
  Bacterial polypeptide expressing nucleotide sequence isolated from the Sargasso Sea
gatggctgattttgatgtaattgttgttggagctggaccaggaggatatgttgcagcgattagagcagcgcaacttggaatgaaagtagcatgtgtagaaaaagaatccacgttgggcggtacttgtttgaacatcggatgtattccttcaaaagctttactgaattcatcagaaaaatttatggatatctcaaaacatgctgaagagcatggaatcaaggctacaaaaatagaacttgatttagcaaagctaatgcaacgtaaagataaaatcgtaaaacaacttacaggaggaattggttttctattcaaaaaaaataaaattgaacatattagtggctcagcatcttttattgatagtaaaacaattcttgttaaatctgcaaaagaagaaaaaaaactttcagctaaaaattttattatagccacaggatcttcttctattgaaatacctagtataccaattgatgaaaaacaaattgttacatcgactggtgctctttctctacaatcagttccaaaatctatgttggttattggaggaggatatattggtttagagatgggatctgtttggtcaagacttggaacaaaagtaacagtagtagaagcattagaccgtattgttccaactatggacggagagatcgcatctaattttatgaaggccttacaaaaacaaggtatagaatttaaattatctcataaagttaataatgcaaaaataaataaagataatgttgaagtatctatagaatcatctgaaaaaaaagaacttaaagaaaaatatgaaattgttcttatgtcagttggaagaaaaccaaactcggaaggattaaatttagaaaaaatcggtgttaacttagatgaaaaaaaagcaataaaaattaatcaagaatttaaaacaagtgttgatggcatttatgcaataggagatgttgcacctggaccaatgctagcgcataaagcagaagaagaaggtgttgcatgtatagaattaattcatggtcaaaaaacacatatgaactatgatattattccagctatagtttatacaaatcctgaagttgcttccgttggcaaaacagaagaacaacttaaagaacttaaaattgaatacaagattggaaagtttccttttatggcaaatggcagagccctcactacatccactaccgaaggttttgttaaaattttagctgataaaaaaacagactcaattttaggtgcgcatattataggtcatgatgcaggtcagctaattgctgaaattgtcactacaatggaatttggcggtagcgccgaagatattgctcatatttgtcatgctcatccaacaacaagtgaagcagttaaagaggcagcaatgaatgtagat

SEQ ID NO: 223371 - DNA, 1399 bp, Unknown
  Bacterial polypeptide expressing nucleotide sequence isolated from the Sargasso Sea
aatggaagattttgatttaatagtaattggtgcgggacctggtggatatgtagctgcaatcagagcagctcaacttggaatgaaggttgcttgtatagaaaaagagccatcacttggtggaacttgtttgaatattggatgcataccttctaaagcattattaaattcatctgaaaaatttgttgaaatttcaaatcatgctgcagagcatggcataaaaacatcaaagatagatttagatttaaatgttttgatggatcgaaaaacaaagattgtaaaaaagctcacaacggggattggttttttatttaataaaaataaaataactcatattcctggcatggcttcatttgtagataaaaataatatttctattacaaatggaaaaaatgaaataactgctagtgctaaaaattttattatcgcaacaggatcatcttcgattgagattccaaatattcctgtcgatgaaaaacaaatagtatcttcaacaggtgctctttctctatctaaaataccaaaatcactcctagttattggtggtgggtatatcggattagagatggggtcagtatggagtagattaggttcaaaggtaacagttgttgaagctcttgacagaattgttccaactatggatggtgaaattgctagagagtttatgaaaatgttaactaaacaaggattagaatttaaattatctcataaagtgagttctgcaaaatctagtaagtctggtgtagatgttgaaatggaaaaatcagataaaaagaaaataaaagaaaactacgaaatagttttaatgtcagtaggaagaaaaccaaacacagaggggctgggtctcgaaaaaattggtattaaattaacagaaaaaaaatccattgaaattaaagataactttcaaacatctgttgaaggaatctacgcaattggtgatgtagcaccgggaccaatgctagcacacaaagctgaagaagaaggagttgcttgtgttgaatttataaatggtcaaaaacctcatattaactatgacgctataccagccattgtttataccaatccagagattgcatctgtaggtaaaacagaagaacaactcaagcaagaaaagaaagatttcaaggttggaaaatttccttttatggcaaatggtcgtgccttaaccacttctgcgtcagagggatttgttaaaattttggttgataaaaaaacagatgaaattttaggtgctcatataatcggtcacgatgctggacaactgattgcagaaattgttactacaatcgaatttggtggaagtgcagaagatattgctagagtatgtcacgctcatccaacaactagcgaagcggtaaaagaagcagctctaagtgttgatgggagagctattcacatataa

SEQ ID NO: 223372 - DNA, 1402 bp, Unknown
  Bacterial polypeptide expressing nucleotide sequence isolated from the Sargasso Sea
tatgtacgatattttaataattggaagcggaccggcaggatatgtcgctgcaataagagctgcgcaactcggactgaaagtagggtgtgttgagcaatcatctattggtggaacttgcttaaatattggctgtattccatcaaaatcgttactagattcttcatataagcattatcaattggaagatcagtattcaaaacatggtatagaaataaaggatgtaagtattgatttgaaaaagatgatgtctaggaaagatgaagtagtaggacagcttactaatggagtaagtgcattatttaagtcaaataagattgatctgattgaaggtaaagcaaaaatcatttctgatatatcaattgaagtatttaaagacggtgaaagtcatatttatgaaaccaagaatatcattattgctagtggttctagccctgcagaattaaataatatcaacttctcaagtaacatcgtcgatagtgagggcgctttgaagttcgaaaaaataccaaaacaattagtagttattggagcaggcataatcgggctggaattaggaagtgtttgggcaagattaggttccaaagtaacaattttggaagctcaacaagagttcttaccaatgttggatgcaaggatgtctagacaaattcttagagaatttaatagacaagggttagatataagatttgggtctaacattttagatatttcagatacaacgagtggtgtggaagttaggttccaagaaaatggagaagatattaatctgaaggctgaaaaaatgattatagcaattggaagaaagcctaatactcaagatttattcaatactgatttagtttccatagatgataaaggcttcatcgaagtcgatgaatattgccagactaagactaagagcatatgggcaattggagatgccgtgagaggaccaatgctagctcataaagcttcagaagaaggaattatggtttcggaaagaataactggtgagaattgtcttataaattacgcacatattcctaatgtaatatatacccatccagaggttgcttgggtaggtaaaaatgaaaaagaacttaagagtctagaggtagactacaaatctggatctttcccttttgcagctagtggaagagctttagcatctggtgagtcaactgggtctgttaccatccatgctgataatgaaacagatcaaatattaggcattcaggtttttggaccttcagcatccgatattatgcaccaaggcttgattgcaatggataatgaaataacatcagaaaaattcagttcaactatatttagtcaccccactgtctcagaggctcttcacgaggcgacacttgcgatgaatcaaaaggctattcatattcaaaatagaaaaaagaaaaagtaa

SEQ ID NO: 223373 - DNA, 487 bp, Unknown
  Bacterial polypeptide expressing nucleotide sequence isolated from the Sargasso Sea
atgtctgataaaaaatttgatcttgttgtaattggcgcaggccctggaggttatgttgctgctattgtcgctgctcaaaaaggtatgagagttgcctgtattgaaaaacgaaaaactctaggtggaacatgtttgaatgttggatgtattccctctaaagcattattacatgcttcagaacaatatgaaaattcaatcaaatccaatggtaatgaagaatggggtattagatacaaagaagtaagccttgacctgccaaaattacttaaaaagaaattgggcattgtggacgagctaacaaaaggaatagatttcctgtttaaaaaaaataaagttactaaatatattggtgctgcaaaaattttatcttctagcgaaattgaaattatgaatagtgaaaaaaccgaagtaattaatgcagataaaattattattgccacaggatctgaatctacaaatcttccaaatataaatgtagatgagaaaa

SEQ ID NO: 223374 - DNA, 1768 bp, Unknown
  Bacterial polypeptide expressing nucleotide sequence isolated from the Sargasso Sea
aatgagtctcatcgaagtcaaggttccggatatcggcgatttcagcggcgtcgatgtcatcgaagtcaacgtcaaacccggcgacgtgatcgaaaaagagcaaacgctcatcacgctcgaatccgataaagcctccatggaagtgcccagcgacgtcgccggcaccgtcaaggaaatcaaggtcaaagccggcgagaaagtctcgcaaggcaccgtcatcgccatcgtcgaagcatcggctggcgccgccgctcccgcgaaagcacccgaagcagccaagcccgcagcagctgcaccggcgccggccgcagccgctccggcgcccgcgccgcaagccggcagctacgccggtgcagccgacatcgagtgcgacatgctcgtgctcggcgccggccccggcggctactcggccgcgttccgcgccgccgacctcggcatgaagacggtgctcgtcgaacgctactcgacgctcggcggcgtgtgcctgaacgtgggctgcatcccgtcgaaagcgctgctgcatacgtcgctcgtcgtcgaggaagccgcggcgctcgcgtcgcacggcatcacgttcggcaagccggaagtcgatctcgacaagctgcgcgacttcaagggcggcgtcgtcaagaaactgacgacgggcctcgccggcatggcgaaagcacgcaaggtcgaagtggtcacgggcgtcggcgcattcgtcgatccgtatcacatggaagtgcagggcgaaaacggcaagaaggtcgtgaagttcaagcaggcgatcatcgctgcgggctcgcaggccgtgaagctgccgttcatgccggaagacccgcgcgtcgtcgattcgaccggcgcactcgaactgcgccagctgcccaagcgcatgctcgtgatcggcggcggcatcatcggcctcgaaatggccacggtgtactcgacgctcggcgccgagatcgacgtcgtcgaaatgatggacggcctgatgatgggcgccgaccgcgatctcgtgaaggtctgggaaaagtacaacgcgaagcgcttcggcaacgtgatgctgaagaccaagacggtcggcgcggaagcgaaggaagacggcatctacgtgaagttcgagggcgagaaggccccggcggaagcgcagcgctacgacctcgtgctcgtcgcggtgggccgcagcccgaacggcaagaagatcggcgccgacaaggctggcgtcgccgtcacggatcgcggcttcatcgacgtcgacaagcagatgcgcacgaacgtcccgcacatcttcgcgatcggcgatatcgtcggccagccgatgctcgcgcacaaggccgtgcatgaaggccacgtcgcagcggaagccgcgcacggcgagaaggcgtacttcgacgcactgcagattccgtcggtggcatacaccgatccggaagtggcatgggccggcaagacggaagaccagtgcaaggccgaaggcatcaagtacggcaaggccgtgttcccgtgggccgcttcgggccgcgcgatcgcgaacggccgtgacgaaggcttcacgaagctgatcttcgacgaggaaacccatcgcgtgatcggtggtgccatcgtcggcctgaacgcgggcgacctgatcagtgaagtgtgcctcgccgtcgagatgggcgcggacgcggaagacatcggcaagacgatccatccgcacccgacgctcggcgaatcggttggcatggccgccgagctgtacgaaggcgtctgtaccgacctgccgccgcaacgcaagaagtga

SEQ ID NO: 223375 - DNA, 725 bp, Unknown
  Bacterial polypeptide expressing nucleotide sequence isolated from the Sargasso Sea
gagccggacatcgtctctcttatggtggaggagatgaccgccgcgggcgtcaacttccaaacgggctctgaggtcgcgtcgatcacgaaggaggccgacggcacgaagacgttgctcctcgcaaacaatgaggtgttgaaaggttatgacgaggtcctgtttgcgatcgggcgtaagcccgtgaccgactcgctcaacctcggcgcggcgggcgtggagacgaatgcgcgtggcgaggtcatcgtcgagcccaaccagaagacgaccgcggagggtacctacgccgtcggcgacatcatcaccggcgcggtccagctgacgcctgtggcgattgcggcgggtcggctgttatcggaccgtctattcgcgggcgttcccgaggagcagacgattatggactatgagaatgtgccgacggtcgtcttctctcaccccacgattggcgtgatgggcctcactgagaagcaggcggtcgagcggtacggcgccgacgcggtgacctgccacaaatcgacgtgggtcaatatgatgtactcgagggagttcctcgtgcccggccacgggccgatgccgccgaagacgcgcgcgaagattgtgtgcgttggagaggagcagacggtcgtcggcctgcacatgatcggcttggcggtcgacgagatcttgcagggtttcggcgtggcgatcaagatgggcgcgaccaaagcggactttgattcgatcgtggc

SEQ ID NO: 223376 - DNA, 550 bp, Unknown
  Bacterial polypeptide expressing nucleotide sequence isolated from the Sargasso Sea
atgggcgctgatctggatctggttgtacttggggctggctccggtgggctggccgctgcgaaacgcgcggcccgtcatggagcccgcgtcgccatcgtggagggcgatcgcgtcggcggcacctgcgtgatccgcggctgtgttcccaagaagcttttggtgtacggcgcccaggcccgccatcaactggcggatgcctcggcctatggccttgagatcggttcggtgcgttcggatgtgcctgatctcctgcatcgggtgcgcgccgaggtggatcggctcaatgccctccatctcggatttctggagaaggccggtgttcagttgatctccggttggggaagcttcacggcagcagatcgcatcggcatctccgatcaacgcggtgggcccgtgcgagaggaactctcggccccgcgctttctggtggcggttggtggccggccagcccggccggagattcctggggttgaacacacctgggtcagcgacgacattttcctgttggaggatgtcccctcagccgtggttgtggtgggcgccaggcttc

SEQ ID NO: 223377 - DNA, 253 bp, Unknown
  Bacterial polypeptide expressing nucleotide sequence isolated from the Sargasso Sea
ggtgaagtgtataaatcctctttcaccgccatgtataccgccgtgacctcacaccgccagccgtgccgcatgaagctggtctgcgtcggcccggaagagaagattgtcggtattcacggtatcggcttcgggatggacgagatgctgcagggcttcgcggtggcgctgaagatgggcgcaaccaagaaagacttcgacaataccgtggcgatccacccaaccgccgcggaagagtttgtgacgatgcggtaag

SEQ ID NO: 223378 - DNA, 412 bp, Unknown
  Bacterial polypeptide expressing nucleotide sequence isolated from the Sargasso Sea
gtctacgcgctcggtgacgtgtgcgggatccaggagctcacgcccgtggccatcgccgcggggcggcggctctcggaccggctgttcggcgggccggagtacgagaaggcgaagatccagtacgaggaggtgccgacggtggtcttctcccacccgccgatcggcacgatcggcatgaccgaggccgaggccgtggacaagttcggcgaggccgagatcaagacctacacctccaccttcgtcaacatgtactactcgccgtggcagatgccgccggcggacaagcccaagtcgtacgtcaagactggtgtgcgagggcgctgccgagcgggtggtggggctgcacgtcatcggcatggctgccgacgagatgatccaaggattcggcgtcggcatgcgcatgggcgcgacc

SEQ ID NO: 223379 - DNA, 664 bp, Unknown
  Bacterial polypeptide expressing nucleotide sequence isolated from the Sargasso Sea
atggccatcgattcaacacttgatctgcttgttcttggagctgggtctggtggtctggccgctgccaagcgggcggcccgccatggcgcgaaggtggccattgttgagggagaccgcgtcggcggcacctgtgtgatccggggatgtgtcccgaaaaaacttttggtgtatggcgcccaggcacggcatcagctgaaggatgcgccggcctacggcctgacgattggtgcggttgaaagcagcgttacggagttgtttcgccgggtgcgggccgaggtggatcggctcaatcacctgcatctcaactttctggaggaggcgggtgttgaacgcatcgacggctggggccggttcctctcggaccagaccatcggcatcgcggccgaacggggcggtccgattcgacgggagttgtccgctgcgcacgttctagtagccgtcggagggcggcctgtgcgccccgacatccccgggattgagcacacctggatcagcgatgacatgttcaacctggagacgttgccgaaggaggtggtggttgtgggagcgggcttcatcgcttgtgaattcgcctgcatcctccgtggcctcggggtggaggtcacccaggtggttcggggctcaggcctgctcaggggattgaccgggagctggcggacgccgt

SEQ ID NO: 223380 - DNA, 654 bp, Unknown
  Bacterial polypeptide expressing nucleotide sequence isolated from the Sargasso Sea
catgggcactgatttggatttgattgttcttggggcggggtccggtgggcttgctgccgcaaaacgcgctgccagccatggtgcccgcgtcgcgatcgtggagggagatcgtgtcggggggacctgcgttatccgcggctgtgttcccaagaagcttttggtctacggcgcccaggcccggcatcaactggcggatgcatcggcctatgggctgcacatccaatccgtgcgttctgatgtgcctgacctgttgcggcgcgtgcgcgccgaggtggatcgtctcaatgcgctccaccttggatttctagacaaggccggcgttcagctgatctccggttggggtcacttcacggctgtggatcgcataggcatctccgatcaacgcggtgggcccgttcagacggagctttcagcaccccgttttctggtggcagtgggtggccgtccggcacggccggagatcccagggattgaaaaaacttgggtgagtgatgacatgttccagcttgaagatgtccctccggcggtggtggtggtcggcgcaggattcatcgcctgtgagttcgcctgcatccttcgaggcctcggtgttgcggtcacccaggtggtgcgcggccctcggctgttgcgcgggtttgatggggagttggcgga

SEQ ID NO: 223381 - DNA, 430 bp, Unknown
  Bacterial polypeptide expressing nucleotide sequence isolated from the Sargasso Sea
atgcgtgctcacttcctaagaggtgggggttctggtggagtgcgagcctctcgaatggcggcgcaaagaggtgccaaagttggcttgtgcgagctgccgttcgatcctgtgagctctgattcgacaggcggacttggtggaacatgcgtaatacgtggttgtgtaccaaagaaactactgatgtatgggagttcgttcgcagcagatttctccgatgccgagggctttggttggacgcttccacaggaaccaaactttagttggcaaaaattattacaggcaaaaacacatgaaattacaagactgaacggcatttactcccgactgcttgaaaactcgggtgtgcaagtccacattggagctggcaaacttcttgacaaaaatacgatccaaataacttccccggaggtaagtgaaagcaataattaat

SEQ ID NO: 223382 - DNA, 970 bp, Unknown
  Bacterial polypeptide expressing nucleotide sequence isolated from the Sargasso Sea
tccggcggcgtccgtgcatcccggatttccgccggccatggcgcgcgcgtggcggtgatcgaggaaagccgccccggcggcacctgcgtcatccgcggctgtgttccgaagaaactgcttatgtacggctcggccttttccgccgatgcggccgatgccgccggctatggctggcaggtgagtgtcgatggtcatgactggccggcgctcatcgccgcgaagaataccgaactcgacaggctggaggggatttaccggtcgctgctgacgaatgccggtgtcgaactgatcgaggggcgcggcatcgtcactgggccgaacagcgtaagtgtcggcgactgcgaactgaccgctgaacggattttggtggcgacaggcggcttgccgcaaattccagacgtgcccggcctggccgaacatgccatcacttcgaacgaggcgctggaacttgcggaagggccggagagtgtcgtggtctatggcgccggttatattgctctagagttcgccagtatcttcaacgggttcggaattgacacccatcttgtctaccgggctgatctgccgcttcgcgggtttgatcaagacatccggtcacagagcgccgaggcgcttgccgggcgcggcatcatcctccatccgggctgcatggttgagcgtgttgaggacgagaacggccggaaggccgccaccctcagcgacggcactgttcttgtggtatccgagatcatggcggcgacgggccgggtgccgaatacggccgggctcggcctcgagactgcgggcgtcgacctaggccgaaaaggcgaggtcatagtggatgccggttcgcaaagttcggttccgtccatatacgccgtcggcgacgtgaccgaccgcatcgccctaacgcccgtggcgattgccgagggtcatgccctgaccgataccctttatggcacgcgcccgcggcaggtctcgcacgacaatg

SEQ ID NO: 223383 - DNA, 532 bp, Unknown
  Bacterial polypeptide expressing nucleotide sequence isolated from the Sargasso Sea
atgtacagctggatgctaaaaggttatgtgattaccgacgagcaacaaaataccaccgcaaaaggggtatactgtgtgggcgacattatggcaggcggtgttgaattaacccctgtagccgtaaaagccggtcgtttattgtctgaacgtttatttggcaatatgccaaatgccaaaatggactatagcttaattcctaccgtggtttttagtcacccagcgataggcactatggggttaactgagccggaagccgtcgagaaatatggtaaagacaacatcaaggtttacacctctacctttacctcgatgtacaccgctgttactagccatcgccaagcatgtaaaatgaagctggtgtgtgctggcgacaccgaagtggttgtgggtattcacggtatcggttttggtatggatgaaatactccaaggttttggcgttgcgatgaaaatgggcgcaaccaaagcagactttgactcggttgtggcaatccaccctacgggcgctgaagaattcgtaacaatgcgataaa

SEQ ID NO: 223384 - DNA, 553 bp, Unknown
  Bacterial polypeptide expressing nucleotide sequence isolated from the Sargasso Sea
gatggatgccgattttgatctgatcgttctgggagcgggttccggtggtctggctgccgccaagcgggcggttcgccacggggcgcgggtggcgattgcggaaggagatcgggtcggggggacttgcgtgatccgtggctgtgttccgaaaaagctgctggtctacggcgcgcaggcccggcatcagctgcaggacgcgccctcctatggcctgcacgtggaggctgtgcgctcggatgtgagtgaactgctggagcgcgtgcgttcggaggttgatcgcctcaacctccgccatcgccagatgctctcggaggccggggtggagttgctgcagggctggggccggttcacggctcctgatcgcatcggtctgtccgccacgcccggtggaccgatcgagcgagagctcggagcagcccggattctgatcgccgtcggcggtcagccgatccggccctcgatccccggcgcggaacacacctggctgagtgacgacatgttcctgcaggagacctacccggatcaggtcgtggtggtgggtgctggattcatc

SEQ ID NO: 223385 - DNA, 1369 bp, Unknown
  Bacterial polypeptide expressing nucleotide sequence isolated from the Sargasso Sea
catggccatcgagtcgacctttgatctgattgttctgggtgcagggtctggagggttggccgctgccaagcgggcggcccgccatggcgccaaggtggccattgttgagggagaccgcgtcggcggcacctgtgtgatccggggatgtgtccccaaaaagcttttggtctacggcgctcaggcgcggcatcaactgaacgatgccccggcctatggcctcaccctgggttccgttgagagcagcgttgcggaactgtttcgccgggtgcgggccgaggtggatcggctcaatcatctgcatctcggctttctggaaaaggcgggtgttgcgcgcatcgatggctggggccggttcctgtccgaccagtgcatcggcatcgccaccgaacgcggtggtccgattcaacgggagctttcggctgcgcactatttggtggcggttggtgggcggacggtgcgcccggatattcccgggattgagcacacctggatcagcgatgacatgttcaacctggagcagttgccgaaggaggtggtggtggtgggagcgggcttcatcgcctgtgaattcgcctgcatcctccggggccttggagtggaggtcacccaggtggtgcggggctcgggcctgctcaggggatttgaccgggagctggcggacgccgtgctggaggggctgcgggagcagggaatccacgtgttgttggaacgcacggtgtcggcagtgagcggtcagcccggtgacctgacggttcagctgtcggatgggctggctctgccctgcggtggggtgttgatggccacaggccgtcgcccctggctggagggtctgggtctcgatgctgctggtgtggccgtggagcagggacggatcagcgttgatgccgactcacgcacctcggttgcccacatttatgccgttggtgatgtcaccgaccgggtcaacctcacgccggtggcgatcgacgaaggccgcgcctttgccgatgccacctttggcagtcggcctcgacaggtgaaccacgaccttgtggccagcgcggtgttcagtgatcccgaactggccacggtgggcctttctgaagaggcggccatcgaccgccatggtgtggatggtgtggtgatccatcgggcccggttccgatcgatgtcgcgcgccctcccggccaccgggtcccgttgtttgttgaagctggttgtggagatctcgacggatcgtgtgctcgggtgccacatggtgggggagcatgccgccgaaatcattcagatggcagctattgccgtcggtatgggggccaccaaggcggatttcgatcgcacgatggccttgcatccctcggtgtccgaggaattcgtgacgatgggttga

SEQ ID NO: 223386 - DNA, 991 bp, Unknown
  Bacterial polypeptide expressing nucleotide sequence isolated from the Sargasso Sea
atggccatcgagtcgacctttgatctgattgttctgggtgcagggtctggagggttggccgctgccaagcgggcgacccgccatggtgccaaggtggccattgttgagggagaccgcgtcggcggcacctgtgtgatccggggatgtgtccccaaaaagctgttggtctacggcgctcaggcgcggcatcagctcaacgatgcacaggcctttggcctcactctgggttccgtggagagcagtgttgcggaactgtttcgccgggtgcgggccgaggtggatcggctcaatcatcttcatctcggctttctggagaaggcgggtgttgagcgcatcgatggctgggcccggttcctgtctgatcagtgcgtcggcattgcgaccgaacgcggtggtccgattcaacgggagctgtcggctgcgcactacttggtggcggttggtgggcggccggtgcgcccggacatcccaggggttgagcacacctggatcagcgatgacatgttcaacctggagcagttgccgcagcaggtggtgttggtgggagcgggctttatcgcctgtgaattcgcctgcatccttcgtggccttggggtagaagttacccaggtggtgcgcggctctggcctgctcaggggctttgaccgggagctggcggacgccgtgctggaggggctgcgggagcagggaatccacgtgttgttggaacgcacggtgtcggcggtgaacggtcagcccggtgacttgacggttcagctgtcggatgggacggctttgccctgcggtggggtgttgatggccacaggccggcgcccctggctggggggtcttggtctcgatgctgctggtgtagccgtggagcagggacggatcagcgttgatgccgactcacgcacctcggttccccacatctatgcggttggtgatgtcaccgaccggatcaatctcacgcccgtggcgatcgacgaaggccgcgccttcgccgattcca

SEQ ID NO: 223387 - DNA, 288 bp, Unknown
  Bacterial polypeptide expressing nucleotide sequence isolated from the Sargasso Sea
cttggaatttgaatttgatttaattgttgttggcgctggatctggaggcctcgcggcggctaaacgtgctgctagttatggagcaaaagtcggaatcatagaagtaaatcaaataggaggaacttgtgtgataaggggatgtgttcctaaaaagttgatggtttatgcagctaaaagtaaaaataatatggattcttctgaaggatatggattaaaaaatgaaggtattaattttgaatcaaatattttattaaagaatgttagagatgaggttttaagattaagtaa

SEQ ID NO: 223388 - DNA, 577 bp, Unknown
  Bacterial polypeptide expressing nucleotide sequence isolated from the Sargasso Sea
cttggaatttgaatttgatttaattgttgttggcgctggatctggaggactcgcggcggctaaacgtgcggctagttatggagcaaaagtcgcaatcatagaagtaaatcaaataggaggaacttgtgtgataaggggatgtgtgcctaagaaattaatggtttatgcagctaaaagtaaaaaaaatctggattcttctgaaggatatggattaaaaaatggaggtattaattttgaatcaaatattttgttgaagaacgttagagaggaggtttctagattaagtaatttacatagaaattctttaaaaaagttgaatataactatttttgaaggcttaggaagatttattactcaaaatgaattagagattatttgttcaaaaacaaagaaaattaaaaacaaaataagttcaaaaaaaattcttatttcagttggaggtaaaccaaagaaattaaatattcctggggtagatttggcatggactagtgatgatatttttgaattagaaaagtttcctaaatcaatattaatagtaggaggtggatatattgcttgtgaatttgctttctatttt

SEQ ID NO: 223389 - DNA, 572 bp, Unknown
  Bacterial polypeptide expressing nucleotide sequence isolated from the Sargasso Sea
gattggccgtaaaccctctaccgacaaaattgatattgaaaataccgacgttgaactgaacgacaacggcacggttaaggtcgacaaatatcaaaacaccacggcaaagaatgtctacgcggttggtgatattaccggtgaagcagagcttactccagtggcagttaaagcaggtcgcttgctaagcgaacgcttattcaacggcaaaaaagacgctcacatggattattcaatgattccaaccgtggtctttagtcatccacccattggcactattggcttaaccgagccagaagctattgaagaatacggtgaagacaacgttaaagtgtacacctctagttttgcgtctatgtacaccgcggtaacccgccaccgtcaaatgaccaagatgaagttggtatgcgcgggtaaagacgaaaaagtggtaggccttcacggtattgggcacggcatggatgaaattctgcaaggcttcgccgttgccataaaaatgggggcgaccaaagctgactttgatgcgtgtgtagccattcaccctaccagtgcagaagagtttgttactatgtaga

SEQ ID NO: 223390 - DNA, 190 bp, Unknown
  Bacterial polypeptide expressing nucleotide sequence isolated from the Sargasso Sea
tatgaactttgattatgatctttttgtaattggtggtggatcaggtggagtacgagcagcgcgcgtggcagcatctgaggctggagctaaggttggtttggcagaagaagatcgatatggtggaacctgcgtcatacgtggctgtgtaccaaaaaagctcatggtttatgcaagtgaattcagcagacat

SEQ ID NO: 223391 - DNA, 250 bp, Unknown
  Bacterial polypeptide expressing nucleotide sequence isolated from the Sargasso Sea
gttgattaaaaaagtcttggaatttgaatttgatttaattgttgtaggcgctggatctggaggactcgcggctgctaaacgtgcggctagttatggagcaaaagtcgcaatcatagaagcaaatcaaataggaggaacttgtgtgataaggggatgtgtgcctaagaaattaatggtttatgcagctaaaagtaaaaaaaatatggattcttctgaaggatatggattaaacaatgaagggattaaattt

SEQ ID NO: 223392 - DNA, 603 bp, Unknown
  Bacterial polypeptide expressing nucleotide sequence isolated from the Sargasso Sea
gatggcccaatcttcgcagaactttgactatgatttgattgtgattggtgcaggatctggtggtgttcgtgctggccgtatcgctgctggtcatggcgccaaggttgccgtgatcgagggtgaccggccgggtggaacctgcgttattcgtggttgtgtgcctaaaaagctgctgatgtatgcagccagcttttctgccgatgtggaagatgcccgcgggtttggctggcagattgatcagctgacgcatgattggcctagtttgattgcagcgaaagatgctgaaattggtcggctggaaaatatttatcggtcgctattgaaaaaggctggcgccgccttgattgagggctgggggcgggttaccggcccgaatgaggtcaacgttggggcagatgtctaccgtgctgccaaaattttgatcgcggttggtggtgccccgcaattcactaatattcccggcatgagagatcatgccatcagctcgaacgaagcgctggatctgccagaaatgccaaaagaaattgccatttatggcagcggctatattgcgcttgaatttgccggtatttttaacgggcttggagcgcgaacccatctgat

SEQ ID NO: 223393 - DNA, 249 bp, Unknown
  Bacterial polypeptide expressing nucleotide sequence isolated from the Sargasso Sea
cttggaatttgaatttgatttaattgttgttggcgctggatctggaggcctcgcggcggctaaacgtgctgctagttatggagcaaaagtcggaatcatagaagtaaatcaaataggaggaacttgtgtgataaggggatgtgttcctaaaaagttgatggtttatgcagctaaaagtaaaaataatatggattcttctgaaggatatggattaaaaaatgaaggtattaattttgaatcaaatatttt

SEQ ID NO: 223394 - DNA, 826 bp, Unknown
  Bacterial polypeptide expressing nucleotide sequence isolated from the Sargasso Sea
tttgctggccttggtgctcgcacaactctcgtgtatcgcggtgatctatttctccgcggtttcgacgattcagtgcgagaattcgttaaagccgagatagagaaaaaacacattaatttgttgttcaacagcaatgttgcgcaaattgacgaacaagctgatgcacaaggccggagtcgcttcgcgcttaccatggcagacggcagtcagcgcacgacggatttagtgctctacgccaccggtcgcaaacctaagacggctgggcttggccttgaaaatgcaggcgtcgcattaggcgataatggcgaggttttggtagatgagtattatcaaaccaatgcggagaatatttacgccatcggtgatgtaacggatcgcgtgcagttgaccccggttgccatcgaagaaggcatgtgtatcgccaataacctatttaccgataacccgaaaaaacgtctgaattatcagaatattgccactgcggtattttgccaaccgaatattggtactgtgggccttaccgaagcagaagccgttgcagaacatgcaggtgatctggatatttatgaaagcgactttaaacccatgaagcataccctgagtggtcgggacgaacgcacctacctgaaaatgatcgttcgtcgcagcgacgatgtggtgctaggaatccatatggttggccctgatgctggtgaaattattcaaggcctaggtgttgcactggtagctggtgcaaccaaggcgcagtttgatgcgactgtgggtattcatcccactgctgccgaggaatttgtaaccatgcgctcgttaagtcgaaccgcataag

SEQ ID NO: 223395 - DNA, 397 bp, Unknown
  Bacterial polypeptide expressing nucleotide sequence isolated from the Sargasso Sea
tttgttaagcgagcgcttatttaatgggcaaaaagatgcgcacatggattactcgcttattcctaccgttgtgtttagtcacccgccaatcggcaccattggtttaacagagccagaggctattgaaaaatacggtgaagacgatattaaggtgtatacctcaagctttgcgtctatgtacacagcagttacccgtcaccgtcaaatgacgaagatgaagctagtatgtgctggtaaagacgaaaaagttgttggcctacacggtattggccacggtatggatgagattctgcaaggttttgctgttgccataaaaatgggcgcgaccaaagctgactttgatgcgtgtgtggccattcaccctaccagcgcggaagaattcgttaccatgacctag

SEQ ID NO: 223396 - DNA, 715 bp, Unknown
  Bacterial polypeptide expressing nucleotide sequence isolated from the Sargasso Sea
ttggaatttaaatttgatttaattgttgttggcgctggatctggaggactcgcggcggctaaacgtgcggctagttatggagcaaaagtcgcaatcatagaagcaaatcaaataggcggaacttgtgtgataaggggatgtgttcctaaaaaattgatggtttatgcagctaaaagtaaaaaaaatatggattcttctgaaggatatggattaaaaaatgaagggattacttttgaatcaaaaattttattgaagaatgttagagaggaggtttctagattaagtaatttacatagaaattttttaaaaaagttgaatgtaactgtttttgaaggcttaggaaggtttattactcaaaatgaattagaaattatttgtccaaaaactaagaaaattaaaaacaaaataagttcaaaaaaaattcttatttcagttggaggtaaaccaaagaaattaaatattcctggggtagatttagcatggactagtgatgatatttttgaattagataagtttcccaaatcattattaatagtaggaggaggatatattgcttgtgaatttgcttctattttcagaaatttaggtattgaagtaactcaattaattagaggtcaacatttacttaatggttttgatgaggatctttcttcatgccttgaggaatcacctacttttactgaaattaatataatttccaatgctcaaaattaaa

SEQ ID NO: 223397 - DNA, 155 bp, Unknown
  Bacterial polypeptide expressing nucleotide sequence isolated from the Sargasso Sea
catggactttgacttgctcgtcatcggcgctggctccggtggtctggccagtgccaaacgggcagcccgtcatggagccaaggtcggaatcatcgaaggcgaccgggtcggtggcacctgcgtgattcgtgggtgcgtgcccaaaaaactgctgg

SEQ ID NO: 223398 - DNA, 277 bp, Unknown
  Bacterial polypeptide expressing nucleotide sequence isolated from the Sargasso Sea
atggcacaaacaggcgcatcttatgattatgatctcatcgtcattggcgcggggtcgggcggtgtgcgggctggtcggattgccgccggacatggcgcacgcgttgcggtgattgaaggggatcgcccgggcggcacctgtgttattcgcggttgtgtgccgaaaaaactgctgatgtacggatcggcgttttcatcagaaattgaagacgcacacgggtttggctggcaaatcaatcagatgccaccacatgactggccaaccttaattgcggcca

SEQ ID NO: 223399 - DNA, 275 bp, Unknown
  Bacterial polypeptide expressing nucleotide sequence isolated from the Sargasso Sea
cttggaatttgaatttgatttaattgttgttggcgctggatctggaggcctcgcggcggctaaacgtgctgctagttatggagcaaaagtcggaatcatagaagtaaatcaaataggaggaacttgtgtgataaggggatgtgttcctaaaaagttgatggtttatgcagctaaaagtaaaaataatatggattcttctgaaggatatgggataaaaaatgaaggtattaattttgaatcaaatattttattaaagaatggtagagatgaggttt

SEQ ID NO: 223400 - DNA, 703 bp, Unknown
  Bacterial polypeptide expressing nucleotide sequence isolated from the Sargasso Sea
attgattaaaaaagtcttggaatttcaatttgatttaattgttgttggcgctggatctggtggactagcggctgctaaacgcgctgcgagttatggggcaaaagttgcaatcatagaagtagataaagtaggaggaacttgtgtaataaggggatgtgttcctaaaaaattgatggtttatgcagctaagagtaaaacaaatatgacttcttctgaaggatatggattaaaaagtgaaagtattaactttgaatcaaatatccttttgaaaaatgttagagaagaggtttccagattaagtgatttacataaaaattctttaaaaaaattgaatgtaaaagtttttgagggcttaggaagatttataactcaaaatcaattagaaataatttgtccaaaaacaaagaaaattttaaataaattaagttcaaaaaaaattcttatttcagttgggggtaaaccaaagaaattaaatatccctggggtagatttggcatggactagtgatgatatttttgaattagaaaagtttcccaagtcaatattaatagtaggaggtggatatattgcttgtgaatttgcttctatcttcagaaatttaggtactgaagtaactcaattaattagaggtcaacatttacttaatggttttgatgaggatctttcttcatgcctagaggaatcaccaacttttacgaaatca

SEQ ID NO: 223401 - DNA, 819 bp, Unknown
  Bacterial polypeptide expressing nucleotide sequence isolated from the Sargasso Sea
attgaaaaggtcttttgatttaattgtcattggtgcaggatccggtggattagctgctgcaaagaaagcagccagttatggagcatctgtagcgatcgtcgagggagatcttgtcggaggaacgtgcgtaataagaggttgtgttcctaaaaaattattagtttgtggttcttctctcgtagagagttttttgtatgcaccatcttatggttttgattttgataatttaaagatcaagtcagagactttattagctaatgttcgaaaggaagtgcaaagactaaatgaattacacgaaaattttctaaataaggctaatgttgagctttttaaaggttggggtgagtttaaaaatccaaattgtatcgcaattaaaaatcgaataaatggagatactttaaatgaactttatggagaaagaattttgattgcagtgggaggtagacctaaaagaccgagcatcgagggggcatctttaggttggacaagtgatgatatgtttcttcttaaaagctttccgaaaaaaattacaattgttggtgcaggctatattgcttgcgaatttgcatgcatattacacggtttaggtgttgaggttactcaattagttcgaggtgatcggattttaagaggatttgactttgaactttcttcagcattaaccgaggcaatgaaaaataaaggagttaacataaactttggtgagaatatttcttcactaaaaggaactcctggatctttaattatcaaaacaaatacaggtaaagagtttgactcgaatggattacttttcgctactggtagagagccgtttttaga

SEQ ID NO: 223402 - DNA, 625 bp, Unknown
  Bacterial polypeptide expressing nucleotide sequence isolated from the Sargasso Sea
cttggaattccaatttgatttaattgtagttggcgctggatctgggggcctggctgccgctaaacgtgctgcgagctatggggcaaaagttgcagtcatagaagtaaataaagtaggaggaacttgcgtaataaggggatgtgttcctaaaaaattgatggtttatgcagctaaaagtaaaaaaaatatgacttcttctgaaggatatggattgaaaagtgaaggtattagttttgaatcaaatattcttttgaagaatgttagagaagaggtttccagattaagcaatttacataaaaattctttaaaaaaattgaatgtaactgtttttgagggattaggaagattcacaactcaaaataaattagaaataatttgtccaaaaacaaagaaaattttaaataaagtaagttcaaaaaaaattcttattgcagttggaggtaaaccaaagaaattgaatattcctggtatagatttggcatggactagtgatgatatttttgaattagaaaagtttcccaaatcaatattaatagttggaggaggatatattgcttgtgaatttgcttctattttcagcaatttgggaactgaagtaactcagttaattagaggtgaaagttta

SEQ ID NO: 223403 - DNA, 831 bp, Unknown
  Bacterial polypeptide expressing nucleotide sequence isolated from the Sargasso Sea
aatgattaaaaaagtcttggaatttgaatttgatttaattgttgttggcgcaggatctggaggactcgctgcggctaaacgtgcagctagttatggagcaaaagtggcaatcatagaagtaaatcaaataggaggaacttgtgtgataagaggatgtgttccaaaaaaattgatggtttatgcagctaaaagtaaaaaaaatatggattcttctgaaggatatggattaaaaaatgaaggaattaactttgaatcaaatattttattgaagaatgttagagaggaggtttctagattaagtaatttacatagaaattctttaaagaaattgaatgtaacggtttttgagggcttagggagatttacgactcaaaacgaattagaaattatttgcccaaaaacggcgaaaattaaaaataaaataagttcaaaaaaaattcttatttcagttggaggtaaaccaaagaaattaaatattcctggggtagatttggcatggactagtgatgatatttttgaattagaaaagtttcctaaatcgatattaatagtaggtggaggatatattgcttgtgaatttgcttctattttcagaaatttaggtactgaagtaactcaattaattagaggtcaacatttacttaatggttttgatgaggatctttcttcatgcctagaggaatcacctacttttactgaaatcaatataatctccaatactcaattaaagtctatcaaaagagtaaatggaaatctggaatctaccctagactcgggggataaactacttactagtaatatacttattgctacaggaagagaaccaaatct

SEQ ID NO: 223404 - DNA, 490 bp, Unknown
  Bacterial polypeptide expressing nucleotide sequence isolated from the Sargasso Sea
ttgattaaaaaagtcttggaatttgaatttgatttaattgttgttggcgctggatctggaggactcgcggcggctaaacgagcggctagttatggagcaaaagtcgcaattatagaagcaaatcaaataggaggaacttgtgtgataaggggatgtgtccctaagaaattaatggtttatgcagctaaaagtaaaaaaaatattgattcttctgaaggatatggattaaaaaatgaaggtattaattttgaatcacatattttgttgaagaatgttagagaggaggtttctagattaagtaatttacatagaaattctttaaaaaagttgaacataactatttttgaaggcttaggaagatttattactcaaaatgaattagaaattatttgttcaaacacaaagaaaattaaaaacaaaataagttcaaaaaaaattcttatttcagttggaggtaaaccaaagaaattaaatattcctggggtagatt

SEQ ID NO: 223405 - DNA, 189 bp, Unknown
  Bacterial polypeptide expressing nucleotide sequence isolated from the Sargasso Sea
aatgcaatttgattacgattgtttcattattggaggaggctctggcggagtaagagctgctaaattagcatctcaagctggtaaaaaagttggactagctgaagaatttcgctttggaggtacttgcgtaataagaggctgcgtgccaaaaaaactcatgctatttgcatctgattttagccaatccta

SEQ ID NO: 223406 - DNA, 795 bp, Unknown
  Bacterial polypeptide expressing nucleotide sequence isolated from the Sargasso Sea
cttggaatttgaatttgatttaattgttgttggcgctggatcaggaggactcgcggcggctaaacgtgcagctagttatggagcaaaagtcgcaatcatagaagcagatcaaataggaggaacttgtgtgataaggggatgtgtgcctaagaaattaatggtttatgcagctaaaagtaaaaaaaatatggatttttctgaaggatatggattaaaaaatgaaggtattaattttgaatcaaatattttgttgaagaatgttagagaggaggtttctagattaagtaatttacatagaaattctttaaaaaagttgaatataactatttttgaaggcttaggaagatttattactgaaaatgaattagaaataatttgttcaaacacaaagaaaattaaaaacaaaataagttcaaaaaaaattcttatttcagttggaggtaaaccaaagaaattaaatattcccggggtagatttggcatggactagtgatgatatttttgaattagaaaagtttcctaaatcaatattaatagtgggaggaggatatattgcctgtgaatttgcttctattttcaggaatttaggtactgaagtaactcaattaattagaggtcaacatttacttaatggttttgatgaggatctttcttcatgcctagaggaatcacctacttttactgaaattaatataatctccaatactcaattaaattctataagaaaaataaatggaaatctggaatctaccctagactcgggagataaactcctaacaaataatattcttaattg

SEQ ID NO: 223407 - DNA, 788 bp, Unknown
  Bacterial polypeptide expressing nucleotide sequence isolated from the Sargasso Sea
aatgaaaaatacaaacacagattttgatttatttgtcatcggagctgggtcgggtggcgtaagagctgctagacttgcatcacagtcaggtgcaaaggtctgcatagctgagagggatagaataggcggtacgtgtgttattagagggtgtgtaccgaagaaatttttcagctatagtagtaagttttctaagcataatactgtggctaaaagctatggatggtctcatgaagagacgacattttcctgggacaaattaattgagaataaaaataaacaaattgagaagttaagtaatatctatcgctccaatttagaaaaggcaggcgtaaagatttttgagtcggaggcaagcattattggctcaaatattgttagactctcaaacggagatgaatattgtgcaaaaaaaatattaattgcaacaggtgcaaaaccaaatttccctaatattaaaggtgcgaactacggcatatcatcagatgatttttttgagttggagacacttccgcaaaagataatagttgttggaggcggttatattgcacttgaattttcgtcgattatttcaggtttaggtagtaagtgtgatttactctatcgcggtgataaattattaaagggttttgataaagatattagcagaattattacacaagaattgcagtccgaaaaatgtaatgtgaaattaaatacagatgttattgaaataacaaagaataaaaatcagtttgaggtattaacaaatgatagtgaacgtcttaaggctgacttggtattatttgcaa

SEQ ID NO: 223408 - DNA, 764 bp, Unknown
  Bacterial polypeptide expressing nucleotide sequence isolated from the Sargasso Sea
gcgcggttttgatgatgacgtccggtatcacctagcagacgagatgcgaaagcaagagttagatttgcgcttttacgctaatattgcccggatcgaaaaagagggtgaagtgctggtcgcagttctggaggacggcacacaaatgcgaacggacgtaattctctatgcgacgggccgtttgccaaattcagcgaatattggccttgaaaattctggggtcaaattgggtaaagggggtgcagttctggttgatgaaggattcaagacctcagttccctcgatctacgctataggcgatgttattgaccgtgtacaactgacgcctgttgcgcttgaggaaggaatggtagttgccaatgccctgttcaatgagaaggccggtgctgttgattacaaaaatattccgaccgcggtatttagtcagccaagcattggcactgtcggccttactgaaggggaagcccgggacaagtatggcaaggtcgacatttataagtctgattttaaggcactgaagcacacgttgacgggacgagatgagcggactttgatgaagctgattgttcatcccgagaccgatatggttctcggcgtgcatatggttggtccggaagcgggtgagattatccaaggtataggaattgcgctcaaggccggagctaccaaagctacttttgacgcgacaattggtattcatccaacatctgcagaggagttcgtaactatgcgtgagaaggtgcccgaccgcaaagaagataattaaa

SEQ ID NO: 223409 - DNA, 616 bp, Unknown
  Bacterial polypeptide expressing nucleotide sequence isolated from the Sargasso Sea
atgtatgatttatttgttataggagcaggatcaggtggagttcgttcagcaaggttagctgccgctcagggctttagtgttggtattgctgagtcctctcgcgtaggtggtacttgcgtaataagaggatgtgttccaaaaaagctaatggtccacgccgcagaattcagccaatattttagcgatagtgaaggttatggatggactattaaaggtgcacattttgattggcagcgaatggtgatagctagaaacaaggaggtagacaggctagaggcagcatacaaaatgaatttgaaaaactccggagttgaaatttatgaaaactttgcaaaattgagaggagtgaacgaggttgagctagataaccagaaagttataaaggcaaaacatattcttttagcgactggtggtaaacctaagaaaccagagtttccaggtgttcagtttacaaagtcatctgatgatattttcatgatgtcaagcttgccagaaaaagtcgtaatttatggtgctggttatatagcctgtgaatttgctacgatttttaatggattgggtgtcgatgttacactagtttacagaggcgaaaatttattaagagggtttgattacg

SEQ ID NO: 223410 - DNA, 1366 bp, Unknown
  Bacterial polypeptide expressing nucleotide sequence isolated from the Sargasso Sea
cttggaatttcaatttgatttaattgttgttggcgctggatctggtggactagcggctgctaaacgcgctgcaagttatggggcaaaagttgcaatcatagaagtacataaagtaggaggaacttgtgtaataagaggatgtgttcctaaaaaattgatggtttatgctgctaaaagtaaaacaaacatgacttcttctgaaggatatggattaaaaagtgaaagtattacctttgaatcaaatatccttttgaaaaatgtcagagaagaggtttccagattaagtgatttacataaaaattctttaaaaaaattgaatgtaaaagtttttgagggcttaggaagatttataactcaaaatcaattagaaataatttgtccaaaaacaaagaaaattttaaataaattaagttcaaaaaaaattcttatttcagttggaggaaagccaaagaaattaaatattcctggaataaatttggcatggacaagtgatgatatttttgaattagatagtttccctgactcaatattaatagttggaggaggatatattgcctgtgaatttgcttcaatttttaggaatttgggtactaaagtaattcaattaattagaggtcaacatttacttaatggttttgatgaggatctgtcttcatgcttggaagaatcaactacttttggtggaataaatataatatccagaaatcaattaaagtctatcgagagagttaatgggaatttggaatctaccctggactcgggagataaaatcctaactaataatatccttattgctacaggtagagaaccaaatcttctgcctttaaatttagattttctaaacctaaaaatggatggcgcttatttagatgttgatgaatttaatcaaacaagcaatgctaatatttttgcagttggagatataataaataaaccaaacttaacaccagtagcaatagaacaaggtagagttttttctgataatttttttaatgaccaaaaaagaaaagtaaattatgaatatatccctaaggcagttttcactattcctgaaatttccacagttggcttaaatgagaaacgcgcgaaagaaatttactctgaaaaaaatataaaaatttttaaatgtaaattcacacctatgtctaacacttttaaagagaataaatcaaaatgtatgttaaagattatcgttaataagctaacggacaaggtaataggatgccatatgtttggggaaacatcatctgagattattcaaatggtatcaatttcattaaacgcaggtataacaaaaaaagactttgatattactatggctttgcatccaactatctcagaagaatttgtaactatgtatggctaa

SEQ ID NO: 223411 - DNA, 1360 bp, Unknown
  Bacterial polypeptide expressing nucleotide sequence isolated from the Sargasso Sea
atggatttcgactacgacctgttcgtcatcggcgccggctcgggcggcgtgcggctcgcacgcatgtccgcgtcctacggcgcgcgtgtcggcatagcggaagaagagcagatcggcggcacctgcgtgctgcgcggctgcattccgaagaagctgctcgtctacgcatcgcactacccgcatgaagtcgaggacgcgaagggcttcggctggaccttcggcgccggcacgctcgactggcccgcgctgatcgccgcgaaggatcgcgagatcaaccggctcagcgacatctacatcaacctgctgcggcaatcgggcgtcgagatgcacgcggggcgcgcgacgctcgtcgatgcgcacacggtcgcgatcggcgagcgcacgatccgcgcgcgccacatcgcgatcgcgaccggctcgcgcccgtcgctgccgccgcggcccggcatcgagcacgcgatcacgtcgcgcgaggccttgtcgctcgccgcgtgccccaagcgcatcgcggtggtcggcggcggctatatcgcggtcgagttcgcaggcatcttcaacggcttcggcagccacgtcgacctgttctatcgcggcgagaagatcctgcgcggcttcgacgacgacgtgcgccagttcctgaccgacgagatgacgaagcagggcgtcacgatccatgcgcgctcggtggtcgagtcgatcgagcgcgcggacgacggcacgctgagcgtgcgcgccggcgatgcgcggcacgggccgtacgaccaggtgctttatgcgaccggccgcgtgccgaacgtcgacggtctcgggctcgagcaggcgggcgtgatgctcgacgcgcgcggcgcgatcgccgtcgatgcgtattcggcgacgtcggtgccgtcgatccatgcgatcggcgacgtcacgtcgcggccgcagctcacgccggtcgcaacgcgcgacggcgggttgctcgcccgcacgctgttcggcgggtcgcgcatcgcggccgatcacgaatgggtgccgtcggcggtgttcagccagcccgaggtcgcgacggtcgggttcacggaggcggccgcgcgcgacctgtacgaaggcgacgtcgatatctaccgtacgtcgttcaaggcgttgcgtcacacgctgtcgggccgcgacgagcgcacgctgatgaagctggtcgtcgcgcgcgacagccagcgcgtggtcggcgcgcacatggtcggccgcgatgcgggcgagatcatccagggcatcgcgatcgcgattcgcgcgggcgcgacgaaggcgcagttcgacgacacgatcggcattcacccgaccgcggccgaagagttcgtgacgatgcggcagaaggtggcggattagc

SEQ ID NO: 223412 - DNA, 721 bp, Unknown
  Bacterial polypeptide expressing nucleotide sequence isolated from the Sargasso Sea
acactttagtagaactgatgcccaaagatggtcttcagctacaccctcataccccgaagtgagttctgtcagtaaaaatgcggacggctctttaactgtgcagttatctaccggcagcagcttaacagtagattgtctgatttgggctataggtcgcgagcctgccaatgaccaactacagctggaaaaagctggtgtaaaactggatgccgaaggttttatcccaacagacgagtatcagaataccaatgtgcctggcatttatgcggtaggtgataatacaggccgtctggcgttaactccggtcgcagtcgcggcaggacgacgtttgtccgagcggttatttaataataaaccagacagcaaactggattacagcacagtgccgacagtagtgttttcgcaccctcctattggcactataggtttaaccgaagatgaggcccgtcagcagtttggtgatgaccagattaaggtctatcgcagcgaatttgctgctatgtacacggctttaacccagcaccgtcagttaacacgtatgaaattggtctgtgctggtccaactgaaaaagtagtaggtttgcatgtgataggttttggcgctgacgaaatgctacagggttttggtgtggcgataaaaatgggcgccaccaaagctgactttgataattgtgtggctatacatccaacctcagctgaggagtttgtcacgctcagataa

SEQ ID NO: 223413 - DNA, 835 bp, Unknown
  Bacterial polypeptide expressing nucleotide sequence isolated from the Sargasso Sea
ctttaaaggacttggatctgacgttacactgatgtttagacaagatctaccgctccgaggttttgatgaagatttacggaaaactatccatgaaaaccttgaacaacgtggcataactgtacaccacaactgttctccactcgagattactcgagaggaagatggaaccctgatcacgaggacaagtattggaaatgttcaatctgatgcagtaatgtttgcaaccggtagaagaccgaatacgagtcgcccagacctcggcctggaggatgttggtgttgaccttgacgatgctggagctgtggtcgtggatgatttcagtcgaacaactgtttcaaacatctgggcagttggggatgttacaaatagagtcaatctcacaccagtcgcgctaatggaaggaatggcattcgtgcgcagtgtcattgatcgaacattgacgaagccaaactatgcaaacattccttgtgcaatcttttcacagcctccagctgcaactgttggcctttccgaagatcaggcagttaccgaaggatatgattgtgacatatactgttcaaaatttacacctatgcgttccactcttgcaggaagacaggaaaaaactttcatgaagctggttgtggatacctccagtgatcgcgtattaggtgtacacatggtgggtcctgatgcgcctgagattctccagggttttgccaccgctttgcagtgtggtgcaacaaaaacacatttcgataccacagtgggaattcatccttccagtgcagaagagtttgtcacgatgcgcacaaaaacccgttccgtcaagcacgcttctgggagagatgtttag

SEQ ID NO: 223414 - DNA, 1192 bp, Unknown
  Bacterial polypeptide expressing nucleotide sequence isolated from the Sargasso Sea
tatgggctttgattatgatctttttgtaattggtggtggatcaggtggagtacgagcagcgcgcgtggcagcatctgaggctggagctaaggttggtttggcagaagaagatcgatatggtggaacctgcgtcatacgtggctgtgtaccaaaaaagctcatggtttatgcaagtgaatttagcagacatttagacgatgcttttgcatttggatggagcgtagaaaatagcggctttgattggcaaaaatttagaaaaaagctccatttagaacttgatcgtttggaagccgtatatcgaaacttactacgaaatgctggtgtagacacctacgatcaaagagcaaaactacttgaccaaaatacagtcgtaataggaaagaaaaaattaactgcaaggacaatccttatagcgaccggcggccgacctttcagaccggatattcctggaattgaaaatgctttagtctccgatgatatttttaatctcgagaaacttcccaaatcgatagcgataattggcggaggctatatcgcttgtgaaatggcaagtatcatgaatggctttggtgttaatacaaaactcatttaccggggtgatcagattttgcgcggttttgataaagaaattagagaccatgttgctgaagaaatggctaaaaatggcatttcaatttctcttaatgaagatgtcacgaaaataaatgtgacagcagagggtttagaactcgtaaattctgagggtaagaaagaaaattttgataaaattttgactgcaactggacgaacacctaactcagacgacttagggttggataactcaggtgtccaacttggtgagaaaggtgaaatattagtagataatttgtctaagagttctagggagtctgtctatgcaattggggatgttacaaaccgcagtaatctaacgccaattgctattagagaagctatgtcttttattgagactgtgtttagagacagacctgaaaaacttgattatagttttatcccaactgctgtctttactacaccagaagttggaacagttgggttgactgaggaagaagcatctcaatttgctccgcttgagatttataccacaaaattcaaatctatgcgtgaggcttttgcaggaagggaggacagagttttcatgaaattgattgtagaagaaaaaaatcaaaaggtt

SEQ ID NO: 223415 - DNA, 1221 bp, Unknown
  Bacterial polypeptide expressing nucleotide sequence isolated from the Sargasso Sea
cttggaatttgagtttgatttaattgttcttggcgctggatctggaggactcgccgcggcaaaacgtgcagctagttatggagcaaaagttgcaatcatagaagcaaatcaaataggaggaacctgtgtaattaggggatgtgttcctaagaaattgatggtttatgcagctaaaagtaaaaaaaatatggattcttctgaaggatatggattaaaaaatgatggtattaattttgagtcaaatattttattgaagaatgttcgaaaggaggtttctagattaagtaatttacatagaaattctttaaaaaaattaaatgtaactgtgtttgaaggcttaggaagatttactactcaaaatgaattagaaattatttgtccaaagacgaagaaaattaaaaataaaattagttcaaaaaaaattcttatttcagttggaggtaaaccaaagaaattaaatattcctggggtggatttggcatggactagtgatgatatttttgaattagaaaagtttcccaaatcaatattaatagttggtggaggatatattgcttgtgaatttgcttctattttcagtaacttaggtactgaagtaactcaattaattagaggtcaacatttactaaatggttttgatgaggatctttcattatgcctagaggaatctcctacttttactgaaataaatataatctccaatactcaattaaagtctattaagagagtaaatggtaacctggaatccatcttggactctggtgataaactcctaaccaataatatcctcattgctacaggtagagaaccaaatcttttacccttaaatttaaatttcttaaatctaaagatgaatggcaaatatttagatgttgatgaacttaatcaaacaagcaaccctaatatttttgcagttggcgatatcataaataagccaaacttaactccagtagcaatagaacaagggagagttttttcagataatttttttaatggccaaaaaagaaaagtaaattatgaaaatattcctaaggctgttttcactattccagaaatctcaacagttggcttaagtgaaaaaaaagctttagagatttactctgaaaaaaatataaaaattttcaaatgcaaatttactcctatgtcatatacttttaaagagaataagtcaaaatgtatgttgaagattgtagttcataagctaactgacaaagtcctagg

SEQ ID NO: 223416 - DNA, 1366 bp, Unknown
  Bacterial polypeptide expressing nucleotide sequence isolated from the Sargasso Sea
cttggaatttgaatttgatttaattgttgttggcgctggatctggaggactcgcggcggctaaacgtgcggctagttatggagcaaaagtcgcaatcatagaagcaaatcaaataggaggaacttgtgtgataaggggatgtgtgcccaagaaattaatggtttatgcagctaaaagtaaaaaaaatatggattcttctgaaggatatggattaaaaaatgaaggtattaattttgaatcaaatattttgttgaagaatgttagagaggaggtttctagattaagtaatttacatagaaattctttaaaaaagttgaatataactatttttgaaggcttaggaagatttattactcaaaatgaattagaaattatttgttcaaaaacaaagaaaattaaaaacaaaataagttcaaaaaaaattcttatttcagttggaggtaaaccaaagaaattaaatattcctggggtagatttggcatggactagtgatgatatttttgaattagaaaagtttcctaaatcaatattaatagtaggaggtggatatattgcttgtgaatttgcttctattttcagaaatttaggtactgaagtaactcaattaattagaggtcaacatttactaaatggttttgatgaggatctttcttcatgcctagaggaatcacctactttcactgaaatcaatataatccccaatactcaattaaactctatcaaaaaactaaatggaaatctggaatctactctagactcgggagataaactcctaactaataatattcttattgctacaggaagagaaccaaatcttttgcctttaaatttagattttttaaatctaaagatggatggccaatatttagatgtcgatgaacttaatcaaacaagcaacgcaaatatttttgcagttggcgatatcataaataagccaaacttaactccagtagcaatagaacaagggagagttttttcggataatttttttaatgaccaaaaaagaaaagtaaattatgaatatatccctaaggccgtttttactattccagaaatttcaacagttggcttaagtgagaaaagagctaaagagatttactctgaaaaaaatataaaaattttcaaatgcaaatttacccctatgtctaatacctttaaaaagaataaatcaaaatgtatgttgaagattgtagttcataagctaactgacaaagtcctaggatgtcatatgtttggagaaacatcgtctgagattattcaaatggtatcaatttcattaaatgcagggataacaaaaaaagactttgatattactatggctttgcacccaactatctcagaagaatttgtgactatgtatggataa

SEQ ID NO: 223417 - DNA, 250 bp, Unknown
  Bacterial polypeptide expressing nucleotide sequence isolated from the Sargasso Sea
tttggctgagtatgattttgacttatttattattggagctggttccggtggtgtaagagcggccagattagcctctaaattaggtaaaaaagtagctatagctgaggagtatagatttggaggaacctgtgtaattagaggctgcgttccaaagaaattaatggtttttgctagttcttattcaaaaatttttaaagaaggtaaaggatatggtttgggatcaaaaaaatgcctcattttcatggaataa

SEQ ID NO: 223418 - DNA, 784 bp, Unknown
  Bacterial polypeptide expressing nucleotide sequence isolated from the Sargasso Sea
agtgaaacccatttattagtgcgtaaagacaaaccactgcgtagcttcgaccctatgttatccgacaccttagtcgaactgatggccaaagatggtccgaaactacacacccataccgaagtgagttctgtcagtaaaaacgccgatgcttctttaactgtgcaactgtccactggcagcagcttgactgtggattgcctgatttgggctataggccgcgagccagccaatgaccaattgcagctggaaaaagctggagtgaagttggatagcgaaggttttattccaacagatgagtatcagaacacgaacgtctctggcatttatgcggtgggtgataacacaggtcgcctggccttaactccggtggcagttgcagccggacgtcgtttgtccgagcggttatttaataacaagccagacagcaaactggattacaacactgtgccaacagtggtgttttcgcaccctcccatcggcactataggtttaaccgaagacgaagcccgtcagcaatttggtgatgaccaggttaaagtctatcgcagcgaatttgctgctatgtacacggctttaacccagcatcgtcagcttacccgaatgaaactggtctgcgctagcccgaccgaaaaagtagtaggcttgcatgtgataggttttggcgctgatgaaatgctgcagggttttggtgtggcgataaaaatgggcgcaaccaaagccgactttgataactgtgtggctatacacccgacgtcttcagaagagttcgttacacttagataat

SEQ ID NO: 223419 - DNA, 1357 bp, Unknown
  Bacterial polypeptide expressing nucleotide sequence isolated from the Sargasso Sea
catggctcaacattttgactatatctgcctaggcgcaggcagcggcggtatcgcctcagctaaccgagctgccatgcgtggcgctaaagttctactcatcgaagcgaaacatgttggcggcacctgcgtaaacgtaggctgcgtgcctaaaaaagtcatgtggtatggcgcacatatcgccgaagccatgaacctctacgccaaagattatggatttgatgtttcagtcaacaaattcgactggaacaccttagtgaacagccgcgaagcctatatcggtcgtatccacgaggcctacggtcgcggctttaccaataacaaggtcaccctgctcaatggctatggccgtttcgttaatggcaacaccattgaagtgaatggcgagcactacacggctgaccatatcctgatcgccaccggtggcgcgccaactatccctaacattccgggtgcggaatacgggattgattcagatggtttcttcgccctgcgcgaacaacctaaacgtgtcgcagtcgtcggcgctggctatatcgctgtcgaagtcgcgggtgttttacacgcgcttggcagtgagactcacctgtttgtgcgtaaacatgcgccgctgcgtaacttcgatcctatgctaatcgacgccctagtcgatgccatgaagaccgaaggcccaacacttcataccaacagtgtcccacaatctgtggtcaaaaatgccgacgacagcctgactctgaatctcgagaatggcgaaagcgtgaccgttgattgcctgatttgggccattggccgctcacccgcgacgggcaatatcggtttagaaaacaccgatgtgcaactggatagcaaaggctatgtaattaccgatgcgcagcaaaataccacccacaaaggcatttattgcgtgggcgatataatggcgggcggcgtggaactgactcccgttgcggttaaagcgggtcgcttactgtctgagcgcctattcaacggcatgagcgatgccaaaatggattacagccaaatcccaaccgtggtcttcagccatcctccaattggcactatgggattaaccgagccagaagcccgcgcgcaatatggtgatgataatgtgaaggtttacacctctggctttacctcaatgtataccgccgtcactagccaccgtcaggcctgtaagatgaaactggtctgtgcgggtaaagaagagaaagtcgtgggtattcatggcattggttttggtatggatgagatccttcaagggtttggtgtcgccatgaaaatgggcgccaccaaagccgatttcgatgccgttgtcgccatccaccccactggtgctgaggaatttgtgactatgcgctaa

SEQ ID NO: 223420 - DNA, 1357 bp, Unknown
  Bacterial polypeptide expressing nucleotide sequence isolated from the Sargasso Sea
catggctcaacattttgactatatctgcctaggcgcaggcagcggcggtatcgcctcagctaaccgagctgccatgcgtggcgctaaagtgcttctcatcgaagcaaaacatgttggcggcacctgcgtaaacgtgggctgcgtacccaaaaaagtcatgtggtatggtgcgcatatcgccgaggccatgaacctctacgccaaagattatggatttgatgtttcagtcaacaaattcgactggaacaccttagtaaacagccgcgaagcctatattggtcgcatccacgaggcctacggtcgcggttttaccaataacaaagtcaccctgctcaatggctatggccgtttcgttaatggcaacacgattgaagtaaatggcgagcactacacggctgaccatatcctgatcgctactggcggcgcgccaaccatccctaacattccaggtgcagaatatggcattgattccgatggcttcttcgccctgcgtgaacaacctaaacgtgtcgcagtcgtcggtgctggctatatcgccgtcgaagtcgcgggcgtgttgcacgcacttggcagtgagactcacctgtttgtgcgtaaacatgcgccgctgcgtaacttcgatcctatgctgatcgacgccctcgtcgatgccatgaagaccgaaggcccaaccctgcataccaacagcgtcccacaatctgtggtcaaaaatgccgacgacagcctgactctgaaccttgaaaatggcgaaagtgtgaccgtcgattgcctgatttgggctatcggccgttcacccgcaacgggcaatatcggtttagaaaacaccgatgtgcaactggatagcaaaggctatgtgattaccgacgcgcagcaaaataccacccacaaaggcatttattgcgtgggcgatattatggcgggcggtgtggagctgactcctgttgcagttaaagcgggtcgtttactctccgagcgcctatttaacggcatgagcgatgccaaaatggattacagccaaatcccaaccgtggtctttagccatccaccgattggcactatgggcttaaccgagccagaagcccgcgcgcaatatggcgatgacaatgtgaaggtttacacctccagtttcacctccatgtataccgctgtaacaagccatcgccaagcctgcaagatgaagctagtctgcgccggtaaagaagagaaagtggttggtattcatggcattggctttggtatggacgaaattctccaaggctttggcgtcgccataaaaatgggcgccaccaaagccgatttcgatgccgttgtcgccatccaccccacaggggctgaggaatttgtcacgatgcgctaa

SEQ ID NO: 223421 - DNA, 1357 bp, Unknown
  Bacterial polypeptide expressing nucleotide sequence isolated from the Sargasso Sea
atggctcaacattttgactatatctgcctaggcgcaggcagcggcggtatcgcctcagctaaccgagctgccatgcgtggcgctaaagttctactcatcgaagcaaaacacgtcggcggcacctgcgtaaacgtgggctgcgtacccaaaaaagtcatgtggtatggtgcgcatatcgccgaagccatgaacctctacgccaaagattatggatttgatgtttcagtcaacaaattcgactggaacaccttagtgaacagccgcgaagcttatataggccgtattcacgaggcctacggtcgaggctttaccaataacaaggtcaccctgctgaatggctatggccgcttcgttaatggcaacaccattgaagtaaatggcgagcactacacggctgaccatatcctgatcgccactggcggcgcacccaccattccaaacattcctggtgcagaatacggtattgattcagatggtttcttcgccctacgcgaacaacctaaacgtgtcgcagtcgtcggtgccggctatatcgccgtcgaagtcgcgggcgttttacacgcactgggcagtgagactcacctgtttgtgcgtaaacatgcgccgctgcgtaacttcgatcctatgctaatcgacgccctagtcgatgccatgaagaccgaaggcccaaccctgcacaccaacagcgtcccacaatctgtggttaaaaatgctgacgacagcctgactctaaatctcgagaatggcgaaagcgtgaccgttgattgcctgatttgggccattggccgctcacccgcgacgggtaatatcggcttagaaaacaccgatgtgcaactggatagcaaaggctatgtgattaccgacgcacagcaaaataccacccacaaaggcatttattgcgtgggcgatattatggcgggcggtgtggagctgactcccgttgcggttaaagcgggtcgtttactctctgagcgcctattcaacggcatgagcgatgccaaaatggattacagccaaatcccaaccgtggtcttcagccatcctccgattggcactatgggcttaaccgagccagaagcccgcgcgcaatatggtgatgataatgtgaaggtttacacctcaggctttacctcaatgtataccgccgtcactagccaccgtcaggcctgtaaaatgaagctagtctgcgcgggtaaagaagagaaagtcgtgggtattcatggcattggttttggtatggatgagatcctccaaggatttggcgtcgccatgaaaatgggtgccaccaaagccgatttcgatgccgttgtcgccatccaccccactggggcagaggaatttgtgaccatgcgctaag

SEQ ID NO: 223422 - DNA, 1351 bp, Unknown
  Bacterial polypeptide expressing nucleotide sequence isolated from the Sargasso Sea
atgacacattttgattatatatgtattggcggtggcagcggtggtattgcatctgcaaaccgtgcagctaaacacggaaagaaggccgccatcattgaagcgaaagatattggcggtacttgcgtgaacgttggctgcgtgcctaaaaaagccatgtggtacggagcgcagatggctgaagccatacatcgctatgcacctgaatacgggttcgacctgtcggtaaatcactttagctgggacagcctaattgccagccgccaggcttatgttgagcgtattcatgcttcttacgaccgcgctcttactgcaaatgacgttaccttaattcgcggtttcgcgaagtttatcaataacaacacagtagaagtcaacggcgaaaagtatacggctgatcatattacgattgctgtaggcggccgcccaatcatcccagatattgaaggtgcgcagtacggtattgattctgatggtttctttgccttaaaagagcagccgaagcgcgctgtcgtggttggcgcaggctacattggagttgaattggccggcgttcttcacgcccttggcacagaatcgcatctggtagttcgcaaacacgctccacttagaaatttcgaccctattattcacgaaaccttagtggatatgatccacgctgaaggctgcaaattgcacaaccatgctagcgtagagaaagtggaaaaagctaaagatggcgagctatcagtacacttaaccaatggcgaagtgttaaaagctgactgcttgatttgggcgattggccgtaaaccctctaccgacaaaattgatattgaaaataccgacgttgaacttaatgacaacggcacggtgaaagtggataagtaccaaaacaccacggcaaagaatgtctacgcagttggtgatatcaccggtgaagcagagcttactccggtggcagttaaagcgggtcgcttgctaagcgaacgcttattcaacggccaaaaagacgctcacatggattactcgcttattccaaccgttgtgtttagtcatccacccattggcactattggcctaaccgagccagaagctattgaagaatacggtgaagacaacgttaaagtgtacacctctagttttgcgtctatgtacaccgcggtaacccgccaccgtcaaatgacaaagatgaagctggtatgcgcgggtaaagacgaaaaagtggtaggtcttcacggtattgggcacggcatggacgaaattctgcaaggcttcgccgttgccataaaaatgggggcgaccaaagctgactttgatgcgtgtgtagccattcaccctaccagtgcagaagagtttgttacgatgacctaga

SEQ ID NO: 223423 - DNA, 1351 bp, Unknown
  Bacterial polypeptide expressing nucleotide sequence isolated from the Sargasso Sea
aatggcacagcattttgactatatcgccatcggcggcggcagcggcggcatcgcctcggccaaccgggctgccatgtacggtaagaaagttgccctgattgaagccaaagagttgggtggaacctgcgtcaacgtcggctgcgtgccgaagaaggccatgtggtatgccggccagatcgccgatgccctgaaatatggcgccgactacggcttcgacaccaccctcaaccacttcaactgggccaagctggtcgagtcccgccaggcctacatcggccgcattcatcagtcctaccagaacgtgctgggcaagaaccagatcaccgtcatcaagggcttcgcccgcttcgtcagcagcaacaccatcgaagtgaatggcgagcagtacagcgccgatcacatcctgatcgccaccggcggccgcccagaagtgccggccatcccgggcgccgagctgggtatcgactccgacggcttcttcgagctgcagagccagcccaagcgggttgccgtggtaggggccggctatatcgcggtggaaatcgccggcgtgatgcaggcgctcggctccgagacccatctggtggtgcgcaaacacgcgccgctgcgcaacttcgaccccatgatccacgagactctggtcgaaatcatggcgcaggaagggcccaagctgcacacccacgccattccaaaagccgtggtcaagaacgccgatgagagcctgactctgcagctggaagatggtcgccacctcaccgtcgactgcctgatctgggccatcggccgcgtcccggccaccgacaacctcaatctggctgccgccggcatcgagttggacgagaagggctttatcccgaccgacaagttccagaacaccgccgtcgccaacgtctatgccgtcggtgacaacaccggccgcatccagctcaccccggtggctgtcgcggcgggccgccgcctctcggagcggctgttcaacaacaaacccaacgagcacctcaattacgatctggtgccgaccgtggtgttcagccacccgcccatcggcaccatcggcctgaccgaaccggaagccatcgccgaatacggtgaaggtcaggtcaaggtctaccgcagccagttcaccgccatgtactcggcgctgaccctgcatcgccagcccacccggatgaaactggtctgcgtcgggccggaagagaaggtggtcggcctgcacggcatcggctttgcgatggacgagatcctgcaaggcttcggcgtcgccatgaagatgggcgccaccaaggcggacttcgacaactgcgtcgccatccatccgaccagcgcggaagagtttgtgactatgcgctga

SEQ ID NO: 223424 - DNA, 988 bp, Unknown
  Bacterial polypeptide expressing nucleotide sequence isolated from the Sargasso Sea
tgagtttctatcacctgatgaggcttttgtaatgtcccatgaggttgtcaatgacaagcatataaaaataaattggacaattcatccaggttattatttatatatgggaatgtttgaatttgaatcacttgataaggataacctaatccaaaaagttgagatgcctgatggcaagaaaaaaactgatgaattctttggtgaagttgatatctattatttctcaacgagtgcagatatttatttgaaaaataacctctctgagtatcttgatcttaaaataaagtatcaaggctgcgcagatgcaggattatgctatccaccaatttttaagacaatcacagtaaaaaaaaagttaaggacatctagtctccaaaagacatcaatatttgatagtcaaactgctatgagtgaatcactcaacattaactctctgatctataacacttttattttttacttagctggattattgctagcgtttactccttgtgtcttgcccatggtccctattctcacaggaataattgctggacgtggaaatgtatctcaaagaaaatctctagcgctttcaatgatttatgttttaagtatgtcactgacatatgctgttgcgggcatcattgttgcaacatcaggaacaaatatacaggctagtttgcaaaatccttacgtaattagctttttatcctttttattttttatatttgcattggccatgttcaaattttttagtattcagatgcccaaattgatacaaaatatagctacaaaaataagcaataagcaaaaatctggcgatattaaggatgtcgcgactatgggtgtattgtctgcgctcatagtaggtccctgtgtaactgcaccattaattggtgcactgatatacattgctagtactggagatattctaattggaggcttagcacttttttttctaggtctgggaatgggtacaccattaatagctttgggttcaacaacaacaaaa

SEQ ID NO: 223425 - DNA, 968 bp, Unknown
  Bacterial polypeptide expressing nucleotide sequence isolated from the Sargasso Sea
aacattttctctttcatctatttttctatttttcttatttataagcaatgtacattctgatggtttattttcgtcaagtaaaaatacatttttaaatgtagatgaggcatttaaaatctctttaaaaacaaatgaaaaagaatctttatctataaaatttgatatcgcaaacggatattatttatataaagataaaataaaaatatcggttgataatgaagaaattacaaaaattttttttccaaaatcaaaaataaaagaagatgagttttttggaaaaagtgaaatatatgataaaaatatttctcttatcgtagaaaaaaataataaaagaggaacattattagaagttttatatcaaggttgtgcaaataaaggcttatgttatccaccgataaaaaaaacattttttttaggcgatgacgcaagaggagaatacataaaaacccaaaaaatttcagaatcagaatatatatatgacaaactcttatcaaataattatcttacaaacattattttattcttaggttttggcttgttactttcttttacaccatgtgttttgccaatggttcctatactctcagggttaataataaaatctaataatgtttcatcaaggaagccatttttgctctctatgtattatgttttaggactatgtctactgtacttattagttggtctttttatcggatattcaactaatatttataatattcaaagcgcatttcaagaaccactttacctagtaatcttttcatttatactaattcttttatcattttcaatgtttggattttatgagataaaaatttccaactcttttcaaaaatttattacagatattagtaataaaataaatataggcggatatagaggttcttttataatgggttttttatctgctttgatagtaggcccctgtgttgcccctcctttagcaggaatattcatatacattactt

SEQ ID NO: 223426 - DNA, 490 bp, Unknown
  Bacterial polypeptide expressing nucleotide sequence isolated from the Sargasso Sea
tatgggcagcgccgggcttacctatcaggcgggtatcaatactggtctttggggcgagcacgctgagatagtccactcgagccacccagagtttgttgtggcaagagatttgactgatttacgccataaaatagcggcagccaacggggaaggaaaaaccgtgatggtcgacttgtacgccgactggtgtgtggcgtgtaaagagtttgagaaatacaccttcccagacgaaaaagtggtttcagcgcttagcaatacggtatggatgcaaatggatcttaccgacaacacccctgagcggcaggagatttttgatacttttaacgtgctcggtcttcccactattttatttttcgacgcaaacggctatgaactgactaaagcccgggtgacaggttttatgaaagcagacgcttttgcccgtcacgtaaacgaatggcttaacgatgcacccgtaactcgtgacagcaagcatgagcccggtaactag

SEQ ID NO: 223427 - DNA, 662 bp, Unknown
  Bacterial polypeptide expressing nucleotide sequence isolated from the Sargasso Sea
gatgcttgccgtggccattgtgtttattgagcgtttatataatagcccagccactggcttcctatggggattgcttggcttcggtttattcggttactactgggtactcaatcgcgccagcaaaaactcactgatgaagcttgtacgtgctgttgtggtggcaataggcattatgggaagtgctggccttacttatcaagcagggctaaacacagggctttggggcgagcactctgatggtgtccacgcagggcatccagactttgttgttgcgcgagacttggcagacttacgtaataaaatagcggcggctaacacaaaaggtaaaaccgtgatggtcgatttgtacgccgactggtgcgtagcctgtaaggagttcgagaagtacacgttccctgacgagaaagtggtatctgcacttagcaatacggtatggatgcaaatggaccttaccgataacacaccagaacgtcaggagatttttgacacctttaccgtgctaggcctgcctaccattttgttctttgacgaaaacggcgacgagctaaccaacgctcgtgtcaccgggtttatgaaagcagacgcctttgccggtcacgtaaacgagtggcttaacaatgggtctaacactaatgacggtcaaagtggtcgcttggactaag

SEQ ID NO: 223428 - DNA, 1201 bp, Unknown
  Bacterial polypeptide expressing nucleotide sequence isolated from the Sargasso Sea
tatgtcccgcctcctgttgtgtctgcttcttctgctcaccttgccggccgacgctgggatattcgatctgtcgcgtgctcagtcggccctgttcggcacctcgctgaataacagccaggattttcttccggtagatcaggcctttcgccttgacttggtagaagccgacaaggacaacctccgtctgcgcttcgtaaacgccgatggctattacctctacaaacatcgtttcgccttcaccagcgaccatcctgacgtttcaatcggcacccctaaatggccagcggccgagcccaagaccgacgagtttttcggcgacgtcgaggtgttctatggcatcaccgatttgctgttgccgattgataaccctcgtgatatccccttcactttgcaggtgagctatcagggctgcgccgatctggggctgtgctatccaccggagatccgcaatatccagatcggtaatacacccgcaactgcagcccagcaacaagtcggcactgttgactggggcagtttggcgctgtttttcctggccggcttgggcctgaccttcactccctgcgtgttgccgatgctgccgattctgtctggcgtagtgttgcgcgggcaattcggcggactacgtggcctaagcctgtcgctcgcctatgtagtccccatggctgcctgcttcgccctgcttggtgcactgatgggtgtgttcggtgcgggcctcaacctgcaggcgcgcctgcaatcaccgtgggtgctggtgcccttcgcaatattcttcatggtgtttgccctggcgatgttcggcgcattcgagatgcgcatgccgcgctttatcgccgaacgattggatcatctggccagccgtgttcgcggcggttcccttttgggcgcagccacgctcggcgtgctgtccagcctgcttgtttcgccctgcgtgacagcaccgcttgtcggcgcactgctctacatcagcgccaccggcgacgccttgggcggcggtctgaagctgtttttcctgggcttgggcatgggcgcgccgttggtattgttcgccaccggtggcggagcattgctacccaagtccgggacctggatgctcggtgtgcgcaaggctttcggcgtgatgctgctggctgtctctgtttggctgctggaacgtgtgttacccgctccagtgactctggccttatggggccttttggcg

SEQ ID NO: 223429 - DNA, 1537 bp, Unknown
  Bacterial polypeptide expressing nucleotide sequence isolated from the Sargasso Sea
ttgatcgaggacggttactacttatacaagcaccgattcaaagtaactcccataaccaaagaagtgcgagttgaagagctaaatatcctgccgggattacgcaaagtagatgaatggttcggtgaggtggaagtttactattccactgcccagctcggttttaggttagatggcttacagagctctgaatccgttgaatttgagcttagctatcaggggtgcgcagaagctggtttgtgttatccgcccgttagtcagcgttacgtactatcaaatggtgaatttctagaagcatcaaaagaggttcgtggtcaagcgaatgtagagctagaaaaacgtgaggagcagaagttagcggatgccttgctaaaggagtccgttggttggagcctcttcctgttttttataggagggatagccctggcgtttacaccatgtgttttcccgatgatcccaatattatccagtattattgtcggacaggggtccgatttaccacgatacagggccttcgcgctttctgggtcgtatgttgcggggatggcaattacctacgcgataattggcactttggttggagtttttggcgcccaactgaacttgcaagccgcattgcaaacaactcccatactgctttttagcgcctcgttatttgtgattttgtcattggcgatgtttgggttttatgagctgcagttgcccgtaagctggcaaaacaaacttaatgaattaagcagtcttcaaagcggaggtaaatatgtatccgtctttataatgggagcgctttctagtttggttatttctccttgcatctcagctcctctagttggaggtcttttgtatatttcgcaaacccaagacgcgcttttggggggcttagcgcttctaagccttggttttggtatgggagtgccgctaatggtggtcggagttgtgggaggcgtctggtttcccagggcaggtgcttggatggatcaggtaaagggtctttttgggtttttgttgattggcgtcgcgatatggttgattgagcgtctcgttgaagattcagtggctatggttttgtggggtttattgctcattggtgccgccatttatttcggcgccttcgagttgcgagcaaggaaaccggtcgagaaggtagttcaatttgtgggagtggtcgtggctatctggggcggtgccatcttggttggcagtagtttgggtagctccagcatatttgatccactggaaggcttgagagtctccagcgcccctcagaatgcctccgagctggaagagaaaggctggcaaacggtgaaaactcttgaagaggtacaaaattttctagaacaaaatgataggccggtcattctcgatgtttacgctgattggtgtatttcctgcaagattatggagaaaaacgtattcaccgaatccagagttcgagaaggtttgcgggaatttgggttgctgagagtcgatgttacggccaacgatgagctagatagagagttgctctctcattttggattattcggcccgcctacgttag

SEQ ID NO: 223430 - DNA, 1226 bp, Unknown
  Bacterial polypeptide expressing nucleotide sequence isolated from the Sargasso Sea
tctgatatataacactctcattttttacttagctgggtgtttgttagcattcactccttgtgtcttacccatggtcccgatactcacagggataattgctggacgaggaaatgtttctcaaaaaaaatctctaacactctcaatagtttatgttctgagtatgtcgctaacttacgcttttgcgggtatcattgttgcaacatcagggacaaatatacaggcaagtttacaaaatccttacgtaattagctttttatcctttttgttttttatatttgcgttggctatgttcaaattttttagtattcagatgcccaaatcaatacaaaatttagctacaaaaataagcaataagcaaaaatctggagatattaaagatgtcgcgactatgggtgtattgtctgcgcttatagtgggtccctgtgtaactgcgccattaattggtgcgctggtatacattgcgagtacaggagatattctagttgggggcttagcgcttttttttctgggtattggtatgggtacaccattaattgctctaggttcaacaacaacaaaattaatatcaaaaattggtccctaccttgagcttgtgaattatttttttggcattctatttattattgtttctgtttggttgcttgaaagaattttgtcattggagacagcagcttatttatggactatctctgcagctctcctaatattagtgttatttaaatcgtccaagttaataaataatttatcatctaaaatcatcgtatcgatgttgtcagttctatcgattttttatattgggttacaaacatatggaatcataaataataattattatgaaccgataacaagctttatacaaaaagagcagaatattaaattcataacagtaaaaacaacagagagattattcgaagaaatcaataaaagtaatgagcctgttatggttgatttatacgcagattggtgtgtagcatgtaaagagttagaaaaatatacattcagtgacgagagagtcagcgagaaattaaacaaattaaaacttatcaaatttgacataacagaaacgactgaggaacactcgaaatatttacaaagtatgatggtctttgggcctcctgctttatttttcttcaatgaggatggtaatgaaattattgatgcgagaattgtaggcttcatgggcagcgaagacttcttaaaagtactcaaactagtaaaaaattgaa

SEQ ID NO: 223431 - DNA, 967 bp, Unknown
  Bacterial polypeptide expressing nucleotide sequence isolated from the Sargasso Sea
ctgtgcgggcttgtgatcggtgcagcctcaaccccactaggagcccaagacagcgaagacctgctcgaacctgaccaggcgtttgctttttctgcgcaggcaatctcgcccgaaaaaattgcggtgacctggaatatcgcgccggggtactacatgtatctcgacaaattcagttttgacagcgatcccgcggacatcacgatctcagacatcagctatccgccggcgcggaccaaacaggatgagtttttcggagacgtacagatactcgagcactcggccaaaatcgtcctgaacctttcccgcggcgcaccagattcaggactattacaactcaccgcgcgcggacagggctgtaacgagcctgttggcgtctgttacgcacccatcgcccacacggtcgcgctgactctgcccaagacgactgccgccaatagcagcgcgatcaatagcgtgacggatctgcagcaactgcttggggtagcggcctcgggacccgaatttctcgccgcggacgaggcttttcgcctcgaggccaggtccgacgggcgcgatacgctcattgcgcagtttttggtcgctccaggctattacctgtatcaggacaaactccgtttcgagatgctggccggggccacccttaaggaacacgccctcccgccaggggtccacaaacaggatccctatttcggtcaagtcaatatttttccggctgactttacggccgagctgcccatcgtggctgacgctggcgccaatgaggtgaggctcattgcccattttcagggctgtgccgagcagggtatctgctacccgccggcaaagaagaccctttctatctcgctccccaatatcatcagtgatgcggcggccagcgagaatccgaacctttccgcttcaggcgaagtagccgaggacaccggccccaccaaaaaagaaacagtgtcgacccaggttttggtgggct

SEQ ID NO: 223432 - DNA, 1264 bp, Unknown
  Bacterial polypeptide expressing nucleotide sequence isolated from the Sargasso Sea
ttatataaatattatttttttaaaagaaagtattccaaatcagttttttttagaatatcagggatgtgcaaaaaaaggcctttgctacccgccaaacaatttcgaaattaatttaaaaaacaaattgattgacacaagttctcaaaattcatttaaatctcaacaaatggaaatagctgagcaaattttaagtaaaaatatacttataacctcaatcttatttttgggtttcggaatattactcgcttttactccttgtgtcttaccaatggttccgattttatcaggaattttattaaaagatagaaagcgaggctctaaagagtcaattaaaatctcattacaatacgtatctggtctttgtcttgtttatctattgataggaatacttctgagtgtatataaacaatctattaatattcaatttatatttcaggatccagttattctaatagttttttcaataattttggtattactgtcactatcgatgtttggtgtttttaattttcaaatgcctagtatggtccaaaactggtccaataaaataagttcaaaattaaatacagaaaactcatttggaatattcatgatgggtgctttatcagcattaattgttggtccatgcataggcccacctttagctgggattttcatatatattactacaacaaatatcaatccatggtctccaccaattcttctattaatgctttctattggcatgagtatacctttggtaatttatagtgcttttataggaagaatcattccaaaggctggtaattggatgaaatacataaactacttctttggcatattacttattttagcagcactcattttacttgatagggtatataatttttatccatctaaaattagctctgaattagattttcaaaaagttgaaaatctgaatgaattaaaagcagaaatacataatcctaatgtaaatttcattatggtggatgtttatgctgattggtgtctagagtgcaaaagaatggaggctaccacttttaaaaataaacaggtcatagaagcccttaacaaaatacatttaattaaaatagatgttacagaaaataataagaatgatcaggaaatattaaattatttaaaaattattggccctccatcatatatgtttggtacatcagattttggtgttatgcatgaatttaatgtgcaaggatacatgggcaccgaggattttctaaaccatcttaaaatttttaatgaatttaatagtgataactaa

SEQ ID NO: 223433 - DNA, 892 bp, Unknown
  Bacterial polypeptide expressing nucleotide sequence isolated from the Sargasso Sea
catggctcaacgcatcattacgctgattctgctgctctgcagcacatccgctttcgccggcttatttgacgcccccgggcgttctgactttgttcccgcagaccaggcttttgcctttgatttccagcagagtcagcgggacctcaacctgacctggcaaatcaaagagggttactatctctaccgccagcagatcaaactgacgccggcgaatgccaccctcgccgcgccgacgctgccgcccggcacctggcatgaagatgagttttacggcaaaagtgagatttaccgccagcggctgaccatcccggtgacgctgagccaggcggaaaaaggggcaacgctcaccgtgacatatcagggctgcgccgacgcgggcttttgctatccgccggagacgaaagtggtgccgcttcgcacggtactggccgcctccggcagcgagtcggtccccgcccatccggcgctccccgcgtccggacaacccaaatttaatccgccgctgccggtggaaaagcgtcctgagctggcctcgcaacccgagcagtctgtccgacaagagaagagcgacgccggcgataatgcgccagccagcctgcccttctccgcgctatgggcgctgctgataggtatcggtatcgccttcacgccgtgcgtgctgccgatgtatccgctgatctcgggtattgtcctcggcggcaaacagcggctctctaccggacgagcgctgctgctggcgtttatctacgtgcaggggatggcgctgacctataccgcgctggggctggtggtcgccgccgccggtttgcagtttcaggcggcgttgcagcatccgtacgtactgattgccctgtctgcggtctttatcctgctggcgctgtcgatgtttggt

SEQ ID NO: 223434 - DNA, 124 bp, Unknown
  Bacterial polypeptide expressing nucleotide sequence isolated from the Sargasso Sea
atgagtcaaaatccaactaaacacacaaaagtgttaataattggatccggccctgccggatacactgcagcagtttatgctgctcgtgcaatgttaaatcccattttggtttatggatctgagc

SEQ ID NO: 223435 - DNA, 190 bp, Unknown
  Bacterial polypeptide expressing nucleotide sequence isolated from the Sargasso Sea
tatgagcaaaattgaaaataatgtattaataattggctctggtcctgcaggttatactgctgcaatttatgcagctcgtgcaaatttgaagccgcatttagtttctggtttagagccaggtggacagcttacaataacaacagatgttgagaatatcctggatttggagatgttatacaagggaccctgg

SEQ ID NO: 223436 - DNA, 109 bp, Unknown
  Bacterial polypeptide expressing nucleotide sequence isolated from the Sargasso Sea
atgagtgaaaaaccaactaaacatacaaaagtgttaataattggatctggtccagctggctacactgctgcagtttatgctgcaagagctatgctaaaaccaatgttgg

SEQ ID NO: 223437 - DNA, 250 bp, Unknown
  Bacterial polypeptide expressing nucleotide sequence isolated from the Sargasso Sea
tatggaaaataattcaaaaaaacattcgaaagtgctgattataggatctggtccagctggatatacagcagcaatttatacagctagagctatgcttaaaccaatattggtacatgggtctgagcctggtggacaaatgacaaccacaacagatgtccaaaattaccctggatactctgatgtaatacaaggtccatggctaatgaaccaaatgaaggaccaagccaaagcagttggaactaacatgatt

SEQ ID NO: 223438 - DNA, 391 bp, Unknown
  Bacterial polypeptide expressing nucleotide sequence isolated from the Sargasso Sea
aatgagtagcttgcattcacctctgataattttaggttctggaccagccggctatactgctgcactttatgcatcaagagcgaatctaaaaccaacgctaatcacaggattagaaattgggggccaactaacaacaactactgacgtagaaaattggcccggggatcatgataatcttcaaggtccaatactcatggatagaatgaaggcacatgttgaaaagttcaatactaatgtaattatagatcatatcaaggatgtaaagcttgacgtgcgaccgtttgtattaattggagatgatactgagtatacttgtgattctttaattattgctacaggtgccagcgctaaatatctaggcttagaatcagaaaaacaatatctggcaaag

SEQ ID NO: 223439 - DNA, 810 bp, Unknown
  Bacterial polypeptide expressing nucleotide sequence isolated from the Sargasso Sea
gaatgcccacagcgcgccgtacgcagagtttgccgttgcggctggcgaaattacgctctctgaggaaccggctattaagaccgaccctgatgaatggtggttactcggcaattcgaccccgcgaatcgaggtgccacttaaggtcaacggtagcgctcactttgcgattgatacacaaattgatggcatggtctatgcggctgtgaagagttgtccggtgccgtgggggcgcctggtaagttttgacttcgatcaagttagtgatcgcccaggggttattgcggtcgtcgagctcaaggccgtgccgggtaagacggcttattcggatatgcaaaacggtgtcgcgattgtcgctgacacttggtatcgcgccaagactgcgcttgatttgatgccgatcgagtgggatttcggttctgatgcccaagttagtaatgatactcaagcggagacggctcagcgtctttgggaggagaccggcgacgtcagcaacgaggtcggcggcgacacccttggcatgattgcggactccgatgctgtcgtcagtagtgagtaccaccgtccctatgagacgcacgctcgcatggagccgatcaatgcgacggtgagcatcactgacgaacgcatcgatgtatggtcgccgacgcaaaatcaagcgacgccgatcatgctcgtggccgatcaactcggtcgtgatccgcgcgatatctatgtcaacacagtatttctaggtggcgcgtttggtggcaacggtggaggtaatacggccgttacgcgtcaggctgctgagatcgcgagacaggtcgggcg

SEQ ID NO: 223440 - DNA, 178 bp, Unknown
  Bacterial polypeptide expressing nucleotide sequence isolated from the Sargasso Sea
atgcataatgtagcaattattggttctggacccgctggctatactgctggcatttacgcttcaagagcaagtttagagcctgtcctttttgagggcttagagtcaggtggtcaacttatgttaacaaccgatgtagagaattaccctgggtttgattcatggagtaatgggacctgac

SEQ ID NO: 223441 - DNA, 136 bp, Unknown
  Bacterial polypeptide expressing nucleotide sequence isolated from the Sargasso Sea
atgaatacaatcattataggaagtgggccagctggatatacagcggcaatttatgcagctagagctgatcttaaaccaataatatatactgggttagaacccaggtggccaattaaactactacaactgaagtaga

SEQ ID NO: 223442 - DNA, 256 bp, Unknown
  Bacterial polypeptide expressing nucleotide sequence isolated from the Sargasso Sea
atgaatcgaaaggttattattattgggtctggaccagctggtctaacagctgctctatatactgcgcgcgctaatttaaagcccttagttttcgaaggaagtcagcctggaggccaattaactataacaacagatgttgaaaattttccaggatttcctgaaggaattatgggtcctgagttaatgaatctttttcgtaaacaagctgaaagatttggcgctgaatgctattttgagcatgttactaaggtagatt

SEQ ID NO: 223443 - DNA, 463 bp, Unknown
  Bacterial polypeptide expressing nucleotide sequence isolated from the Sargasso Sea
atggaggacgccctctatctgacaaagttcgccaaggaagtggtaatcattcatcggcgagacgagctgcgagcgtcgaagatcatggcggagcgcgctatggagagcgagaagatcaccttcgcctggaacaccgttgtcaccgaagtgctcggtgacgacgtcatcaccggtcttcagcttaaggacgtgcactcgggtgaccagcgggaactcgaagtcgggggactattcgttgcgataggccactcgcccaacacgggattcctgaagggcgtggtcgaactgaaggacaatggctacgtagatactccgatcccttggcgtacacagacctcggtgcccggaatcttcgcggccggtgacgtgatggacgactactatcgacaggccgtcaccgcggccggcactggatgcatggctgctctggaggccgagcgatggttggctcacgggggatgag

SEQ ID NO: 223444 - DNA, 379 bp, Unknown
  Bacterial polypeptide expressing nucleotide sequence isolated from the Sargasso Sea
atgtccatcacccaacacgcgaaagttctgatcctcggctctggccctgccggctacaccgccgccgtttacgctgcgcgtgccaacctgaaccccgtgctgatcaccggcatggcgcagggcgggcagctgatgaccaccaccgaagtggataactggcccgctgacgtgcacggcgtgcaaggcccggacctgatgcagcgctttctggagcacgccgagcgcttcaatacccagatcatcttcgaccacatcaacaaggtcgatttcagcaagcgccccttcaccctcacaggcgacagcggcacctacacctgcgactccctgatcatcgccaccggcgcatcggccaagtatctgggcctgccctcggaagaag

SEQ ID NO: 223445 - DNA, 460 bp, Unknown
  Bacterial polypeptide expressing nucleotide sequence isolated from the Sargasso Sea
tatgagtgctaacaaagaaaatattcttataattggttcaggatcagcaggtttaactgcagctatttacgcatcaagagcaggtttcaagcctttagttttaactggtattcaaccaggtgggcaattaacaataacaactgatgttgaaaattatcctggctatgaagatgttattcaaggcccttggttaatggaacaaatgcaaaaacaagcagaaaatgttggtgctaggattgagttcgatttaatgacaaacattgatactgaaaactggccatttaatgtaattactgattctggaaaggaaatagaagctgaaacaataattatagctacaggagctcaagcaagatggcttggtcttggaagtgaagaaaatataatggaaagggtgtatcagcttgtgcaacatgtgatggtttctttttttaaaataaaaacgttgctgttattggtg

SEQ ID NO: 223446 - DNA, 156 bp, Unknown
  Bacterial polypeptide expressing nucleotide sequence isolated from the Sargasso Sea
catgggagacacgcattacaaagttatcattattgggtctggaccggcaggtcatgcagctgcaatatacactagtagagcacagctaaacccaattatgtttgaaggagaaatggcaggcggcgttgcagcagggggccaacttacaacaacaac

SEQ ID NO: 223447 - DNA, 595 bp, Unknown
  Bacterial polypeptide expressing nucleotide sequence isolated from the Sargasso Sea
agatggctgggaattaaaagtgaagaaaaatttaaaggatatggtatttctttttgtgcaacttgtgatggattttttttcaaagatcaaaaagtagctgtcattggaggaggtaatagcgctgtagaagaggcattatatctaaccaattttgcttcgaaagtaactttgattcatagaagagatgaattaagggcggaaaaaatcttacaagatagactttttaaacatccgaaaataaatataatttggaataaaactgttgaagaattcattgggaatgaagaaaaaccatcgctagaaactttagttttaaaggatactaaagatagttcagaatcaaaattgagtgtaaatggagcctttgttgctattggtcatgatccttcaacttcattatttgttaataaagttaaaatggacaaagataattatattattacaaaaccagatagtaccgaaacaagtatttcaggagtttatgcagctggtgatgttaaagataaaatttacagacaagcagtcactgctgcaggaatgggttgtatggcggctttagaggctgagaaatttatagctaataaaaaaaactagc

SEQ ID NO: 223448 - DNA, 259 bp, Unknown
  Bacterial polypeptide expressing nucleotide sequence isolated from the Sargasso Sea
tgagttagaagtagcaggtattttctatgctataggccatactcctaataccggtatttttaatggtcaattagatcttgataattcaggttatattaaaattaaaccaggaactcaggagactagtatagaaggtgttttcgccgctggagatgtacacgatcacaaataccgtcaggccattactgctgctggtaccgggtgcgctgctgctctcgaagccgaaagatggctggctgaaaagggtttgtgtgaataa

SEQ ID NO: 223449 - DNA, 751 bp, Unknown
  Bacterial polypeptide expressing nucleotide sequence isolated from the Sargasso Sea
catggatcaattgcgcaagcaggctctcaagttcggagcaagagtggagaatgcgtatgttgacaaggtcgaattcggagattccgtgaacaccctttttgcgggggaacgaatgttcgaggccaagacagtcataatcgccacgggagccgctcccaggcttctcggaattcccggagagatggaaatgttcggaggcaaaggggtaacgacctgcgcgacctgcgacggggcgttttatcgggacatggaagtcgttgtcgtaggcgggggcgattcagcatgcgaggaagcgctgttcctgacccgtttttgctcaaaggtaacccttgtccaccgcagagacgagctgcgcgcctcgaaaatcatggcggaaagaacccttgcccatgagaagatcaccccgctttggaactcagccgtcaaggaggtcctgcccgacgaagacggaaaggccagagccatttgcgttgaaaatctcaagtcgggagaaagtgctgaagtcccgtgcaagggagtcttcatcgcaatagggcacgttcccaatacaagtgcattcgaagggattattccgcttgatgaaaatggttatttccttcccgagcagggtagcatggtcaggacgtccgttcccggtgtcttcgttgccggagattgcgcagaccatgtctatcgtcaggcaattaccgcagctgggatgggatgccaagccgctatcgaggcggagcgctggctggcggaaagcaaataa

SEQ ID NO: 223450 - DNA, 654 bp, Unknown
  Bacterial polypeptide expressing nucleotide sequence isolated from the Sargasso Sea
gatggtacatcgccgtgattttatagctggaagtggggctgcatttggtacagccctcttgtgtcctgaagccgttctcgaagctgaagagcttggtcgagctcggaccgtttcagtatttcatacaacagaccttcacggtcacattgagccgacacgtacgtatgaaggtcttgatgatgttggtgggcttgctcgttgtatgagttgtattcgtgaatggcgacgcatgtccccttattctctcactgttgatgttggtgatcttgttcagggcactgctgtgagtgcctggagtgatggtcagttgatgatgaagttgcttaatcgaattggttatgatgcgtggacacttggaaatcatgactttgattgggggctggaatcactcgaaaacattcttcagctctctcaaccccctgttctcacagctaatcttgatcggagcagtcttcctgtggggtcgcttgaaggcgcatggaaaaatgtcagtccatgggccattcgtgaggttgggggatttcgcattggtcttatcggtctcattacacctggcctgcagtcatggttgccgccagaggtgttgggtggtgttttgccaactgatccggtaggagcgatctctgcagctcttcaagaactgaagaatgaaaa

SEQ ID NO: 223451 - DNA, 121 bp, Unknown
  Bacterial polypeptide expressing nucleotide sequence isolated from the Sargasso Sea
tatgagtcaaaatccaactaaacacacaaaagtgttaataattggatccggccctgctggatacaccgcagctgtttatgcggcaagagcaatgttaaatccaattttagtttatggatct

SEQ ID NO: 223452 - DNA, 475 bp, Unknown
  Bacterial polypeptide expressing nucleotide sequence isolated from the Sargasso Sea
ggtatgctgctgtagaggaagctatgtttttacaaaatttgcaacaaaagttaaattgattcacagaagagataaattgagagcagaaaaaatgcttcaagaaaaattaaaagctaacaaaaaaattgaagttatttgggatagcgttgtagaggatgttttaggaacaattgagcctaaaggagttaatgctattaagattaaaaatgttaaagataataaaattaaagagttgaaagttgatggattatttattgctataggtcacgatcctgctacacaattatttaaagatcagttaaaaatggataaagaaggttacttaattacaaaaccagattctacaatcacaaatatacctggagtatttgcggctggcgatgtgaaagataaaatttttagacaagctgtaactgctgccggaatgggctgtatggcagcacttgaagcagaaaaacatttatctgataaataa

SEQ ID NO: 223453 - DNA, 580 bp, Unknown
  Bacterial polypeptide expressing nucleotide sequence isolated from the Sargasso Sea
gttaaatataaaatcagaacaggaatttagagggtttggagtttctgcttgtgcaacttgtgacggtttcttttttaaaaataaagaagttgctgtagttggaggaggtaatgcagcggttgaagaggcaatgttccttacaaagtttgcatctaaagtgaaattaatccacagaagagatagtttaagagctgaaaaaatgcttcaaaaaaaattaatggaaaataaaaaaattgaaataatttgggactctgtagttgaagatgtgttaggtgataaagatcctaaaaatgtcaaaggaataaagattaaaaatgttaaaacaaataaaatacaagaattgaaacttgatggcgtattcattgctatcggtcatgatccagctactcaactttttaaagatcaattaaaaatggataatgagggatatttaattactaaacccgactcaacagaaactaatgttcctggtgtttacgcagctggagatgtaaaagacaaaacatttagacaagctgtaaccgctgccggtatgggatgtatggctgcacttgaagcagaaaaatttttatctcactaa

SEQ ID NO: 223454 - DNA, 125 bp, Unknown
  Bacterial polypeptide expressing nucleotide sequence isolated from the Sargasso Sea
tatgaataataaatcatctaaacatacaaaagtgttaattcttggatctggtccagcaggctatacagcggcaatatatgcgtcaagagccatgttaaagcccattttagtttatggttcacaac

SEQ ID NO: 223455 - DNA, 154 bp, Unknown
  Bacterial polypeptide expressing nucleotide sequence isolated from the Sargasso Sea
atgaaaaaaaatattgaaacagatttgcttataataggttctggtccagctggatatacagcagctatctatgctgcaagagctaatttaaaacctcatttagtaacaggactagatgcaggtggccaacttacaataacgacagatgttgaaa

SEQ ID NO: 223456 - DNA, 910 bp, Unknown
  Bacterial polypeptide expressing nucleotide sequence isolated from the Sargasso Sea
gccaataaacaggactgcaacctctgcctagtgcaaatcgaaaataccgatgccagcctgcgctgcgttaaagcctgtgaaacgcccgccgaacagggcttaaaagtcatcacccaatcggcatatttaactaaacagcgccaagccgcactgagcacgattttaagtgaccactttgccgattgtgaggcgccctgccaacaggcctgccccgcgggcgtggatgtgcaaagttacctgtaccacattgcccaaggtgaccatacccaagccattaaagtcattaaagacactctgccgctaccgctgtcgattggccgagtctgccccgcgttttgcgagagcgaatgccgccgcggcctcgtcgatgaccccattgccattcgtcaacttaagcgccacgccgccgatttagacttggccgacgatgaacaaggcaatagctatcagccgccgcgtctcgcagataccggcaagaaaattgccattattggcgcgggccccgcaggcttaagcgcgggttattacctgtcaaaccaagggcataatgttgagatatttgaagccatgcccaaggcgggcggctggctgcgctacgggatccccgaataccgtttacctaaggcgattctcgataaagaaatcgagctgctgtgccgcaatgggttaaccattcataccgatactcgcctcggccatgaaattcatttagcccagctggtcaccgatttcgacgctgtgtgcctcgccatcggcgcccaaaaagcggtaccgatgaactacaaaggctcagcgcttgcgggctgttaccttggggtggattttcttaaggatcattgcctcgacaaacaattgaagttgggcaaaaaagtcgcggtcattggcggcggcaacaccgccatcgactgcg

SEQ ID NO: 223457 - DNA, 790 bp, Unknown
  Bacterial polypeptide expressing nucleotide sequence isolated from the Sargasso Sea
gactccgcctgcgaagaagcgtttatctcaccaaatacggcagtcacgttcaccagatcgtgcgctccgagcaactcagggccagcgccgccatggccgaccgggttcgggccaaccccgcccatcacccttcactggaacagcgaagtggtggacgtgagcggcaacggctggatggagaacctgaccctgcgcgaccgttccaccggagatcaggccagccttgctgccaagggcctgttctatgcgatcggccacacaccgaacacggatctgctgaaggagcagctgtctctggatgccaaggggtatgtgatcaccgagccaggccgaccggaaacctccatcgaaggtgtcttcgctgccggagatgtcgctgatgccgaatggcggcagggcatcacagcagccggcagcggttgcaaggcggccctggccgctgagcgctggctgacccatcacgatctggcgcaacgggtgcagagacgctcggttgaccccgcgaaggcggagatgccggtgaatgtggccgtcacgaccgaggagacctatgccccggatgctccctggcagaaaggcagctatgccctgcgcaagctgtatcacgacagcagccgcccgctgcttgtgatctacacctcaccctcgtgcggaccctgccacgtgctcaaaccgcagttgaagcgggtgatcaccgagctggaaggccgggcccaggccgtggtgatcgacatcgaggccgatcaggacattgctgaacaggccggcgtgaacggaaccccgacagtcc

SEQ ID NO: 223458 - DNA, 613 bp, Unknown
  Bacterial polypeptide expressing nucleotide sequence isolated from the Sargasso Sea
atttcgacaggtgctcaagcaaggtggttaggtctagagtctgaaaaaaaatttcaaggatatggagtttctgcttgcgctacatgtgatggctttttctttaaagaaaaaaaagttgctgttattggcggtggtaattcagctgtagaagaagccttgtatttaactaattttgcatcgacagtttatttaatacaccgaagagatgaattaagagctgaaaaaatacttcaagacagactttttaataatgaaaaaattaaatgtatttgggaccatcaactgcaagatattctaggtgatgaaaatcctctcaatgtaaaaggaataaaagtcaaaaatgtaaaaactaacgagatacaagatattgaattagacggagtatttatagcaataggacatgatcctgctacacaaatcttcagagatcaagttgagatggacaatgaaggctacattattacaaaacctgactcaactctaacaaatgttaatggtgtttacgccgctggtgatgtaaaggataaaacttaccgtcaagctgtgaccgcggctggcatgggatgcatggctgcgcttgaggcagaaaagtttctagcagaaaaatcttaaa

SEQ ID NO: 223459 - DNA, 457 bp, Unknown
  Bacterial polypeptide expressing nucleotide sequence isolated from the Sargasso Sea
ctttatttggcaaatatgtgtaaaagtgtcacactaattcacaggcgtgatgaattacgaggtagcaaaatcatgcagaaacgcacactcgatcatgaaaaaatttcgattttatgggatacaattgtcgaagaagtattaggcaactcagaagaaggaatgacttcacttaaagttaggaatgtaaaaactgatgaagtttcagaacatccatttacaggattgttcgttgcaattggacatactccgaatactagtttattcaaagaacaactagaacttgatgtaaatgggtatattcaagtgactcccggtactacttttacatcggtagaaggggtttttgcatccggagatgtacaagatcatgtttatcggcaggcaattacagctgccggtacgggatgcatggcggcaatagacgctgaacgttggcttgcagagcatttcggttaaa

SEQ ID NO: 223460 - DNA, 667 bp, Unknown
  Bacterial polypeptide expressing nucleotide sequence isolated from the Sargasso Sea
gaaatcaacataaaaggtcttttttacgcaatagggcacacacctaatacgaatttcttaggtaacaaagttgatttagataataaaggctatattgcttgcaaatcaggaaggccagaaacatctattgaaggcatcttcgcagcaggtgatgttgttgattctgagtggagacaaggagttaccgctgcaggaactggatgcatggcagcattagctactgaaagatggttagccgagaaaaacttagcaaaaactatagtcagagagactcccgaacctgaaaaaaaacttaattcatcagattttaatgaagaagaagttaatgaagatactttcgattcaaactccgaatggcaaaaaggcagttatgcattaaggagactttatcatgagagtaaaaaaccaatcttagtaatttttagttccccaagctgcggcccatgtcatgttttgaaacctcagttaaaaagagtaattaaagaacttgatggtgcagttcttggcgttgaaatagatattgataaagatcaagatattgctaaacaagctggtattaacggcacaccaacagttcaactttttaaggaaaaattattaaaaaaacaatggcaaggcgttaaacaaagaagtgaatttaaagaagctataaaaaatattatctgaa

SEQ ID NO: 223461 - DNA, 115 bp, Unknown
  Bacterial polypeptide expressing nucleotide sequence isolated from the Sargasso Sea
tatgaaaaataattctaaaaagcattcaaaggtgttgattataggatctggccccgctggatacactgctgcaatttatacggccagagcaatgctaaaaccaattctagtttag

SEQ ID NO: 223462 - DNA, 597 bp, Unknown
  Bacterial polypeptide expressing nucleotide sequence isolated from the Sargasso Sea
aatgactacaacatttgttgaaaattatccaggttttccagatggtgtacttggtcctgaattaatggatctaatgaaagctcaagccgaaagatggggtactaatttatacgaaagtgatgttgtctcaataaatactgattcacatccctttgaattaaaaactttagaaggaactataaaatctaactcaattattattgcaactggagcaagtgcaaatagattaggcgtgataaatgaagataaattctggagtaaaggaataagtgcgtgtgcaatatgtgatggagcaaccccacaatttagaggtgaagaattagctgttattggagggggtgactctgcatgtgaagaagcagcatatctcacaaagtatggaagcaaagtgcatttgattgttagatcagaaaaattaagggctagcgcagcaatggtagatagagtaaaagctaatccaaagatagaaattcattggaacacaaaagttaataaagcggatggctctgaatggcttgagaaaatagaaactattcaccctctagaaggtaaaggggaaattaatataaaaggtcttttttacgcgatagggcacac

SEQ ID NO: 223463 - DNA, 127 bp, Unknown
  Bacterial polypeptide expressing nucleotide sequence isolated from the Sargasso Sea
atgagtcaaaatccaactaaacacacaaaagtgttaataattggatccggtccagctggttacacagctgcagtttatgcagctcgtgcaatgttaaacccaattttggtttatggatctgaacctg

SEQ ID NO: 223464 - DNA, 232 bp, Unknown
  Bacterial polypeptide expressing nucleotide sequence isolated from the Sargasso Sea
gatgaagagaaaagttattattataggttctggtcctgcaggtttaaccgcagcaatttatgctgctcgtgcaaatcttgaacccttggtttttgaaggggttcaacctggagggcagttaacaatcactactgatgtggaaaattatccaggatttccagatggaatcatgggtcctgaattgatggataatttcagaaaaacagctcaaagatttggagctgaaactcac

SEQ ID NO: 223465 - DNA, 601 bp, Unknown
  Bacterial polypeptide expressing nucleotide sequence isolated from the Sargasso Sea
actgggtgcatctgcacgcttgctaggtctagagtctgagaccagattaatgggacatggtgtgtcagcatgcgcaacctgcgatgggttctttttcaaagataaaaaagtcttggttgtcggtggaggagattcagctatggaagaagctacttttttgacaaagtttgcctctgaggttgtcatcatacaccgtagaaaggaatttcgtgcatcaaaaatcatggtagagagagcagtctcaaaccctaaaatatcattcagatacaatcaaaccattgatgaaattattggtacaaaagatacaggcgttcagtctgttaatctcaaggatacactaacaaatgagataacaaacgaagtatgcgatggtatttttatggctatagggcatgttccgaatacatcactttttaaagacatgattaatcttgatggatcaggatatattattacaaatccagactcgacacatacaaacctcgatggggtttttgcttgtggggatgtacaggatcacgtatacaggcaagctgtaacagctgctggttcaggctgtatggctgctattgatgcagaaagatggttggagcagcaataa

SEQ ID NO: 223466 - DNA, 151 bp, Unknown
  Bacterial polypeptide expressing nucleotide sequence isolated from the Sargasso Sea
tatgaaaaataattctaaaaaacattcgaaagtgttgattataggatctggtcctgctggatatacagcagcaatttatacagctagagcaatgcttaaaccaattctagtttatggtgctgagcccaggtggacaaatgacaacaacaac

SEQ ID NO: 223467 - DNA, 371 bp, Unknown
  Bacterial polypeptide expressing nucleotide sequence isolated from the Sargasso Sea
aatgaataataagtctactaaacatacaaaagtgttaattcttggatccggcccagccggatatactgctgcaatttatgcagctagggctatgcttaagccaatattagtgtttggctctgaacctggcgggcaattgaccacaactactgatgttgaaaactttccaggttattcaaaagtaattcaagggccttggttaatggaagagatgaagggacaggctaaagctgtaggtaccgagatgattcaagatcatataagtaaagtagatctttccaaaaaaccttttgaggctgtgggtgatagcggtcagcggtatacagctgatagttttattatatcaaaccggggctcaggcacggtggtta

SEQ ID NO: 223468 - DNA, 124 bp, Unknown
  Bacterial polypeptide expressing nucleotide sequence isolated from the Sargasso Sea
atgagtcaaaatccaactaaacacacaaaagtgttaataattggatccggtcctgctggatatactgctgcagtttatgcggcaagagcaatgttaagtcctatattagtttatggatcagcac

SEQ ID NO: 223469 - DNA, 319 bp, Unknown
  Bacterial polypeptide expressing nucleotide sequence isolated from the Sargasso Sea
atgtctaaacattcaaaagttttaatattaggatcgggaccagctggatatacagcggcaatttatgctgcaagggctatgttaaagccgatacttgtttttggttcagagcctggtggccaattaaccaccacaactgatgtagaaaattttcctggatattctaaagttatacaaggaccatggttaatggaagaaatgaaaggtcaagcaaaggctgttggcacagaaatgatacaagatcatatcaaaaaagttgatttatcaaaaaaaccctttgaagcagttggggatagcgggcaaatgtatacagctgaca

SEQ ID NO: 223470 - DNA, 708 bp, Unknown
  Bacterial polypeptide expressing nucleotide sequence isolated from the Sargasso Sea
ttgagaacatagaaactaggcactctcaagagggtaagggggaaatcaatattaaaggtcttttttatgcaataggacatacacctaatacaaattttttaggaaacaaaattgatttagataataaaggatatatcgcttgcaaatcaggccgcccagagacatctattgaaggaattttcgcagcaggtgacgttgttgattcagagtggagacaaggagttactgctgcaggaacaggctgcatggcagcattagctactgaaaggtggctagccgagaaaaacttagcaaaaactatagccagagaaacacccgaaccagaaaaaaaacttaattcctctgattttaatgaagacgaagttaatgaagctaccttcgattcaaactctgaatggcaaaaaggaagttatgcattaagaaagctttatcacgagagtaaaaaacctctcttagtaatttttagttccccgagctgcggcccatgtcatgtcttgaaacctcaattaaaaagggtaattaaagaacttgatggtgcagtgctaggcgttgaaatagatattgataaagatcaagatattgcaaaacaagctggtataaatggcacaccaactgttcaactttttaaagaaaaactattaaaaaaacaatggcaaggcgtcaaacaaagaagtgtgtttaaagaagcgataaaaaatattatctgaa

SEQ ID NO: 223471 - DNA, 703 bp, Unknown
  Bacterial polypeptide expressing nucleotide sequence isolated from the Sargasso Sea
atgattgatacagatgttttaattgttggcgcaggtcctactggattgttttgtgcacatcaattagggattataggtcttaaatgtgaaatagttgacaatttagataaattaggaggtcagtgcattgaactttatcctgataaacctatctatgatatacctgcaattccagaatgtaccggagaggaacttacaaataatttaattgaacaaattaaaccatttaaatttaaatctcatttaagtgacagagtacaagaaataaaaaatgaaaataataaatgggttgttaaaacactaaaaggaaaagaatttttaactccaaatatagttattgcaggtggagtaggttcttttgaaccaagaaaatttcctacaaaaaattgtgaaaaatatgagggaaaaactgtcttatattcaataaaagacaagaatatttttaaagataaaaaagttgttatttttggaggtggagatagcgcattagattgggcaatagaactttcaaagaattcttcagtaactttagtacatagaagagatgagtttagaggagcaccatctagtgtagaaaaaataaaagaattagaaaaagataaaatgattgaagttttaacacaatattcaattaaagatgtattaggcaatgaaaaccttgaaacagttgaaataaaaaatgaacaaggcgaaattaagaaaa

SEQ ID NO: 223472 - DNA, 197 bp, Unknown
  Bacterial polypeptide expressing nucleotide sequence isolated from the Sargasso Sea
tatggaacagcaattaataattctaggttcaggtccagcaggttacacggcagctgtttatgctgctagagctaatttaaaaccgttattaataacaggtctagaagttgggggacagctaacaactactacagaagtagagaattggcctggagattttgaagacttacagggccctgatctttatggttcgcatg

SEQ ID NO: 223473 - DNA, 614 bp, Unknown
  Bacterial polypeptide expressing nucleotide sequence isolated from the Sargasso Sea
tgaagagtttatgcataatggcgtcgagtacgctgtgcgcgaccccgagatgtttcgtgggagaaaggtcatgattgttggaggtggcgacactgcgctcgatttcgtgatcatgctaaaagacgttgccgactcgctgactttggtgcaccgccgtgatgggtggagggcgcatgaggcgacggttgcactagtggagaaggctgctgaggctgaagagattgatctccgaaccttttacgaggtgcgtgcgattcacggggccaactcggttgaacgagtaacaattttcgacaaccggactgacaaagacacgacgcttgagtgcgatgcagtattgtcatgcgttggattcaaacccgatctaggcccaattaagtcttgggggctgaaggtcgagaagaatcgcattcttgtggatgcgcttatggccaccagcgtttcgggcgtatttgcagcgggcgatgttgtagactacgaggggaagttggacctcatcgctaccgggtttgctgaggcggccgttgccgtgaacaatgcggtgcaccatgtcgatcctacggcacgggttaatcccggtcactcaacgaacatgaaagtctttaaggaatagt

SEQ ID NO: 223474 - DNA, 259 bp, Unknown
  Bacterial polypeptide expressing nucleotide sequence isolated from the Sargasso Sea
atgaccgacaacggcacgccccaacacgaaaaggttgtcatcattggctccggtccagctggctggaccgcggcgatctatgccgcccgagctgagatgaatccgttcgtgatcgagggaaacatcagccgcacgatgattccgggaggtcaactcatgttcacgactgaggtcgagaattacccgggtttcaaagacggtgtcgacggtcagtcccttatgttggagatgaaagctcaggcactccgttcgacacccg

SEQ ID NO: 223475 - DNA, 595 bp, Unknown
  Bacterial polypeptide expressing nucleotide sequence isolated from the Sargasso Sea
ggcacaagctagatggttaaatctgaaatctgaacaggaatttagaggatttggtgtttctgcgtgcgctacgtgtgatggttttttctttaaggataaagaggtagcagttgttggaggaggtaatgcagctgttgaagaagcaatgttccttacaaagtttgcatccaaagtaaaattaattcatagaagagatagtttgagagctgaaaaaatgcttcaaaaaaaattaatggaaaataaaaaaatagaaataatttgggattcagtagttgaagacgtaattggtgataaagatcctaaaaatgttaaaggtttaaaaattaaaaatgtaaaaacaaataatgtagaagaattaaaactagatggtgttttcattgcaattggtcacgatcctgcaactaaactttttaaagatcagttggaaatggacaatgagggttatttagttactaaaccagattctacagagacaaatgttcctggtgtttatgcagctggagatgtaaaagacaaaacatttagacaagctgtaaccgctgcaggtatggggtgtatggctgcacttgaggcagaaaaatttttatctcactaa

SEQ ID NO: 223476 - DNA, 172 bp, Unknown
  Bacterial polypeptide expressing nucleotide sequence isolated from the Sargasso Sea
tatgacacaaaatccaactaaacatacaaaagtgttaataattggatcaggaccagctggatacactgctgcagtttatgcggcaagagccatgttaaaacctattttagttcatggaattcagcccaggtggacaattaacaactacaacagatgtggaaaattacccagg

SEQ ID NO: 223477 - DNA, 275 bp, Unknown
  Bacterial polypeptide expressing nucleotide sequence isolated from the Sargasso Sea
aatgaataacttacattcatctttaataattctagggtctggtccagctggctacactgctgcactctatgcatcaagagcaaatctaaaaccaacgcttatcacaggattagaaattggaggtcagctgacaacaactactgatgtagaaaattggcctggggattacgataatctccaaggaccaatacttatggatagaatgaaagcacatgttgaaaagttcaatactaagataatcatggatcacattaaggatgtgaagcttgatgtac

SEQ ID NO: 223478 - DNA, 736 bp, Unknown
  Bacterial polypeptide expressing nucleotide sequence isolated from the Sargasso Sea
agagcaagcaagtaaagttggaacaacaattcatagtgatatagttacttttgtagatttttctacttcacctttaatatcaaaaacagattcaggtataacttttgaaagtaaaactattattatttctacaggtgcacaagctagatggttggaaatagatagtgaaaaaaaattcaaaggatatggaatttcagcatgcgcaacttgtgatggtttcttttttaaaaataaagaagtagctgttataggtggaggtaatagcgctgttgaagaggcattatacttaacaaattttgcctctaaagtaactttaatacacagaagagattccttgcgcgctgaaaaaatacttcaagacagattatttaagaataaaaaaattaatatactttggaataaaactgtaaaagaatttaaaggctcaatcaatccactaggtctagagcaaataataattgtagatactaaaaataaatctgaatcttctttaaaagttaatggcgcttttattgctatagggcatgatccttctacatcactttttattaataaaatcaaaatggatgatgaaaattacattattactaaaccagacagcactgaaacaaatattcctggtgtatatgcagctggggatgttaaagataaaatttatagacaagctgtaactgcagcaggaatgggctgtatggctgctctagaagctgaaaaatttatagctgaaaacttttaa

SEQ ID NO: 223479 - DNA, 116 bp, Unknown
  Bacterial polypeptide expressing nucleotide sequence isolated from the Sargasso Sea
tatgagtcaaaatccaactaaacacacaaaagtgttaataattggatccggtccggctggatatacagctgcagtttatgctgcaagagcaatgcttagccctattttagtttatg

SEQ ID NO: 223480 - DNA, 208 bp, Unknown
  Bacterial polypeptide expressing nucleotide sequence isolated from the Sargasso Sea
ctgcaggttatacagtctgcaatatatgcagcaagggcaaatcttcaacctcttttagtgacaggatttaattcgggtggaattccaggtgggcaattaatgactacaacatttgtagaaaattaccctggttttccagatggagtattagggcatgaattgatggacctaatgaaggcccaagcagaaagatggggtgcaaatttat

SEQ ID NO: 223481 - DNA, 376 bp, Unknown
  Bacterial polypeptide expressing nucleotide sequence isolated from the Sargasso Sea
atggaaactataaaaagaaagcttgtaatattaggttcaggtccagccggatatacagcagccgtttatgctgcaagagcggggttagagccttgtttggttactggtatggaacaaggaggtcagttgacaaccactactgacgtagagaattggccaggtgatagcgacggtctacaaggtcctgagctgatggatagaatgttaaaacatgtagaatctttagaagttgaagtgatatttgatcacattgaatctgcaaacttatcggggccttttgctcttatgggtaatgtaaataattatgatgcagagtcattgatcattgcaacaggagcttcagctcaatatctaggacttgaaagtgagcagaatt

SEQ ID NO: 223482 - DNA, 634 bp, Unknown
  Bacterial polypeptide expressing nucleotide sequence isolated from the Sargasso Sea
ttatactgccgactcagtaatcatttcaacaggtgctcaagcaaggtggtttggtctagagtctgaaaaaaaatttcaaggatatggagtttctgcttgcgctacatgtgatggctttttctttaaagaaaaaaaagttgccgttattggcggaggcaattcagctgtagaagaagccttgtatttaactaattttgcatcgacagtttatttaatacaccgaagagatgaattgagagctgaaaaaatacttcaagatagactttttaataatgaaaaaattaaatgtatttgggaccatcaactgcaggatattctaggtgatgaagatcctcttaatgtaaaaggtattaaagtcaaaaatgtaaaaactaacgaggttcaggatattgaattagacggagtatttatagcaataggacacgatcctgctacacaaatcttcagaaatcaagttgagatggataatgaaggctatattattacaaaacctgactcaactctaacaaatgttaatggtgtttacgcagctggtgatgtaaaagataaaacttaccgtcaagctgtgaccgcagctggcatgggatgcatggctgctcttgaggcagaaaagtttctagcagagaaatcttaa

SEQ ID NO: 223483 - DNA, 136 bp, Unknown
  Bacterial polypeptide expressing nucleotide sequence isolated from the Sargasso Sea
aatgacaaaaaacaatcattcaaagttattaattcttggctcgggtcctgctggatataccgcagctatttacgcttcaagagcaatgttagaacccactcttttgactggtattgagcccggtgggcaaatgaca

SEQ ID NO: 223484 - DNA, 147 bp, Unknown
  Bacterial polypeptide expressing nucleotide sequence isolated from the Sargasso Sea
acggcatggccacccagaccagcattccgggcgtattcgccgccggcgacgtagccgaccacgtttatcgccaggctgtcacctccgccggtttcggctgcatggccgccctggatgccgagaaattcctggaccagcaggactaaa

SEQ ID NO: 223485 - DNA, 372 bp, Unknown
  Bacterial polypeptide expressing nucleotide sequence isolated from the Sargasso Sea
attgttaacaaaatcgccatactctttttttacgtctgtaaattccctacaatcctgctcattgcctgccaacaactatggggatctcatgggcgcaaccaaacacagtaaacttcttattctgggctctggccctgcgggatataccgctgcggtctacgctgcacgcgcgaacctgcaaccggtactgattaccggtatggaaaaaggtggtcagttgaccacaacaacagaagtggaaaactggcctggcgatccgcacgatcttactggcccgctgctgatggagcgtatgcacgaacatgcgtccaaatttgacactgaaatcatttttgatcacatcagcaaagttgatctgcaaaaccgtccttt

SEQ ID NO: 223486 - DNA, 302 bp, Unknown
  Bacterial polypeptide expressing nucleotide sequence isolated from the Sargasso Sea
tcctaaatctgttaaggcaataaaaataaaaaacgttaaaacaaataaagttactgaacttaaagttgatggtttgtttgtagccataggacacgatcctgctacttcactttttaagggtcaattaaacatggataaagaaggatatatagttactaaaccagactctactgtgactaatgtacctggtgtttttgcggcaggagatgttaaagataaagtgtttagacaagcagttactgcagcaggaatgggttgtatggctgcactcgaagtagaaaaatttttatcgtcaaaataat

SEQ ID NO: 223487 - DNA, 250 bp, Unknown
  Bacterial polypeptide expressing nucleotide sequence isolated from the Sargasso Sea
attttagatcttaaagttgatggactctttgttgcaattggtcatgatccagcaacaagtttattccaaaatcaaattgaaatggataaagaaggttacttgattactaaatcggactcaacaaccacaaatattccgggggtctttgctgcaggagatgttaaagataaaatttttagacaggctgtaactgcagctggaatgggatgcatggcagctctagaagcagaaaagtatctttctcaatagt

SEQ ID NO: 223488 - DNA, 388 bp, Unknown
  Bacterial polypeptide expressing nucleotide sequence isolated from the Sargasso Sea
tatgacagaaaaaatccatcataagttaatagtccttggatcgggaccggcgggttacacagccgcactttacgcagccagatctaacctgcaaccagcactcataaccggagtggaggttggcggccagctaaccacaacaaccgaagtagagaattggccgggcggccacgcggaacttcagggacccgaactgatgatgcagatggcagaacatgtagaacggttcgaagccggtatcgttaacgaccacattcataccgcaaaactgtccaaagatgcactaattcttgtgggtgacaaagcagagtactcttgcgatgccttgatcatcgcgaccggtgcctccgcgaagtatttaggtctggactccgaagacatttcaaag

SEQ ID NO: 223489 - DNA, 411 bp, Unknown
  Bacterial polypeptide expressing nucleotide sequence isolated from the Sargasso Sea
aatgaataataagtctactaaacatacaaaagtgttgattcttggatctggtccggcaggctacactgcggctatttatgcggcaagagctatgctcaaaccaattttagtttttggatctgaaccagggggtcaattaaccacaacaactgatgttgaaaactttcctggatattcaaaagtaattcaagggccatggctaatggaagaaatgaaaggtcaagccaaagcggtaggaactgaaatgattcaagaccatataagtaaggtagacctttcaaagaaaccttttgaagcaacaggtaatagtggtcaggtttataccgcagatagttttataatttctacaggtgctcaagcaagatggttaaatttaaaatcagaacaagaatttatgggatttggtgtttc

SEQ ID NO: 223490 - DNA, 169 bp, Unknown
  Bacterial polypeptide expressing nucleotide sequence isolated from the Sargasso Sea
atgtatgacgtaataattattggagcaggcccagcaggactaacggctgcctatgagctaatgcattcaaataaaaatatactagtgctagaaaaaaaaatgaacgtcggagggctagctgaaacaaaagtttatggtaatcatagatatgatattggccccccataga

SEQ ID NO: 223491 - DNA, 711 bp, Unknown
  Bacterial polypeptide expressing nucleotide sequence isolated from the Sargasso Sea
gctgttattggaggaggagactctgcatgtgaagaagcagcatatctcacaaagtatggaagcaaagtgcatttgattgttcgatcagaaaaattaagggctagcgcagcaatggttgatagagtaaaagctaatccaaagatagaaatccattggaacacaaaagttgataaagctgatggttctgaatggcttgagaaaatagaaactatgcactctaaagaaggtaaaggggaaatcaatataaaaggtcttttttacgcgatagggcacacacctaatacgaaattcttaggcaacaaaattgatttagataataaaggctacattgcttgcaaatcaggaaggccggaaacatctattgaaggcatcttcgcagcaggagatgttgttgattctgagtggagacaaggagttaccgctgcaggaactggatgcatggcagcattagctactgaaagatggttagccgagaaaaacttagcaaaaactatagtcagagaaactcccgaaccagaaaaaaaacttaactcatcagattttaatgaagatgaagttaatgaagatactttcgattcaaattctgaatggcaaaaaggtagttatgcattaaggaaactttatcacgagagtaaaaaacctatcctggtaatttttagttccccaagctgcggcccatgtcatgttttgaaacctcagttaaaaagagta

SEQ ID NO: 223492 - DNA, 96 bp, Unknown
  Bacterial polypeptide expressing nucleotide sequence isolated from the Sargasso Sea
tatgagtcaaaatccaactaaacacacaaaagtgttaataattggatctggtcctgccggatatacagcagcagtttatgctgctcgtgcaatgtt

SEQ ID NO: 223493 - DNA, 394 bp, Unknown
  Bacterial polypeptide expressing nucleotide sequence isolated from the Sargasso Sea
atgtctactattaaacacagccgtttattgattttaggttctggccctgcgggctacactgcggctgtttatgctgcgcgcgctaatttgaatccggtgctgttgaccggtatgcaagcgggcggtcagttaaccacaacaactgaagtagaaaactggccgggtgacccgcacggtttaacaggcccagcgctgatggatcgcatgaaagcacatgcagaaacctttaacactgaaattctgtttgaccatattcacacagtgaacttacagcaacgtccgtttgttctgaccggtgacaatggccagtacagctgtgacgccctgattatcgccacaggcgcttcagccaagtacttaggcctgccgtcagagcaaacctacaacggccgtg

SEQ ID NO: 223494 - DNA, 148 bp, Unknown
  Bacterial polypeptide expressing nucleotide sequence isolated from the Sargasso Sea
atgaataataaatcaacaaaacatacaaaagtgttaattcttggatcaggtcctgccggctatacagcagctatttatgcggctagagcaatgctaaaaccaatacttgttcatggttctcaacccggcgggcaattaactactacca

SEQ ID NO: 223495 - DNA, 622 bp, Unknown
  Bacterial polypeptide expressing nucleotide sequence isolated from the Sargasso Sea
aattcattgatcattgccacgggtgcttctgctcgatggcttggtttggattcggaaaaaaaatacaatggtcgtggtgtatcggcctgtgccacctgcgatggttttttcttcagaaatcaaaatgtcgctgtagttggtggaggtgatacggctatggaagaagcgttatacctggccaatctttgtgaaaaagtgactgtcattcatcgaagagatgaattacgggctagtaaaatcatgcaggatcgtgctctgaatcacccaaaaattgcatttctatgggattctgccgtggaagaagtgttaggtgatgaacagggtatgaacggtttatcaattaaaaatctaaaaaatggagaattaacaaaacacccttttgatggaatgtttgtcgcaataggtcacacgcccaacacccaactttttgagggtcaactggatatggatgaaaacggttatctaaaagtccgttccggttcaacctacacctcatacgaagggatttttgcctgtggtgacgtacaagaccatatttaccgtcaggctgtaacagcagctggaacaggctgcatggcagccatcgacgccgaacgctggctggcggaacaatcaatataaa

SEQ ID NO: 223496 - DNA, 148 bp, Unknown
  Bacterial polypeptide expressing nucleotide sequence isolated from the Sargasso Sea
atgacaaaagatattaaaacagatgtactaattataggctctggccccgctggttatacagctgcaatttacgctgctagggctaatttaaaacctcatatagtttctggtttagaaccacgggggtcaacttactataactactgat

SEQ ID NO: 223497 - DNA, 595 bp, Unknown; identical to SEQ ID NO: 223475
  Bacterial polypeptide expressing nucleotide sequence isolated from the Sargasso Sea

SEQ ID NO: 223498 - DNA, 646 bp, Unknown
  Bacterial polypeptide expressing nucleotide sequence isolated from the Sargasso Sea
gggtgacactggtcaaaaatatactgctgatagcataataatttccacaggtgcccaagctagatggttaaatattaaatctgaacaagagtttaggggatttggtgtatcagcttgtgcaacatgtgatggttttttctttaaagataaagaagttgctgttgtgggtggaggtaatgcagctgttgaagaggcaatgtttcttacaaaatttgcttcaaaagtaaaattaattcacagaagagatagtttgagagctgaaaaaatgcttcaaaaaaaactcatggaaaataaaaaaattgaaatcatttgggatacagttgttgaggatgtaattggagataaagatccaaagaatgtaaaaggaataaaggtcaaaaatgtaaaaacaaataagattaatgaaattaagttagatggcgtcttcattgctattggtcatgaccctgcaactaaattatttaaagatcaacttagcatggataatgagggttatttaattacaaaaccagattcaacagaaactaatgtaccaggtgtttatgcagccggagatgttaaggataaaacatttaggcaagcagtaactgctgctggtatgggatgtatggcagcactagaagctgaaaagtttttatctcattga

SEQ ID NO: 223499 - DNA, 121 bp, Unknown
  Bacterial polypeptide expressing nucleotide sequence isolated from the Sargasso Sea
atgagtcaaaatccaactaaacacacaaaagtgttaataattggatcaggtccagctggatacactgcagcagtttatgccgctcgtgcaatgttaaatcctattttagtttatggttctg

SEQ ID NO: 223500 - DNA, 115 bp, Unknown
  Bacterial polypeptide expressing nucleotide sequence isolated from the Sargasso Sea
tatgagtcaaaatccaactaaacacacaaaagtgttaataattggatcaggtccagctggatacactgcagcagtttatgctgctcgtgcaatgttaaatcctattttagtttat

SEQ ID NO: 223501 - DNA, 379 bp, Unknown
  Bacterial polypeptide expressing nucleotide sequence isolated from the Sargasso Sea
atgtccgaaaatagagagcgggtacttataataggttctggcgcagcgggtcttacagcagctatttacacagcccgcgctaacattgaccctcttctcgtgaaaggattacaaccagggggtcagatgaccatcacaaccgatgtcgaaaattatcctggttttgcagacgtaatacaaggtccttggctaatggaacaaatggaggctcaggcgcggcaggtgggaacacgaatggttgaagatatcataacatcaattgataccagcaaacgcccattccatttaaagggtgatactggagacgattattatgctgacgctgttattgtcgccacgggagctcaagctaggtggctaggccttgaaagtgaggcac

SEQ ID NO: 223502 - DNA, 317 bp, Unknown
  Bacterial polypeptide expressing nucleotide sequence isolated from the Sargasso Sea
tatggcaaaaaatcgtcacatcagactgctaatactgggttcagggccagcaggctataccgctgcattatacgctgcacgcgcaaatctttcccctgtattaataagcggtatgcagccaggcggacaattaacaaccacaactgatgttgataactggcctggtgatgttcaaggcttacagggacaggatttaatggaccgtatgcttagccatgttcagcgttttgacactgaagttattagcgaccatataaacacagctaatttatctactaataaacttgagcttattggcgatgaaggcacatacacat

SEQ ID NO: 223503 - DNA, 243 bp, Unknown
  Bacterial polypeptide expressing nucleotide sequence isolated from the Sargasso Sea
tatgagtcaaaatccaactaaacacacaaaagtgttaataattggatcaggtccagctggatacactgcagcagtttatgctgctcgtgcaatgttaaatcctattttagtttatggatctgagccaagaggacaattaacaacgacaactgatgttgaaattatccaggattttctgaagttatcagggggcatggttaatggatcaatgaaagacaagcaaagcagttggactgaaatgat

SEQ ID NO: 223504 - DNA, 796 bp, Unknown
  Bacterial polypeptide expressing nucleotide sequence isolated from the Sargasso Sea
ccctttaccttctttagagatgaagaattagctgttattggaggaggagactctgcatgtgaagaagcagcatatctcacaaagtatggaagcaaagtgcatttgattgttcgatcagaaaaattaagggctagcgcagcaatggttgatagagtaaaagctaatccaaagatagaaatccattggaacacaaaagttgataaagctgatggttctgaatggcttgagaaaatagaaactatgcactctaaagaaggtaaaggggaaatcaatataaaaggtcttttttacgcgatagggcacacacctaatacgaaattcttaggcaacaaaattgatttagataataaaggctacattgcttgcaaatcaggaaggccggaaacatctattgaaggcatcttcgcagcaggagatgttgttgattctgagtggagacaaggagttaccgctgcaggaactggatgcatggcagcattagctactgaaagatggttagccgagaaaaacttagcaaaaactatagtcagagaaactcccgaaccagaaaaaaaacttaactcatcagattttaatgaagatgaagttaatgaagatactttcgattcaaattctgaatggcaaaaaggtagttatgcattaaggaaactttatcacgagagtaaaaaacctatcctggtaatttttagttccccaagctgcggcccatgtcatgttttgaaacctcagttaaaaagagtaattaaagaacttgatggtgcagttcttggcgttgaaatagatatgataaagatca

SEQ ID NO: 223505 - DNA, 1288 bp, Unknown
  Bacterial polypeptide expressing nucleotide sequence isolated from the Sargasso Sea
atgatagaacttaaaatcgacaatcacagcgtcacggccgagccgaacgataacctattacaagcggcccgtaaggcgggcatagccattccgagtttgtgcgatccaacggacgccacacggcaattgggcgcagctcctaacgccaataaacaggactgcaacctctgcctagtgcaaatcgaaaataccgatgccagcctgcgctgcgttaaagcctgtgaaacgcccgccgaacagggcttaaaagtcatcacccaatcggcatatttaactaaacagcgccaagccgcactgagcacgattttaagtgaccactttgccgattgtgaggcgccctgccaacaggcctgccccgcgggcgtggatgtgcaaagttacctgtaccacattgcccaaggtgaccatacccaagccattaaagtcattaaagacactctgccgctaccgctgtcgattggccgagtctgccccgcgttttgcgagagcgaatgccgccgcggcctcgtcgatgaccccattgccattcgtcaacttaagcgccacgccgccgatttagacttggccgacgatgaacaaggcaatagctatcagccgccgcgtctcgcagataccggcaagaaaattgccattattggcgcgggccccgcaggcttaagcgcgggttattacctgtcaaaccaagggcataatgttgagatatttgaagccatgcccaaggcgggcggctggctgcgctacgggatccccgaataccgtttacctaaggcgattctcgataaagaaatcgagctgctgtgccgcaatgggttaaccattcataccgatactcgcctcggccatgaaattcatttagcccagctggtcaccgatttcgacgctgtgtgcctcgccatcggcgcccaaaaagcggtaccgatgaactacaaaggctcagcgcttgcgggctgttaccttggggtggattttcttaaggatcattgcctcgacaaacaattgaagttgggcaaaaaagtcgcggtcattggcggcggcaacaccgccatcgactgcgcccgtaccgcggtgcgtgaaggttgcgatgtcaccttaatctaccgccgtacccgcgccgaaatgcccgccgaagcctacgaagtacacgaggccgaggttgaaggcgtcaaattccatttcttaaccaatcccattgaaaatcatagtgatgccaatggacaggtagaagctgttaccttcagcaaaatggcgctcggtgaagccgatgcctcgggcagacgcgcgcccggga

SEQ ID NO: 223506 - DNA, 736 bp, Unknown
  Bacterial polypeptide expressing nucleotide sequence isolated from the Sargasso Sea
atgaaagagcaagcaaaagcagttggaacagaaatgattgaagatcatataagttctgtcgatttaaaaaaaacaccgtttgaagccattggggacactggtcaaaaatacactgctgatagcattataatttcaacaggtgcacaagcaagatggttaaatttaaaatcagaacaagagttcagaggttttggagtatccgcatgcgcaacatgtgatggttttttctttaaagacaaagaagtagctgtcgttggaggaggtaatgcagctgttgaggaagctatgtttcttacgaaatttgcatcaaaagtaaaattaattcacagaagagataatttaagagctgaaaaaatgcttcaaaaaaaacttatggagaataaaaaaattgaaattatttgggatagtgttgttgaagacgttattggtgataaagatccaaaaaatgttaaaggaattaaaatcaagaatgttaaaacaaataaaattgacgaaattaaattagatggtgtcttcatcgcaattggacatgatccggctacgcaattatttaaaaatcagctaagtatggataaagaggggtatttaataacaaaaccagattcaacggagactaatgtaccaggcgtttatgcggctggagatgtaaaagataaaacattcagacaagcagtaactgctgctggtatgggttgtatggcagcactagaggctgaaaagtttttatcacattaaa

SEQ ID NO: 223507 - DNA, 850 bp, Unknown
  Bacterial polypeptide expressing nucleotide sequence isolated from the Sargasso Sea
aagtatggaagcaaagtgcatttgattgttagatctgaaaaattaagggctagtgcagcaatggtagatagagtaaaagctaatccaaagatagaaattcattggaacacaaaagttgataaagcagatggttctgaatggcttgagaaaatagaaactattcactctcaaaaaggtaaaggggaaatcaatataaaaggtcttttttacgcgataggacacacaccaaatacgaagttcttaggcaacaaaattgatttagataacaaaggatatattgcttgcaaatcaggaaggccagaaacatctatagaaggcatcttcgccgcaggtgacgttgtagattctgagtggagacaaggagttaccgctgctggaactgggtgcatggcagcattagctaccgaaaggtggctagccgagaaaaacttagcaaaaactatagtcagagaaactcccgaaccagaaaaaaaacttaattcatcagattttaatgaagaagaagttaatgaagatactttcgattcaaattctgaatggcaaaaaggcagttatgcattaaggaaactttatcacgagagtaaaaaacctatcttagtaatttttagttccccaagctgcggcccatgtcatgttttgaaacctcagttaaaaagggtaattagagaactcgatggtgcagttcttggcgttgaaatagatattgataaagatcaagatattgcaaaacaagctggtattaacggcacgccaacagttcaactttttaaagaaaaattattaaaaaaacaatggcaaggtgttaaacaaagaagtgagtttaaagaagcgatagaaaatattatctaaa

SEQ ID NO: 223508 - DNA, 579 bp, Unknown
  Bacterial polypeptide expressing nucleotide sequence isolated from the Sargasso Sea
taaatatcaaatcagaacaagaatttagaggttttggagtttcagcttgtgcaacatgtgatggtttcttttttaaagataaagaagttgcagtggttggtggtggaaatgctgctgttgaagaagcaatgtttcttacaaaatttgcatcaaaagttaaattgatccacagacgtgatagtttgcgagccgaaaaaatgcttcaaaaaaaattgatggaaaataaaaagatagaaattatttgggactctgttgttgaagatgtaatcggagacaatgagcctaaaaatgtaaaaggaattaaaattaaaaacgttaaaacaaataatattgaagaaataaaacttgatggagtatttattgcgattggtcacgatcctgcaactcaactttttaaaaatcaattagaaatggataaagaaggatatctaattacaaaatccgactcgactgagacgaatgttcctggtgtttacgcagctggagatgtaaaagacaaaacgtttagacaagctgtaactgctgcaggtatgggatgtatggctgctcttgaagctgaaaaatttttatcccactaaa

SEQ ID NO: 223509 - DNA, 295 bp, Unknown
  Bacterial polypeptide expressing nucleotide sequence isolated from the Sargasso Sea
tgttacatcaataaagttagagaataaaggttctgaaatttctaaagaagtgatgggtgtttttattgcaataggccataaaccaaatactgaaatattcgatggacaattagatatggacaatggttatattatcatcaaatcaggtttaaacggatctgttacaagctcttctgttgaaggtgtttttgctgctggtgatgtatctgatcaaatttatagacaagcggtaacctccgcaggatttggctgtatggcagcgttagacgctgaaaaatatttatctgaatcataa

SEQ ID NO: 223510 - DNA, 367 bp, Unknown
  Bacterial polypeptide expressing nucleotide sequence isolated from the Sargasso Sea
aatgcttgatttagcaattattggttcaggacctgctggttatactgccggaatatatgcttcaagagcaagtttgaaacctgttctttttgaaggtttagagtctggtggccagcttatgcttacaacagacgtagaaaactatccaggttttgattcggggataatgggtcctgatttaatgcaaatatttaaaaaacaagctgaaaggtttggtactgagataaaaactgaaactattaattcgattaaaaaaatagatggtggttttagccttgaaagcgcacaaggttcctatgagtttaaatcagtaattatctcatccggagcatctgcaaaatggctagacgtaaaaggagaaaaagaa

SEQ ID NO: 223511 - DNA, 628 bp, Unknown
  Bacterial polypeptide expressing nucleotide sequence isolated from the Sargasso Sea
gtattccgcagaagcgattataatttcactggtgctactgctaggctcttaggtctggaagcagagaccaaattaatgggacatggagtatctgcatgtgctacttgcgatgggttcttttttaaagagaaaaaagttttagtcgtgggtggaggtgactcagccatggaagaagctacttttctaacaaagttcgcttcggaagtggttatagttcataggcgagaagaatttcgagcatcaaagataatgattgaaagagctctctcgaatcctaaaataaaagtggaatacaataccacagtagaagatataaaaggttcccaagaaacaggtgtgcagtcagtcatcctaaaagatacacaaactggtgaacttcgtgattatgcctgtgatggtatctttatggcaattggccacgttccaaacacaaaactattccaagatgcactcgaacttgatgctgctggatacattattacacaatcagattccacctatactaatgtagaaggcgtatttgcatgtggagatgtacaggatactgtctatagacaggctgttacggctgcaggttcgggctgtatggcagctattgattctgaacggtggttggaggaacaataat

SEQ ID NO: 223512 - DNA, 4300 bp, Unknown
  Bacterial polypeptide expressing nucleotide sequence isolated from the Sargasso Sea
gatgatagaacttaaaatcgacaatcacagcgtcacggccgagccgagcgataacctattacaggcggcccgtaaggccggcatagccattccgagcctgtgcgatccaacggatgcgacacggcaattgggcacggctcctaacgccgataaacaggactgcaacctctgcctagtgcaaatcgaaaataccgatgccagcctgcgctgcgttaaagcctgtgaaacgcccgctgaagcaggcttaaaagtcatcacccaatcggcatatttaactaaacagcgccaagctgcattgagcacaattttaagtgaccactttgccgattgtgaggccccctgccagcaggcctgccctgcgggcgtcgatgtgcaaagttacctgtaccacattgcccaaggcgaccacacccaagccattaaagtcattaaagacactctgccgctgccgctgtcgattggccgagtctgccctgcgttttgcgagagcgaatgccgccgcagcctcgtcgatgaccccattgccattcgtcaacttaagcgccacgccgccgatttagacttggccgacgatgaacaaggcggcagttatcaaccagcacgcctcgccgacacaggtaagaaaattgccattattggcgcgggccccgcgggcttaagcgcgggttattacctgtcaaaccaaggtcatagtgttgagatatttgaagccatgccccaggcgggtggctggctgcgctacgggatccccgaataccgtttacctaaggcgattctcgataaagaaattgagctgctgtgccgcaatgggttaatcattcataccgatactcgcctcggccatgaggtccacttagcccagttggtcgccgatttcgacgctgtgtgcctcgccatcggcgcccaaaaagcggtgccgatgaactacaaaggctcagaacttgcggactgctaccttggggtggattttcttaaggaccattgcctcgacaaacaattgaagttaggtaagaaagtcgccgtcattggcggcggcaacaccgccatcgactgcgcccgcaccgcggtgcgcgaaggttgcgatgtcaccttaatctaccgccgtacccgcgccgaaatgcccgccgaagcctacgaagtacacgaggccgaagttgaaggcgtaaaattccattttttaaccaatcccattgaaaatcatggcgatgccaatggacaggtagaagctgtcaccttcagtaaaatggcgctcggtgaagccgatgcctcgggcagacgcgcgcccgtggacacgggagaaacctttaccgaggccttcgataccgttatcgccgccgtctcccaagcgccggatctgagttttatgcaggatcctatggggcaactcagccaaggtgaactggcgctgagccgctggaacacactgataggctgcgagcaaaccatgtcatcaggtgtagaaaaactgtttgtgatgggcgatgcccgcagaggtcctgccaccgctgtagccgcgattggcgatggccgcaaagcggcaatcgctattgataagatgctaaaaattggccttagctgcgatttacatgcccatgagtttaactcgatcaaaaccattcccagcgccctcattccaagtgcccttaagcaaaccgaaacaagctcaaaagcagggtcaaggctttatccccataccccgcgtcagccccgcctgaagatgcccgaactcacggcactgcaacggctgctgaattacagcgaagttgagctaggttttcccgccgatgccgccatgcaagaggcggcacgttgcctcgagtgcgcctgtcaggccaatactgattgtaagcttagggattacgccacggattacggtgtcgaggccaaaagcttagccactgaaaatgcacggcatttcagtgtggataagagtgcgccctttattcaattcgatgccaaccgctgtattagctgcggtaagtgcgtcgatgtgtgtcagcagcagagtggccactgcgccatccaatttagccaagattcctaccaggcgctgccgcaagaaattagccaaacccttgagcgccgtgcgcccagagtcggctttagtgcaagcatggccgatagccactgcgtgcaatgcggtaactgtgtacaggtttgtccgacgggggcactggtcgatgcccgagataaacgccaaggcgatagcacagagttaaaaaccgcctcgacgatttgtacttactgcggcgtgggctgccgtctagaccttaaaatcgaccccaacgccaatcgcattcgtcatatcgaaggcaataaggactcggtcgttaaccaaggcatgctgtgtgttaagggacgttttggcttcgattttattcatagcgacaaacgtctcactacgccactgatccgtaaaaacggcgagctacaaccgagtagctggcccgaagccatcgcctatgtagcaaaacgcttaaccgagataaaacaaaaagatggcagcaatgccctcgccagtctcgcctcagcaaaagccaccaacgaagataactttgtgctgcaaaagtttgtccgcagcgttcttggcaccaacaatatcgatcactgcgcccgcctctgccactcatcgacggtaacaggcttgcagcagagtattggtagcggcgccatgaccaatgatattccgagcattaaggactcggacgtcatctttattttaggttcggataccacctgcgcccatccgattatcgcctcaaaaatccagcaggcggtgatgcagcacggcgcgcgtttactggtcgccgatccaaagcgggttggcattgccgaaaaagccgagctgtatgtcgctcacagaccgggcacggatgtgatggtgcttaacgccattatggcggaaattattcgccacgattggcaggataaagcctatatcgcccagcgcaccgaaggcattgaggccctctatgcagagttagccaaggacgattattccctcgaaaacgcagcgcttatcacgggcgtaaaagccgaagacattgcccgcctcgcgcgtaccataggcacggccgaaaagaccgcggtttactacgccatgggcatcactcagcatacgacggggcacgataacgtcaccgccatctctaatttgcagctactttgcggcaatataggtgtgtcaggcgcgggcattaatccacttcgcggccagagcaatgttcaaggtgcctgcgatatgggcgccctacccaactattttaccggttaccaaaaggtcacggatcttcatgccagaatgcgtttcgaaaaccattggcgaacaccgttatcgggggagattggcgtcaccgcaacccatatgatgcacgatattgccaagggcaaaattaaagccttgtatgtgatgggtgagaatccagtgctcagcgatcccgaccaagcccatgtgcttaatgcattgagccaaatcgagtttctggtggtgcaggatatctttttaaccgagacggccgagcttgcccatgtggtcttacccgccgccgcatttgtggaaaaacgcggtcactttaccaataccgaacgtcgggtgcagcggctcgagcaggcactcgcctcaccgggtgaggccttacccgattggcagatagtgcaagccgtcgctaacgccatgggcgcatgctgggactatgccaacgaagaggccatctggcgcgaaatcaacgaacttactccgcagtatcgcggcattcgttgggacagattaagtgccaatgcagagggtcaaatctcccaagggattcaatggccctgtccagatgaaacccatccaggaacaccgattatgcaccagagccaattcactcgaggcttaggcttatttacgcctgtcagttatcgccttcccgccgagatgccctgcaacgagtatccgctaacgctctcaacggggcggctgttggagcagttccacacaggcacactcacccgtaagacaccagggctggatttactcggcgcgcctaaggtaatgatttcggtttatgatgcggagcaactggggataaacaatggcgataaacttcgcctcactacccgtcgcggagagattgagatcgatgcctttgtgactaaacgcgcccaggcaggtgtactgttcctgccgttccattttgtggaagcggcggcgaataagctcactatcaatgccttagatcctgtggcttatattcccgaatataaggtctgtgcggtcagggcggaaaaggtgacagcaaaggtgagtgaaccagcttaa

SEQ ID NO: 223513 - DNA, 181 bp, Unknown
  Bacterial polypeptide expressing nucleotide sequence isolated from the Sargasso Sea
atggataatggttatatactatttaaatctggattaagtggttcaataacaagcacatcagtcgatggagtttttgcagcaggtgatgtatctgatcaaatttatagacaagcagtaacatcagcagggtttggatgcatggctgcccttgatgcagaaaaatatttatcagagaaataat

SEQ ID NO: 223514 - DNA, 4285 bp, Unknown
  Bacterial polypeptide expressing nucleotide sequence isolated from the Sargasso Sea
atgatagaacttcgaatcgataatcagatagtctcggccgagccgagcgataacctattacacgcagcccgtaaggcgggtattgctattcccagcctgtgcgatcccactgacgcctcacggcaattggacacgcaagcccatgccgaaaagcaggactgtaacctctgtctggtgcaaatcgaaaatagcgatgccagtctgcgctgcgttaaagcctgtgaaacccctgcccaaacaggcatgaaggtcatcacccaatcggcgtttttaaccaaacagcgccaagcggcactgaacaccatcttgagtgatcactttgccgattgtgaagcgccctgccaacaggcatgccctgcgggcgtcgatgtacaaagttatctctaccacattgcccaaggtgaccacacccaagcgattaaagtcattaaagacactctgccactgccgctgtcgattggccgtgtctgccccgcgttttgcgaaaccgaatgccgccgcggcctcgtcgacgaccctattgccatccgccaacttaagcgccacgctgccgatttagatttagccgatgacgagcacggcaatagctatcaaccaccacgcctcgcagacacggggaagaaaattgccattataggcgcaggccctgcgggcttaagtgcgggttattatctttctaatcaagggcataatgtcgagatatttgaagccatgcccaaggcgggcggttggctgcgctacggtattcccgaataccgtttacccaaggcgattctcgataaagaaatcgagctgctgtgccgtaatggtttaatcattcataccaatactcgcctcggccatgagatccacttagcccagttggtcaccgacttcgatgcagtgtgccttgcgatcggcgcccaaaaagcagtgccgatgaattataaaggctcggagctggcgggctgttatcttggagtagattttcttaaggatcattgcctcgataagcaactgaagttgggtaaaaaagtcgcagtcatcggcggcggcaataccgccatcgattgtgctcgtacagcggtacgtgaaggctgcgatgttaccttaatctaccgccgtacccgcgccgaaatgcccgccgaagcctacgaagtacacgaggccgaagttgaaggagtaaaattccacttcttaaccaatcccattgaaaatcatagtgatgccaatggacatgtacagtcggtgacctttagtaaaatggcgctcggcgaagccgatgcttcaggcagacgcgcccccgtagacacaggggaaacctttaccgaagcctttgatactgttatcgccgccgtctcgcaggcaccagacctgagctttatgcaagatcccatggggcaactcagccatggcgagctggcactcagtcgctggaacaccctcattggttgtgagcaaaccatgtcatcgggtgtggaaaaactgtttgtgatgggcgatgcccgccgcggcccagccaccgcggttgccgccattggtgatggccgaaaagcggcaaaagccattgataaaatgcttcaaattggccttagctgtgatttacatgcccacgattttaactcggtaaaaaccattccgagcggccttaagcaagcgaaagcaacatcagaagctgcaccaacgctttatccccatacgccacgtcagccccgcttgaaaatgcccgaactcacagcactacaacggctgctgaattacagtgaagtcgaattgggctttcccgcagatgccgctatgcaagaggcggcacgttgccttgagtgcgcctgccaggccaataccgactgtaaactgagggattacgccacggattatggtgttgagagcaaaagcttactcactgaaaatgcacggcatttcagcgtagataagagttcaccctttattcaattcgatgccaaccgttgcattagctgcggcaaatgcgttgatgtgtgccagcagcagagcggccactgcgccatccaatttaccgaagattcctatcaggcgctgccacaggaaatcagtcaaagccaagtgcgccgcgcgccgagagttggctttagcgcaagtatggccgatagtcgctgtgtacaatgtggcaactgcgtgcaagtgtgtcccactggcgcactggtcgatgcgcgggacaaacgccaaggtgataaaacagcacttaaaaccgcctcgacgatttgtacttactgcggtgtaggctgtcgtctggatcttaaaattgaccctaacaccaatcgcattcgccatatcgaaggcaataaagactcggttgttaaccaaggcatgttatgtgttaaagggcgttttggtttcgattttattcacagcgacaaacgcctaacaacgccattgatacgtaaaaaaggcgagctacaaccttgtagttggcccgaagccatcgcctatgtcgcaaaacgcttaaccgagataaaacagcaagatggcagcaacgcgatcgctagtctcgcctcggccaaagcgactaacgaagataactttgtgctgcaaaagtttgtccgcagcgttcttggtaccaataatatcgatcactgcgcccgcctatgccactcatcgacggtaacgggcttacagcagagtattggtagtggcgcgatgaccaatgatattccaagtattaaggactcggatgttatctttatcatcggttcagacaccacctgcgcccacccgattattgcctcaaaaatccagcaggcggtaatgcagcacggcgcacgattaatcgtggccgatcctaaacgcgtaggcatagcagaaaaggccgaactctatgttgcccacagaccgggcacggatgtaatgctattaaacgccattatggcggaaattattcgccacgattggcaagataaagcctatatcgccgagcgtactgaagggatcgagggcctctatgcggaattagcgaaggaggattactccctcgaaaacgccgccctaatcacaggtgttaaagctgaggatatcgcccgcatcgcgcgtaccataggcactgcacaaaaaacggcggtttactacgccatgggcatcactcagcatacgacaggccacgataacgtcaccgccatttctaacctgcaactactctgcggtaatatcggagtatcaggggcgggtatcaatccgctgcgcggccagagtaatgtgcaaggggcttgtgatatgggtgcattacccaactacttcacaggctatcaaaaagtcacggatattcatgccagaatgcgcttcgaaaaccactggcaaacgccgttatcgggggaaattggcgtcacggcaacccacatgatgcacgacattgccaagggcaaaatcaaagccttatatgtgatgggtgaaaatccagtgctgagcgatcccgatcaagctcatgtgcttaatgcactgagtcaaattgagtttctggtagtgcaggatatctttttaaccgagacggccgagcttgcccatgtggtcttgcccgccgccgcattcgtagaaaaacgcggtcactttaccaataccgaacgtcgggtacaacgactcgagcaagcgcttgcctcaccgggggaagccttatccgattggcagatcgtacaagcgctcgctaatgccatgggcgcaaactgggattacaaagatgaagaggctatttgggctgaaatcaatgtattaacaccccagtatcgcggtattcgttgggagagattaaccacaagtgcagagggtaaagtgcctcagggtattcaatggccctgtccggatgaaaatcatccggggacaccgattatgcaccagagtcaattcacccgcggtttaggcttatttacgcccgtcagttatcgtcttcccgccgaaatgccctgcaacgagtatccactgacgctatcgacggggcggctcttggaacaattccacacaggtacactcacccgtaaaacaccgggactggatttactcggcgcacctaaagtgatgatttcagtctatgatgccgagcaactcgggataaataatggcgacagaattagccttatcacccgccgcggagagattgaaatcgatgcctttgtgactaaacgcgcccaagccggtgtactgttcttgccgttccattttgtcgaagccgcagcgaacaaactcaccatcaatgccttagatcccgtggcttatatccctgaatataaggtttgcgcagtaagagttgaaaaggtgactaagcgggttatcgaaccagcctaaa

SEQ ID NO: 223515 - DNA, 713 bp, Unknown
  Bacterial polypeptide expressing nucleotide sequence isolated from the Sargasso Sea
agacgtgagaaatggtcacattagtaaagtagagttttcatctcaaaatgggggtattcataaagcatgggttgatgataaaacagaactcagagctgaaactgtaataattagtactggtgctagtgcaaaatatttagggattgaaagcgaacaaagacttcgaggtggtggagtttctgcatgtgctgtatgtgacggatttttttataaggatcaaaatgttgctattgttggaggtggcgatactgccgccgaggaagcaacttatttagcaaatatctgtaaaaaagtaactatgttagtcagaaaaggagaaatgagggcttccaaagcaatgcaacatagagtaacaaaaacaaaaaatattgatttaagatacttttctgaaatagaagaagttataggagatcaagttgttgaagggttaagaattgtaaataataaaacaggaaaaaaagaagaaataaaaataacaggtctttttattgcaattggccataaaccaaatactgaaattttcctgaatcaactagaaatggacgaaggaggatatattattactgatggcaaaacaactaaaacaaataaacccggagtttttgcttctggtgatgttcaagataaagaatacagacaagcagtaacagcagcaggaacaggatgtatggcagcattggatgcagagagatacattaatagtttaagataat

SEQ ID NO: 223516 - DNA, 148 bp, Unknown
  Bacterial polypeptide expressing nucleotide sequence isolated from the Sargasso Sea
aatgataaaaagcaatcattcaaagttattaattcttggctcgggtcctgccggatataccgcagctatatatgcttcacgagcaatgttagaaccaactcttttgactggtattgagccaggcggtcaaatgacaataacaacagat

SEQ ID NO: 223517 - DNA, 583 bp, Unknown
  Bacterial polypeptide expressing nucleotide sequence isolated from the Sargasso Sea
ggcctagattctgaaaagaaatttcaaggttacggagtttctgcctgcgctacatgtgatggctttttctttaaagaaaaaaaagttgctgttattggtggtggcaattcagctgttgaagaggctttatatttaactaattttgcatcaacagtttatttaatacacagaagagatgagttgagagctgaaaaaatacttcaagatagattatttaataatgaaaaagttaaatgtatctgggaccatcaattgcaagatattctaggagacgaagatcctctcaatgtgaaaggtatcaaagtcaaaaatgttaaaactaacgagatacaagatatcgaattagacggagtgtttattgcaataggacatgatcctgctacacagatttttaaaaatcaagttgagatggataatgaaggatatattatcacaaaacctgactcaaccttaacaaatgttaacggagtttatgctgcaggagatgtaaaggataaaacatatcgtcaagcagtgactgcagctggcatgggatgtatggctgcgcttgaagcagaaaagtttctagcagaaaaatcctaaa

SEQ ID NO: 223518 - DNA, 418 bp, Unknown
  Bacterial polypeptide expressing nucleotide sequence isolated from the Sargasso Sea
cacagaagagatgaattaagagctgaaaaaattctacaagagagaatatttaaagaagaaaaggctggcaaaattgaaattttatgggactcacagcttaaggaagtcttaggtgatgatatgggcgtgaatggtatggtaattgatactaaaggtagtgaggttaaaaaagatgttatgggaatatttattgcaattggacataaaccaaatactgatatttttaataatcaattagatatggataatggttacatattaataaaatcaggtttaaaaggttctataacaagcacttctgtagaaggcgtttttgcagctggagatgtttctgatcaaatttacagacaagctgtaacttctgccggttttggttgtatggctgcgcttgatgcggaaaaatatttatcagaataat

SEQ ID NO: 223519 - DNA, 343 bp, Unknown
  Bacterial polypeptide expressing nucleotide sequence isolated from the Sargasso Sea
gatgagattctttggtgatgaaagcggagtaaatggccttaagataaaaaatgtaatcaatagtaaggagacgaccattgagctttacggtgtatttattgctattggtcataaaccaaacaccgaattgttcaaaaatcaactagatatgaaaaatgactatattaaaatcaaatctggtcttgctggagatgcaactgcaacaagcatcaaaggtgtttttgctgtaggtgatgtttcagatcaaatatacagacaagcaataacatcagcaggtgctggatgcatgggtgcattagatgcagaaaaataccttgattcattgaatatttcaaaatcttaa

SEQ ID NO: 223520 - DNA, 127 bp, Unknown
  Bacterial polypeptide expressing nucleotide sequence isolated from the Sargasso Sea
tatgagtgaaaatccaactaaacacacaaaagtgttaataattggatccggtcccgctggatacactgctgctgtttatgctgcaagagcaatgctaaaacctattttagttcatggcatggagccg

SEQ ID NO: 223521 - DNA, 658 bp, Unknown
  Bacterial polypeptide expressing nucleotide sequence isolated from the Sargasso Sea
tttgaagcaattggtgatagcggtcagaaatatactgctgatagcattattatttctactggagctcaagcaagatggttaaatataaaatcagaacaggaatttagaggatttggagtttctgcttgtgcaacttgtgacggtttcttttttaaaaataaagaagttgctgtagttggaggaggtaatgcagcggttgaagaagcaatgttccttacaaagtttgcatctaaagtaaaattaatccacagaagagatagtttaagagctgaaaaaatgcttcaaaaaaaattaatggaaaataaaaaaatagaaataatttgggactctgtagttgaagatgtgttaggtgataaagatcctaaaaatgtcaaaggaataaagattaaaaatgttaaaacaaataaaatacaagaattgaaacttgatggcgtgttcattgctattggtcatgatccagctactcaactttttaaagatcaattaaaaatggataatgagggatatttaattaccaaacctgactcaacagaaactaatgttcctggtgtttatgcggctggagatgttaaagacaaaacttttagacaagctgtaactgctgcaggaatgggatgtatggctgcgcttgaagcagaaaaatttttatctcactaaa

SEQ ID NO: 223522 - DNA, 5545 bp, Unknown
  Bacterial polypeptide expressing nucleotide sequence isolated from the Sargasso Sea
catgcaacagcgtgacgctgatacctatgtattagcctataccggtcgctcagcagatggttttattcaaacgtttgacatcaatgcgaatgggtctaccattaccaaaaaaagaagctgggagcatgatggctgccaaggtaattataactcgctagtaaaggtgtcggatgatgtctttgctttggcctacgctggctcttcgagtgatggttatatcagaacatttaaggttgatgcaagtggcaaaatttcaagtaaaaaggttaaagaacataataccaattacggtatctacaatgcattgacgcacctggtagggaccacctatgtactggcgtataccggtgcatcaaataaggggaaaatgtcaacctttaccatcccggcagatggcagcagtattactattaaaaaaaccatcaatatggatgcaagctttgctgcctacaacgcgatccataaaatgacggacagcaccgtagtggtggtctatcaaggaagcggtcccaaattcttaatgaaaacgtttcagatatctagcgatggaaaaacgatcactgaaaagaaatctgagaccatttacgaaggaaaagcacactggaatgccatcgcccaggtggatgcaaatacctacgttatcgccacgcaaggcaaggatgatgatgggtatctctatacgtacgatgtagctcctgatggttcatcgatcgctaaagtggcggaacttgaatttgatgatgagaaatcattgcatcacaccctctacaatgcaggttcaaattcatttgtgttggcgcataccggtacagcgaatagtcgtacttacggtaaaatgtttaccatcccggcagatggcagcaaaataaatcagatttatagcaccaaattaaatgattacggacaagggcaatcggccttatccagaattgatgcggatacctacgctttcgctttctctggaagtggtgttgatggcattatgtctactttaacagttagggcgggcgatacagttcttccggttatttctttcatcgcaatcaatgatgataattcatccgtgcaagttaccttcaatgaagaagtgtacaattcagctggcgccagcggtagcctagaagtttcagactttagcttaacgatcaccgggggtactgcaaaattaccaagcgcaacgccaaccagtatatctgcaaatggcaaaatctatacgctaggttttgatctcaccggaactgctaatgggcaagaagtttttaaagtcagtccagtagagaaagctatttttgatggcggcggcaatacagcagcaactaatcaaaccaatggcagcgccaacttgaaagataagactggtcccgctatctctaagacagttctggccaatgataatagcacagctacaattacctttaatgaaaaatcctacagtactggtagcggtagtggcgccttagagaaaagtgactttgtactatccatcgatggtggacttgctaaactggctggcaccacaccaaccagtatatcggtatcaggaaatgattataccctaggatttggtcttacaggatcaccggatggaaatgaagtattaaagataaatccagcatccaaatcgatttttgatgcgagtggaaatatttctaccactctacaaacaaataacaccgcaaacttaaaagatattgttcctgcggttatagactccattgaattggcaggtgataatagcattgttcaagtatttttcaacgagccagtattcagcaaggaggatggtagtggcgccttagactcggctgactttgtgtattctttaactggtggcattgcaaccttagctaaaaaatatcccagttctgtaagcggaagcggtacaaagaccctatcgctaggtgtcctgttaacgggaagacccaatggaaaagaagttttaaccgttacaccggtaagtaaatcagtatttgacaaaccgggcaatataacctccacaacccagtccaaaaataaagcgaatttaaacgataaatttgtgccgcagtattccgccagcgctctggcacctgacaatagcgtaattgcggtgacctttaacgaaccggtgtttgccaaatcaaatgcgacaggtaaaatcgatacgagtgattttgaatttaccctaaatggtggaagcgctaagctattaaaagcgtacccagatagcgtagggcaggtaggcaatacgtatagcttgggtattaaactagatgggcttgcggacggaactgaaacctttacctttaagcctaaatcaggagctatttttgattccactggaaacaaggctagcaccacgcaaagctttagcagtttaaaactgaatgataaagcaccgccagagatcaaatccttatccttagccgctgataacagcaaactatctatagattttacagaatccgtttatagcaaaggcaatggaacaggcgatcttgaaaaaagtgactttgttttttctgtgacaggcgaaacgattgttttaacatcgcccttccctactagtattgccaaatctggtaatacatttaccctaggtattggttcgcgaggcgatcctaacggcaccgaagttctttcggtgttgattgtagataatgctgtatttgatgggtctggaaaccctgctacgatggagcaaaataagaataaagtaacattcaatgataagaacgctccattgattaccaagcttgacctagctaccgataattcaacgcttacagtaacaatgaatgaaccaacattcagcgcaagcgatggtacgggcagtcttgactcaaccgccttcatcttgaaaatcaataatggaacctctaccctctcgcagcagcatccaaaaacgttaaaaactattgatagtacttttacatatattttagggcttccgttaactggaattgctgacggatctgaagaattgatcattagctttgctgatgatgggttgtacgatgcatcaggaacagaagctgcccaaacgcaagtcatcaacaaagtgactttgtttgatctaagtgcaccagttatatcggaatcaaagttggattcagataataaaaaggtaatggttcgattcagtgtccctgttttctctagcgccaaagctacaggaactttagagcgtgatgattttcgattatcgcttgttgggggctcagcaacattaaaaaataccacgccttcaagtattgacagcagcgataatggtcgccgctataaattaggaattgaaattgcaggaattccagatggtcgagaaacattgacaataaacccagtagacaacaatgtttttgatgcatcagcgaatccagcaaataaagttcagtcaaacaatagcatgaatttgtttgataagcagccccctattatcaaaagcgttacgctttcatcaaccaatgattccctctttgtaacttttgatgaatctgtctacgcaaaagaagatggaacggactctctaaaggctgatgatttccttctttcgcttagcggaggcatcgcaggtctaaaaaattccaatcctgcaactgctagtggaagcggaaagaattacattttaacatttggtctttcaggcacgccagatggaaatgaaaaaatcatagtaaatgcgaataatagatctatttttgatgctgcgggtaaccccggcgttaatcaggatagggataattccgtatttctaaatgataagagcgctcccagatctccacagggtctagtaggtataccagggaacaatcaagctaccctatcttggaagactacgggtgaaacagatatttcaaaatattatatctatggcggaacgtcaactaacccaacgcaaaaaattgactccacccagtctggtggcaatgttaaagtcatttcaggattgacaaatgaaatcacttattattttaaagtatctggcctagataagaccggctacgaaggtgcgctcagcgatacggtgagcgtaaagcctacaactacacagtcctttactgtaaaagctgatgggacaggtgatttttctaatgcgcaggcagcgattgatgcagccgtttctggtgacagtgtctatattgaagccggtagctatgattcgctacgcgttgatggtaaatccattcaaatcatcgcaggtgatggccctacaaaatcctttattgacgctcaaggaaaaactactgcggtaatactatctggatatccgaaccaaactactatttcaggctttacgattatgaatggtgttggagataacaatgataatgggcaaggcggaggaattgtcgttgagccaggtgtaaatgcgacgattgataattgcgtattaaccaataacgaagatggggcaatttattttggcgatagcagtgaagtaaaaatttcaaatacccttgcctatggtaatgataaatcattcgtatttggttctggtacagccaattttattaactgtacctttgttcgtgaaaaagagaattcggcaatgggcagcggtgcaaaaattaatttcatcaataccatcttcatgaatgaggttgttgcaagcgatacggttactgatatttcgctatgggcaaactattcattgtttcttttaggtgaggatacattcaatccaaacttgatcaaagaatacaattggggtaaaggcaatattgagggtgatccgatgtttgttgataccttgaaccttgattatcatctacaaaaagaatccccagcgattggtgttggaattcaatcaattaacgtggcaggtcttacctatgaagcgcctgaaaaagatttagatggctataatcgtccctctccaagtggatcagctccggatatgggtatatatgaaagtccttattctagtgcagccccatcggccaatcaaatttctgacggactttccgattcggtggaagtggatttttcaagctctaattcaaccctatccgcgcattggaaacgctttgggggttcgaatgtagtgtatgaatatgcgatcggcacctcgcctgataaacgcacggatataaaaaattggactgtggtaggatttgacaccactattactgtgactggtctttcccttgtcaatagcactacttactacaccagtattcgaggtaaaaataatttaggtgaaacttctaccgtcacttcagatggtgtaaccattgactttgaaagtccgaaaataaattctgttactgaattaaaagaagatgttgattggtttgggcctaatatgcctggtcatatttttgttgatgctaccgataatacaggaattgagaaatatgaattttctattggaacaaataaaggcggtgatgatgtaattgcctggaccgagagcgattcaaattcaatcgcttttgatgttaaagatctcactgaaaatgttacctactattctaatgctatagtaaccgactatgttgggtattctacttctgcatcatcggacagctttatgatggatttcagcagcccagagcaaggctat

SEQ ID NO: 223523 - DNA, 931 bp, Unknown
  Bacterial polypeptide expressing nucleotide sequence isolated from the Sargasso Sea
tatgggagaggatgtcagaagtgtaatcattgttggttctggccctgcgggatatactgcaggcctatacacggctagagccctgctggatccattgatgttcgccggttacatgtccgggggtcaactaatgctaacatcagatgttgagaacttccccggataccccaagggaataggcgggcccgaaatgatgatcgatatgagggagcaagctgagaggttcggtttggaggttcatgacaagaatgtcgaaagagtcgatctttccgaacgaccctttcgagtttgggtcgaaggagaggagttcagggctcattcactgattatttgcacaggtgcagaagcaatttggcttggagcagagggtgaggaggagcagaaaggacgtgggatttccacatgtgccacatgtgatggtgctttcttccgagacgaggagatcattgttgttggaggaggtgattcagcgatggaagaggctactttcctgactaggtttgcgagtaaggttactgtcatccaccggagagatgttttcaaggcgtcaaaggtcatgtacgaaagagcagagaagcatcctaaaatagaaatcaagacatttaggcaagtgaaaaaatggattgcaggcgaacaaggccttactggggcggtactggaggatccaagagatggatcggaggaggagattagttgcgctggtgcatttattgccataggtcacaaaccaattactcaattccttggagaacagattgagactgactccgagggatatatagtccacaaggagaatacaatgactgaggttcccggagtttttgctgcaggggatgttgtcgacaaaaggtatcgtcaagcgattacagctgccggcatggggtgccaagctgcgattgatgcagaaaaatggttggaagagcaagattga

SEQ ID NO: 223524 - DNA, 400 bp, Unknown
  Bacterial polypeptide expressing nucleotide sequence isolated from the Sargasso Sea
agagataagtttagagctagtcaaataatgcaggatagagttttaaatcatgaaaaaatagaggtggtttggaatagtactgttgaaaaaattattggtgatggcgccgtttcttctgtagttctaaaaaatactctagatggttcagagtctgaacttaacttagaaggcgtatttgtagcaattggtcatgatccaaatgtagagtttttaaacaatttcgttgaactagatgaaaaaggatatataaaaaccgggttcacaacagacactagcacttctattcctggaatctttgctgcgggagatgttgcagattcgatatacagacaagcaattactgcagcaggaaccggatgtcaggcagctattgattctgaaagatggttagatcattaat

SEQ ID NO: 223525 - DNA, 122 bp, Unknown
  Bacterial polypeptide expressing nucleotide sequence isolated from the Sargasso Sea
ggttgaaggagtttttgcagcaggagatgtatcagatcaaatttatcgtcaagctgtaacctcagcaggttttggatgtatggctgctcttgatgctgaaaaatatttatcagaaaaataaa

SEQ ID NO: 223526 - DNA, 359 bp, Unknown
  Bacterial polypeptide expressing nucleotide sequence isolated from the Sargasso Sea
aatgaaagaaaaaattaataccgaagtactaattattggatctggtccagctggttatactgcagcaatttatgcagcgcgagcaaaccttaagccacatttagtttctggtttagaacctggaggacaattaacaatcactactgatgttgaaaactatcctggatatggagacactattcaaggaccttggttaatggaagaaatgaaaaaacagtctttaaatgtaggtactattattcataatgatttggtaacagaagtagattttaattcttatccttttatttctaaaactgattcaggattaatttttgaaagtaaaacagttataatatctacaggtgcccaagcaagat

SEQ ID NO: 223527 - DNA, 580 bp, Unknown
  Bacterial polypeptide expressing nucleotide sequence isolated from the Sargasso Sea
aaatttaaaatcggaacaagaatttagaggatttggtgtttcggcatgtgcaacatgcgatggtttcttttttaaagaaaaagaagttgctgttgttggaggtggaaatgctgctgtagaagaagcaatgtttttaacaaagtttgcctcaaaagttaaactaattcatagaagaaatgaattaagggcagaaaaaatgcttcaagcaaaattaaaagcaaataaaaaaattgagattatctgggatagcattgttgaggatgttataggagacactaatccaaaatcagtcaaagctattaaaattaaaaatgtgaaaactaataaaactagcgaattgaaagttaatggactttttatagcaataggccatgacccagctacttcgcttttcaagggacaattaaatatggataaagaaggatatattgtaaccaatcccgactctacaataactaatgtgccaggagtttttgcagctggcgatgttaaagataaaatattcaggcaggcagttactgcggctggaatgggttgtatggctgcacttgaggctgaaaaacatttgtcttcaaaatga

SEQ ID NO: 223528 - DNA, 282 bp, Unknown
  Bacterial polypeptide expressing nucleotide sequence isolated from the Sargasso Sea
tatgagtcaaaatccaactaaacacacaaaagtgttaataattgggtctggtcctgctggatacactgctgcagtctatgcggcgagagcaatgttgagtccaattttagtttatggggcggagcctggaggccaattaaccacaacaacagatgttgaaaactttcctggatttgctgatgttattcaaggtccatggcttatggatcaaatgaaagcacaagcaaaagcagttggaacagaaatgattgatgaccatataagttcagtaaacttaaaaac

SEQ ID NO: 223529 - DNA, 551 bp, Unknown
  Bacterial polypeptide expressing nucleotide sequence isolated from the Sargasso Sea
aatggaaaataaagagaagatctcaaacgtagaaaatgtagtaattataggttcgggacctgcaggttacacagctgcaatatacgccgcacgagcaaatcttcaaccattacttgtgacaggatttaattctggtggaattcctggtggacaattaatgactacaacatttgttgaaaattatccaggtttcccagatggagtactaggacctgaattaatggatctaatgaaggctcaagcagaaagatggggcactaatttatacgaaagtgatgtagtctcaattaataccgattcacatccatttgaattaaaaactttagaaggaactataaaatctaactctattattattgcaactggagcaagtgcaaatagattaggggttattaatgaagataaattctggagtaaaggaataagtgcttgtgcaatatgtgatggagccaccccacaatttagagatgaagagttagctgttattggagggggagactctgcatgtgaagaagcagcatatctcacaaagtatggaagcaaagtgcatt

SEQ ID NO: 223530 - DNA, 451 bp, Unknown
  Bacterial polypeptide expressing nucleotide sequence isolated from the Sargasso Sea
atggaaaataaagagaagatttcaaacgtagaaaatgttgtaattataggttctgggcctgcaggttacaccgctgcaatatatgccgcacgagcaaatcttcaaccattgctcgttacaggatttaattctggtggaattcctggtggccaattaatgactacaacatttgttgaaaattatccaggttttccagatggtgtacttggtcctgaattaatggatctaatgaaagctcaagccgaaagatggggcactaatttatacgaaagtgatgttgtctcaataaatactgattcacatccctttgaattaaaaactttagaaggaactataaaatctaactcaattattattgcaactggagcaagtgcaaatagattaggcgtgataaatgaagataaattctggagtaaaggaataagtgcttgtgcaatatgtgatggagcga

SEQ ID NO: 223531 - DNA, 377 bp, Unknown
  Bacterial polypeptide expressing nucleotide sequence isolated from the Sargasso Sea
tatgaaacaaaatccaactaaacacacaaaagtgttaataattggttctggcccagcaggctatacagctgcagtttacgctgcaagagcaatgctaaaaccaataatggttactggaatggagccaggtggtcaactaacaactacaactgatgttgaaaattatcctgggtttgctgaggtaattcaaggaccatggttgatggaacaaatgagagatcaagcaaaggctgtaggaaccgaaatgattgaagatcatatcgcatctgtaaatttaaaatcaaaaccttttgaagcaattggagatggtgggcaaaaatataccgctgatagcataataatatctactggtgctcaagcaagatggctaaacatag

SEQ ID NO: 223532 - DNA, 847 bp, Unknown
  Bacterial polypeptide expressing nucleotide sequence isolated from the Sargasso Sea
gttagtccaaggtttacagcctggtgggcaacttattataacaactgatgttgaaaattatcctgggtacgaggatgtaatacaaggtccgtggttaatggaacaaatgcaagaacaagcaaaaaatgttggaacaaatattataaatgacattataaaaagtgtagactttaaaagcaagccatttaaggctattagtgagtcgggaactgaatatactgccgactcagtgattatctcaacaggagctcaagcaagatggcttggattagattctgagaaaaagtttcaaggttacggtgtttcagcctgtgcaacttgtgatggcttcttttttaaggaaaagaaagttgcagtaatcggtggtggtaattcagctgttgaggaagctttatatttaacaaactttgcgtctaaagtttaccttattcataggcgtgatgagcttcgagcagaaaaaattcttcaaaatagattgtttaaaaatgaaaaagttgaatgtgtctggaatagcgaactaaaagaaatagttggcgatgaagatcctttaaacgtaaaaagtataaacattaaaaatacaaaaactaatgaaaccagcagcattgagctagatggagtctttgttgctatagggcatgatccagctactcaaatttttagggaccaagtcgaaatggatgaagatggatatataattacaaaacctgactcaacacttacaaatgttgaaggtgtatatgcagcaggagatgtaaaggataaaatctatcgtcaggcagttactgcagctggtatgggttgtatggcagcacttgaggcagaaaaatacctagctgaattatcttaa

SEQ ID NO: 223533 - DNA, 733 bp, Unknown
  Bacterial polypeptide expressing nucleotide sequence isolated from the Sargasso Sea
aatgaatcgaaaagttataattattggttcgggtccagcgggtttgacagcagctttatatacagcacgagccaatcttaagcctttagtctttgaaggtaaccagccaggtggtcaattgacaattacaacagatgtagaaaactaccctggattcccagatggaattatggggccagatttaatggaaagctttagaaagcaagccgtgcgatttggtgcagaatgtcattttaaaaatgtaaccaaaattgatttaaataaaaagccttataaaatttgggttggagatgaaaattttaatactgaatctttaatcatcgcaactggtgcctcagcaaaaatgcttggtcttgatagtgaaagagtcttaatgggttatggtgtatctgcatgcgcaacttgcgatggttttttctttaaagataaaaaagttcttgttgttggtggcggtgattctgcgatggaggaagcaacttatcttacaaaatttgcatctgaagtagtaattattcatagaagagataaatttcgcgcatctaaaattatgattgataggacaatgagtaatccaaaaatttctgtcttatggaataaaacaataaatgagattttaggtagtcaggaaaaaggcgtaaatggcgtattactaaaagatactatttcaggtgaatctaatgaagaagcttgtgatggtgtatttatggcaataggacataaacctaatacagat

SEQ ID NO: 223534 - DNA, 409 bp, Unknown
  Bacterial polypeptide expressing nucleotide sequence isolated from the Sargasso Sea
aaaatgcttcaagaaaaactctttgaaaaaaccggggataacggaaacattaatatcctttgggatcatgttttggatgaagtgcttggagacgaatccggcgttaatggcattgtgtgctccaatgtcaatgaaccatcagatcaaactcagcttgatgttcaaggcgtatttattgccattggtcacgatccaaacacatcgttctttggcgatggcttaaaactggacgactccaattacatcattctcgatgagtccaatgctcgattttccactcaaacaagcatagaaggcgtatttgcagctggagatgtcgctgatcctgtatataggcaagctgtgacctctgcaggaagcggctgcatggctgcactggatgcagagaaattcttggaacaaagctagt

SEQ ID NO: 223535 - DNA, 316 bp, Unknown
  Bacterial polypeptide expressing nucleotide sequence isolated from the Sargasso Sea
aatgccaaatacttaccacacaaaagtcttaataattggttcaggacctgccggatatactgcagctatatatgcagctcgggcaaatctaaagccaatcttagtccaaggtctagaaccaggtggacaactcactataacaactgatgtagaaaattatcctggtttttcagatgtgatacaaggaccatggttgatggaacagatgcgagaacaagctgaaaaagttggaacacgtcttatatcagaccttattcaaaaagtagattttacaaaaaaaccatttcattgcttagcagattctggtgatttattt

SEQ ID NO: 223536 - DNA, 179 bp, Unknown
  Bacterial polypeptide expressing nucleotide sequence isolated from the Sargasso Sea
tatgagtgaaaatccaactaaacacacaaaagtgttaataattgggtcgggtccagctggatatacagcagcaatttatgctgcaagagcaatgttaaaaccaatattagttcatggtatggaacctggtggccaattaacaacaacaactgatgttgaaaattttcctggatttaaag

SEQ ID NO: 223537 - DNA, 955 bp, Unknown
  Bacterial polypeptide expressing nucleotide sequence isolated from the Sargasso Sea
gttgaaaattatccaggttttccagatggtgtactaggtcctgaattaatggatctaatgaaagctcaagccgaaagatggggcactaatttatacgaaagtgatgttgtctcaataaatactgattcacatccctttgaattaaaaactttagaaggaactataaaatctaactcaattattattgcaactggagcaagtgcgaatagattaggcgtgataaacgaagataaattctggagtaaaggaataagtgcttgtgcaatatgtgatggagcaaccccacaatttagaggtgaagaattagctgttattggagggggcgactctgcatgtgaagaagcagcatatctcacaaagtatggaagcaaagtgcatttgattgttagatcagaaaaattaagggctagcgcagcaatggtagatagagtaaaagctaatccaaagatagaaattcattggaacacaaaagttaataaagcggatggctctgaatggcttgagaaaatagaaactattcactctctagaaggtaaaggggaaatcaatataaaaggtcttttttacgcgatagggcacacaccaaatacgaagttcttaggcaacaaaattgatttagataataaaggatatattgcttgcaaatcaggaaggccagaaacatctattgaaggcatcttcgcagcaggtgacgttgtcgattctgagtggagacaaggagttaccgctgcaggaactgggtgcatggcagcattagctaccgaaaggtggctagccgagaaaaacttagcaaaaactatagtcagagaaacaccagaaccagaaaaaaaacttaattcatcagattttattgaagaagaagttaatgaagatactttcgattcaaattctgaatggcaaaaagggagttatgcattaaggaaactttatcacgagagtaaaaaacctatcttag

SEQ ID NO: 223538 - DNA, 232 bp, Unknown
  Bacterial polypeptide expressing nucleotide sequence isolated from the Sargasso Sea
atgaatcaaaatccaactaaacacacaaaagtgttaataattggatccggaccagccggatatacggctgcagtttatgcagctagagcaatgctcaaaccaataatggtctctgggatggagccaggaggtcaattaacaactacaactgatgttgaaaattatcctggttttgcagagataattcaaggaccatggttaatggaacaaatgcgagatcaagctaaagctg

SEQ ID NO: 223539 - DNA, 322 bp, Unknown
  Bacterial polypeptide expressing nucleotide sequence isolated from the Sargasso Sea
atgaatcagaatccatctaaacacacaaaagtgttgataattggatctggacctgccggatacaccgctgctgtttatgctgcaagagcaatgcttaaacctataatgatttctggtatggaaccaggaggacaattaacaactactactgatgtagaaaattatcctggatttgcaaaagtgattcaaggtccttggctaatggaagaaatgcgagaccaagctaaagctgttggaactgtgataattgaggatcatatttcatgtgtaaatttaaagtctaaaccattgaagctattgcggaaagcggccaaaaatatac

SEQ ID NO: 223540 - DNA, 626 bp, Unknown
  Bacterial polypeptide expressing nucleotide sequence isolated from the Sargasso Sea
ttccaaatcgataattattgcaactggcgctcaggctagatggctaaatttggaaagtgaaaaaaaatttaaaggatttggtatttctgcttgtgcaacttgtgatgggtttttcttcaaagatcagcaagtagcagtgattggtggaggtaatagtgcagtagaggaagcaatgtttttgactaaatttgcttcaaaggttttgttaatccatagaagagatagtttacgagctgaaaaaattttacaagaaagactatttaataataaaaaaattgaagtaatttggaatagtaaggtttctgagttcgttggagaagaaaatccaaatacattaaaaaaagttattttagagaacacactagatggtgccaaaacaactatagatgtaaatggtgcttttatagctataggacatgatcccgctacttcactttttatagataagttaaaaatggacgaggaaaattatataattactaaacctgatagtactgaaacaagtattagaggagtctttgcagcaggtgatgtaaaagataaaatttataggcaggctgtaactgctgctggtatggggtgtatggctgctttagaggctgagaaatatatagcagaaaattaat

SEQ ID NO: 223541 - DNA, 793 bp, Unknown
  Bacterial polypeptide expressing nucleotide sequence isolated from the Sargasso Sea
aactatccaggctactcaaaagtgattcaaggcccgtggctaatggaagaaatgaaaggtcaagctgagtctgttgggacagaaatgatacaagaccatattaataaagttgatttatctgctaagccttttaaagctaatggtgatagtggtcaggtttatacagctgactcgataataatttcaacgggagctcaagcaagatggttaaatttaaaatctgaggaaaaatatagaggttttggagtttcggcttgcgctacctgtgatggtttcttttttaaagataaagaagttgcagttgtaggaggaggaaatgcagctgtagaggaagcaatatttttaacaaaatttgcttccaaggtaaaactaattcatcgaagaaatgagcttagagcagagaaaatgcttcaagaaaaattaaaatctaataagaaaatagaaatagtttgggatagtgttgttgaagaagttgtcggaaaaaatgaaccaaaatctgtaagtgcaattaaaattaaaaatgtaaaagataataaagtaaaagaattaaaaattgatggattatttatcgcaataggacatgatccagcaacatctttatttaaagatcaacttaaaatggacaaagaaggatatttaataacgaaacccgattctacagaaacgaatattcctggagtatttgctgcgggggatgtcaaagataaaatttttaggcaagcagtaacagctgcagggatgggatgtatgtctgctttagaagcagagaaatatctttctgactctaattaag

SEQ ID NO: 223542 - DNA, 337 bp, Unknown
  Bacterial polypeptide expressing nucleotide sequence isolated from the Sargasso Sea
atgaacaaagaaaaagttttaataattggatccggtccggcaggttatacagcagcaatttacgccgctagagctggtcttaaccctttattaatatcaggtttagagccgggaggacagctaacaatcactaccgatgttgagaattttccaggttttgaagatcccattcaaggaccatggttaatggaacaaatgaaaaaacaagccgtagcttatggaacaagaataatgaatgactatgttttagaggttgatttcaataaaaaaattcattgtgtcaaaacggaaaaagacaaattctcttcacacacagtaataatagctactggtgcaa

SEQ ID NO: 223543 - DNA, 369 bp, Unknown
  Bacterial polypeptide expressing nucleotide sequence isolated from the Sargasso Sea
tatgagtcaaaatccaacaaaacacacaaaagtgttaataattggatccggtcctgccggatacactgcagcagtttatgctgcaagagcaatgcttaaacctatactagttcacggaatgcaaccaggtggacaattaacaactaccactgatgttgaaaattttccaggttttgcggaagtaatccaaggaccttggttaatggaacaaatgaaagaacaagcgcaagcagttggaactgaaatgattgaagatcatattgcttctgtaaatttaaaatcaaaaccttttgaagcagttggagacggtggacagaaatatactgcagatacaattattatttcaactggagctcaagcaagatggtt

SEQ ID NO: 223544 - DNA, 226 bp, Unknown
  Bacterial polypeptide expressing nucleotide sequence isolated from the Sargasso Sea
tatggaagataaagatacgaacaacgatgcaaatactcctgatttcccaaagaaatcaaaatctgcatacgatgtaattataattggtgcaggaccagcaggatatactgcagggatttattgttcgagagcaagacatgacacattaataatttcgggattgttgccaggaggacaattaatgaatacaacagatgtagaaaattatccaggatttgaagaaaga

SEQ ID NO: 223545 - DNA, 661 bp, Unknown
  Bacterial polypeptide expressing nucleotide sequence isolated from the Sargasso Sea
tgaggctttaggtgaaagtggtcaaaaatataccgcagactcaatcattatctctactggagctcaggcaagatggcttaatattgaatctgagcaagagtacaaagggtttggagtttctgcttgcgctacatgtgatgggttcttttttaaagataaaactgttgcagttgttggtggaggaaatgcagctgtagaagaagcaatgtttcttactaaatttgcatctaaggtaaaacttattcacagaagaaacgaattaagagctgagaaaatgttacaaaaaaaattaatggaaaataaaaaaattgaaatagtatgggatactgttgttgaggatgttttgggagataaggatccgaaaaatgtaacaggtttaaaggtaaaaaatttaaaaacaaataaatctgaggtaatgaaaattgatggtcttttcattgctataggtcatgaccctgctacccaattatttaaagatcagcttaaaatggataaagaaggttatttgattaccaagccagattcaactgaaaccaatgttcctggggtgtttgcggctggagatgttaaagataaaatattcagacaagcagtaactgctgctggaatggggtgtatggcggcattagaggctgaaaaacatctttctcataataaataa

SEQ ID NO: 223546 - DNA, 247 bp, Unknown
  Bacterial polypeptide expressing nucleotide sequence isolated from the Sargasso Sea
atgaagaataaaattgaaacagatgtgttaattattggatcaggcccagcaggatatacagctgcaatttatgcagctagagcaaatttaaaacctcaccttgtatcagggttagaaccaggtggacagcttacaattacaactgatgttgagaattatccaggatttggagatgttattcaaggtccatggttaatggagcaaatgaaagaacaagctttaaaagttgggacagagttccataatg

SEQ ID NO: 223547 - DNA, 390 bp, Unknown
  Bacterial polypeptide expressing nucleotide sequence isolated from the Sargasso Sea
tatgacacaaaatccaactaaacatacaaaagtgttaataattggatcaggaccagctggttacacagcggcagtttatgctgctagagcaatgctaaagcctattctagttcatggaattgaaccaggtggacagttgacgacaacaactgatgttgaaaattatcccggttttgctcaagtaattcaaggtccttggttgatggatcaaatgaaagaacaggcccaagctgttggaacagaaatgatacaagatcatattaagtcagtagatttaaaaaaaacaccattccaagctgttggtgaaagtggccagatgtatacagctgactcaataattatttctacgggagctcaggcaagatggctaaacattgagtctgaacaaaa

SEQ ID NO: 223548 - DNA, 751 bp, Unknown
  Bacterial polypeptide expressing nucleotide sequence isolated from the Sargasso Sea
aacatttgttgaaaattatccaggtttcccagatggagtactaggtcctgaattgatggatctaatgaaggctcaagcagaaagatggggtactaatttatacgaaagtgatgtcgtctcaataaatactgattcacatccctttgaattaaaaactttagaagggactataaaaactaactctattattattgcaactggagcaagtgcaaatagattaggcgtgattaatgaagataaattctggagtaaaggaataagtgcttgtgcaatctgtgatggagcaactccacaattccgagatgaagaactagctgttataggaggaggagactctgcatgtgaagaagcagcatacctcacaaaatatggcagcaaggtgcatttaattgttagatcagaaaaattaagggctagcgcagcaatggttgatagaataaaagctaatccaaagataaaaatccattggaacacaaaagttaataaagctgatggatctgaatggcttgagaaaatagaaactattcactctaaagagggtaaaggggaaatcaatataaagggtctcttttatgcgataggacacacaccaaatacgaagttcttaggcaacaaaattgatttagataataaaggatatattgcttgcaaatcaggaaggccagaaacatctattgaaggcatttttgcagcaggtgatgttgttgattctgagtggagacaaggagttacagctgcaggaactggatgc

SEQ ID NO: 223549 - DNA, 720 bp, Unknown
  Bacterial polypeptide expressing nucleotide sequence isolated from the Sargasso Sea
ttagtgttggaacaaatattgtttttgatactattattgatgttgatttatctagcaaaccgttctctttacaatctgactcaggtaaaaattatacatgcgatgcattaataatttcaacaggcgctcaagcaaaatggttaggtctagagtcagaaaataaatttaaaggttacggagtttcagcatgtgcaacttgcgatggttttttctataaagataaaacagttgttgttgttggaggaggaaatactgcggctgaggaagctatttttttaaccaactttgctagtgaagtaaaattaattcatagaagagattcattacgggcagaaaaaattcttcaaaaaaggctgatggataataaaaagattgaaattatttggaactcagaaattacagaaataattggtgatgaaaatccgttaagcgtgaagcaagtagtccttagaaacaacaaagatgacagcacaaaaaaaataaacactgatggtatttttgtggctattgggcatagcccagcttcaatgatatttaaaaatcaacttaatatggatgataaaggctatatctttactgaagcggactcaacaaaaacaaatgtagaaggtgtttttgcggcaggagatgttacagatgataaatatagacaagctgttacagctgcaggtatggggtgcatggcggctcttgaagttgaagagtttttatctgaataaa

SEQ ID NO: 223550 - DNA, 286 bp, Unknown
  Bacterial polypeptide expressing nucleotide sequence isolated from the Sargasso Sea
tatgaataataaatcaactaaacacacaaaagtgttgattcttggatctggtcctgctggatatacagctgcaatttatgcggctagagctatgttaagtccgattttagtccatgggtctcaacctggaggacaattgaccacaacaactgatgttgaaaattacccaggatattcaaaagttattcaaggcccatggcttatggatgaaatgaaaggccaggcggaagcagtaggaacacaaatgattcaagatcatattaataaagtagatttatcaagtaaa

SEQ ID NO: 223551 - DNA, 671 bp, Unknown
  Bacterial polypeptide expressing nucleotide sequence isolated from the Sargasso Sea
aggaagtgggccagctggatacacagcggcaatttatgcagctagggcagatctaaaaccaataatttatactggtttagaaccaggtggtcaattaactactacaactgaagtagataattttcctggatatccccaaggcatagatggaccaacaatgatgaatgagttaagagaacaagcagaaagatttggaacaaaagttgaagttgattttatttcaagagtagaattttcaaaagaaaaaggaggagttcacaagatttatacacaaaatggtgatgaaatccagtcaaagacaataataatatgtacaggtgcttctgctaaatatcttggtcttccaagtgaacaaaaacttatcggtggtggagtttcagcttgtgcagtttgtgatggattcttttacaaggatcaagatgtagctgtagtaggtggtggagatagtgcaattgaagaagcaacatatttagcaaaaatctgtgaaaatgtgacaatgctagtaagaaaggatcactttagagcttcaaaagcaatgcaacatcggataagcaattttaaaaatattaatgttctttttaattctgaaatagatgaagtattaggagacaatgttgttgagggaataaaaattaaaaataatatcaccaatgatttttctgaacttaata

SEQ ID NO: 223552 - DNA, 379 bp, Unknown
  Bacterial polypeptide expressing nucleotide sequence isolated from the Sargasso Sea
atgaatcaaaatccaactaaacacacaaaagtgttaataattggatctggcccagccggatacacagccgcagtttatgctgcaagagcaatgcttaaacctataatggtaagtggtatggagccaggaggtcaattaaccaccactaccgacgtagaaaactatccaggatttgcagaggtaatacaaggtccttggttaatggagcaaatgcgagaacaggctaaagcagttggtacagaaatgattgaagatcatatctcatcagttaacttaaaatcaaaaccgtttgaagcaattggagacggtggtcaaaaatatactgctgatacaataattgtttctactggtgctcaagccaaggtggctaaatattgag

SEQ ID NO: 223553 - DNA, 400 bp, Unknown
  Bacterial polypeptide expressing nucleotide sequence isolated from the Sargasso Sea
tatgagtcaaaatccaacaaaacatacaaaagtgttaataattggatccggtcctgctggatatacagcagctgtttatgctgctagagcaatgctgaaaccaatgttagtggctggaatgcagccaggtggacaattaacaataactactgatgtagagaactatccaggcttttctgatgttatccaaggaccttggttaatggatcaaatgagagaacaggcgaaagcagttgggacagaattaattgatgatcatataaaatcagtaaatttaaaatccactccctttgaggctataggtgatggtggccaaaaatacacagcagattcgattattatctcaaccggtgcacaagctagatggttaaatattgaatctgaagaaaaatttaaggga

SEQ ID NO: 223554 - DNA, 583 bp, Unknown
  Bacterial polypeptide expressing nucleotide sequence isolated from the Sargasso Sea
atgaaaagaaaagtaatcattataggctctggtccggcaggattgacatccgccatttacgccgccagggcgagtttaaagccgctagtttttgaaggtattcagcctgggggtcagctaaccataacgacagatgtagaaaattacccgggttttccaaagggaatacttggaccagaacttatggatttgtttagaaaacaagctcagagattcggtgcagagtgcaggttctctgcagtagatcatgttgatttatctgaaagaccgtttaaaataatatctcaagatgaacaattttttacagagtcagtaattatatctactggggctactgccaaacttttagggcttaaatcagagaaaaagatgatgggtcacggtgtttcggcatgcgccacctgcgatggattttttttcaaagaaaaaaaagttctggttatcggcggcggtgattctgctatggaagaagcttcctttttaacaaagtttgcaaaagaagttgtgattgtccataggagaaatgagttcagagcatcaaaaataatggtagaacggagtattatcaaatccctaaaataaa

SEQ ID NO: 223555 - DNA, 618 bp, Unknown
  Bacterial polypeptide expressing nucleotide sequence isolated from the Sargasso Sea
atgcagttatcgtatctactggggcgcgctcagtcatgctagatcttcccaatgagtttgaattagtcggacatggtgtatcaacttgcgctacttgtgacggattctttttccgcgatcaggagatagccgtagtaggcggtggtgattcggcaatggaagaggctaccttcctgtcacgctttgctagcaaggtaacaattattcatcgaagagaagaacttagagcttcaaaaattatgcaagaacgagcattctctaatccaaaaattgatttcttatggaatcacgaagtgatcggctatgtcggcgagtcgaaacttgaaggaatcacagtccgtgatgttaactccggtaatgaaaagaatatagatctttcaggtttgtttatagctataggacataagcccaatacagacatctttatcaatcaactcgatttgttagataacggctatgtggcaactaagcccgactcttctttaacaaatatttcaggagtcttcgcatgtggtgatgttcaagattttacctatcgccaagcaatcactgctgcggggtctggttgtatggctgcgatagatgctgaacgatggttagaagagcaaggtgactgaa

SEQ ID NO: 223556 - DNA, 871 bp, Unknown
  Bacterial polypeptide expressing nucleotide sequence isolated from the Sargasso Sea
ggcccagcagggtacacagcggcaatttatgcggccagagcaaatttgaaacctcatctcgtatcaggattagagcctgggggacagttaacaattacaactgacgttgaaaactatcctggctttggagatgttatacagggtccttggttaatggagcaaatgaaacaacaagcagtaaaagttggaacggaatttcataatgatatagttaataatgttgaatttgataaaaatccttttcatgctcaaactgacttaggtatagaattcaaatcaaaatcaataattattgcaacaggagctcaagcaagatggctaaatttagagtcagaaaataagttcaaaggttttggaatttctgcatgcgcaacctgtgatggttttttttttaaagaccaaaatataattgtagttggtggtggaaatagtgctgttgaagaggctctttacctcacaaactttgcttcaaaagtaactttagttcatagacgtaataaattgcgtgctgaaaaaattcttcaagaaaggctttttaaacatccaaaaattgaagtgatttgggatcatgttgttgaagagtttattggttcggatcaaccactaacacttaaaaaaataaaactaaaaaatgttaataataattcagagaaaataattaattcaacaggagcatttattgctataggacatgatccagcaacttctttatttaaaaataaaattaaaatggataatgataactatattattacaaaaccagatagtacagaaacaaatattgaaggcgtatatgcggctggagatgtaaaagataaaatatttagacaggcggtcactgctgctgggatgggttgtatggctgctctag

SEQ ID NO: 223557 - DNA, 788 bp, Unknown
  Bacterial polypeptide expressing nucleotide sequence isolated from the Sargasso Sea
tatgaacaatcaaagagaaaaagttataattattggttcaggagctgcaggtttaactgctgcaatatatgctgcaagagctaatctgaatccaattgtaattgaaggaatccaacctggtggccaacttacaataactacagatgttgaaaactacccaggatatgctgatgttgttcaaggtccatggatgatggaacaaatgagatctcaggcaataaaagttggagctcgtataatcaatgatatagttgttaaaattgatttaaaaaaaaatgaaaagatggtggttttagattcaagtaaatctttgacagcagacacattaattatagccactggagcacaggctaaatggttaggtttagagagtgaaaacaaatataatggaagaggcgtttcagcttgtgcaacctgtgatggttttttttacagaaacaaagaagttgcagtagttggaggaggtaatacagctgttgaggaggctttatatttatcaaatatatgttctaaagtaaatttaatacatagacgtgatgcactaagatcagagaagattttacaagacagacttttttctaaaaaaaatataaatattatttggaataatgaagttagcgaaattctaggtgatgaaaatggggttaatgctcttaaattaatctcaactaaacaaaataaaacagagataattagagttgatggtgttttcattgcaattggtcatagtccatcaacaaagccttttgaagatgtgctggaaatggacaatgaaggatatattatag

SEQ ID NO: 223558 - DNA, 778 bp, Unknown
  Bacterial polypeptide expressing nucleotide sequence isolated from the Sargasso Sea
tttgcagaagttatacagggtccttggttaatggatcaaatgaaagaacaagctaaagctgttggcacagaaatgattgaagatcatattggttcagtaaatttaaaatctactccatttgaagctataggagatagtggtcaaaaatatactgccgacagcataataatttctacaggtgctcaggcaagatggttaaatttaaattcagaacaagaatttagaggatttggtgtatctgcttgcgcaacatgtgatggtttcttttttaaagataaagaagttgcagtagttggtggaggcaatgcagctgttgaagaggcaatgtttcttacaaaatttgcatccaaagtaaaattaattcacagacgagatagtttaagggctgaaaaaatgcttcaaaaaaaattaatagaaaataaaaaaattgaaattatttgggactctgtagttgaagatgtgttaggtgataaaaatccaaaaaatgttaaaggaattaaaataaaaaatatcaaaacaaataaaacacaagaattaaagcttgatggtgtatttatagctattggtcatgatccagcaacccagctatttaaagatcaactggaaatggataaagaaggatacttaatcacaaaggcagactctactgaaactaatatacctggtgtttttgcagctggagatgtaaaagacaaaatttttagacaagcagttacagctgcaggtatgggatgtatggcagctcttgaggcagaaaaacatctctctcacaattaaa

SEQ ID NO: 223559 - DNA, 382 bp, Unknown
  Bacterial polypeptide expressing nucleotide sequence isolated from the Sargasso Sea
atgagtcaaaatccaactaaacacacaaaagtgttaataattggatccggccctgccggatacactgctgcagtttatgctgcaagagcaatgttaaaacctattatgatttctggaatggagccaggaggacaattaacaactacaactgatgtagaaaactaccctgggtttgctgaagtaatacaaggaccttggttgatggaacagatgcgagatcaagcgaaagctgtaggtacagaaatgattgaagaccatattgcttctgtaaacttaaaatccaaaccatttgaagcaataggagataatggacaaaaatatacagcagactcaattataatttcaaccggagctcaagcaagatggttaaatatagaatctg

SEQ ID NO: 223560 - DNA, 511 bp, Unknown
  Bacterial polypeptide expressing nucleotide sequence isolated from the Sargasso Sea
catggaatatcaacatcataagctcattatccttggatcaggaccagcaggttatgctgcaggaatttatgcagctcgagctggactagaaccattgctaataactggtgctgagcaaggaggtcagctaacaactaccacagacgtagagaattggcctggggatcatgagggtttacaaggcccagaattgatggaaagaatgaaaaaacatgcagaaatgtttgacgttcaaatagtaaatgatcatatagattcaacagaattaactgaaaaaccgtttaagttaacgggcagtcaaaattggtcatgtgactctttaattatttcaactggggcaagtgcaaaatatttaggactaccttcagaaaaagaatttttaggcaaaggtgtttcagcatgcgctacttgcgatggatttttctatcgagatcaagaggttgcagtagttggaggaagtaacactgcggctgaagaagctttgtatttgtctagaatttgctcgaaagtt

SEQ ID NO: 223561 - DNA, 572 bp, Unknown
  Bacterial polypeptide expressing nucleotide sequence isolated from the Sargasso Sea
aaaatatagaggatttggagtttctgctggtgcaacatgcgatggtttcttctataaaaataaaaacgttgctgttgtaggtggtggcaatacagcagctgaggaagcactttttctctcgatcttttgtaaaaaagtaactctaatccatcgaagagataaattaagagctgaaaatatattacaaaaaagattatttgagaaaaaaaatattgaatttatttggaattccaatgtagaaaaagttttaggtgatgctaaaaaaaaaacaattacctctcttgcaatcaataattgtcagaacaacctcaagaagactattccggttgatgggttttttgtagcaattggtcatagtccaacaactgaaatttttaaaaaaaagctgcaaatggatgatgagggctatatttttactgatgcggactcaacaaaaaccagtgtagacggagtttttgcagctggtgatgtaactgataaagtcttcaggcaagctgttacagctgcaggcatgggatgcatgggcgcattagaagctgaaagctttttgacaaaaaaaaacgttatttaat

SEQ ID NO: 223562 - DNA, 616 bp, Unknown
  Bacterial polypeptide expressing nucleotide sequence isolated from the Sargasso Sea
atgaataataagtctactaaacatacaaaagtgttgattcttggatctggcccagctggttatacggcagctatttatgctgccagagcaatgcttaaaccaatattggtatttggttctgaaccaggtggtcaattaaccacaacgactgatgttgaaaattttcctggatattcaaaagtaattcaggggccttggttaatggaagaaatgaaaggtcaggcaaaagctgtgggaaccgaaatgattcaagaccacataagtaaagtggatctttccaaaaaaccttttattgctagaggagatagtggtcaggtttatactgcagatagctttataatctcaacaggagctcaagcaagatggctaaatttaaaatctgaacaggaatttagaggtttcggtgtgtctgcttgtgcaacttgcgatggctttttctttaaggataaagaggtagctgtagttggaggtggcaatgctgccgtggaagaagcgatgttcttaacaaaattcgcgtctaaagtaaaacttatacatagaagaaatgaacttagagcggaaaaaatgctccaagcaaaattaaaagcaaataaaaaaattgagataatttgggaca

SEQ ID NO: 223563 - DNA, 172 bp, Unknown
  Bacterial polypeptide expressing nucleotide sequence isolated from the Sargasso Sea
tatggatgaaagtggatacataattacagagcctaaatcaactattacaaatatacctggagtttttgcagctggagatgttcaagataaagaatacaggcaagctgtaactgctgctggaacaggatgtatggcggctttggatgctgaaagatatttacaggaaatttaa

SEQ ID NO: 223564 - DNA, 261 bp, Unknown
  Bacterial polypeptide expressing nucleotide sequence isolated from the Sargasso Sea
aatgcattcaaaagttctcataattggttcaggacctgcaggatatacagccgctatctatgctgcgcgtgctatgcttgaacctactcttgtgcagggaattcaaccaggaggtcaattaacaataacaactgatgttgaaaattatcctggttacggagatgtaattcaaggtccttggcttatggaacaaatggaagcccaagcaaagaatgttggaacaaaaattattagtgatattattgaaactgtagattttaa

SEQ ID NO: 223565 - DNA, 805 bp, Unknown
  Bacterial polypeptide expressing nucleotide sequence isolated from the Sargasso Sea
ccaaaaaaaacaaagacatcatatgatgtaattataattggtgcaggacctgctggatacactgcaggaatttattgttcaagagcaagacatgacacactaataatttcaggacttttgccaggcggtcagttaatgaatacaacagatgttgaaaattatccaggatttgatgaaggaattatgggaccagatttaatgttaacaatgagaaaacaagcagaacgaatgaacactacaattatcgacgatgtagttgtgaatgtagatttccgtgcaaaaccattcaaggttttaacaggttcagaagaatatgaagcaaaagctgtaatagtttgtacaggtgccacaccaagaaaaattggtatagaaggtgagcaaacatttagcggaaagggagtttcatattgtgcaacatgtgatggtgcatttttcagaaatcaagacattgcagttgttggaggaggagatacatgtatggaagaagcaacatttcttacaaaatttgcatcaaaggttcacatcattcacagacgagatacattcagagcaagtaaaatcatgcaagatcgtgcattaaacaacgagaatatcgaagttcattggaacagcgttattgaagatatcaaaggtgaccaaaaagttcaacagattattctaaaggatacaaaaactggagaaaataaaaccttggagatgggaggagtttttgtagcaattggtcatgaaccaaataccgaattattcaaaaatcaattggagatggatgaaaatggatacatcattcagaaacaaaatacagaaa

SEQ ID NO: 223566 - DNA, 682 bp, Unknown
  Bacterial polypeptide expressing nucleotide sequence isolated from the Sargasso Sea
aatggaaaataaagaaaaaaatctaaatgtagaaaatgttgtaattataggttcaggacctgcaggttatacagcagcaatatatgcagcaagagcaaatcttcaacctttgctcgtaacaggatttaattccggtgggattcctggtgggcaattaatgactacaacatttgttgaaaattatccaggttttccagatggagtattaggtcctgaattgatggatctgatgaaggctcaagcagaaagatggggtactaatttatacgaaagtgatgttttgtcaataaatgttgattcacatccctttgaattaaaaactttagaaggaactataaaagctaagtcaattatcattgcaactggagcaagtgcaaatagattaggcgttataaatgaagataaattctggagtaaaggaataagtgcttgtgcaatatgtgatggagcgactccacaatttagagatgaagaattagctgttataggaggaggcgactctgcatgtgaagaagcagcatacctcacaaagtatggcagcaaagtacatttgatcgttagatcagaaaaattaagggctagcgcagcaatggttgatagagtaaaagctaatccaaagatagaaattcattggaacacaaaagttgacaaagctgatggttatgaatggcttgaaaaaata

SEQ ID NO: 223567 - DNA, 325 bp, Unknown
  Bacterial polypeptide expressing nucleotide sequence isolated from the Sargasso Sea
ggagacgagtcgggtgtcacgggaatgagggtggagagtaaatctggggaagtaaagtccatttccgtttctggaatatttatagcgataggacacaccccaaatacgactatctttgcgaaccagctggcaatgtcagatggctatattgaaataaagagtgggagcgaaggaaacgctacctcaacaagcgttgcgggagtttttgcggcaggtgatgtcgctgatcatatctaccgccaagctataaccagcgcgggtttcgggtgcatggcagccctggatgcagagaaatatttggacaacaaacaaaatcagagttgag

SEQ ID NO: 223568 - DNA, 667 bp, Unknown
  Bacterial polypeptide expressing nucleotide sequence isolated from the Sargasso Sea
accctttaaggccattggtgacagcggacaggaatacactgctgattcaattataatttcaactggcgctcaagctagatggttaaatttagagtctgaacagaagtatagaggatttggagtttcaggatgtgcaacatgcgatggtttcttttttaaagataaagaagtagcagttataggtgggggtaatgctgcagtagaagaagcaatttttctaacaaaatttgcaaccaacgttaaacttattcatagaagaaatgaattgcgtgcagaaaaaatgctacaaaaaaaattaaaagaaaacaaaaaaatagaaattatctgggattcagtactagaagaagttttaggaaacgaagatccaaaaggtgtaactggaattaaaatcaaaaatataaaaacaaataaaactactcaacttaatgttcatggtttatttattgccatagggcatgatccagcgacgtccttatttaaaggtcaattggacatggataaagaaggttatttaatcacaaaacctgattctactgagacaaataaaccgggagtgtttgctgctggagatgtaaaagacaaaatttttagacaggcagtaactgctgctggcatgggttgtatgtcagctcttgaggctgaaaaatttttatcttcaaaaaattaa

SEQ ID NO: 223569 - DNA, 369 bp, Unknown
  Bacterial polypeptide expressing nucleotide sequence isolated from the Sargasso Sea
aatgaaaaaacattcaaaagtattaattttaggatctggacccgctggttatacagccgctatttacgctgctagggcaatgttaaagccaattttagttcatggttccgaacctggagggcaattaactactactactgatgtagaaaactatcctggatattctaaagtagttcaaggcccgtggttaatggaagaaatgaaaggccaagctaaagcagttggaaccgaaatgattcaagatcatataaaaaaagtagatctttcaaagaaaccttttgaagctgtgggagatagtggtcaagtttacactgcagatagctttataatttcaaccggtgctcaagcaagatggttaaacctaaaatc

SEQ ID NO: 223570 - DNA, 206 bp, Unknown
  Bacterial polypeptide expressing nucleotide sequence isolated from the Sargasso Sea
aatggaaaataaagagaagaattcaaacgtagaaaatgttgtaattataggttccgggcctgcaggttatacagctgctatatacgcagcacgagcaaatcttcaacctttgcttgtaacaggatttaattctggtggcattcctggtgggcaatttatgaccacaacttttgttgaaaattatccaggtttccccgatggagtac

SEQ ID NO: 223571 - DNA, 417 bp, Unknown
  Bacterial polypeptide expressing nucleotide sequence isolated from the Sargasso Sea
aatggaaaataaagaaaaaatttctaatgtagaaaatgttgtaattattggttcaggtcctgcaggttatacggcagcaatttatgcagcaagagcaaatcttcaaccattgctcgtaacaggatttaattctggtggaattcctggtgggcaattaatgactacaacatttgttgaaaattatccaggttttccagatggtgtactaggtcctgaattaatggatctaatgaaagctcaagccgaaagatggggcactaatttatacgaaagtgatgttgtctcaataaatactgattcacatccctttgaattaaaaactttagagggaactataaaatctaactcaattattattgccactggagcaagtgcaaatagattaggcgtgataaacgaagataaattctgggagta

SEQ ID NO: 223572 - DNA, 688 bp, Unknown
  Bacterial polypeptide expressing nucleotide sequence isolated from the Sargasso Sea
atgaccgaatctatacatcataaattaatcatccttggatctggacccgcgggctattctgcggctgtttatgccgctcgtgccaatcttaagcctgtcataatcactggatctgaaccgggtggacaactcatgaccacaacggatgttgagaattggccaggcgatcctgagggcttattaggcccggctcttatggatcgaatgcttgaacatgcaaaaagatttgatacagaagtcatttacgatcacattgagagtgcggaacttggctcaaggcctttcactttaaatgggggcaacgctaaatacactgctgatgcattgattattgcaacaggatcaactgctagatatctgggcttggaatcagaagagaaatacaaaggcaagggtgtttctgcctgtgcgacttgcgatggttttttctacaaggatcaagatgtaatcgtagttggcggcggaaatgttgccgttgaagaggcaatttacttatcgaatattgcgaaaaacgtgactctgattcatcgaagagatgaactgagagcggaaaaaatgcttcaagaaaaactctttgaaaaaaccggtgaaaatggaaatattaaaatcctctgggatcacgttttggatgaagtgcttggagacgaatcaagcgttaatggcattgtttgctccaatggtcaatgaa

SEQ ID NO: 223573 - DNA, 287 bp, Unknown
  Bacterial polypeptide expressing nucleotide sequence isolated from the Sargasso Sea
tatgagtcaaaatccaactaaacacacaaaagtgttaataattggatccggccccgctggatacactgctgccgtttatgctgcaagagcaatgctaaaacctatcttggttcatggcatggagccaggaggtcaactaacaacaactactgatgttgaaaattatccaggttttgcagaagtaattcaagggccttggttaatggagcagatgaaagaacaggcacaagctgttggaacagaaatgattgaagatcatatcgcatctgtaaatttaaaaatcaaac

SEQ ID NO: 223574 - DNA, 154 bp, Unknown
  Bacterial polypeptide expressing nucleotide sequence isolated from the Sargasso Sea
tatgagtcaaaatccaactaaacacacaaaagtgttaataattgggtcaggccctgctggatacactgcagccgtttacgccgcaagagcaatgcttaatccaatattagtctatggttcagagcctggtgggcaactaaccactacaaccgat

SEQ ID NO: 223575 - DNA, 148 bp, Unknown
  Bacterial polypeptide expressing nucleotide sequence isolated from the Sargasso Sea
atgagtcaaaatccaactaaacacacaaaagtgttaataattggatcaggtccagctggatacactgcagcagtttatgctgctcgtgcaatgttaaatcctattttagtttatggatctgagccaggaggacaattaacaacgacaa

SEQ ID NO: 223576 - DNA, 397 bp, Unknown
  Bacterial polypeptide expressing nucleotide sequence isolated from the Sargasso Sea
tatgaatcaaaatccaactaaacacacaaaagtgttaataattggatctggtcctgccggatacacagcagcagtttacgctgcccgtgcaatgttaaatcctattttagtttatggatctgagccaggaggtcaattgacaactactactgatgttgaaaattatccagggttttctgaagttattcaaggaccatggttaatggatcaaatgaaagaacaagcaaaagctgttggaacagaaatgattgaagatcacattggctcaattaatttaaaattaaaaccattcgaagctattggagacagtggtcaaaaatatactgctgagagtataattattttcacagggggctcagcaagatggttaaatataaaatcagaacaggaaatttag

SEQ ID NO: 223577 - DNA, 754 bp, Unknown
  Bacterial polypeptide expressing nucleotide sequence isolated from the Sargasso Sea
atgaatacaatcattataggaagtgggccagctggatatacagcggcaatttatgcagctagagctgatctcaaaccaataatatatactgggttagaaccaggtggtcaactaactactacaactgaagtagataattttcctggataccctcaaggtgttgatgggccaaccatgatgaatgaattaaaagaacaagcagaaagatttggaacaaaagttgaagttgattttatttcaagagtagaattttctaaagaaaaaggcggtgtacataagatatacactcaaaatggagatgaaattcaatctaaagcaataataatatgtacaggtgcttcagctaaatatcttggtctcccaagtgagcaaaaactcattggaggtggagtttcagcttgtgcagtttgtgatggcttcttttataagaatcaagatgttgctgtagtaggtggaggagatagtgctattgaggaagcaacatatttagcaaaaatttgtaataatgttaccatgttagtaagaaaggatcactttagagcttcaaaggcaatgcaacatcgattaagcaattttaaaaatattaatgtgctttttaactctgaaatagatgaggtattgggggacaatgttgttgaaggaataaaaattaaaaataatatcaccaatgagttttctcaagttaatattaccggtttattcattgccattggccacactccaaatacagatatttttaaaaggtattgttgat

SEQ ID NO: 223578 - DNA, 766 bp, Unknown
  Bacterial polypeptide expressing nucleotide sequence isolated from the Sargasso Sea
tattcaaggtccttggttaatggaagaaatgaaaggccaggcaaatgctgttgggacagaaatgatacaagatcatataaaaaaagttgatctatcaaaaaaaccttttgaagctattggagatagtggtcaagtttatagcgcagatagttttattatttctacaggagctcaggctaggtggctaaatttaaaatcagaacaagaatttagagggtttggtgtttcagcatgcgcaacatgcgatggtttcttttttaaagaaaaagaagttgctgttgttggaggtggaaatgccgccgtagaagaagcaatgtttttgacgaagtttgcctcaaaagttaaactaatacatagaagaaatgaattaagggcagaaaaaatgctccaggcaaaactaaaagcaaataaaaaaattgaaattatctgggatagtgttgttgaggatgttatcggggacactaatccaaaatcagtcaaggctatcaaaattaaaaatgtaaaaactaataaaactagcgaattgaaagttgatggactttttatagcaataggccatgacccagctacttcacttttcaagggtcaattaaatatggataaagagggatatattttaaccaatcctgattctacaataactaatgtgccaggagtctttgcagctggcgatgttaaagataaaatattcaggcaggcagttactgcggccggaatgggttgtatggctgcacttgaggctgaaaaacatttgtcttcaaaatga

SEQ ID NO: 223579 - DNA, 410 bp, Unknown
  Bacterial polypeptide expressing nucleotide sequence isolated from the Sargasso Sea
tatgaatcaaaatccaactaaacacacaaaagtgttaataattggatctggtccagccggatatacagctgcagtttatgctgcaagagcaatgttaaaacctattatggtttctggcatggagccaggtggacaattaactaccacaactgatgttgaaaattatcccggttttgcagaagtaattcaggggccatggttaatggaacagatgcgagatcaagctaaagctgtaggtacagaaatgattgaagatcacatctcttcagtaaatttaaaatcaaaaccttttgaggctattggagatggtggtcaaaaatatactgcagattcaattataatttcaactggagctcaggcaagatggttaaatattgaatctgaacaaaaatttagaggatttggtgttt

SEQ ID NO: 223580 - DNA, 799 bp, Unknown
  Bacterial polypeptide expressing nucleotide sequence isolated from the Sargasso Sea
tactgatgttgaaaattttccaggatttgctgaagttattcaaggtccgtggttgatggatcaaatgaaagaacaagcaaaaacagttggaactgaaatgattgaagatcatattggttcagtaaatttaaaatctactccgtttgaagctataggcgatagtgggcaaaaatatactgctgatagcataattatttctacaggggctcaagcaagatggttaaatataaaatcagaacaggaatttagaggatttggagtttctgcttgtgcaacttgtgacggtttcttttttaaaaataaagaagttgctgttgttggaggaggtaatgcagcggttgaagaagcaatgttccttacaaagtttgcatctaaagtaaaattaatccacagaagagatagtttaagagctgaaaaaatgcttcaaaaaaaattaatggaaaataaaaaaatagaaataatttgggactctgtagttgaagatgttttaggtgataaagatcctaaaaatgtcaaaggaataaagattaaaaatgttaaaacaaataaaatacaagaattaaaacttgatggcgtattcattgctattggtcatgatccagctactcaactttttaaagatcaattaaaaatggataatgagggatatttaattaccaaacctgactcaacagaaactaatattcctggtgtttatgcagctggagatgtaaaagacaaaacatttagacaagctgtaaccgctgcaggtatgggatgtatggctgcacttgaagcagaaaaatttttatctcactaa

SEQ ID NO: 223581 - DNA, 367 bp, Unknown
  Bacterial polypeptide expressing nucleotide sequence isolated from the Sargasso Sea
aatggaaaataaagaaaaaatttcaaacgtagaaaatgttgtaattataggttcaggacctgcaggttatacagctgcaatatatgccgcaagagcaaatcttcaacctttacttgtaacaggatttaattctggtggaattcctggtggacaattaatgactacaacatttgttgaaaattatccaggtttccctgatggagtactaggtcctgaattgatggatctaatgaaggctcaagcagaaaggtggggtacaaatttatacgagagtgatgttatctcaattaatactgatttacatccctttgaattaaaaactttagaagggactataaaagctaactcaattattattgctactgga

SEQ ID NO: 223582 - DNA, 212 bp, Unknown
  Bacterial polypeptide expressing nucleotide sequence isolated from the Sargasso Sea
tatgactgaaaaaatagaaaatgatgtcttaatcataggctctggaccagcgggctacacagctgcaatctatgcagcaagggcaaatttaaaaccacatttagtttcgggtttagaacctggaggtcaactaactattactacggatgtagaaaactatccaggatttgaaaatgttattcagggaccttggcttatggaacaaatgaaag

SEQ ID NO: 223583 - DNA, 394 bp, Unknown
  Bacterial polypeptide expressing nucleotide sequence isolated from the Sargasso Sea
atgaatcaaaatccaactaaacacacaaaagtgttaataattggatctggcccagctggatatactgctgcagtttatgctgcaagagcaatgcttaaacctataatggttactggcatggagccaggtggtcaactaacaactacaactgatgttgaaaactacccagggtttgctgaagttatccagggtccttggttaatggaacaaatgaaagaacaggctcaagctgtgggcactgagatgattcaagaccatatatcgtccgttaatttcaaatcaaaaccttttgaagctattggggatggtggacaaaaatatactgctgatacaattataatttctactggagctcaagcaagatggttaaatatcgagtctgaacaaaaattta

SEQ ID NO: 223584 - DNA, 838 bp, Unknown
  Bacterial polypeptide expressing nucleotide sequence isolated from the Sargasso Sea
gtttgcagcctgggtggacaattaactataactactgacgtagaaaattatccaggatatggagacgtaatacaaggtccatggttaatggaacaaatgcaggagcaggcaaaaaatgttggaacaaatattataaatgacattatcaagagtgtggatttcaaaaccaaacctttcaaagccattagtgagtcaggaacagagtatactgctgactctgtaattatttctactggagctcaagctagatggcttggattagagtctgaaaaaaagtttcaaggatatggtgtttcagcatgtgcaacttgtgatggctttttttataaagaaaaaaaagttgcagtcattggtggtggcaattctgcagttgaggaggctttatatttaacaaattttgcatctaaggtttatcttgttcatagacgtaatgagcttcgagcagaaaaaattcttcaagatagactatttaaaaacgaaaaagttgaatgtgtttgggatagtgaattaaaggaaatagttggagatgaagatcctctaaatgtaaaaagtataaatataacaaatacgaaaactaacgaaaatagcaatatagagctggacggtgtgtttgttgctatcggtcacgatccagctactcaaatttttagagatcaggtcgaaatggatgaagatggatatataatgacaagacccgactcaacacttacaaatgttgaaggagtctatgctgcaggagatgtaaaggataaaatttatcgtcaagcggttacagcagctggaatgggttgtatggcagcgctcgaggcagaaaaatacctagctgaattatcttaat

SEQ ID NO: 223585 - DNA, 106 bp, Unknown
  Bacterial polypeptide expressing nucleotide sequence isolated from the Sargasso Sea
atgtctgatacgatagaaaaagttaaatgccttattataggttctggtccagcaggatatactgccgctatttatgcttcaagagctaacatgcaccccagtttta

SEQ ID NO: 223586 - DNA, 455 bp, Unknown
  Bacterial polypeptide expressing nucleotide sequence isolated from the Sargasso Sea
gtttctgacaaattttgcctcaaaagttaccctgatacacagacgagatgaactcagagctgaaaaaattcttcaagagcgcctactcaatcatcctaaaattgaaacactttggttccacgaacttaaagaagttattggaacaaatgaccccaaaggagtagaggctgttcgcgtagaaaatgtccatactagtcaaataaaagagatcaaatgcaaaggtgtattcatcgcgatcggtcattcgccagcttcagaattagtaattgagcaattggaaacccatagcggtgggtatgtacaagttcaagctggtagcactcggacatctattaatggtgtttttgcagcaggagatctcaccgaccatatctatcgtcaagcaattactagtgcgggcatgggctgcatggcggccctagatgcggagaaatttctggcggaaaaaggataag

SEQ ID NO: 223587 - DNA, 448 bp, Unknown
  Bacterial polypeptide expressing nucleotide sequence isolated from the Sargasso Sea
aatgaccgaatctatacatcataaattaatcatccttggatctgggcccgcgggctattctgcggctgtttatgccgctcgtgccaatcttaagcctgtcataatcactggatctgaaccgggtggacaactcatgaccacaacggatgttgagaattggccaggcgatcctgagggcttattaggcccggctcttatggatcgaatgcttgaacatgcaaaaagatttgatacagaagtcatttacgatcacattgagagtgcggaacttggctcaaggcctttcactttaaatgggggcaacgctaaatacactgctgatgcattgattattgcaacaggatcaactgctagatatctgggcttggaatcagaagagaaatacaaaggcaagggtgtttctgcctgtgcgacttgcgatggttttttctacaaggatcaagatgta

SEQ ID NO: 223588 - DNA, 247 bp, Unknown
  Bacterial polypeptide expressing nucleotide sequence isolated from the Sargasso Sea
atgagtgaaaatccaactaaacacacaaaagtgttaataattgggtcaggtcccgctggatatacagcagcaatttatgctgcaagagcaatgttaaaaccaatattggttcatggtatggaacctggtggccaattaacaacaacaaccgatgttgaaaatttccctggatttaaagatgtaatacaagggccatggcttatggatcaaatgaaaggtcaggcagaagtaatggaactgaaatgat

SEQ ID NO: 223589 - DNA, 583 bp, Unknown
  Bacterial polypeptide expressing nucleotide sequence isolated from the Sargasso Sea
taaatttggatctgaaaaaaaatataagggttttggcatttctgcatgtgcaacgtgtgatgggtttttttttaaagatcaaaatatagttgtcattggtggtggaaatagtgctgttgaggaagcgctttttttgacaaattttgcctctaaagtaactttagtacataggcgcgatgaattacgtgcagaaaaaattctccaacaaagactttttaatcataaaaaaatagatgttatttggagtcatgttgttaaggaatttattggttcaaatgaacctctttctctcaatgaaattaaaataaaaaatgttaatgacgaaagtgaaaaaattataaaagcaacaggtgctttcattgcaataggtcatgatcctgcgacttctctttttaaaaataaaatcaaaatggatcacgaaaattatattattactaaatctgatagcacagaaaccagtataaaaggtgtttatgcagctggggatgtaaaagataaaacttacagacaggctgttactgctgcaggtatgggatgtatggctgctttagaggctgaaaaatatattgctgaaaattactag

SEQ ID NO: 223590 - DNA, 514 bp, Unknown
  Bacterial polypeptide expressing nucleotide sequence isolated from the Sargasso Sea
atggcaaaacactctaaagtactaattcttggatcaggtcccgctggatacacagctgcaatatacgcggcaagagcgatgctaaaaccaattcttgtttttggctcagaaccaggtggtcaactaactaccacaactgatgtagaaaacttcccaggatactcaaaagtaattcaaggaccgtggttgatggaagaaatgaaaggtcaagcaaaagctgttggaactgaaatgatacaagatcacataaaaaaagttgatctatcaaaaaaaccttttgaagctattggagatagtggtcaagtttatagtgcagatagttttattatttctacaggagctcaggcaaggtggttaaatttaaaatcagaacaagaatttagagggtttggtgtttcagcatgcgcaacatgcgatggtttcttttttaaagaaaaagaagttgctgttgttggaggtggaaatgctgccgtagaagaagcaatgtttttgacgaagtttgcctcaaaagtta

SEQ ID NO: 223591 - DNA, 352 bp, Unknown
  Bacterial polypeptide expressing nucleotide sequence isolated from the Sargasso Sea
atggaaaataaagaaaaaaattcaaatgtagaaaatgttgtgattataggttcaggccctgcaggttatacagctgcaatatatgcagcaagggcaaatctgcaacctcttttagtgacaggatttaattcgggtggaattcctggtgggcaattaatgactacaacatttgtggaaaattaccctggttttccagatggagtattaggtcctgaattgatggacctaatgaaggcccaagcagaaagatggggtacaaatttatacgaaagtgatgttgtctcaattaatactgatttacatcccttcgaattaaaaaaattagacggggatataaaaacgaactcaatta

SEQ ID NO: 223592 - DNA, 409 bp, Unknown
  Bacterial polypeptide expressing nucleotide sequence isolated from the Sargasso Sea
tatgttaaaacctataatggtttcgggtatggaaccaggtggacaattaacaacaacaactgatgttgaaaattaccctggatttgcaaaggcaattcaaggaccatggttgatggaacaaatgcgagaccaagctaaagctgtaggtacggaaatgattgaagatcatatctcttcagtaaatttaaaatcaaaaccttttgaagctattggagatggtggccaaaaatataccgcagattcaattataatttcaactggagctcaggcaagatggttaaatattgaatctgaacaaaaatttagaggatttggtgtttcagcttgcgcaacatgtgatgggtttttctttaaagataaaacagttgcagttgtaggtggtggaaatgctgcagttgaagaagcaatg

SEQ ID NO: 223593 - DNA, 718 bp, Unknown
  Bacterial polypeptide expressing nucleotide sequence isolated from the Sargasso Sea
tcgttttggtgctgattgtcgcttcaaagaagtaacaaaggtagagtttaatgcaaatccttttaaaatatgggtaggcgaagaactttttgaatcgaaatcagttattatctctacaggtgcatctgcgcgacttcttgggttagaatctgaatcagaattaatgggtaatggtgtctcagcctgtgcaacttgcgatggatttttctttaaaaataaggatgtaattgttgttggaggtggtgattccgctatggaagaagctacttttttaaccaaatttgcaaataaggtaacagtagtacaccgtcgggatcaattaagagcatcaaaaatcatgcaagatcgtgctgaaaataattcaaaaattggattcgtttggaatacttcaattgataaaatctatggaaatactgaaagtggtgttaatggtgtaaggatgaaggatacactttcaggggaaacacgtgattttgcttgtgaaggggtttttttggctataggacatacgccaaacacttctcttttagtagggcaattagatactgatgaaaaaggatatattgttacattagatggatcatctaagacttctatcgaaggtgtatttgcttcaggggatgtccaagatcgtatttatagacaggctgttactgctgcaggtagtgggtgcatggctgctattgatgcagagagattcctcgagtctcagcattaa

SEQ ID NO: 223594 - DNA, 358 bp, Unknown
  Bacterial polypeptide expressing nucleotide sequence isolated from the Sargasso Sea
atggaaaataaagagactatttctaacgtagaaaatgttgtaattataggttcggggcctgcaggttataccgcagcaatttatgcggcaagagcaaatcttcaacctttgctcgtaacaggatttaattctggtggaattcctggcgggcaattaatgactacaacatttgttgaaaattaccctgggttcccagatggagtactgggtccagaattgatggatctaatgaaggctcaagcagaaagatggggcactaatttatacgaaagtgatgtggtctcaattaataccgatacgcatccatttgaattaaaaactttagaaggaactataaaatccaattcaattattatgc

SEQ ID NO: 223595 - DNA, 917 bp, Unknown
  Bacterial polypeptide expressing nucleotide sequence isolated from the Sargasso Sea
gtaaaatgtttaattgttggttctggtccagcgggatttactgcggctctctatgcttcaagagcaaatatgaaacctgttttgtaccaaggtatgcagccaggtggtcagcttactacaaccactgaggttgataattttcctggttatgcaaatggtgttgatggaactcaaatgatgattgatttaaaagctcaggcaaaacgttttggcactgatgtaaggacaggaatgattacgaaagtagatttcacgggtcctgttcataaagtttgggttgataataaaacagagattcattcggataccattgttatctctaccggtgcatctgcaaaatacttgggcttggaatctgaacaacattatttagcaaatggtggtggggtgtctgcctgcgcagtatgtgatggttttttctataaaggacaagataccattattgttggagctggagattcggcatgtgaagaggcatcttatttagctaatatttgcactaaggttactatgctagttagaagagatgagtttagagcttctaagataatggctgaaagagtacgtaatattgataacattgaaattctccataatactgaactagatgaggtcttaggagacgggaatgttgttactggtgttagagtagtaaacaataaaaccaatgataaacatgaaattccatgtacaggtgcctttatagcaatcggtcatactccaaatactcaagtatttcaaccttggctagatatggatgaaactggttatattgtaaatcaaccaggaacttcaaaaactaatattgagggagtttttgtttctggagatgctgctgatcatgtataccgccaagcggttactgcagctggaacaggatgtatggcggcattagatgctgaaagatacctggcctc

SEQ ID NO: 223596 - DNA, 766 bp, Unknown
  Bacterial polypeptide expressing nucleotide sequence isolated from the Sargasso Sea
ggaattcctggtgggcaattaatgactacaacatttgttgaaaattatccaggtttcccagatggagtattaggtcctgaattaatggatctaatgaaggctcaagcagaaagatggggcactaatttatacgaaagtgatgtggtctcaattaataccgattcacatcctttcgaattaaaaactttagaagggactataaaatctaactcaattattattgcaactggagcaagtgcaaatagattaggcgtgataaatgaagataaattctggagtaaaggaataagtgcttgtgcaatatgtgatggagccaccccacaatttagagatgaagaattagctgttattggagggggcgactctgcatgtgaagaagcagcgtatctcacaaagtatggaagcaaagtgcatttgattgttcgatcagaaaaattaagggctagcgcagcaatggttgatagagtaaaagctaatccaaagatagaaattcattggaacacaaaagttgataaagcggatggttctgaatggcttgaaagaatagaaactattcactctcaagaaggtaaaggggaaatcaatataaaaggtcttttttacgcgatagggcacacacctaatacgaagttcttaggcaacaaaattgatttagatcaaaaaggctatattgcttgcaaatcaggaaggccagaaacatctatagaaggcatcttcgcagcgggagatgttgttgattctgagggagacaaggagttaccgcggc

SEQ ID NO: 223597 - DNA, 611 bp, Unknown
  Bacterial polypeptide expressing nucleotide sequence isolated from the Sargasso Sea
aatggagaataaagagaacacttcaaacgtagaaaatgttgtaattattggttcaggtcctgcaggatatacagctgcaatttatgcagcaagagcaaatcttcagccattgctcgttacaggatttaattctggtggaattcctggtggccaattaatgactacaacatttgttgaaaattatccaggttttccagatggtgtacttggtcctgaattaatggatctaatgaaagctcaagcagaaagatggggcactaatttatacgaaagtgatgttgtctcaataaatactgattcacatccctttgaattaaaaactttagaaggaactataaaatctaactcaattattattgcaactggagcaagtgcaaatagattaggcgtgataaatgaagataaattctggagtaaaggaataagtgcttgtgcaatatgtgatggagcgaccccacaatttagagatgaagaattagctgttattggagggggcgactctgcatgtgaagaagcagcatatctcacaaaatatggaagcaaagtgcatttgattgttagatcagaaaaattaagggctagcgcagcaatggttgatagagtaaaagcta

SEQ ID NO: 223598 - DNA, 448 bp, Unknown
  Bacterial polypeptide expressing nucleotide sequence isolated from the Sargasso Sea
atgcccgcaacttccacgaaacacgccaaagttctgattctcggttccggtcccgccggctatacggcagcggtctatgcggcgcgcgccaacctgtcgccggtgctcgtcacgggcctcgcccagggcggccagctgatgaccacgaccgacgtcgaaaactggcctgccgacgcccacggcgtgcaaggcccggaactgatggggcgcttcctggagcatgccgagcgcttcaacactgaaatcattttcgaccacatccacacggccaagctggacgaaaagccgattcgcctgatcggcgatgcgggcgaatacacctgcgactcgctgatcatctcgaccggcgcatcggcgcagtatctcggcctgccgtccgaagaagcattcatgggcaagggcgtgtcggcttgcgccacctgcgacggcttcttctacaagcaacctt

SEQ ID NO: 223599 - DNA, 355 bp, Unknown
  Bacterial polypeptide expressing nucleotide sequence isolated from the Sargasso Sea
tatgaatcaaaatccaactaaacacacaaaagtgttaataattggatctggtccagccggatatactgctgcagtttatgctgcaagagcaatgttaaaacctattatggtttctggtatggagccgggtggacaattaactactacaactgatgttgaaaattatcctggttttgctgaagtgattcacggtccttggctaatggaacaaatgcgagaacaagctaaagctgttggcacagaaatgattgaagatcacatctcttcagtaaatttaaaatctaaaccttttgaggctactggtgatggtggtcaaaaatatactgctgattcaattataatctctactggagct

SEQ ID NO: 223600 - DNA, 265 bp, Unknown
  Bacterial polypeptide expressing nucleotide sequence isolated from the Sargasso Sea
atgaataataaatcaacaaaacatacaaaagtgttaattcttggatcaggccctgccggctatacagcggctatttatgcggctagagctatgcttaaaccaatacttgttcatggatctcaacccggaggacaattaactaccactacagatgttgaaaattatcctggatactcaaaagtgattcagggaccatggctaatggatgaaatgaaaggtcaggctgaagcagtgggcacagagatgatacaggatcatataagta

SEQ ID NO: 223601 - DNA, 799 bp, Unknown
  Bacterial polypeptide expressing nucleotide sequence isolated from the Sargasso Sea
agttgaaaactggccaggagtaaaagaaatacttggtcctgatcttatgacaaatttagaaagtcatgctaagtccgcaggtacaaaaattattaatgaaactattatcaaattaaatttaaaaaaatatccattcattgcaatttcagattgtggaaatcaatacgaagcagaatccgttatacttgcaactggggcccaagcaaaatggcttggtttgaaatcagaagagaagtataaaggatttggagtatcagcatgtgcaacatgtgatggttttttctttagaaacgaaataattactgtgattggtggtggaaatactgctgtagaagaagctctatttcttacaaattttgcaaaaaaagtaattttaattcacaggagagatactttaagagctgaaaaaatacttcaagaaagactatttaaaaatcaaaaagtagaggtcatttggaatagccaattaaaggaaataattggaacagacaatcccttaagtgtggcgggaataaaaattgaaaaccttctagataaaaaagaattagatatttcatgtaaaggtgtttttatagctattggccacgccccatcaaatgaattaattatgaatcaacttgaaacacataatggaggttatgttgttacgcaaccaaattcaacagagacttctataccaggagttttcgccgctggcgatattacagattttaaatacagacaggcagttactgccgctggaatgggttgtatggctgctttggaagcagaaaaatttttggcagagaagataaactag

SEQ ID NO: 223602 - DNA, 724 bp, Unknown
  Bacterial polypeptide expressing nucleotide sequence isolated from the Sargasso Sea
aaacgctgttggaacggaaatgattgaagaccatatatcatcagtaaattttaaaacaaaaccttttgaggcagttggtgataatggtcaaaaatatactgctgactcaataattatatctacaggtgcacaagctaggtggcttaatataaaatctgagcaagaatttagaggttttggagtttcggcctgtgcaacatgtgatggatttttttttaaagacaaagaagttgcagttgttggtggaggaaatgcggctgtggaagaggcgatgtttttgactaaatttgcgtctaaagtaaaattaattcacagaagagacaaacttagagctgaaaaattattacaaactaagctaatggaaaataaaaaaatagaaataatatgggatagtgttgttgaagaagtaattggtgatgataatcctaaaaacgttaaaggtattaaaataaaaaatgtaaaaactaatgaagtaattgagatgaatttagacggtgtttttattgcaattggtcatgatcctgcaacacaattatttaaagaccaacttgaaatggataatgagggatatttagtaacaaaatctgattctactgaaaccaacgttcctggagtttttgcggctggagacgtaaaagataaagtgtttaggcaagctgtaacagctgctggaatgggctgcatggcagcacttgaggcagaaaaacacctctcacatacttaa

SEQ ID NO: 223603 - DNA, 400 bp, Unknown
  Bacterial polypeptide expressing nucleotide sequence isolated from the Sargasso Sea
tatgagtcaaaatccaactaaacacacaaaagtgttaataattggatctggtcccgccggatacacagcagcagtttatgcggctcgagctatgttaaatccaattttagtttatgggtctgaacctggtggacaattatcaactacaacagatgttgaaaattttccaggatttgctgaagttattcaaggtccgtggttaatggatcaaatgaaagaacaagctaaagctgtaggaactgaactgattgaagatcatattagttcggtaaatttaaaatcttctccatttgaagctataggagacagtggtcaaaaatatactgctgatagcattataatttctacaggagctcaggctagatggttaaatataaaatctgagcaagaatatagagga

SEQ ID NO: 223604 - DNA, 727 bp, Unknown
  Bacterial polypeptide expressing nucleotide sequence isolated from the Sargasso Sea
tgaagatcctattcaaggtccttggttaatggaacaaatgaaaaaacaggctgcgcacgttggtactgaaattatcaattcacaagtaactgaagtttttttaaatgaagatataaaaaaattaaatttggataatggcataactttaaatgcaaaaactgtgataataagcactggtgctcaagcaagatggcttggtttagaaaatgagtctaaatttcaaggtcatggactatcagcttgcgccacttgtgatggttttttctttaaaaataaagaagttgctgttattggtggtggcaatagtgcagctgaagaagctttattcttaactaagtttgctactaaagtttatctaattcacagaagagataaacttagagcagaaaaaatattacaagatagattaaatgaaaattcaaaaattgaatttatatggaacagcgaggtaactaagtttaatggtaatgatgatttagaatcaatagacttactcaataaaaaagataataaaacctcaaacctaaaaatagatggtgtatttattgcaatagggcacgatccggcaacacaattatttaaaggccaattaaatatggatgatggtggatatataatcacagatccagatagcacaaaaacttctattgagggtgtatttgctgcaggagatgtaaaagataaaatttacagacaggctgtaactgctgctggaatgggatgtatg

SEQ ID NO: 223605 - DNA, 426 bp, Unknown
  Bacterial polypeptide expressing nucleotide sequence isolated from the Sargasso Sea
gatggaaaacaatcataaaaaattaataattttagggtccggtcctgccggttatgctgcaagcatttatgctgccagagcaggattgaatccaattattattgcaggcatgcaagaaggcggtcagttaacgacaactacggatgttgaaaattggcctggtgatagtgatggacttcagggacctgaattaatgcagagaatgaaaaagcatgcagagcagtttgatgttcaaatcattaatgaccatattaatgaggttattctttctaatgaaccatttaaattaatgggatcatcagagtattcttgtgattcattaattattgcaactggtgcaagcgcaatgtacttaggccttccatctgaaaagaagtatcttggtaaaggtgtttctgcatgtgcaacatgtgacggtttttttta

SEQ ID NO: 223606 - DNA, 643 bp, Unknown
  Bacterial polypeptide expressing nucleotide sequence isolated from the Sargasso Sea
gatgggggtcaaaaatatactggccgattcaattattatttctacaggagctcaagcaagatggttaaatattgaatctgagcaaaaatttagaggatttggtgtatcagcttgtgcaacatgtgatgggtttttctttaaagataaaacagttgcagttgtaggtggtggaaatgctgcagttgaagaagcaatgtttcttacaaaatttgcatcaaaggtacaattaattcatagaagagattctttaagagctgagaaaatgctccaaagtaaattaatggctaacaaaaaaattgaaattatttgggatagtgttgttgaagaggttgttggagacaatgatccaaaaaatgttaaaggattaaaaattaaaaatgtaaaaactaataaaattgatgaattaagaattgatggtttgtttattgcaattgggcacgatccagcaacccaactatttaaagatcaattagatatggacaaagaaggctatttaacaacaaagccagattcaacagagacaaatataccaggtgttttcgctgcaggagatgttaaagataaaatatttagacaagcagttacagctgcaggaatgggttgtatggctgcactagaagctgaaaaatttttatctaagtaa

SEQ ID NO: 223607 - DNA, 514 bp, Unknown
  Bacterial polypeptide expressing nucleotide sequence isolated from the Sargasso Sea
atgtctaaaaaaattatacatcacagactggttatacttggttcgggtcctgccggacttactgcagcgatatatgccgcaagagcaatcttaaatcctgtggtaatatctggacgtgaagccggcggacagctgatgataacaacagatgttgaaaactatccaggtttcccagaagggattgaaggcccgaaaatgatggatcttttgaaggcccaggctttaagatttgggacaaagtttgtttccggggatgtaattgatgttgattttaggaaacggccttttaagcttaatttggaaaacaaagacaccctgatgtgcgattcactaattatttcatctggtgcttccgcacgctggcttggtttggaatcagaaaaagaatatagtgggaaaggagtttcagcatgcgctacctgtgatggttttttcttccgtgaccacgatgttggggttgttggtggaggagatactgccctagaggaggctctttatctggcaaatatgtgta

SEQ ID NO: 223608 - DNA, 218 bp, Unknown
  Bacterial polypeptide expressing nucleotide sequence isolated from the Sargasso Sea
taaacctaatactgatatctttagaggttcgcttgatatggatgacacagggtatctcaatatcaagggtggttcgtctggaaatgccacacaatgctctattgaaggagtctttgcagctggtgatgtatctgattcaatatatagacaagcaattacatcagcaggcgctggatgtatggcagcattagatgcagaaaaatatttagataaatagt

SEQ ID NO: 223609 - DNA, 248 bp, Unknown
  Bacterial polypeptide expressing nucleotide sequence isolated from the Sargasso Sea
aatgaaagaaaaaattaataccgaagtactaattattggttctgggccagctggctatactgcagcaatatatgcggcacgcgctaaccttaagccacatctaattgctggcttagaacctggaggacaattaacaattactactgatgttgaaaattatcctggttacggagatacaattcaaggaccttggttgatggaacacatgaaaaaacagtccttaaatgtaggtactattattcataatg

SEQ ID NO: 223610 - DNA, 419 bp, Unknown
  Bacterial polypeptide expressing nucleotide sequence isolated from the Sargasso Sea
tatgagtcaaaatccaactaaacacacaaaagtgttaataattggatccggaccagctggttacacagctgcagtttatgcagctcgtgcaatgttaaacccaattttggtttatggatctgaacctggaggtcaattaacaacaactactgatgttgaaaattatcctggatttgctgatgttattcagggaccttggttaatggatcaaatgaaagagcaagcaaaagcagttggtactgagatgatagaggatcatattggatcggtaaatttaaaatcgactccatttgaagcaattggtgatagtggtcaaaaatttactgcagatagtattattatttcaactggtgctcaagcaagatggttaaacataaaatcagaacaagaatttagaggttttggagtgtccgcatgtg

SEQ ID NO: 223611 - DNA, 474 bp, Unknown
  Bacterial polypeptide expressing nucleotide sequence isolated from the Sargasso Sea
aatggaaaataaagagaagagttcaaacgtagaaaacgttgtaatcataggctcgggacctgcgggttacactgccgctatatatgccgcacgagcaaatcttcaaccattacttgtaacaggatttaattctggtggaatccctggtgggcaattaatgactacaacttttgttgaaaattatccgggttttccagatggagtacttggtccagaattgatggatctaatgaaggctcaagcagaaagatggggcactaatttatacgagagtgatgtggtctcaattaataccgattcacatccatttgaattaaaaactttagaaggaactataaaatctaactcaattattatcgcaactggagcaagtgcaaatagattaggcgtgataaatgaagataaattctggagtaaaggaataagtgcctgtgcaatatgtgatggagctaccccacaatttagagacgcaga

SEQ ID NO: 223612 - DNA, 704 bp, Unknown
  Bacterial polypeptide expressing nucleotide sequence isolated from the Sargasso Sea
tatgaaaaatcaaaaagaaaaagttataattattggttcaggagctgcaggattaactgctgcaatatatgcggcaagggctaatctcaatccattggtaattgaaggaatccaacctggtggtcaacttacaataactacagatgttgaaaactacccaggatatgccgatgtagttcaaggtccatggatgatggaacaaatgagatctcaggcagtaaaggttggtgctcgtataatcaatgatatagtcgttaaaattgattttaaaaaaaatgaaaagatggtggttttagactcaaataaatctttgacaacagacacaataattgtagctactggagcacaagctaaatggttaggtttagaaagtgaaaataaatataatggaaagggtgtttctgcttgcgcaacctgtgatggttttttttatagaaataaagaagttgcagtcgttggaggaggtaatacagctgttgaggaggctctatacctatcaaatatatgttctaaagttaatttgattcatagacgtgatgaactgagatcggaaaagattttacaagacagacttttttcaaagaaaaatataaatataatctggaataatgtggttggtgaaattttgggtgatgaaaatggggtcagttctctaaaattaacttcaactaaacaaaataaaacagaggtaataaaagttgaag

SEQ ID NO: 223613 - DNA, 817 bp, Unknown
  Bacterial polypeptide expressing nucleotide sequence isolated from the Sargasso Sea
caacttacaacaactacagatgttgaaaattttctgggatattcaaaagtgatacagggaccatggttaatggatgaaatgaagggccaagcaaaagctgttggaacagaaatgatacaagatcatataaaaaaggttgatctgtcaaaaaaaccttttgaagccgttggagatagcggtcaagtttatactgcagatagttttattatttcaacaggagctcaagccagatggttaaatttaaaatcagagcaggaatttagaggatttggtgtttcagcatgtgcaacatgcgatggtttcttttttaaagaaaaagaggttgctgttgtaggaggtggaaatgctgctgtagaagaagcgatgtttttaacaaaatttgcatctaaagttaaactaatccatagaagaaatgaattaagggcagaaaaaatgctacaagcaaaattaaaggcaaataaaaaaattgaaattatctgggatagcgttgttgaggatgttatcggagacactaatccaaaatcagtaaaagctatcaaaattaaaaacgtaaaaactaataaaaacactgaattgaaagttgatggactttttatagcaataggccatgacccagctacttcgcttttcaagggtcaattaaatatggataaagagggatatattctcaccaatcccgactctacaataactaatgtgccaggagtttttgcggctggcgatgtaaaagataaaattttcagacaggcagttactgcggccgggatgggctgtatggctgcacttgaagctgaaaaacatttgtcatcaaaatgag

SEQ ID NO: 223614 - DNA, 500 bp, Unknown
  Bacterial polypeptide expressing nucleotide sequence isolated from the Sargasso Sea
aatgtccgaatatagagagcgggtacttataataggttctggcgcagcgggtcttacagcagctatttacacagcccgcgctaatattgaccctctactcgtgaaaggattacagccaggaggtcagatgaccatcacaaccgatgtcgaaaattaccctggcttcgcagacgtaatacaaggtccttggctaatggaacagatggaagctcaagcgcggcaggtgggaacacggatggttgaagatatcataacatcaattgataccagccaacgcccattccatctaaaaggtgatactggagacgattattatgctgacgctgttattgttgctacgggagctcaagctagatggctaggtcttgaaagtgaggcacggttgaatggaaaaggtgtatccgcctgcgcaacttgtgatggctttttcttcagaggccaagaagtcgcagtagttggaggaggaacacagcagttgaagaagccttatacttatccaa

SEQ ID NO: 223615 - DNA, 464 bp, Unknown
  Bacterial polypeptide expressing nucleotide sequence isolated from the Sargasso Sea
tatggcaaaacattctaaagtattaattcttggatctggacctgcggggtatacggctgcaatatatgctgccagagctatgttaaagccaattctggtttttggatcagagccgggaggtcaattaactacaactactgacgtagaaaactttcctggatattcaaaagtcatacaaggaccctggttgatggaagagatgaaaggtcaagcagaagctgtcggtacagaaatgatacaagatcatataaaaaaagttgatttatcaaaaaaaccttttgaagctattggagatagcggtcaagtttatactgcagacagttttattatttcaacaggagctcaagcaagatggttaaatttaaaatcagagcaggaatttagaggatttggtgtttcagcatgtgcaacatgtgatggtttcttctttaagaaaaagaagttgctgttgttggaggtggaaa

SEQ ID NO: 223616 - DNA, 778 bp, Unknown
  Bacterial polypeptide expressing nucleotide sequence isolated from the Sargasso Sea
aatgaaaaagcattctaaagtattaattcttgggtctggaccagctggttacacggccgctatttatgctgccagagcgatgttgaagccaatattagtatttggctcagaaccaggtggtcaattaaccacaactacagacgttgaaaattttccaggatattcaaaagtaattcagggaccttggttgatggacgaaatgaaaggccaagcaaaagcagtagggactgaaatgatccaagatcatataagtaaagtagatctttcaaaaaaaccttttacagctacaggtgatagtggtcagacttatacagcggacagcttcataatctcaactggtgcacaagcgagatggttaaacttaaaatctgagcaagaatttagagggtttggtgtttcggcttgcgcgacatgtgatggattcttttttaaagaaaaagaggtggcagttgttggtggtggtaatgctgctgtagaagaagcgatgtttttaactaaatttgcatctaaagtaacactcattcatagaagaaatgaattgagagccgaaaaaatgcttcaagcaaaattaaaagcaaacaaaaaaattgaaattatatgggatagcgttgttgaagacgtcataggagaaaaaaatcctaaatcagttaaaggaataaaaattaaaaacgtaaaaacaaacaaaactacagaacttaaagtagatggactttttattgctataggacatgaccccgctacatcgctatttaaaggtcagttaaaaatggataaagag

SEQ ID NO: 223617 - DNA, 274 bp, Unknown
  Bacterial polypeptide expressing nucleotide sequence isolated from the Sargasso Sea
tatgaatcaaaatccaactaaacacacaaaagtgttaataattggatctggtccagccggatatacagctgcggtttatgctgcaagagcaatgttaaaacctattatggtttctggcatggaaccaggtggacaattaactacaacaactgatgttgaaaactatcctggttttgctgaagtaattcaaggaccatggttaatggaacaaatgcgagaccaagctaaagctgtaggtacagaaatgattgaagatcatatctcttcagtaaac

SEQ ID NO: 223618 - DNA, 215 bp, Unknown
  Bacterial polypeptide expressing nucleotide sequence isolated from the Sargasso Sea
aatgagaaaaacaatagaaacggacgtattgattattggttcaggtccagctggatacacagcggcaatatatgcagctagagcaaatttaaaacctcaccttgtatcaggattagagcctggaggacaactaacaattacaaccgacgttgaaaattatcctgggtttggagaagttatacaaggtccttggctaatggaacaaatgaaagaac

SEQ ID NO: 223619 - DNA, 326 bp, Unknown
  Bacterial polypeptide expressing nucleotide sequence isolated from the Sargasso Sea
tcaatggagtgaagtgcttggagatgagaaaggcgttcattcaatgaaaatagtaactaacgaagaaaagaagaatcttcaattgaatggtgtgtttattgctattggccatcaccctaacactgaaatttttaaaggccagcttgagatgaaaaatgattacatcaccattaaatcaggcacagacggcatggctactgctacaagtgttcctggtgtttacgccgcaggtgatgtgtcagatcaaatttaccggcaagccattacctcagctggatttggctgtatggctgcgctcgatgctgagaaatttttatctgagtaat

SEQ ID NO: 223620 - DNA, 460 bp, Unknown
  Bacterial polypeptide expressing nucleotide sequence isolated from the Sargasso Sea
ctgcatggaagaggcgctgttttaacaaagtttgcgtcaaaagtttatgtaatacacagaagagaccagtttagagcaagccaaataatgcaagacagggtactaaatcatgaacaaatagaagttgtttggaacaaaactgttgaaaaaattaatggtgatgggagcgtttcatcaattgaattgaaagatgtagaaaacgaaacaacgagtgaattagagcttgatggagtgtttgttgccataggtcatgatccaaatgtaaaatttttagacgagcttgtagaacttgatgaaaaaggatacataaaaactgggttcacaacggagacaagcacttcagtacctggtgtgtttgcagctggcgatgtagcagattctttatacagacaagcaattactgctgctggtaccggatgtcaagcagcaatggatgttgagagatggcttgaccactaat

SEQ ID NO: 223621 - DNA, 763 bp, Unknown
  Bacterial polypeptide expressing nucleotide sequence isolated from the Sargasso Sea
aggaccgtggttgatggatcaaatgaaagaacaatccaaagctgttggaaccgatatgattcaagatcatattaataaagtcgatcttagtaaaaaaccttttaaagctattggtgatagcggacaagaatacactgctgactcaattataatttcaactggtgctcaagctagatggttaaacttagagtcagagcaaaaatatagaggatttggagtttcgggatgtgcaacatgtgatggcttcttttttaaagacaaagaagttgcagttattggaggaggaaatgcggctgtagaagaagcaatttttctaaccaaatttgcaaccaaagttaaacttattcatagaagaaatgaattacgcgcagaaaaaatgttgcaaaaaaaattaaaagaaaataaaaaaattgaaattatttgggatacaatccttgaagaagttttaggaaatgaaaaaccaaaaggtgtaactggcattaagatcaaaaatgtgaaaacaaataaaactactcagcttaatgttcatggactatttattgccataggacatgatccagcaacatctttatttaaaggtcaattagatatggataaagagggatatctaattacaaaaccagattctactcaaacaaacaagcctggtgtttttgctgccggagatgtaaaagacaagatttttagacaggctgtaacggctgctggtatggggtgtatgtcggcgcttgaggctgaaaaatttttgtcctcaaaaaactaa

SEQ ID NO: 223622 - DNA, 217 bp, Unknown
  Bacterial polypeptide expressing nucleotide sequence isolated from the Sargasso Sea
atgagtcaaaataaagagcataaatccaaagttttaatcataggatcaggaccagcaggttatagtgctgctgtttatacctcacgagcaatgcttaatccgataatggtgactggaatggaacaaggtgggcaactaacaaccacaaccgacgttgaaaattatccaggattttccaaagcagttcaaggaccgtggttgatggaagaaatgaaaa

SEQ ID NO: 223623 - DNA, 654 bp, Unknown
  Bacterial polypeptide expressing nucleotide sequence isolated from the Sargasso Sea
gttaaatccaattttagtttatggttcagagccaggaggacaattaacaacaacaacagatgttgaaaattttccaggatttgctgatgttatccaaggtccgtggcttatggaccaaatgaaagagcaagcaaaaacggttggaacagaaatgattgaagatcacataagttcagtcgatttaaaaaaaacaccttttgaagccgtcggggacactggacagaaatacactgctgatagcattataatttcaacgggcgcacaagcaagatggttaaatttaaaatcagagcaagagttcagaggttttggtgtatctgcatgcgcaacatgtgatggttttttctttaaagacaaagaagttgctgttgttggaggaggtaatgcagctgttgaagaagcgttatttcttacaaaatttgcgtctaaagtaaaattaattcatagaagagataatttaagagctgaaaaaatgcttcaaaaaaaactaatggaaaataaaaaaattgaaattatttgggatagtgttgttgaagacgtaattggtgataaagatcccaaaaatgttaaaggaattaaaattaaaaatgttaaaacaaataagattgaggaaattaaattagatggtgttttcatcgcaatcggacatgatcc

SEQ ID NO: 223624 - DNA, 403 bp, Unknown
  Bacterial polypeptide expressing nucleotide sequence isolated from the Sargasso Sea
agaagagaccagtttagagcgagccaaataatgcaagacagagtactaaatcatgaacaaatagaagttgtttggaacaaaactgttgaaaaaattaatggtgatgggagcgtttcatcaattgagttgaaagatgtagaaagcgaagaaacaagtgaattagaccttgatggagtgtttgttgccataggtcatgatccaaatgtaaaatttttagacgaacttgtagaacttgatgaaaaaggatacataaaaactgggttcacaacggagacaagcacttcagtacctggtgtgtttgcagctggcgatgtagcagattctttatacagacaagcaattactgctgctggtaccgggtgtcaagcagcaatggatgttgagagatggcttgaccactaat

SEQ ID NO: 223625 - DNA, 910 bp, Unknown
  Bacterial polypeptide expressing nucleotide sequence isolated from the Sargasso Sea
accggccggtttaactgctgctatttattctgcacgtgctgaattgaaccctttagttatagaaggggaaccatcatctaccggagatcaaccaggtggacaattgatgcttacaactgaagtagaaaattttcctggttttcctgatggaattttaggtccacaattaatggctgatatgaaagcccaagcagaaagattcggcgcaaaattttcaacaagaaaagtgaccaaagtggacttaacaaaaaacccttttgaaatctggataggtgatccaaatgaagattctccaacacatactgccgaagcattaattatttcaacgggagctcaatcagtgatgttagaagttgaaggagaaaaacgactactaggacatggcttatcaacatgtgccacatgtgacggtttcttttttaaagacaaaaaaattgcagttgtaggaggaggtgactctgctattgaagaagcgacttttttaacaaaatttgccagtgaagtaactgtgatccacaggagagatgaattacgagcgtcgaaaataatgcaaaagagagctcacgaaaatccaaaaataaattttctttgggattctgaagtaacagaaatacttggttcaagttctgttgaagctgtaaaaatccgaaatacaaaaactcttgaagaaacgcaacttgatttagaaggaatttttatcgctataggtcacacgccaaacacttcacttttcatagacaaactttcaatagatgacttgggatatatagagacagagcctcacagctcaaaaacaaatattgacggagttttcgcttgtggcgatgtccaagatcataaatacagacaggctgttactgctgctggatcaggatgtatggcagccattgacgcagaacactggttagaa

SEQ ID NO: 223626 - DNA, 370 bp, Unknown
  Bacterial polypeptide expressing nucleotide sequence isolated from the Sargasso Sea
tatgagtcaaaatccaactaaacatacaaaagtgttaataattggatccggtcccgctggatacacggcggctgtttatgccgcaagagcaatgcttaaacctattttagttcaaggtatggagcctggtggacaattaacaataacaactgatgttgaaaactatcctggttttgctgaagtaatacaaggaccttggttaatggaacaaatgaaagaacaagctaaagcagttggaactgagatgatagaagatcatattcaatcggtaaatttaaaatcaaaaccatttgaagttgtaggagacggtggtcaaaaatatactgcagactcagttataatctctactggagctcaagcaagatggtta

SEQ ID NO: 223627 - DNA, 763 bp, Unknown
  Bacterial polypeptide expressing nucleotide sequence isolated from the Sargasso Sea
ttgggttcaggacctgctggatacagcgctggaatttatgccgctcgcgcaggattagatcctattcttattactggtctagaaatcggtggtcaactcactactacaacagatgttgaaaattggccaggcgatcatgatgatttacaagggcctgatttgatggaaagaatgaaagatcacgccgaaaagtttgatgtcaaaatcattaatgatcatattgaacaggtgaatgtaaaagataaaccaatcgagttaaaaggaaatgatacttatctggcagagtctttaattattgcaactggagcttccgcccagtacttaggaattgaatctgaagaaaaatttttaggtagaggtgtaagcgcttgcgcaacttgtgatggctttttttataaagacaaagaggtggcagtaattggtgggggaaacactgcggcagaagaagcgctttatttaagcaatatttgttcaaaagttcatctgatccacagaagagacagtcttagagctgaaaaaatcttacaagatagaattttcaacaaagaaaaagaaaagaaaattgaaattcattggaattcacaacttcaagaggtggtcggtgacgagttggtaaacaaaataattttagattctggaaaagaactaaatttagaaggagttttcattgcgattggccataaaccaaatacagacatgttcattgatcagctagatatgaaaaatggttatatttcgattaatagtgggttgagtggaaatg

SEQ ID NO: 223628 - DNA, 415 bp, Unknown
  Bacterial polypeptide expressing nucleotide sequence isolated from the Sargasso Sea
atgactgaaaaaataaaaaatgatgtcttaattatagggtctgggccagcaggctacactgctgcaatctatgcagcaagagcaaatttaaaaccacatttagtttctggtttagaaccaggaggtcagctaactatcactacggatgtagaaaactatccaggatttgaaaatgttatccaaggaccttggcttatgcaacaaatgaaagaacaagctgtaaaagttggaactatttttcataatgatattgtaacgtcagttgattttgaaaaaaatccatttacatccataactgattcaggaaaagaatttaaatccaaatcaataattattgcaacaggcgctcaagctagatggctgaatttggaaagtgaaaaaaaatttaaaggatttggcatttcagcttgtgcaa

SEQ ID NO: 223629 - DNA, 666 bp, Unknown
  Bacterial polypeptide expressing nucleotide sequence isolated from the Sargasso Sea
aatggaaaataaagaaaaaatttcaaacgtagaaaatgttgtaattataggttcaggccctgcaggttatacagctgcaatatatgcagcaagagcaaatcttcaacctttactcgtaacaggatttaattctggtggaattcctggtggacaattaatgactacaacttttgttgaaaattatccaggttttcctgatggagtactaggtcctgaattaatggatctaatgaaggctcaagcagaaaggtggggtacgaatttatacgaaagtgatgttgtctcaattaatactgatttacatccctttgaattaaagactttagaagggactataaaaactaactcaattattattgctactggagcgagtgcaaatagattaggcgtgataaatgaagataaattctggagtaagggaataagtgcttgtgcaatttgtgatggagctaccccacaattcagagacgaagaattagctgttataggaggaggggactctgcatgtgaagaagcagcatacctcacaaagtatggcagcaaagtacatttgattgttagatcagaaaaattaagggctagcgcagcaatggttgacagagtaaaagctaatccaaagatagaaatccactggaacacaaaagtagagaaagctaatgggtctga

SEQ ID NO: 223630 - DNA, 385 bp, Unknown
  Bacterial polypeptide expressing nucleotide sequence isolated from the Sargasso Sea
atgaataataaatcaacaaaacatacaaaagtgttaattcttggatctggccccgccggctatactgcagctatttatgcggccagagcaatgcttaaaccaatacttgtgcatggttctcaacctggaggacaattaacaaccaccacagatgtcgaaaattatcctggatactcaaaagtgattcagggaccatggctaatggacgaaatgaaaggccaagcagaagctgtaggtacagagatgatacaggatcatataagtaaagttgacttaacaaaaaaaccttttacagcaacaggtgatagtggccaggtttatactgcggatagttttataatttcaaccaggggcacaagcaagatggttaaatttaaaatctgaa

SEQ ID NO: 223631 - DNA, 430 bp, Unknown
  Bacterial polypeptide expressing nucleotide sequence isolated from the Sargasso Sea
tatgaatcaaaatccaactaaacacacaaaagtgttaataattggatctggtccagccggatatacagctgcggtttatgctgcaagagcaatgttaaaacctattatggtttctggcatggaaccaggtggacaattaactacaacaactgatgttgaaaactatcctggttttgctgaagtaattcaaggaccatggttaatggaacaaatgcgagaccaagctaaagctgtaggtacagaaatgattgaagatcatatctcttcagtaaacttaaaatcaaaaccttttgaagctattggagatggtggtcaaaaatataccgcagattcaattataatttcaacaggcgctcaagcaagatggttaaatattgaatctgaacaaaagtttaggggatttggtgtatcggcttgtgcaacatgtgat

SEQ ID NO: 223632 - DNA, 724 bp, Unknown
  Bacterial polypeptide expressing nucleotide sequence isolated from the Sargasso Sea
atggcaaagcatacaaaagtattaattcttggatcaggacccgcgggatacactgcagcaatatatgctgcaagagcaatgttgaaaccaatactggtttttggatcagaaccgggagggcaattaactactactactgacgtagaaaactttcccggatattcaaaagtgatacagggaccctggttaatggaagaaatgaaaggtcaagcaaaagctgttgggacagaaatgatacaagatcatataagtaaagtagatttatcaaaaaaaccatttgaagcagttggagatagtggccaagtatatacagcagatagtgttataatttctacaggagctcaagctagatggttaaacttaaaatcagagcaagaatttagaggtttcggtgtttcagcatgtgcaacatgtgatggtttttttttcaaggaaaaagaagtggccgtcgttggcggtgggaatgccgcggttgaagaggcaatgtttttaactaaatttgcttctaaagttaaacttgttcatagaagaaatgaattaagagctgaaaaaatgcttcaagcaaaattaaaggctaataaaaaaatcgaaattatttgggatagtgttattgaagatgttataggagaaaaaaatccaaagtcggtaaaaagtattaaaattaaaaatgtaaaagccaataaaacttcagaattaaaggtggacggtctttttgtgctatagg

SEQ ID NO: 223633 - DNA, 469 bp, Unknown
  Bacterial polypeptide expressing nucleotide sequence isolated from the Sargasso Sea
catggcagccggcagcgcctcggagactgtcgagaatctcgtaattgtcggttcgggcccggccggctacaccgcagcgatctacgcggccagggccaatctgcaaccgctgctgatcacaggcttccaacgcggcggtattcctggcggtcagttgatgaccaccaccgatgtcgagaatttccctggttttcccgacggagtcctgggcccggacctgatggatctgatgcgtgcccaggccgtgcgctggggaacacacctgctggaagcggatgccgatgagatcgatctcagtcagcggcccttccggatcaaggcggatggacgcactctgctgacccatgccctggtgatcgccacgggtgcaagcgcgaaccgactcggcctgccctcagaggagcgcttctggagcagcggcatcagtgcatgcgccatctgcgacgaagcgactcctcagttccgcaac

SEQ ID NO: 223634 - DNA, 163 bp, Unknown
  Bacterial polypeptide expressing nucleotide sequence isolated from the Sargasso Sea
tatgagtcaaaatccaactaaacacacaaaagtgttaataattggatctggtcctgccggatatacagctgcagtttatgctgctcgagcaatgttgaatccaattttagtttatggtgctgaaccaggtggacaacttacaactacaactgatgtagagaaa

SEQ ID NO: 223635 - DNA, 444 bp, Unknown
  Bacterial polypeptide expressing nucleotide sequence isolated from the Sargasso Sea
catgtcagacaatcataacaaattaataattttaggttcaggtcctgcaggttatgcagcaagtatttacgctgccagagctgggttagatccaatcataattgcaggtatgcaggaaggtggtcaattaactactacaactgacgttgaaaattggcctggtgatagtgacggtctccaaggcccagaacttatggaaagaatgaaaagacatgcacaacagttcgatgttgaggttattaatgatcatataaatgaagtagatttattaaataaaccatttacattaaaaggaacctcagaatactcatgtgattcgttaattatatctactggtgctagtgcaatgtatcttgggctaccatcagagaaagagtttcttggtaaaggtgtttcagcgtgtgctacttgtgatggtttcttttatagagatcaagaggtagc

SEQ ID NO: 223636 - DNA, 831 bp, Unknown
  Bacterial polypeptide expressing nucleotide sequence isolated from the Sargasso Sea
gtggacagctcacgataactaccgaggttgagaattggcccggagagaaagaaatacttgggccagacttaatgaaaaatatggaagatcatgctcgtaatctgggatgcaaaattatttccgaacatgtttcaaaagtaaatcttactgtacgacccttctttgtagaaacagatagtggttcacaatatttgactgagtcagtaattttagcaacaggagcgcaagcaaattggcttggactctataatgaagaaaaatataaaggttttggggtttcggcgtgtgcaacatgtgacggttttttctatagagacaaaatagtcgcggtaataggaggagggaatatggctgttgaagaggcaatattcttaacaaaatttgcttccaaagtttatttagtccatagaagagatgagttacgagccgaaaaaatcttacaaaaacgtctttttgagaatgaaaaaattgaaatcatatggaataagcaagtaactgacatattaggagaagatcatcctttaggcgtaacaggaattcagataagagatactttgaacaagaaattatctgaaattacttgctcaggggtctttgtagcaataggacattcccctgcttcaaatcttattaaagatcagctcaaaacttttgatagtggctatgtgtctactgttccaggaactacaaaaacttctattcctggagtttttgccgctggggatttagtggataatgtttacaggcaagcagtaacgtccgctgcaatgggatgcatggccgctttagatgcagagaaatatctaagcgagatcaataatggaaattgaa

SEQ ID NO: 223637 - DNA, 433 bp, Unknown
  Bacterial polypeptide expressing nucleotide sequence isolated from the Sargasso Sea
tatgaatcagaatccatctaaacacacaaaagtgttgataattggatctggacctgccggatacaccgctgctgtttatgctgcaagagcgatgctgaaacctataatgatttctggtatggaaccaggaggacaattaacaaccactactgacgtagaaaattatcctggatttgcaaaagtaattcaaggcccttggttaatggaagaaatgcgagaccaagctaaagctgttggaactgagataattgaggatcatatttcatctgtaaatttaaaatctaaaccatttgaagctattgcggaaagcggccaaaaatataccgcagactcaattattatttcaactggagctcaagcaagatggttaaatattgaatctgaacagaaatatagaggatttggagtatctgcatgcgcaacgtgtgatggt

SEQ ID NO: 223638 - DNA, 1060 bp, Unknown
  Bacterial polypeptide expressing nucleotide sequence isolated from the Sargasso Sea
atgtcagaagattcactcgagaatgttgtcatcattggaagcggcccggcaggttggtgcgcagcaacatatgccgctagagcgcaattgaagcctcttgtttttgagggggctattactgaagagaatcgtatggcgggaaccttgccacttggtcagttggcactgacaagtgaagtggagaactatgcaggatttcctgcaggtgatcttgcgacatttcttgagtcagcactccctgaagatcgacgaatgatgatggctccgcacgctggtgaaggcgtgacgggcccagagttaatggaactcatgcggcagcaggcagtaaactttggcacacgtgtcattacggacgacattcagaaggttgatttttcaaaaaggccatttactctgacgcgagcaggtggtggtgaaatacgagcgcgaagtgtaattgttgcaacgggtgcaagtgccaattggcttggattggagagtgaagagcggtttaaaaatcgaggagtgagcgcttgtgcagtctgtgatggagcgcttccgagatttcgagataaagaacttgttgtagttggtggtggagattcagccgtagaagaagctacgtatctcacgaagtttgcgagtcgagttcatcttattcaccgtagggatgaattgcgagcaagcaaaattatggcaaaacgtgcgtacgatagtgagaaaattgagatccactatcattcaaagctcgtcgaagtccttggtgacgataccgatggtgtaaccggtgtccggttgcaaagtacaacagaatcgggtgaagaaaccacagtaaccgcagctggcgtatttctggcaattggtcatacaccgaatacggcatttctggatgggcaattggaattgaatcccaaaaaatatgttgtttggcaaaaccacttccgtacatcgacgaatgttgagggtgtctttgcagctggtgatgtagctgatgactattatcgtcaggctatttcggctgccggtacagggtgtatggcggctcttgatgccgagcggtggctggccgaaaacgaatagg

SEQ ID NO: 223639 - DNA, 970 bp, Unknown
  Bacterial polypeptide expressing nucleotide sequence isolated from the Sargasso Sea
atgacggcgtcgacgcccgagagcggggtgaaaggggaccacgcgtacgaatacgatgtcgtcgtcgtcggtggtgggtccggagggttggcggcggcgaaggaggcggcgaaacagggggcgaagacggcgtgtttggatttcgtcaaaccgtcgccggcggggacgacgtggggactcggcggaacgtgcgtgaacgtcgggtgcattccgaaaaaactcatgcaccaagcggggatactgggtgaacagttcagcgacgcgcgagagtacgggtggaagctcgcgacggagggacacgattggagtaagatggtggaggctgttcaaaatcacatcggttctttgaattttggatatcgcacggcgctgcgacaaaagggcgtgacgtatatcaacgcgtacgggaggtttaaggatgcgcacacgatcatcgcgacgaagaagaacggtcaagagcaagagatcacggcggataagattgtcgtcgccgtcggcggacgaccggcgtaccccgacgcgccgggcgccaaggagtgctgcatctcgagcgatgacatcttctctctgtctgaggcgccgggtaagacgctgtgcgtcggtgcgtcgtacatctctctcgagaccgccggtttcttgacggcgctcggattcgagacgtcggtcgctattcgttccattccacttcgcgggttcgatcaggaaatcgcggagatgatcgtcaagtacatgggtgaacacggcactcgattcttgcgtgactcgcaaccgacggctttcgaaaagcaagaggacggtaagatcaaggtgacgttcgaaaacaccatgtttggcaacactttcgaagaaacctttgacaccgtcgtgtgcgccgtcggcagagacgccgccaccgaagggttggacctgaaggcggctggcgtcgaattcaacgctaagaacggtaagatcccgtgtgtcgatgagcaat

SEQ ID NO: 223640 - DNA, 787 bp, Unknown
  Bacterial polypeptide expressing nucleotide sequence isolated from the Sargasso Sea
ggtatatgctgctcgtgcactgttaaatccaattttagtttatggtgcagaacctggtggacaattaacaactacaacggatgtagagaattatccaggatttgcagatgtaatccagggtccatggttaatggatcaaatgaaagatcaagctaaagcagttggaacagaaatgattgaggatcatattgcatctgtgaatttgaaatcacaaccctttgaagcaatcggcgatagtggacaaaaatatagtgctgatagcataattatttcaacaggtgctcaagcaagatggttaaacataaaatcagaacaagaatttagaggctttggagtttcggcttgtgcaacatgtgatggtttctttttcaaggataaagaggttgcggtagttggtggtggtaatgcagctgttgaagaggcaatgtttctcacaaaatttgcatctaaagtaaaattaattcacagacgagatagtttaagggctgaaaaaatgcttcaaaaaaaattaatggaaaataaaaaagttgaaattatttgggactctgttgttgaagatgtattgggtgataaagatccaaaaaatgttaagggaattaaaataaaaaatgttaaaacaaataaagcacaagaattaaagctagatggtgtatttattgcaattggtcacgatcctgcaacgcagctttttaaagatcaattagaaatggataaagaaggatacctaattacaaatccgactcgactgaaacaaatgttcctggtgtttatgctgctggagatgtaa

SEQ ID NO: 223641 - DNA, 581 bp, Unknown
  Bacterial polypeptide expressing nucleotide sequence isolated from the Sargasso Sea
aatgaatcgaaaagttataattattggttctggtccagcaggtttaactgcagctctatatactgctcgcgccaatcttaagcctctggtttttgaaggcgagcaaccaggtggtcaattgaccattacaacagatgttgaaaattatcctggatttccaaaaggtattatggggccagcactaatggatgattttagagaacaagcgaaacgatttggtgcagaatgtcattttgcgcatgtaaccaaggttgattttaactcaaacccatatagaatttgggttgaagataaaacctatagttctgattctataattattgctactggagcttcggctaaaatgctaggccttgatagcgaaaaggaacttatgggttatggtgtctcagcatgcgctacatgtgatgggtttttctataagaataaaaaggtcttagtggtgggtggtggagactctgcaatggaagaagcaaattatctaactaaatttgcatctgaagtagtaattattcatagaagagatgaatttcgcgcttctaaaattatgatagatagagcacttaataattccaagattt

SEQ ID NO: 223642 - DNA, 946 bp, Unknown
  Bacterial polypeptide expressing nucleotide sequence isolated from the Sargasso Sea
aatgactgaattggaatctcctctcaatgtactcatcctcggttcgggcccggctgggctcactgcggcaatttatgctgccagagccaacttgaatccggtcctggtatatggacgggaaaaaggaggccagctgatgattacctctgacgttgaaaactatcccgggtttcccaaaggaattaaaggtccggaaatgatggatctgctgacggaacaagcggctcgttttgaaacacgattttttcagggagatgtcgttgaggcggatctgagtactaggccgttttcactcaaactggaaaatggagaagcgctcaaaaccaattcattgatcattgccacgggtgcttctgcacgatggcttggtttggattcggaaaaaaaatacaatggccgtggtgtatcggcctgtgccacctgcgatggttttttcttcagaaatcaaaatgtcgctgtagttggtggaggtgatacggccatggaagaagcgctttacctggccaatctatgtgaaaaggtgactgtcattcatcgaagagatgaattgcgggccagtaagatcatgcaggatcgtgctctgaatcacccaaaaatttcatttctttggaattcagctgttgaagaagtattaggagatgaacagggtatgaatggtttatcaattaaaaatcttaaaaatggagaattaacaaaacacccttttgatggaatgtttgtcgcaataggccacacgcccaacacccaactttttgaggggcaactggagatggatgaaaacggttatctcaaagttcaatccggttccacttatacctcacgcgaagggatttttgcctgtggtgatgtacaagaccatatttaccgtcaggctgtgacagccgccggaacaggctgcatggcagccattgatgccgaacgctggctggcggaacaatcaatataa

SEQ ID NO: 223643 - DNA, 764 bp, Unknown
  Bacterial polypeptide expressing nucleotide sequence isolated from the Sargasso Sea
tatgactactaattcaaaaaaacattcgaaagttttaattataggatctggtccagctggatatactgctgcaatatatacagcaagagcaatgcttaagcccatactagtccatggtgcagaacctggaggacaaatgacaacaacgacagatgttcaaaactatcctggatactcagatgttatacaaggaccttggttgatggatcaaatgaaagaacaagccaaagcggttggaactgatatgattcaagatcatattaataaagtcgaccttagtaaaaaaccctttaaggccattggtgacagcggacaggaatacactgctgattcaattataatttcaactggcgctcaagctagatggttaaatttagagtctgaacagaagtatagaggatttggagtttcaggatgtgcaacatgcgatggtttcttttttaaagataaagaagtagcagttataggtgggggtaatgctgcagtagaagaagcaatttttctaacaaaatttgcaaccaacgttaaacttattcatagaagaaatgaattgcgtgcagaaaaaatgctacaaaaaaaattaaaagaaaacaaaaaaatagaaattatctgggattcagtactagaagaagttttaggaaacgaagatccaaaaggtgtaactggaattaaaatcaaaaatataaaaacaaataaaactactcaacttaatgttcatggtttatttattgccatagggcatgatccagcgacgtccttaatta

SEQ ID NO: 223644 - DNA, 415 bp, Unknown
  Bacterial polypeptide expressing nucleotide sequence isolated from the Sargasso Sea
tatgaaaaatgtagcaataattggctctggaccagctggatatacagctggaatttatgcaggtagagcaaatcttgaaccagtgctttttgagggacttgaatctggcggtcagctaatgcttactaccgatgttgagaattatcctggttttgttgatggaataatgggccctgagctaatgcaagtttttaaaggtcaagctgaaagatttggcacagaaattaagaccgagatcattgactcaattgaaaatatagatggaggtttcaagcttacaagcagtaaaggtgagtacgaatttaaatctgtaattattgcatcaggtgcgtcagcaaggtggcttggcgttgagggtgaaaaagaacttcaagggtatggcgtttctgcatgtgcaacctgtgatgggttcttt

SEQ ID NO: 223645 - DNA, 868 bp, Unknown
  Bacterial polypeptide expressing nucleotide sequence isolated from the Sargasso Sea
atatgctgctcgtgcaatgttaaatccaatattagtatatggagctgcgccaggaggacaactaacaacaacaactgatgttgaaaattttcctggatttgccgatgtaattcaaggaccatggttgatggaccaaatgaaagagcaagcaaaagctgttggaactgagatgatagaagatcatattgcatccgtaaatttaaaatcgcaaccttttgaagctatgggggatagcggtcaaaagtatacggcagatagcataattatttcgacaggtgctcaagcaagatggctaaacattaagtctgaacaagaattcagagggtttggagtttccgcttgcgcaacgtgtgatggtttcttctttaaaaataaagaagtagcagttgttggtggaggaaatgcggcagttgaggaagcaatgtttcttacaaaatttgcctctaaagttaaattaattcacagacgtgatagtttgagagctgaaaaaatgcttcaaaaaaaattgatggaaaataaaaaaatcgagattatttgggactcggttgtagaggatgtgattggagacaaagagcctaaaaatgtaaaaggaataaaaattaaaaatgtaaaaacaaataacgtagaagaaataaaactcgatggggtatttattgcaattggtcacgatccagcaacatctctatttaaagaacaattagatatggacaaagagggatatttggttactaaaccagattcaaccgaaacaaacatacctggagtttatgcagctggagacgttaaagataaaacttttagacaagcggttacagcagctggaatgggatgtatggccgctttagaggctgaaaagcacttatcataa

SEQ ID NO: 223646 - DNA, 607 bp, Unknown
  Bacterial polypeptide expressing nucleotide sequence isolated from the Sargasso Sea
tatggaagatagaggttcaaatgacgaaccaaaaactccagattttccaaaaaaagtaaagacatcttatgacgtaattataattggtgcaggtccagcaggatacaccgcagggatttattgttcaagagcaagacacgatacactaataatttcaggacttttacctggcggtcaattaatgaatacaactgatgttgaaaattatccaggatttgaagaaggagtaatgggtccggatctaatgttaacaatgcgaaaacaagcagaaagaatgaacacaacaattatcgatgacgtagtcgtgaatgttgattttcgtgcaaaaccattcaaagttttaacaggttcagaagaatatgatgcaaaagctgtaatagtttgtacaggtgcaacaccaagaaaaattggtattgaaggtgaacaaacattcagcggaaaaggtgtttcatattgtgcaacatgtgatggcgcatttttcaggaatcaggaaattgcagttgtcggtgggggagacacatgtatggaagaggcaacatttctaacaaaatttgcatcaaaggttcacatcattcacagacgagatgaattcagagcaagtaaaatt

SEQ ID NO: 223647 - DNA, 754 bp, Unknown
  Bacterial polypeptide expressing nucleotide sequence isolated from the Sargasso Sea
tggcttatggaacaaatgaaagaacaagcagtaaaagtaggaactatctttcataatgatattgtaacttcagttgattttgaaaaaaatccatttacttccaaaactgagtcaggcaaagaatttgtgtccaaatcgataattattgcaacaggcgctcaggctagatggttgaatttggaaagtgaaaaaaaatttaaaggatttggtatttctgcttgtgcaacttgtgatgggtttttcttcaaagatcagcaagtagcagtgattggtggaggtaatagtgcagtagaggaagcaatgtttttgactaaatttgcttcaaaggttttgttaatccatagaagagatagtttacgagctgaaaaaattttacaagaaagactatttaacaataaaaaaattgaagtaatttggaatagtaaggtttctgagttcgttggagaagaaaatccaaatacattaaaaaaaattattttagagaacacattagatagcaccaaaacaactatagatgtaaatggtgcttttatagctataggacatgatcccgctacttcactttttatagataagttaaaaatggacgaggaaaattatataattactaaacctgatagtactgaaacaagtattaagggagtctttgcagcaggtgatgtaaaagataaaatttataggcaggctgtaactgctgctggtatgggctgtatggctgctttagaggctgaaaaatatatagcggaaaattaat

SEQ ID NO: 223648 - DNA, 175 bp, Unknown
  Bacterial polypeptide expressing nucleotide sequence isolated from the Sargasso Sea
tatgactgaaaaaatagaaaatgatgtcttaattataggctctggaccagcaggctatactgctgcaatctatgcagcaagagcaaatttaaaaccgcatttagtttcaggtttagaaccaggaggtcagctaactatcactacggatgtagaaaactatccaggattgaaaatg

SEQ ID NO: 223649 - DNA, 427 bp, Unknown
  Bacterial polypeptide expressing nucleotide sequence isolated from the Sargasso Sea
tatggaaaacactgagaaattaataattttaggttctggaccagcaggttacagtgcgagtatttatgctgctcgtgctggcttgaatccaactcttataacaggttttgaagttggagggcagcttacaacgactacagatgtagaaaattggcccggagactatgaagatcttcaaggcccagacttgatgattagaatgcaaaatcatgctaagaaatacggtgttaacattgttaatgatcaaatagaaaaagtagatttgggtggtgaaattaaaactttagaaggtatgaataaatatacatgcaaatccttaattatcactaccggagcatcagcgaaatatttaggtctttcttcagaagaaaagtatttaggaaaaggtgtaagtgcatgcgccacatgcgatgggttttttttataa

SEQ ID NO: 223650 - DNA, 949 bp, Unknown
  Bacterial polypeptide expressing nucleotide sequence isolated from the Sargasso Sea
aatgtcgaaaaaaaatatgcatcacagactgattatacttggttcgggtcctgccggacttactgcggctatatatgccgcaagagcaatcttaaaccctgtggtaatatccggacgtgaagccgggggacagctgatgataacaacagatgttgaaaactatccgggcttccctgaagggattaaaggtccgaaaatgatggaactcttgaaggcccaggctttaagatttgggacaaagtttatttccggggatgtaattgaagttgattttaggaaacggccttttaagcttaatttggaaaacaaagaaaccctgatgtgcgattcactaattgtttcatctggtgcttccgcacgctggcttggtttggaatcagaaaaaaaatacagtgggaaaggggtttcagcatgcgctacctgtgatggttttttcttccgtgaccaagatgttggtgttgttggtggaggagatactgccctagaggaggctctttacctggcaaatatgtgtaacagtgtaacactaattcaccgacgtgatgaattgcgaggtagcaaaatcatgcagaaacgcgcagtagatcatgaaaaaatatcttttttttgggatacggttgttgaagaagtattaggtaaccctgaaggtggaatgacttcaattaaagtaaggaacgtcaaaactgatcaggtctcagaacatccatttactggattgttcattgcaataggtcatactccaaataccagtttatttaaagataagctggaactggatgaaaacggttatatacaagtaactcccggaactacttatacatcggtagaaggtgtttttgcttcaggagatgtccaagatcatgtttatcgacaggccgttacagctgcaggtacaggttgtatggctgcaatagatgctgaacgttggcttgctgaacattttggctaa

SEQ ID NO: 223651 - DNA, 244 bp, Unknown
  Bacterial polypeptide expressing nucleotide sequence isolated from the Sargasso Sea
tatgaatcaaaatccaactaaacacacaaaagtgttgataattggatctggcccagctggatatactgctgctgtttatgcagcaagagcaatgttaaaacctataatggtttctggtatggagccaggagggcaattaacaactacaactgatgttgaaaattatccagggtttgcaaaagtaatacaaggtccgtggttgatggaacaaatgaaggaacaggcggaagcagtggaactgaga

SEQ ID NO: 223652 - DNA, 979 bp, Unknown
  Bacterial polypeptide expressing nucleotide sequence isolated from the Sargasso Sea
atggaagatagaggttcaaatgatgagccaaagaccccagattttccaaaaaaaacaaagacatcatatgatgtaattataattggtgcaggacctgcaggatacactgcaggaatttattgttcaagagcaagacatgacacactaataatttcaggacttttgccaggcggtcagttaatgaatactacagatgttgaaaattatccaggatttgatgaaggaataatgggaccagatttaatgttaacaatgagaaaacaagcagaacgaatgaacactacaattatcgatgatgtagttgtgaatgtagatttccgtgcaaaaccattcaaagttttaacaggttcagaagaatatgaagcaaaagctgtaatagtttgtacaggtgccacaccaagaaaaattggtatagaaggtgaacaaacatttagcggaaaaggtgtttcatattgtgcaacatgtgatggagcatttttcagaaatcaagacattgcagttgttggaggaggagatacatgtatggaagaagcaacatttcttacaaaatttgcatcaaaggttcacatcattcacagacgagatacattcagagcaagtaaaatcatgcaagatcgtgcattaaacaacgagaatatcgaagttcattggaacagcgtcattgaggatatcaaaggtgaccaaaaagttcaacagattattctaaaggatacaaaaactggagaaaataaaaccttggaaatgggaggagtttttgtagcaattggtcatgaaccaaataccgaattattcaaaaatcaattggagatggatgaaaatggatacatcattcagaaacaaaatacagaaacaagtgtaaaaggagttttcactgcaggagacgttcatgatcacagatacagacaagcagttactgcagcaggatttggttgtatgtctgcaattgatgttgacaaatatctatcagaacaaaaataag

SEQ ID NO: 223653 - DNA, 614 bp, Unknown
  Bacterial polypeptide expressing nucleotide sequence isolated from the Sargasso Sea
aatgtccgacgcttccgggcacgttgaaaatctcgtcatcgttggctcagggcctgccggctacaccgctgccatctacgccgcacgggccaacctgcagccgctcctgatcacagggttccagcggggaggcatccctggcggccaattgatgaccaccacccacgtggagaactttccggggttccccgatggaatcctcggtccagacctgatggacctgatgaaagcccaggccgtgcgctggggcacccacctgatcgaagccgatgcagaccggattgacctgaaccagcgccccttccgcatcgaagctgacggagagacgatccaggcccatgccgtggtcatcgccaccggtgccagtgcgaaccggcttggcctgcccacagaggagcgctattggagcagtggcattagtgcctgcgcgatctgcgatggggccaccccgcagttccgcaatgaggaactggcggtagttgggggtggtgattccgcttgcgaggaagcggtctatctcaccaagtacggcagccacgtccatctgatcgtccgatccgaccaattccgagcgagcgccgccatggccgatcgcgtgatggccaatccagcca

SEQ ID NO: 223654 - DNA, 355 bp, Unknown
  Bacterial polypeptide expressing nucleotide sequence isolated from the Sargasso Sea
aggtaaaattgaaatcttgtgggatactcaattgaaggaagtaattggtgacgaaaatggagttactggtatcaaattagacaataaaggtagtgagataattaaagaagttatgggtgtctttatagcaattggtcataaaccaaataccgaaatgttttctgatcaattagaaatggataatggttatattgttatcaaatctggacttaagggattagtaacaagcacttctgtcgaaggagtttttgcagcaggagatgtttcagatcaaatttatcgtcaagcaataacatcagcaggttttggctgtatggctgcccttgatgctgaaaaatacttatctgaaaaataa

SEQ ID NO: 223655 - DNA, 934 bp, Unknown
  Bacterial polypeptide expressing nucleotide sequence isolated from the Sargasso Sea
tatgaaccggaaagtcataataattggttctggtcctgctggacttactgcagcaacttatgcagctcgagcaaatcttgaacctttggtatttgaaggcgtccaaccgggtggtcaattaacaatcactacagacgttgaaaattatcctgggtttcctgatggaattatgggaccagatctaatggataaatttcgtgaccaggcaaagcgttttggtgccgaatgttatttcaaacacgttacaaaagttgatttagaatctaatccatttaaagtgtgggttgctgatgaaacttttacatctgattcgataattattgcaactggtgcaactgccaaactattaggtttagaatctgagaaaaacttaatggggcatggtgtatcagcttgtgctacatgtgatggtttcttttttaaagacaaaaaagtctttgtaataggaggtggtgattctgcaatggaagaggcaagttttttaacaaaatttgcttctgaagtacagattattcatcgtcgaaatgagctaagagcatcaaagattatgcaagatcgtgtattaaataaccctaaaattcatattcaatggaatacaacacttgaagatattaaaggcaatgtagatgatggtgtaagtgcagttattctaaaggatattattagtggtgatatacgttctgaagaatgtgatggagtctttttagctataggacatacaccaaacacagaactttttgataattttcttaatttagatgaaaaaaaatatatttgtacagatgataatagtactaaaacttcagttcctggaatttttgcttgtggagatgtgcaagatagcatatatcggcaagcagttaccgcagctggcagtggatgtatggctgctattgatgctgaaagatatttggaatcaatagaatcatcctaa

SEQ ID NO: 223656 - DNA, 724 bp, Unknown
  Bacterial polypeptide expressing nucleotide sequence isolated from the Sargasso Sea
gcgcggcaggtgggaacacgaatggttgaagatatcataacatcgattgataccagtcaacgcccattccatctaaaaggtgatactggagacgattattatgctgacgctgttattgttgctacgggagctcaagctagatggctaggtcttgaaagtgaggcacggttgaatggaaaaggtgtatccgcctgcgcaacttgtgatggctttttcttcagaggccaagaagtcgcagtagttggaggaggaaacacagcagttgaagaagccttatacttatccaacatagcatctaaagtcacccttatacaccggcgcgagcaactgcgtgcagaaaaaattttacaagataggctttttagaaaagaaaatattgatatcatttggaatagcgaagtcaccgaaatctgtggcgacgaggctgtaaaaagtgtgaagctttttaattcgcagacaaacgaagtgaaagaattacttgcagaaggttgcttcgttgcaataggccacgatccagcaacgtcagtttttcgaggtcaagtggaaatggatgaagatggctacattattgtagaacgaggcactacgcggactgataaacctgggctttttgcggcaggagattgcgtggatcgtgtttatcggcaagccgttacagcagcgggcctcggttgcatgtctgcccttgaagtggagaaatatctggctgatttagagatttgat

SEQ ID NO: 223657 - DNA, 940 bp, Unknown
  Bacterial polypeptide expressing nucleotide sequence isolated from the Sargasso Sea
atgacagacaaaactattcataaaacaatcattattggttcaggtcctgctggactaacttcagcaatctacgctggaagagcaaatttaaaacccattgtttttgagggaaatcaacctggaggtcaattaacaattactacagatgttgaaaactaccctggttttccaaacggtgttatgggtcctgaaatgatggacttattcagagatcaagcaaaaaaatttggagcagaatgtttttttaagcatgtcaccaaagtagattttagttcaaagccatataaagttttcgttggagatgatgaatttctatctgaaactattattatttctactggagcatctgctcgaatgttaggtcttaaggaagaagatgagttaatgggttatggaattagcacttgtgcaacatgtgatggatatttttttaaggataaaaatattgttgttgttggtggtggtgattcagctatggaagaagcatctttcctcacaaaatttgcaaaaaaagtaactatcattcacagaagagaagtattcaaagcttcaaaaattatgttagatagagcaaaaaataatcctttaatagacatcatagtcaataaaagtatagagtctattaatggttcacaaaaagatggtgtatctagcgtaattcttagagatactatcacagaacaaaaatctacttttaattgtgagggtgttttttatggaatcggtcataatcccaatacagaactttttaagggaattattgatttgaatgacaacggatatattataactaaacctgattccacgttgaccaatattccaggagtttttgcatgtggagatgttcaggatgatcattatcgacaagctattactgccgcaggatctggttgtatgtctgcgatagatgcagaaaaatatctagaagatgtagaatagt

SEQ ID NO: 223658 - DNA, 898 bp, Unknown
  Bacterial polypeptide expressing nucleotide sequence isolated from the Sargasso Sea
gccagctggttatactgctgctgtttatgctgcgagagctatgcttaaaccaatgttggttgctggtatgcaaccgggtggtcaattaactataacaactgatgttgagaactaccctggatttgcagatgttattcaaggaccatggttaatggaacaaatgagagagcaggcaaaagcagttggaacagatttagttgaagatcatatccagtcagtaaatttaaaatctaaaccgtttgaggcgattggtgacggaggacaaaaatataccgcagactcgattataatttcgactggagcacaagcaagatggttaaacattgaatctgaacaaaaatttaagggatttggagtatcagcttgtgcaacatgtgatggcttttttttcaaagataaaacagttgcagttgttggtggaggaaatgctgcagtagaagaagctatgtttcttacaaaatttgcatcaaaagtacaattaattcatagacgagataaactaagagctgaaaaacttttacaaaaaaaattaatggaaaataaaaaaattgagattatttgggactctgttgttgaagaggtagtaggtgacgatgagccaaaaaatgtaaaaggattaaaaattaagaatgttaaaactaatgaaacatcagatttaaaaatagatggattatttatagctattggacatgatcctgctacatctttatttaaagatcagctagaaatggatagcacaggttatttaattactaaaagcgattctaccgagactaatattccaggagtttatgcagctggagatgtgaaagataaaatttataggcaagcagtaactgcagcaggaatgggctgtatggcagcattagaggcagagaaatatttagctgcaaattaa

SEQ ID NO: 223659 - DNA, 375 bp, Unknown
  Bacterial polypeptide expressing nucleotide sequence isolated from the Sargasso Sea
tatgagtcaaaatccaactaaacacacaaaagtgttaataattggatccggccctgccggatacacagcagcagtttatgctgctcgtgcaatgttaaatcctattttagtttatggatctgagccaggaggacaattaactactacaactgatgttgaaaattatccagggttttctgaagttattcaaggaccatggttaatggatcagatgaaagaacaagcaaaagcagttggaactgaaatgattgaagaccatattggatctgtaaatttaaaaagctcaccatttgaagcaattggagatagtggtcagaaataccctgctgatagtattattatttctactggagcaccagctagatggttgaatat

SEQ ID NO: 223660 - DNA, 952 bp, Unknown
  Bacterial polypeptide expressing nucleotide sequence isolated from the Sargasso Sea
tatgaataaaaatcatcataaactaataattttaggttctggtcctgctggatgtacagccgccatatatgcagctagagccggtctaaaacctattctaattcgcggtctagagcctgggggacaactaactataacaaccgatgtagataattatccaggatatgaaaatactattcaaggtccttggctgatggatcaaatggaaaaacaagccttatctgtaggcactaaactagtcaatggaaccgttataaaatgtgaccttactactaaacctattaaactagagttagataatggtgaaagttatttttctgatgcatgcataatagctactggcgcctctgcaagatggctaaatttaccatccgaaaaaaaatatagaggttttggagtaagcgcgtgcgctacatgtgatggattcttctataaaaataaagaagttatagtagtaggtggcggaaatacagcagttgaggaagctttatttttaactaattttgcctctaaagttactttagtgcatagaagatctgaattaagagctgaaaaaattttacaggaaagattattcaaaaataataaaattagtattatttgggatcatgttttaaaagaagttaaagggtcagattcaccattaatagtaaatcaagcagtactcgaatcaattaaagataataagttaatgaaaatagatgttagcggtatatttattgctataggtcatgatcctaatacaaaattatttatcaatcaactaaatatggatgatgaaaattatattttgactgcaaatgatagcacaaaaactaatatagaaggagtatacgcagctggagatgtacaagataaaatatacagacaagctgttacggctgcaggccatggatgtatggcagcattagaagcagagaaatatctttcaataatagagaaatctttatag

SEQ ID NO: 223661 - DNA, 940 bp, Unknown
  Bacterial polypeptide expressing nucleotide sequence isolated from the Sargasso Sea
atgacagataaaactattcataatacaatcattattggttcgggtcctgccggattgactgcagctatctacgctggaagagcaaatttgaagcctattgtctttgaaggaaatcagcctggtggacaattgacaattaccacagatgttgaaaattttcctgggtttcccaatggtgtgatgggtcctaagatgatggacttattcagagatcaagctaaaagatttggggctgaatgtttttttaagcatgttacaaaagtagattttagttcaaaaccctataaagtttatgttggagatgaagaatttctatcagaaactgttattatttctactggagcttctgctagaatgctaggattaaaagaagaagaagagcttatgggttatggaattagcacttgcgcaacttgcgatggatatttctttaaagataaaaacatcgttgttgttggaggtggtgattccgcaatggaagaagcatcgtttctcacgaaatttgcaaaaaaagtaactatcattcatagaagagaagtatttaaagcttcaaaaattatgcttgatagagtaaaaaataatccgctcattgacataatggttaataaaagcattgattctattatcggttcacaaaaagaaggagtctcaagcattgtgcttaatgatactgtttcaggagaaaaaactacttttaagtgtgaaggtgttttttatggaattggtcacaaccctaacacagatctttttgatggagtaattgatttagatgataatggatacattattactaaacctgattcctctttgacaaatattccgggagtttttgcatgtggagatgttcaagatgatcattatcgacaagctattactgctgctggatctggttgtatggccgctatagatactgaaaaatatttagaagatatcgaatagt

SEQ ID NO: 223662 - DNA, 194 bp, Unknown
  Bacterial polypeptide expressing nucleotide sequence isolated from the Sargasso Sea
aatggagaataaagagaacacttcaaatatagaaaatgttgtaattattggttcaggtcctgcaggatatacagctgcaatttatgcagcaagagcaaatcttcaaccattgctcgttacaggatttgattctggtggaattcctggtggccaattaatgactacaacatttgtgaaaattatccaggtttcca

SEQ ID NO: 223663 - DNA, 307 bp, Unknown
  Bacterial polypeptide expressing nucleotide sequence isolated from the Sargasso Sea
tatgactcaaaatccaactaaacacacaaaagtgttaataattggatcaggaccagctggatacactgctgctgtttatgcggcaagagctcttctgaaaccgataatggttacaggtatggagccagggggacaattaacgaccactactgatgttgaaaattatccaggttttgctgaagtcgtccaaggtccctggttaatggagcaaatgagagatcaagcaaaagcagttggaacagaaatgattgaagatcatatttcatctgtaaacttaaaatcaaaaccttttgaagcaatttggtga

SEQ ID NO: 223664 - DNA, 292 bp, Unknown
  Bacterial polypeptide expressing nucleotide sequence isolated from the Sargasso Sea
gattgaaataaaaaataaattaagtgaagagatagcgagcattgagttaaaaggtgtatttattgctattgggcatgagccaaatactaaattatttaaaggacaactagaaatggagaatggctatattaaaacaagaagtggcttgaatggacaggtcacatcaacaaacatcccaggtgtttttgcagctggtgacgtatctgatcatatctatcgtcaagcaataacatcagctggatttggatgtatggctgcgttggatgccgaagcatatttagatgaaaaataa

SEQ ID NO: 223665 - DNA, 550 bp, Unknown
  Bacterial polypeptide expressing nucleotide sequence isolated from the Sargasso Sea
tatggatacattaattattggtagtggcccagctggatatacagctgcaatatatgctgctagagcagatttaaagcctgtaatttatactggtcttgaaccgggtggtcaattgacaacaactacagatgttgacaactttcctggatatccaaaaggaatagacggtcctaaaatgatggatgaattaaaagaacaagccgaaaggtttggaactgaagtgaaaattgattttatctctaaggtagagttctcaaaaaacaaagggagtcttcataaagtgttctctcaagacggaacagaaattgaggccaaaacaattataatttgtactggagcttctgctaaatatcttggattaccaagtgaaaaaaaattaattggtggtggagtctctgcatgtgcagtttgtgatggatttttctataagaatcaagaggtggctgttgttggtggtggtgatactgcagttgaagaagccacttatttagctaaaatatgctctaaagtaactatgattgttagaaaagatcacctaagagcttcaaag

SEQ ID NO: 223666 - DNA, 699 bp, Unknown
  Bacterial polypeptide expressing nucleotide sequence isolated from the Sargasso Sea
atcatattaataaagttgatctatctaaaaagcctttcacagctacaggtgatagtggtcaagtttatactgctgatagttttattatttcaacaggtgctcaagcaagatggttaaatttgaaatctgagcaagaattcagaggtttcggagtttcagcttgcgctacgtgcgacggatttttcttcaaagaaaaagaggtggctgtagtaggcggaggaaacgcagctgttgaagaagcaatgtttctaactaagtttgcttcaaaagtttatctaattcatagaagaaatgaattaagagcagaaaaaatgcttcaaacaaaattaaaagcaaacaaaaaaatagaaattatttgggacagcgttgttgaagatgtattaggtacaaaagagcctaaaactgtgaatgcattaaaaattaaaaatataaaagataataaagttaaagatcttaaggttgacggtttatttattgctataggtcatgatccagctacatctttgttcaaggatcaattaaaaatggataaagagggatacttaattactaagccagactcaactgaaacaaatatacctggtgtgtttgctgctggtgacgtaaaagataaaatatttaggcaagcggtaacagcagctggcatgggttgtatgtctgctcttgaggcagaaaaatatttagcagctaaagactaaa

SEQ ID NO: 223667 - DNA, 445 bp, Unknown
  Bacterial polypeptide expressing nucleotide sequence isolated from the Sargasso Sea
aatgggtcaatcatcgcaccataaattaataatacttggttctgggcctgccggttataccgcagcagtctacgcagcaagagccaatctggaaccggtcgtaataactggattaacacagggaggtcagttaaccacaacaacagatgttgataattggcctggagatgtagaaggtcttcagggacctgatctcatggaaagaatgaaaaaacatgcagaaagatttgattctaaagtaatatttgatcatatctgcaaagtaaatttacaagaaaagcctttcgttcttttggggcaagatacatcttatacttgcgatgcgctgataatagcaactggtgcttccgctcagtatttaggtttagagtcagaaactgcatttatgggcaaaggtgtgagtgcttgcgctacttgtgatggatttttttatcgaaaccaagcc

SEQ ID NO: 223668 - DNA, 878 bp, Unknown
  Bacterial polypeptide expressing nucleotide sequence isolated from the Sargasso Sea
catgagcgacgccgtacgcaatgtaatcataatcggaagtggacctgcaggatacactgcaggcctgtataatgcaagggctatgttggacccgttgatgtttgcaggatacatgtctggtggtcaattgatgttaacatcagatatcgaaaacttccccggctatccagaaggaatcgctggtcctgagatgatgatgcaattaagagaacaagccgaaagatttggtttggaagtgcaagataagaatgtagagagaatcgatgcttcaacccgcccattcaaagtctgggtagagggggaggagttccaatctcataccttgattatctgtactggcgcagaagcgatttggctcggtgcagaaggagaagatgagcagaagggtagaggtatttccacttgtgcaacatgcgacggggctttctttagagaccaagaaatcatggtaatcggtggtggagattcagcgatggaagaagcaaccttcttgacacgatttgcctcaaaggtaaccgttgtacacagaagagatactttccgtgcatcaaaggtaatgtatgaccgtgctgccgctcatcctaaaatcgaaattaaaacatttagacaagtgactaagtggttatctgatgaaagcggacttacaggtgctcttctcgaagacccccgcgacggttctacagaagaattagcagtaactggtgcatttattgcaataggtcacaagccgataacagccttccttgaaaatcaaatagaaaccgatgaagaaggatacatagtgcccaaaggattctctatgacaagtgttccaggaatatttgctgctggcgatgtggttgataccagatacaggcaagcaatcactgctgctggaa

SEQ ID NO: 223669 - DNA, 323 bp, Unknown
  Bacterial polypeptide expressing nucleotide sequence isolated from the Sargasso Sea
tatgagcataattgaaaataatgtactaattattggatccggtccagcaggatatactgcagctatttatgcagcacgcgctaacctcgaacctcatttgatttcaggcttagaacctggtgggcaacttacaattacaacggatgttgaaaattatccaggatttggagatgtaattcaaggtccttggcttatggaagaaatgaaaaaacaagcattaaacgtaggaacaaaatttcataacgatattgttacatctgtaaactttgaaaacaaaccatttcgttcaaaaacagagtcaggtaaagaatttttatcaaaat

SEQ ID NO: 223670 - DNA, 679 bp, Unknown
  Bacterial polypeptide expressing nucleotide sequence isolated from the Sargasso Sea
tatggctaaaacttgtgatgtagctgttttaggaggcggagcggctggtttatcagcagcactgtattcaactcgagctatgctaaaaacagttgtcctagaaaacttgggagtaggaggacaattacttattaccgatgaaatagaaaattacccaggctttcctgaaggagaaaccgggcaacaactagctatcaacatgcaacaacaagctgaaagatttggagcagaaatagacttttcatccattgagggagtttctgatttagacaaagagaccaagataatccataccgatgatggggatttgcatgccaaagcagtgatcatagctactggaggatctcataaaactctcggtattcctggcgaagatgcactatcagggaagggagtgtcttactgtgcagtatgtgacggaaacttctttaaaggacaagatgtagtagtaatcggcggaggagacgctgctatggatgaaagcaattacctcaccggcatagtcaactcagtaacaattgtacatagaagagacgagctcagagccactaaaatacttcaagaacgagctttcgctaaccccaaatacaaatggctatggagccatgttgtagaagaattcgtaggagacaacttgctgacagctgctagagtgaaagaccttaagactggtgaagta

SEQ ID NO: 223671 - DNA, 437 bp, Unknown
  Bacterial polypeptide expressing nucleotide sequence isolated from the Sargasso Sea
aaaagtatatttagttcatagaagagacgaattaagagctgagaaaattcttcaagataggatatttaaagaggaaaaagctggcaaaattgaaattttatgggactctcagcttaaggaagttttaggcgatgatatgggcgtgaatggaatgatgattgatactaaaggcagtgaagttaaaaaagatgttatgggaatatttattgcaataggacacaaaccaaatactgatatctttaataatcagttagatatggaaaatggttacatattaataaaatcgggtttaaaaggttcaataacaagcacttctgtagaaggtgtttttgcagctggagatgtttctgatcaaatttacagacaagctgtaacttctgccggttttggttgtatggcagcacttgatgcagaaaaatatttatcagaaaaataaa

SEQ ID NO: 223672 - DNA, 895 bp, Unknown
  Bacterial polypeptide expressing nucleotide sequence isolated from the Sargasso Sea
atgaagcggaaagttatcattattggctctggacctgcaggactaactgcagctatttattctgccagagcaaatctagagcctcttgtttttgaaggagctcaacctggaggacaactcaccatcactactgatgtagaaaattatcccggattcccagatggtatcatggggccagagatgatggatgaatttagaaaacaggcccagcgatttggtgctgagtgcatgttcaagaccgtagataaggtcgatctttccagtcgtccattttcagtatgggccaatgatgaagaatattctgcagaagcgattataatttcaaccggagctactgcgaggctattaggcctagatgcagagaccgaattgatgggccatggagtttcggcatgcgctacttgtgatggattcttttttaaggataaaaaagtactagttgtgggtggaggtgactccgctatggaagaagctacctttttaacaaagtttgcttctgaagtggttatcatacacagaagagaagagtttcgtgcatctaagataatgatcgaacgggcattgtcgaattcaaaaatatcagtagaatacaattctacagtagaagatatcaagggatcaaaagaagaaggtgtgagatcagttgtattaaaggacacaaatacgggggaactacgtgattacccttgcgatggtatttttatggcaattggtcatgttccaaatacacagctattccaaggtaatatcgatcttgatgattcaggatacattatcacaaaatcagactcaacctataccaatattgatggtgtttttgcatgtggagatgttcaggaccatgtatataggcaggcggttaccgctgcaggatctggatgtatggcagctattg

SEQ ID NO: 223673 - DNA, 289 bp, Unknown
  Bacterial polypeptide expressing nucleotide sequence isolated from the Sargasso Sea
tatgaaccaaaagccaactaaacacacaaaagtgttaataattggatccggcccagctggatatactgctgcggtttatgcggcgagagcaatgttaaaacctgtaatggttgctggaatggaaccagggggtcaattaacaaccacaactgatgttgaaaattatcctggatttgcagaggtaattcaaggtccatggctaatggagcatatgaaagaacaagctgaagctgtgggcactgaaatgatacaagatcatatatcgtcagtaaatttaaaatctaaacct

SEQ ID NO: 223674 - DNA, 634 bp, Unknown
  Bacterial polypeptide expressing nucleotide sequence isolated from the Sargasso Sea
atacactgctgatagttttatcatttcaacaggagcgcaagcaagatggttgaatttaaagtctgaacaagaatttagaggatttggagtttcggcatgcgcgacttgtgacggatttttctttaaagaaaaagaagtagccgtagttggtggaggaaatgctgctgttgaagaagcaatgtttctaacaaaatttgcttcaaaagtttatttaatacataggagaaacgaactaagagcagaaaaaatgcttcaaacaaaattaaaatctaataagaaaatagaaattatttgggatacagtagttgaggacgttattggtacaaaagagccaaaaactgtaaatgcattaaaaattaaaaatgtaaaagataataaaattaaagatcttaaagtcgatggtttatttattgcgataggtcatgatccagctacatctttatttaaggaacaacttaaaatggataaagaagggtatttaattacaaaacctgattctactgaaacaaatattccaggagtttttgctgcaggagatgtaaaggacaagatttttagacaagcagttaccgctgctggaatgggttgtatgtcagcacttgaggctgaaaaatatctatctgagtctaattaa

SEQ ID NO: 223675 - DNA, 247 bp, Unknown
  Bacterial polypeptide expressing nucleotide sequence isolated from the Sargasso Sea
atgagtcaaaatccaactaaacacacaaaagtgttaataattggatctggtccagccggatacacagctgcagtctatgctgcaagagctatgctaaaacctattatggtttcaggaatggaaccaggaggacaattaacaactacaactgatgtagaaaattatcctggatttgcagaagtaatacaggggccttggttaatggaacaaatgagagaccaagctaaagctgtaggaactgaaatgg

SEQ ID NO: 223676 - DNA, 335 bp, Unknown
  Bacterial polypeptide expressing nucleotide sequence isolated from the Sargasso Sea
tatgaataataattcaaaaaaacattctaaagtcttaattataggatctggacccgctggatatactgctgcagtttatgcggctagagcaatgttaaagcctatgctcgtacatggcatggagcctggcgggcaattatcaacaactactgatgtagaaaattatccaggattttcaaaagttatccaaggtccttggttaatggatcaaatgaaagatcaggcaaaagctgtcggaacggaaatgattgaggatcatattgcctctgtaaacttaaaatctaaaccatttgaagctgttggagatggtgggcaaaaaatatacggcagactca

SEQ ID NO: 223677 - DNA, 791 bp, Unknown
  Bacterial polypeptide expressing nucleotide sequence isolated from the Sargasso Sea
aatgaatcgaaaggttataattattggatctggtcctgctggtttaacagcagcactttataccgctcgcgcaaatctaaatccattggtctttgaaggtagtcagcctggtggtcagttaacgattacaactgatgttgaaaatttccccggttttccggatggaattatgggccctgaattaatggatttatttcgtaaacaggctgaaagatttggcgctgagtgccattttgaacatgtgaccaaggttgattttagcaaaaaaccctacaacgtatgggtgggtgataagaattaccaagctgaatcaattatcatcgcaacaggagcaaccgcaaagatgctaggtttagatagcgaaaaagagctaatgggttttggggtatctgcgtgcgcaacttgcgatggttttttctttaaggataaaaaagtgttggtcgtaggtggtggcgattctgccatggaagaagcaacctatcttaccaagtttgcttcagaagtggttattgttcatagaagagaagaatttagagcttctaaaatcatgatcgatcgcgcgatgaataatccaaagatacgtgtattatggaattctacgatcgatgagatcatgggatcgcaagaaaaaggtgtccatgcggtgaaaattaataaaacggattccggtgaaagttttgaagaagaatgcgatggcgtttttatggcgattggtcataaacccaatacagaattattcactgatgttttaaaaaccgatcaaaatggatatttggtaactgtaaatggat

SEQ ID NO: 223678 - DNA, 361 bp, Unknown
  Bacterial polypeptide expressing nucleotide sequence isolated from the Sargasso Sea
atgagtcaaaatccaactaaacacacaaaagtgttaataattggatctggtcctgccggatacaccgcagcagtttatgcggctcgtgcaatgttaaatcccattttagtttatggatctgagccaggaggacaattaacgactacaactgatgttgaaaattatccaggattttctgaagttattcaaggaccatggttaatggatcagatgaaagaacaagcaaaagctgttggaactgaaatgattgaagaccatattggatctgtaaatttaaaaagttcaccatttgaagcaattggtgatagtggtcagaaatatactgctgatagcattattatttctactggagctcaagcaa

SEQ ID NO: 223679 - DNA, 946 bp, Unknown
  Bacterial polypeptide expressing nucleotide sequence isolated from the Sargasso Sea
gatgacagataaaactattcacaaaacaatcattattggttcaggaccagcaggtttaactgctgctatttatgctggaagagcaaatttaaaaccaattgtatttgaaggaaatcagcctggtggtcaattaactattactactgatgttgaaaatttcccaggttttccagacggagttatgggtcctgatatgatggatttattcagagatcaagcaaagaaattcggagcagaatgtcattttaaacatgtcactaaagtagattttagttctactccttataaggtttttgtaggtgaagaagagtttctttcagaaactgttataatttccactggagcctccgctcgaatgcttggattaaaagaagaagagcaattaatgggttatggtattagcacttgtgcaacttgcgatggatattttttcaaagagaaaaacatcgtagttgttggaggaggagattcagcaatggaagaagcttcttttctaacaaaatttgcaaaaaaagtaacaatcattcatagaagagaggtttttaaagcttctaaaattatgcttgatagagttagaaataatccgctaattgatatcgtggttaataaaagcattgaatccataaaaggtactcagcaagatggaatttcgagcattgttcttaaggatacagtctctggagaaagttcaacttttgaatgcgagggagtgttctatggaattggacataccccaaatactgatctttttaaaggaatgattgatttaaatgataatggttatattataacacaatctgattcttcattaactaatattcctggcgtttttgcgtgtggcgatgttcaagatgatcattacagacaggcaattactgctgcgggatctggttgtatggctgcgattgatgcagagaaatatttagaagaaaatattattgaatag

SEQ ID NO: 223680 - DNA, 277 bp, Unknown
  Bacterial polypeptide expressing nucleotide sequence isolated from the Sargasso Sea
atgaatcaaaatccaactaaacacacaaaagtgttaataattgggtctggtccagccggatatacagctgcggtttatgctgcaagagcaatgttaaaacctattatggtttctggtatggagccaggtggacaattaactaccacaactgatgttgaaaattatcctggttttgctgaagtaattcaggggccatggttaatggaacaaatgcgggaccaagctaaagctgtaggtacggaaatgattgaagatcatatctcttcagtaatttaaa

SEQ ID NO: 223681 - DNA, 504 bp, Unknown
  Bacterial polypeptide expressing nucleotide sequence isolated from the Sargasso Sea
tatgaatcggaaagtaataataattggttctggtccagctggattgactgcagcaacttatgcagctcgtgcgaatcttaaacctttagtttttgaaggttcacagccgggtggacaattaactataacaacagatgtagaaaattatcctggttttcctgatggtatcatggggccagatttaatggataaatttcgcgaacaagcaaaacgttttggcgctgagtgttattttaaacatgtaacaaaagttgatattgaatctcatccatttaaaatatgggttggtgatgaaactttcacaacagattcaataattatagcaactggtgcaacagcaaaattgttaggattagaatctgaaaaagaattgatggggcatggcgtatctgcttgtgctacatgtgacggtttctttttcaaagataaaaaagtttttgtagtaggaggcggtgattctgcgatggaagaggcaaattttttgacaaaatttgcaaacgaagt

SEQ ID NO: 223682 - DNA, 735 bp, Unknown
  Bacterial polypeptide expressing nucleotide sequence isolated from the Sargasso Sea
aaggtcaggccaaagcagtaggaactgaaatgattcaagaccatataagtaaggtagacctttcaaagaaaccttttgaagcaacaggtaatagtggtcaagtttataccgcagacagttttataatttctacaggtgctcaagcaagatggttaaatttaaaatcagaacaagaatttagaggatttggtgtttcagcctgtgcgacatgtgatggtttcttttttaaagaaaaagaggttgctgttgtcggaggtggaaatgctgctgtagaagaagcaatgtttttaacaaaatttgcatctaaggttaagctaatccatagaagaaatgaactaagggcagaaaaaatgctccaagcaaaattaaaagcaaataaaaaaattgaaattatctgggatagtgttgttgaagatgtttatggagataagaatccaaaatcagtgaaagctatcaaaattaaaaatattaaaagtaataaaactactgaattgaaagttgacggactttttatagcaataggtcatgacccagctacttcgctttttaaaggtcaattaaatatggataaagaaggatatattgtaaccaatcccgactctacaataactaatgtgccgggagtttttgcagctggtgatgttaaagataaaatatttaggcaggctgttactgcggctggaatgggttgtatggctgcacttgaggctgagaaacatttatcatcaaaatgag

SEQ ID NO: 223683 - DNA, 776 bp, Unknown
  Bacterial polypeptide expressing nucleotide sequence isolated from the Sargasso Sea
gctcatggaacagatgcaaaaacaggccgaacacgtcggaacacggatgatttacgacgtcatcaccgaagttgacttctcttcccggccgttccgggcgacgggggattctggcgacacctattcgggggatacggtgataatttcgacgggcgcacaggcccgctggcttgggcttgcggcggaagagaagttcatgggcttcggtctttccgcctgcgcaacctgcgacgggttcttcttccgcgagaaggaagtggcggtcatcggtggcggcaacaccgcggtcgaggaagcgctctatcttaccaaccacgcgagcaaagtaacgttgatccaccgccgcgatcagttgcgctcggagaagatcctgcaggatcggctcttcgcaaatccgaaaatcgaaatcctctgggatcacgtcatggaggacatcatcggcgatgaaaacccggcaagcgtgaccggtgcgaaacttcgcaacgtcaagacggacgaagtttccgagcttgcggtcgacggtattttcgtcgccatcggccacgatcctgcgacggcgatcttcaaaggtcatatcgagctcgacgatgaaggctacgtgatcaccaagcccgatagtacggagacggcaattcccggcgtatttgccgccggtgacgtcaaggacaaggtttaccggcaggccgtcacagcagccgggatgggttgcatggcagctcttgaggcggagaagttcgtcgcggagcacgaggtgcaaagcgcggcggcagagtagc

SEQ ID NO: 223684 - DNA, 567 bp, Unknown
  Bacterial polypeptide expressing nucleotide sequence isolated from the Sargasso Sea
gatgtcagttcataaaaaattaattattcttggttcagggcctgcaggttatgctgcaagtatatatgctgctagagctggattaaatcctattattattgcaggttcccaagaaggtggacaattaactacaacaacagatgtagaaaattggcctggggatagtgacggtctacaaggcccagagctcatggatagaatgaagaaacatgctcaacaatttgatgttgaagtattaaatgatcatattaattctgttgatttaaaacaaaaaccattcttacttaagggatcaaatgaatatacatgtgatgcattggttatctcaactggagctagtgcaatgtacttaggtttggattctgaaaaaaaattcttaggtaaaggagtatctgcttgtgcaacttgtgatggttttttttatagagatcaagaagttatagtggtgggaggaggaaatactgctgtagaggaagctttatatctttcaagaatatgttcaaaagtcactctaatccatcgaagagatagtcttagagcagaaaaaattctacaagatagattatt

SEQ ID NO: 223685 - DNA, 781 bp, Unknown
  Bacterial polypeptide expressing nucleotide sequence isolated from the Sargasso Sea
ctttcgtgatggagtatggggccccaatttaatggatttgctccgcttacaagctcaaaaatttggagcaaagtgtataatgaagcaagtcgacaaggtagatttaagcgttaggccgtttaagattgaatctgataatcaaacaacagaagcggactctattataatttctactggtgcatcagccaaattgcttggaataaaaggagaagagaaatacgttggtagaggactttctacttgtgcaacatgcgatggtttcttttataaagataagtcgattcatgtaatcggtggcggggatagtgcaatggaggaagcaatttttctaactaagtttgcttcaaaagttacaattattcatagacgagatactctcagagcttctaagattatggcagagagagcaattagtaatccaaaaatagattttatttggaatgctgagcccatagagtttttgggaaatgatgagaaaggaatttatggattagcttataaagacaatattgcaaataaggaagttaagataaatactgatggggtatttattgccattgggcataatccaaatacagctctttttgagggcatgttagatatggattcaaacggatatcttgttacggattcaaagtcatcccgtactaatgtattaggtgttttcgcttctggtgatgttcaagatagcgtttatagacaggctataacagcagctggatccggatgcatggcagcaattgatgcagaaaggtttttagaggaagaaaatgaattatag

SEQ ID NO: 223686 - DNA, 532 bp, Unknown
  Bacterial polypeptide expressing nucleotide sequence isolated from the Sargasso Sea
tgtgctacttgtgatggttttttctttaaagaaaaagaagttgccgtagttggaggtggtaatgctgcagttgaagaagcgatgttcttaactaagtttgcatcaaaagttaagttaattcatagaagagataaattgagagctgaaaaaatgcttcaaaaaaaattaatggaaaataaaaaaattgaaataatttgggatactgttgtagaagatgtaattggggatagcgaacctaaaaatgtaaagggaattaaaattaaaaatttaaaaactaataaaattgaagaaattaaagtggatggtttatttatagcaattggtcatgatccagcaacttcattgtttaaagaacaattaaaaatggataaagaaggttatttgattactaaacctgattctactgaaacaaatatccccggagtttatgctgctggagatgttaaagataagacttttagacaagctgtaactgccgcgggcatgggttgtatggctgcattagaagctgaaaagtttttatctcactaaa

SEQ ID NO: 223687 - DNA, 781 bp, Unknown
  Bacterial polypeptide expressing nucleotide sequence isolated from the Sargasso Sea
cgaaaattatccaggtttcgttgatggcattatgggtcctgatttaatgcaagtctttaaaggacaggctgaaagattcggaacacaaattaaaacagaaacaatagattccatagaaaaattagataatggctttaagctaacaagttccaaaggagaatacttgttcaaatcagtaattatcgcttcaggggcatcagcaagatggcttggtgtagagggtgaagaagaattacaaggatacggtgtttctgcttgcgcaacttgtgatggttttttctttaaagagaagacagttgcagttgttggtggcggtgattctgcaatggaagaggctttgtttttaacaaagtttgcttcaaaagtttacgtaatacatagaagagaccaatttagagctagccaaataatgcaggacagagtactaaaccacgaacaaatagaagttatttggaacaaaactgttgaaaagattaatggagatggaagtgtttcatcgattgagttgaaagatgtaaaaaacgaatcaataaatgaactagagcttgatggagtatttgttgctataggacatgatccaaatgtaaagtttttagatggacttttagagcttgatgaaaaaggttacataaaaactgggttcacaacagaaacaagtacttcagttcctggtatatttgcagctggtgatgtagcagattctttgtatagacaagcaataactgctgctggaaccggatgtcaagcagccatggatgttgagagatggcttgaccactaa

SEQ ID NO: 223688 - DNA, 853 bp, Unknown
  Bacterial polypeptide expressing nucleotide sequence isolated from the Sargasso Sea
agtcctattttagtttacggtgcagaaccaggcggacaactgacaactacaacagatgttgaaaattttccaggatttgcagatgtaattcaaggaccttggttaatggatcaaatgaaagaacaagcgaaagcagttggaactgagatgatagaggatcatattgcatccgtgaatttaaaatcacaaccttttgaagctgtaggagatagtggtcaaaagtatacggcagacagcataattatatcgacaggtgctcaagcaagatggttaaatattaaatcagaacaagagttcagggggtatggtgtctctgcatgtgcaacatgtgatggtttcttttttaaagataaagaagttgcagtggttggtggcggtaatgcagcagtggaagaagcaatgttccttacaaaatttgcatcaaaagttaaattgattcacagacgtgatagcttgagagctgaaaaaatgcttcagaaaaagttgatggaaaataaaaaaatagaaattatttgggactcagttgttgaagacgtaatcggagacaacgagcctaaaaatgttaaaggaattaaaatcaaaaatgttaaaacaaacaacgttgaagaaataaaacttgatggggtgtttattgcaattggtcatgaccctgcaacgtctttatttaaaaaacaattagatatggataacgagggttatttaataactaaaccagactcaaccgaaaccaatgtacctggtgtttatgctgctggagatgtaaaggacaagacatttaggcaagctgtgactgctgcaggaatgggatgtatggcagctttagaagctgaaaaacatctttcacacaattaat

SEQ ID NO: 223689 - DNA, 658 bp, Unknown
  Bacterial polypeptide expressing nucleotide sequence isolated from the Sargasso Sea
atggaaaccgctcaacactgtcgactactcatacttggttccgggcctgccgggtatacggccgccgtctacgcagcccgtgccaatctttctcccgtgttagtgactggcatagcgcaaggtggtcaactcatgacgactaccgacgttgacaactggccaggggatacacacggcctgactggccccgatttgatggctcgaatgcttgcgcattccgagcggttcggcaccgagattattttcgatcatatccatactgcaaaattggataaacgccctttcaccttagagggcgatgcggggacttatacctgtgatgcactcatcatcgctaccggcgcttctgcacagtacctgggtctagaatcagaggaggcttacaaaggcaaaggggtctctgcctgcgccacctgcgacgggttcttttatcgtgacaagccggtcgccgttatcgggggcggaaacacagcggtcgaggaggcgctctacctttcggacatctgctcaagcgtaaccctggttcatcgaagggatagcctccgtgcagaggccattcttcaggaccagcttttttcccgcagcggtcaggacggaaatgtctccctggcctggaatcacaccctgagcgaggtactcggagacgaccacggtgtca

SEQ ID NO: 223690 - DNA, 574 bp, Unknown
  Bacterial polypeptide expressing nucleotide sequence isolated from the Sargasso Sea
gggaaaggtgtttctgcctgtgcgacttgcgatggtttcttctataaggatcaagatgtaatagtggttggcggtggaaatgttgccgttgaagaggcaatttacttatcgaatattgcaaaaaacgtgactctaattcatcgaagagatgaactgagagcggagaaaatgcttcaagaaaaactgtttgaaaaaaccggtgaaaatggaaatattaaaatcctctgggatcacgttttggatgaagtgcttggagatgaatccggcgttaatggcattgtttgctccaatgtcaatgaaccatcagatcaaactcagcttgatgttcaaggcgtatttattgccattggtcacgatccaaacacatcgttttttggcgatggtttaaaactggatgattccaattacatcattcttgatgagtccaatgctcgattttccactcaaacaagcatagaaggcgtatttgcagctggagatgtcgctgatcctgtatacaggcaagctgtgacctctgcgggaagcggctgcatggctgcgctggatgcagagaaattcttggaacaaagctagt

SEQ ID NO: 223691 - DNA, 905 bp, Unknown
  Bacterial polypeptide expressing nucleotide sequence isolated from the Sargasso Sea
aaagtgttaataattggatctggtccagccggatacacagcagctgtatatgcagctagagcaatgttaaatcctattttagtttatggatctgagcctggtggacaattaactacaacaactgacgttgaaaattttccaggatttgcagacgttattcaaggaccttggttaatggatcaaatgaaagaacaggcaaagactgtgggaacagaaatgattgaagaccatatttcttcagtaaatttaaaatctcaaccgtttgaagctgttggtgatagtggtcaaaaatatactgcagacagtattataatttcgacaggtgctcaggctagatggttaaatttaaaatcagaacaagagtttagaggttttggagtttcagcttgtgctacatgtgatggttttttctttaaagataaagaagttgctgttgttggtggaggtaacgcagctgtagaggaggctatgttccttacaaaatttgcatctaaagtgaaattaattcacagaagagatagcttgagagcagaaaaattgctacagaaaaaattgatggaaaataaaaaaattcagattatttgggattcaattgttgaagatgttattggagataaagagcccaaaaatgtaaaaggcataaaagtaaagaatgtcaaaacaaataaaattgatgagataaaacttgatggattgtttattgctattggtcatgatcctgctacacaattatttaaagaccaattaaatatggataaagagggttatttaattacaaaacctgattcaacagaaactaatattccaggtgtatatgcggcaggcgatgttaaagataaaacatttagacaagcagttactgcagctggaatgggttgtatggcagccttagaggctgaaaaatt

SEQ ID NO: 223692 - DNA, 648 bp, Unknown
  Bacterial polypeptide expressing nucleotide sequence isolated from the Sargasso Sea
tatgagtgaaaaaccaactaaacatacaaaagtgttaataattggatctggtccagcgggctacactgctgcagtttatgcagcaagagctatgctgaaaccaatgctagttgcaggtatgcagccaggtggtcaactaacaattacaactgatgttgagaactatccaggttttgctgatgttatacaaggaccatggttaatggaacagatgagagagcaagcaaaagcagtaggaacggatttagttgaagatcatattcaatcagtaaatctaaaatctaaaccttttgaagcaatcggagatggtggacaaaaatatactgcagactcaattattatttcaacaggtgcacaagcaagatggttaaatattgagtcagaagaaaaatttaaaggatttggagtttcggcatgtgcaacatgcgatggtttcttttttaaagataaaacagttgcagtagttggtggtggtaacgcagcagttgaggaggcaatgtttctaacaaaatttgcatcaaaagtaaaattaattcacagaagaaatgaactaagagcagaaaagcttttacaaaaaaaattaatggaaaataaaaaaattgagattatttgggactctgttgttgaagaaataacaggtgatagtga

SEQ ID NO: 223693 - DNA, 463 bp, Unknown
  Bacterial polypeptide expressing nucleotide sequence isolated from the Sargasso Sea
atgagtgaaaaaccaactaaacatacaaaagtgttgataattggatccggtccagcgggttatactgctgccgtttatgctgcaagagctatgctaaaaccaatgctagttgcgggtatgcaaccaggcggtcaactaacaattacaactgatgttgagaactatccaggctttgctgatgtaatacaaggaccatggttaatggaacaaatgagggagcaggcaaaagcagtaggaacagatttagttgaagatcatattcaatctgtaaatttaaaatctaaaccttttgaagcaatcggcgatggcggacagaaatatactgcagactcgattataatttcaacaggtgcacaagcaagatggctaaatattgattcagaggaaaaatttaaaggatttggagtttcggcatgtgcaacatgcgatggtttcttttttaagataaaacagttgctgtagt

SEQ ID NO: 223694 - DNA, 601 bp, Unknown
  Bacterial polypeptide expressing nucleotide sequence isolated from the Sargasso Sea
tatgagtgaaaatccaactaaacacacaaaagtgttaataattgggtcaggtcccgctggatatacagcagcaatttatgctgcaagagcaatgttaaaaccaatattagttcatggtatggaacctggtggccagttaacaactacaactgatgttgaaaatttccctggatttaaagatgtaatacaagggccgtggcttatggatcaaatgaaaggtcaggcagaagttgttggaactgaaatgatacaagatcatatagcgtctgtagacttaaaatctaagccatttaaagctgttggagatagcggccaaatttatgaagcagactcaattattatttcaactggagctcaagccagatggttgaacatagaatctgaacaaaattttagaggttttggtgtatctgcatgtgcaacatgtgatggatttttctttaaagacaaaactgttgctgttgtcgggggaggaaatgctgcagttgaagaagccatgtttttaacaaaatttgcctcaaaagttcagcttatacacagaagagatagtctaagagcagaaaaattacttcaaaagaaattaatgaaaataaaaaaatga

SEQ ID NO: 223695 - DNA, 584 bp, Unknown
  Bacterial polypeptide expressing nucleotide sequence isolated from the Sargasso Sea
aatgtcagagaatcataataaattaataattttaggctcaggccctgctggatatgccgctgcgatatatgcagctagagcaggtttaaacccattaatgattactggtgtgcaagaaggtggtcaattaaccacaaccactgatgttgaaaattggccaggagatagtgaaggtcttcaagggccggaattaatggaaaggatgaagaaacatgcattgcaatttgatgttgaaattataaatgatcatatcaatagtgttgaattgtctaagaagccttttaaattatttggaaattccgaatataaatgtgattctttaattatttcaactggagcaagtgctatgtatttaggtctgccgtctgaaaaagaatatcttggaaaaggtgtctctgcttgtgcaacatgtgatggttttttctatagagatcaagaggtttctgtaatcggtggcggcaatactgctgcagaagaagcgttatatttagcaaatatatgttctaaagtttatttggttcatagaagagatgagttgagggcagaaaaaattttacaagatcgtatttttaaacaggaacaag

SEQ ID NO: 223696 - DNA, 541 bp, Unknown
  Bacterial polypeptide expressing nucleotide sequence isolated from the Sargasso Sea
ttgtgcacctgtgatggtttcttttataaaggccaagaggtcgctgtaattggtggaggaaataccgctgctgaagaggctctatatctcgctaatatttgttcaaaagttcatcttgttcatagaagagatgaattaagagcagagaagatacttcaagatagaatatttaagaaggctgatgaaggggtaattgaaatacactgggacagtgaattagaagaggttctaggagatgctagcggtgttacaggcattaaactaaaaaataaagatagctcaatgtcgtcgattaatttgcatggagtattcattgcaattggacataacccaaacaccgaaatatttgatggtcagctagatatgaaagatggatacattgtaattaagtctggtttagatggctcagttacacaaacatctgtacctggagtttttgctgctggcgatgttgcagataaagtttacagacaagcaattacttctgcagggtttgggtgtatggcagctttagatgccgagaaatttttatctgattaaa

SEQ ID NO: 223697 - DNA, 969 bp, Unknown
  Bacterial polypeptide expressing nucleotide sequence isolated from the Sargasso Sea
tctaaacattcaaaagtattaatattaggatctggcccagctggttatacagcggcaatttacgctgcaagagccatgttgaagccgatacttgttttcggtgcagagccaggtggtcaactaaccactacaactgatgtagaaaattttccaggatattcaaaagttattcaaggaccatggttaatggaagaaatgaaaggtcaagcaaaagctgttggaacagaaatgatacaggatcatataaaaaaagttgatctatcaaaaaaaccttttgaagccattggtgatagtggtcaagtttataccgcagatagttttattatttctacaggagctcaagcaagatggttaaatttaaaatcagaacaggaattcagaggatttggtgtttcagcatgtgcaacatgtgatggtttcttttttaaagagaaagaagttgctgttgtaggaggtggaaatgctgcggtagaggaagcaatgtttttaactaaatttgcatctaaagttaagcttatacatagaagaaatgaattaagggctgaaaaaatgctacaagcaaaattaaaggcaaataaaaaaattgaaattatctgggatagcgttgttgaggatgttgtgggagaaaaagatcctaaatctgttaaggcaataaaaataaaaaatgttaaaactaataaagttactgagcttaaactagatggtttgtttatagcaataggacatgatcctgctacttcactttttaaaggtcaattaagcatggataaacagggatacatagttaccaaaccagactctacaataactaatgtgccaggcgttttcgcagctggcgatgttaaagataaaatattcaggcaggcagttactgcggctgggatgggttgtatggctgcacttgaagctgaaaacatttatcatcaaaatgagcaacaaagtattattaacaggaataagtgtttggat

SEQ ID NO: 223698 - DNA, 541 bp, Unknown
  Bacterial polypeptide expressing nucleotide sequence isolated from the Sargasso Sea
ttgtgcacctgtgatggtttcttttataaaggccaagaagttgctgtaattggcggaggcaataccgctgccgaggaggctctatatctcgctaatatttgttcaaaagtacatcttgttcatagaagagatgaattaagagcagagaaaatacttcaggaaagaatatttaagaaggctgatgaggggataattaaaattcactggaacagtgaattagaagaggttctaggagatgctagtggcgttacaggcattaaaataaaaaacaaggatacatcaatgtcgtcgattgatttacatggtgtattcattgcaattggacataacccaaatacagaaatatttgatggtcagcttgatatgaaagatgggtacattttaattaaatctggtttagatggctcagttacacaaacatctatgcctggagtttttgctgctggcgatgttgccgataaagtttacagacaagcaattacctctgcagggtttggatgtatggcagctttagatgccgagaagtttctttctgattaaa

SEQ ID NO: 223699 - DNA, 643 bp, Unknown
  Bacterial polypeptide expressing nucleotide sequence isolated from the Sargasso Sea
gattcttatcaagctgatacgcttataatagctactggtgcatctgctaaatatttaggtctcccatcagaacaagaatttcttggtagaggtgtatcagcttgtgcaacctgtgatggtttcttttataaaggccaagaggtcgccgtaattggtggaggaaataccgctgctgaagaggctctatatctcgctaatatttgttcaaaagttcatcttgttcatagaagagatgaattaagagcagagaagatacttcaagatagaatatttaagaaggctgatgaaggggtaattaaaatacactggaacagtgaattagaggaggttctaggagatgctagcggtgttacaggtattaaactaaaaaataaagatagttcaatgtcgtcgattaatttacatggagtattcattgcaattggacataacccaaataccgaaatatttgatggtcagctaagtatgaaagatggatacattgtaattaagtctggtttagatggctcagttacacaaacatctgtacctggagtttttgctgctggcgatgttgcagataaagtttacagacaagcaattacttctgcagggtttgggtgtatggcagccttagatgccgagaaatttttatctgattaaa

SEQ ID NO: 223700 - DNA, 421 bp, Unknown
  Bacterial polypeptide expressing nucleotide sequence isolated from the Sargasso Sea
catagaagagatgaattaagagcagagaagatacttcaagatagaatatttaagaaggctgatgaaggggtaattgaaatacactgggacagtgaattagaagaggttctaggagatgctagcggtgttacaggtattaaactaaaaaataaagataactcaatgtcgtcgattgatttgcatggagtattcattgcaattggacataacccaaacaccgaaatatttgatggtcagctagatatgaaagatggatacattgtaattaagtctggtttagatggctcagttacacaaacatctgtacctggagtttttgctgctggcgatgttgcagataaagtttacagacaagcaattacttctgcagggtttgggtgtatggcagctttagatgccgagaaatttttatctgattaaa

SEQ ID NO: 223701 - DNA, 527 bp, Unknown
  Bacterial polypeptide expressing nucleotide sequence isolated from the Sargasso Sea
tatgaatcaaaatccaactaaacacacaaaagtgttaataattggatctggacctgctgggtacactgctgcagtttatgctgcaagagcaatgctaaagccaattcttgtttatgggattgaaccaggtggacaattatcaactaccactgatgtagaaaactatccaggatttgctgatgtaattcaaggcccatggctaatggaacaaatgaaagatcaagcaaaaatggttggaacagaattaatagaggatcatatagcttcagttaatttaaaatcatctcctttcgaagcaattggtgatagtggtcaaaaatatacagctgatagcattattatttcaacaggtgctcaagcaagatggttaaatattgagtctgaacaaaaatttagaggatttggtgtttcagcttgtgcaacatgtgatggatttttctttaaagacaaaactgttgcagttgtaggtggtggaaatgctgcagttgaagaggcgatgtttcttaccaaatttgcttcaaaagtgc

SEQ ID NO: 223702 - DNA, 751 bp, Unknown
  Bacterial polypeptide expressing nucleotide sequence isolated from the Sargasso Sea
gatgaataaaaaaatagagacagacgtattaatcattggatctggtcctgcaggttatacagcagcgatttatgctgcaagagctaatctaaaaccacaccttgtttcaggtattcagccaggtggacaattaacgattacgactgatgtggaaaattatcctggatatggagatgtaatccaaggtccttggcttatggaacaaatgagaattcaagctgaaaaagttggtacactgattcataatgacataatttctgcagttaattttgaaactaaaccctttattgcaaatgctgattctggttctgaatttatcgccaagacaattataatatctactggtgctcaagcaagatggttaaatattaatggagaagaaaaattcaaaggatatggtatttctgcttgtgcaacatgtgatggttttttttttaaagataaggaagttgccgttattggtggaggtaatactgctgcagaagaagctttatttttaactaattttgccaataaagttaatataatacatagaagggactccttaagatcagaaaaaatattacaagagagattgtttaataattcaaaaattaatattttatggaataaaaaagtaattgaatttataggtaagaatgatcctatagaattaaacaaattattattagaagatactaaaaataaccaaaaaacagaactttctgttgcaggagcatttgtagctattggtcataacccatcaactgat

SEQ ID NO: 223703 - DNA, 651 bp, Unknown
  Bacterial polypeptide expressing nucleotide sequence isolated from the Sargasso Sea
tatggaacagcaattaataattctaggttcaggtccagcaggttacacggcagctgtttatgctgctagagctaatttaaaaccgttattaataacaggtttagaagttgggggacagctaacaactactacagaagtagagaattggcctggagattttgaagacttacagggccctgatcttatggttcgcatgcagaaacatgcagaaaaatatgatgtagatatacgaactgattacgttaagagcgttgatctatctaatcagcctttaatacttcaaggcgaaaaagatacttacaaaacaaaaagtttaattatagcgactggtgctagcgctaaatatcttggtttggaaagtgaaaaagcatttttaggtaaaggcgtcagtgcttgtgctacatgtgatggattcttctataaagatcaagaagttgcagttattggcggtggaaatactgccctagaagaagccttgtatttaagcaatatatgttcaaaagtacacttaattcatagaagagatgagtttagaggggaaaaaattttacaagatagagtatttaaaaaagttaaagaaggaaaaatatcattaattttagactctacactaaaagaagttattggagatgatgcagtttcaggaatagt

SEQ ID NO: 223704 - DNA, 607 bp, Unknown
  Bacterial polypeptide expressing nucleotide sequence isolated from the Sargasso Sea
tatgagtgaagtcaagcattcgcgtctgatcatcctcggctccggcccggccggatataccgctgcggtatacgcggcccgcgccaatctgaagccactgatgatcaccggcatccagcccggcggtcagttgaccaccactaccgaagtcgacaactggcccggcgatgtcgaaggtctgaccggcccggacctgatggtccgcatgcagaagcacgccgagcgcttcgacaccgagatcgtcttcgatcacatccataccgcagagttgcagcagcgcccattcaccctgcgcggcgacagcggcgtctatacctgcgacgcattgatcatcgccaccggtgcctcggcacaatacctcggcctgccctctgaagaggcgttcgctggccgtggtgtatcggcctgcgccacctgcgacggcttcttttatcgcaaccaggtcgtcgcggtgatcggcggcggcaacactgcggtcgaggaagcgctgtacctgtccaacattgccaaggaagtccacctgatccaccgccgcgacaaactgcggtcggagaagatcctgcaggacaagatcatggacaaggcggccaacggcaacatccgcctg

SEQ ID NO: 223705 - DNA, 511 bp, Unknown
  Bacterial polypeptide expressing nucleotide sequence isolated from the Sargasso Sea
tatgaataataaatcaacaaaacacacaaaagtgttaattcttggatctggtccagctggctatacagcggctatttacgcggctagagcaatgcttaaaccaatacttgttcatggctctcaacctgggggacaattaactaccactacggatgttgagaattacccaggatactcaaaagtgattcaaggtccatggcttatggatgaaatgaaaggtcaagccgaagctgtaggaacagagatgattcaagaccatattagcaaagttgacttaacaaaaaaaccttttacagcaacaggagatagtggtcagatttacaccgcagatagttttataatttcaacaggagcacaagcaagatggttaaatttaaaatctgaacaagagtttagaggatttggagtttcagcatgtgctacttgtgacggatttttctttaaagaaaaagaggtagctgtagttggcggaggaaatgctgcagttgaagaagcaatgttcctcactaaa

SEQ ID NO: 223706 - DNA, 910 bp, Unknown
  Bacterial polypeptide expressing nucleotide sequence isolated from the Sargasso Sea
atgagtcaaaatccaactaaacacacaaaagtgttaataattgggtctggtcctgccggatacacagctgctgtttatgcagcacgtgcaatgttaaacccaattttagtctacgggtctgaacctggaggtcaattaacaacaactactgatgttgaaaattatcctgggtttgccgatgttattcaaggaccttggttaatggatcaaatgaaagatcaggccaaagctgttggcacagaaatgatagaagatcacattaggtcagtaaatttgaaattaactccatttgaggcaattggagatagtggccaaaaatatactgctgacagtataataatttctactggtgcacaggcaagatggctaaatattaagtcagagcaagaatttagaggttttggagtatcagcatgtgctacatgtgatggatttttctttaaagaaaaagaggttgcagttgttggtggtggtaatgctgccgtagaggaagcaatgtttcttacaaagtttgcttcgaaagtaaaattaattcatagacgtgacagtctaagagctgaaaaaatgctacaaaaaaaattaatggataataaaaaaattgaaattatctgggatactgtagttgaagacgtgataggtgaaaaagaaccaaaaaatgtcaaaggtattaaagtaaaaaatgtaaaaactaataaaactgaagaaatcaaagttgatggcttatttgttgcaattggtcatgatccagcaactcaattatttaaagatcaattaaaaatggatcaagaaggctatttaattactaaaccagactctactgaaacaaatgttcctggtgtttatgctgccggagatgttaaagacaaaacttttagacaagctgtaactgctgctggtatgggttgtatgg

SEQ ID NO: 223707 - DNA, 490 bp, Unknown
  Bacterial polypeptide expressing nucleotide sequence isolated from the Sargasso Sea
atgagtcaaaatccaactaaacacacaaaagtgttaataattggatctggtcctgctgggtatactgcagcagtttatgctgcaagagcaatgctaaatcccattttggtttacggatcagcgccaggaggacaattaacaactacaactgatgttgaaaattatccaggttttgcagatgtgatacaaggcccgtggcttatggatcaaatgaaagatcaagcaaaagcagttggaactgaaatgattgaagatcatattgcatcagtaaacttaaaatctaaaccttttgaagcaacaggtgatagtggtcaaaaatatactgctgatagcattataatttcaacaggtgctcaagctagatggttgaatcttaaatcagaacaagagttcagaggttttggggtttctgcgtgtgcgacttgtgatggtttcttttttaaaaacaaagaagttgctgttgttggtggaggtaatgctgctgttgaga

SEQ ID NO: 223708 - DNA, 808 bp, Unknown
  Bacterial polypeptide expressing nucleotide sequence isolated from the Sargasso Sea
atgagtcaaaatccaactaaacacacaaaagtgttaataattgggtctggtccagctggatatacagcagctgtttacgcagcaagagcaatgttaaatccaattttagtttatggttcagagccaggtggacaattaactacaacaacggatgttgaaaattttccagggtttgctgatgttattcagggtccttggcttatggatcaaatgaaagagcaagcaaaagcagttggaacagaaatgattgaagatcatataagttctgtcgatttaaaaaaaacaccttttgaagctatcggagacactggtcaaaaatacactgctgatagtataataatttcaacaggggcacaagcaagatggttaaatttaaaatcagagcaagagtttagaggttttggagtatccgcatgtgcaacatgtgatggttttttctttaaagacaaagaagttgctgttgttggaggaggtaatgcagctgttgaggaagcgatgtttcttacgaaatttgcatcaaaagtaaaattaattcacagaagagataatttaagagctgaaaaaatgcttcaaaaaaaacttatggagaataaaaaaattgaaattatttgggatagtgttgttgaagacgttattggtgataaagatccaaaaaatgttaaaggaattaaaattaagaatgttaaaacaaataaaattgatgaaattaaactagatggtgtcttcatcgcaattggacatgatcctgctacacaattatttaaaaatcaattaagtatggataaagagggggtatttaataacaaaa

SEQ ID NO: 223709 - DNA, 523 bp, Unknown
  Bacterial polypeptide expressing nucleotide sequence isolated from the Sargasso Sea
atgagtcaaaatccaactaaacacacaaaagtgttaataattgggtctggtcctgctggatacactgctgcagtttatgcagcgagagcaatgttaaatccaattttagtttatgggtcggagcctggaggccaattaactacaacaacagatgttgaaaactttcctggatttgctgatgttattcagggtccatggcttatggatcaaatgaaagagcaagcaaaagcagttggaacagaaatgattgaagatcacataagctcggtgaatttaaaaataacaccttttgaggctgttggcgatactggtcaaaaatatactgctgatagcataataatttccacaggtgcccaagctagatggttaaatattaaatctgaacaagagtttagaggatttggtgtatcggcatgtgcaacatgtgatggttttttcttcaaagataaagaagttgctgttgttggtggagggaatgcagctgtgaagaggcaatgtttctcacaaaatttgcgtcaaaagt

SEQ ID NO: 223710 - DNA, 475 bp, Unknown
  Bacterial polypeptide expressing nucleotide sequence isolated from the Sargasso Sea
cgctgctgaagaggctctatatctcgctaatatttgttcaaaagttcatcttgttcatagaagagatgaattaagagcagagaagatacttcaagatagaatatttaagaaggctgatgaaggggtaattgaaatacactgggacagtgaattagaagaggttctaggagatgctagcggtgttacaggcattaaactaaaaaataaagataactcaatgtcgtcgattaatttgcatggagtattcattgcaattggacataacccaaacaccgaaatatttgatggtcagctagatatgaaagatggatacattgtaattaagtctggtttagatggctcagttacacaaacatctgtacctggagtttttgctgctggcgatgttgcagataaagtttacagacaagcaattacttctgcagggtttgggtgtatggcagctttagatgccgagaaatttttatctgattaa

SEQ ID NO: 223711 - DNA, 877 bp, Unknown
  Bacterial polypeptide expressing nucleotide sequence isolated from the Sargasso Sea
tacgcggctagagctatgcttaaacctatattagtttatggatctcaacctggtggtcaattaactacaactacagatgtggaaaactatccgggttattcaaaggttattcaaggaccatggcttatggaagaaatgaagggccaagctgaagcagttggtacagaaatgatacaagatcacataaataaagtagacctatccaaacaacctttcgaggctgtaggggacagcggtcaagtttatactgcagatagttttataatatctacaggtgctcaagctaggtggttaaatttaaaatctgagcaagagtttagaggctttggagtttcagcttgcgctacatgtgacggtttcttttttaaagataaagaggttgctgtagttggcggtggaaatgctgcagtagaagaggcaatttttttaacaaagtttgcatcaaaagtaaaactaatacatagaagaaatgagcttagagcagaaaaaatgctgcaagaaaaattaaaagcaaacaaaaaaattgaaattatttgggatagtgttgttgatgaagttttaggtgacaatgaacctaaaggtgtaactgcaattaaaattaaaaatgtaaaagataataaaattacagaactaaaagttcacggtttatttatcgctataggtcatgacccagctacttctttatttaaagatcaattaaagatggataaagagggatatttaattactaagccagactcaactgaaacaaatgtacctggagtttttgctgctggtgacgtaaaagataaaatatttagacaagcagtaacggctgctggcatgggttgtatgtctgctcttgaggcagaaaaatatttagcagctaaagcctaaa

SEQ ID NO: 223712 - DNA, 557 bp, Unknown
  Bacterial polypeptide expressing nucleotide sequence isolated from the Sargasso Sea
tatgacaaataataaactaataattcttgggtcagggcctgcaggctacgcagcatctatttatgcagcaagagcaggattaaatcctattattatcgctggagctgagcctggcggacaattaacaacaacaactgaagtagaaaattggcccggtgacagtgatgatcttcaaggacctgatttaatggaaagaatgaaaaaacatgctgaaaaatttggtgttgagattattaatgatcatatttcaaaggtaaatcttgaccagtcaccatttcttctaaagggaacagattcttatcaagctgatacgctgataatagctactggtgcatctgctaaatatttaggcctcccatcagaacaagagtttcttggtagaggtgtatcagcttgtgcaacctgtgatggtttcttttataaaggccaagaggtcgctgtaattggtggagggaataccgctgctgaagaggctctatatctcgctaatatttgttcaaaagttcatctagttcatagaagagatgaattaagagcagagaagatacttcaagata

SEQ ID NO: 223713 - DNA, 506 bp, Unknown
  Bacterial polypeptide expressing nucleotide sequence isolated from the Sargasso Sea
tatgaatcaaaatccaactaaacacacaaaagtgttaataattggatctggcccagccggatacactgcagcagtttattcagcaagagcaatgctcaagccaattttagttcacggtatgcagccaggcggtcaattaacaataacaactgacgttgaaaactatcctggttttgcagaagttattcagggtccatggttgatggatcaaatgaaggatcaagcaaaagcagttggtacagaaatgatagaagatcatattgcttcggttaatttaaaatcaaaaccttttgaggctataggtgaaagtggtcaaaaatatactgcagactctattataatctcgactggtgcacaggctagatggcttaatataaaatctgaacaagaatataaggggtttggggtctctgcttgcgcaacatgtgatggtttcttttttaaggataaaactgtagcggttgtaggtggtggaaatgcagctgtagaagaagcaatgtttctta

SEQ ID NO: 223714 - DNA, 433 bp, Unknown
  Bacterial polypeptide expressing nucleotide sequence isolated from the Sargasso Sea
aatgtctgaaataataaaaacagatgttttaataattgggtcaggacctgctggatatactgctgccatttatgctgcaagagcaaatttaaaacctcatattatttctggaattgagcaaggtggtcaattgacaattacaactgatgttgaaaattaccctggttttgcagatacaattcaaggtccttggcttatggatcaaatgcttgttcaagcagaaaaagttggatcagttattcataatgatattgtcagtgaagttaattttgaaaaaaaaccttttatatcaataactgactcaaaaaaaaaatttgaatccaaaacaataataatatgtactggtgctcaggcacggtggttagatttagaaagtgaaaataaatttaaaggatttggaatttcagcatgtgcaacatgtgatggatttttt

SEQ ID NO: 223715 - DNA, 528 bp, Unknown
  Bacterial polypeptide expressing nucleotide sequence isolated from the Sargasso Sea
tatgagtcaaaatccaactaaacacacaaaagtgttaataattggatccggtcccgctggatatactgcagcagtttatgctgcaagagcaatgcttaaccctattttagtttatggttcggcacctggtggacagttaacaactacaactgatgtggaaaattatccaggatttgctgatgtaatacaaggtccatggttaatggatcaaatgagagatcaagcaaaagcagtaggaacagagatgattgaagatcacatctcatctgtaaatttaaaatcaaaaccctttgaggcaatgggagacagtggtcagaaatatactgctgacagcatcatcatttcaacaggcgctcaagcaagatggttaaatttaaaatcagagcaagagtttagggggtttggtgtctcggcttgtgcaacttgtgacggtttcttttttaaaaataaagaagtagcagttgttggtggtggaaatgcagcggttgaagaggcgatgttccttacaaaattcgcatctaaagtaaa

SEQ ID NO: 223716 - DNA, 736 bp, Unknown
  Bacterial polypeptide expressing nucleotide sequence isolated from the Sargasso Sea
atgactcaaaatccaactaaacacacaaaattattaataattggatcagggccagctggatacactgctgctgtttatgcagctagagctcttctgaaaccgataatggttacaggcatggagccaggagggcaattaacgaccaccactgacgttgaaaattatccgggtttcgcagaagttatccaaggtccttggttaatggagcaaatgagagatcaagcaaaggcagtaggaacagaaatggttgaggatcatatttcatctgtaaatttaaaatctaggccatttgaagcaataggtgatgatggtcaaaagtacactgctgactcaattattatttcaacaggtgctcaagcaagatggttaaatttagactcagagcaaaaatttaggggatttggtgtatcagcatgtgcaacatgtgatggatttttttttaaagataaaactgttgcagtagtcggtggaggtaatgctgctgtggaagaagcaatgtttttaacaaaatttgcatcaaaagttaaactcattcacagaagaaacgagttaagagcagaaaaaatgttgcaaaagaaactaatggaaaataagaaaattgagattatttgggatagtgttgttgaagaggtcattggtgatgatgatcctaaaaatgttaaggggttaaaaattaaaaatgttaaaacgaataaagttgatgatttgaaattggatggtttgtttgtcgcgatag

SEQ ID NO: 223717 - DNA, 865 bp, Unknown
  Bacterial polypeptide expressing nucleotide sequence isolated from the Sargasso Sea
agagctgttttagatccaatcataattgcaggtatgcaggaaggtggtcaattaactactacaactgatgtagaaaattggcctggtgatagtgacggtctccaaggaccagaattaatggaaagaatgaaaaaacatgcacaagagtttgatgttgagataatcaatgatcatataaatgaggtttcattgactcaaaaaccatttaccttaaaaggagttaacgagtattcatgtgattctctaattattgcaactggtgctagtgctatgtatcttggcctgccctcagaaaaaagatatttaggtaaaggtgtttccgcttgtgcaacatgtgatggttttttctataaagatcaagatgttgcagttattggaggtggtaatactgcggctgaagaagcattgtacttagcaaatatatgttcaaaagtatatttagttcacagaagagatgaattaagagcagaaaaaattttacaagataggatatttaaacaagaggaagctggcaaaattgagattttatgggatacacaacttaaagaagtttgtggcgatgatatgggtgttacatcaataaaattagacaataaaggttctgaaatttccaaggaagtcatgggcgtttttattgcaataggccataaaccaaatactgaaatatttgatgggcaattagatatggacaatggttacatcatcatcaaatcaggtctaaatggatctgtcacaagctcatctgttgaaggtgtttttgctgctggtgatgtatcagatcaaatttataggcaagcagtaacctcggcaggatttggatgtatggcagcgttagatgctgaaaaatatttatctgaatcataat

SEQ ID NO: 223718 - DNA, 445 bp, Unknown
  Bacterial polypeptide expressing nucleotide sequence isolated from the Sargasso Sea
tatgacccaaaatccaactaaacatacaaaagtgttaataattggatccggaccagctggatacacggctgctgtttatgctgcaagagcaatgctaaaacctattttagttcatggcatggagccgggtggtcaattaacaacaactactgatgttgaaaattatccaggttttgcagaagtaattcaaggaccttggttaatggaacaaatgaaagaacaagctgaagcagtcggaactgaaatgattgaagatcatatcgcatctgtaaatttaaaatcaaaaccgtttgaagcagttggagacggtggccagaagtatactgcggactcaattattatttcaactggagctcaagcaagatggctaaatattgattctgaacaaaaatttagaggatttggagtatccgcttgcgcaacatgtgatggttttttcttttaa

SEQ ID NO: 223719 - DNA, 531 bp, Unknown
  Bacterial polypeptide expressing nucleotide sequence isolated from the Sargasso Sea
tttaccgcaataaacccgtggtggttgtcggcggaggcaataccgctgttgaagaggcactgtatctaagcaacctctgttcacacgttacgttaattcatcgccgcgatgcattaagagcagaaaaaatgctatcagataaaatcatagaaaaatctaaaacaggaaacgtcaccatcctatggaatcatacattagatgaagtcttaggggatgacagcggcgtcaccggtgttcgcgtagcccatacttcaaacgaatccaaacaagaacttgaagtggatggtgtctttatcgccattgggcatgatcccaacactaacatctttaagaatgacttgaatatggatgaaagtggctatctcattgtaaatagtgggagtgcaggtaacagcactcaaacgagcattccaggtgtgtttgctgctggtgatgtctcagaccctatttacagacaagcaatcacttctgctggtagcggctgcatggctgcattagatgcggaaaaattcctggatgatgcacactaat

SEQ ID NO: 223720 - DNA, 636 bp, Unknown
  Bacterial polypeptide expressing nucleotide sequence isolated from the Sargasso Sea
tatgaaacaaaatccaactaaacacacaaaagtgttaataattgggtctggtccagccgggtatacagcagcagtatatgcagctagagcaatgctaaatccaatattggtatatggttctgcgccaggaggacaattaactactacaactgatgttgaaaattatccaggttttgcagatgtaatccaaggtccatggttaatggatcaaatgaaagaccaagcaaaagcagtcggaactgaaatgattgaagatcatattgcatctgtaaatttaaaatctaaaccttttgaagctataggtgatagtgggcaaaaatacactgctgacagcattattatttcaacgggtgcacaggcacgatggttgaacttaaactcagagcaagaattcagaggttttggtgtctctgcatgtgctacttgtgatggcttcttttttaaaaataaagaggttgcagttgtgggtggtggtaatgctgctgttgaagaagctatgtttttaacaaaatttgcatctaaggttaaactaatacatagaagagatagtttgcgcgctgaaaaaatgcttcaaaaaaaacttatggagaataaaaaaattgaaattatttgggactcagttgttgaagacgttat

SEQ ID NO: 223721 - DNA, 539 bp, Unknown
  Bacterial polypeptide expressing nucleotide sequence isolated from the Sargasso Sea
tatgacgcaaaatccaactaaacatacaaaagtgttgataattggatcgggtccagctggttacacagcggctatttatgctgctagagccatgttaaaccctatattagttcatggtattgaacctggaggacaattaacaacaacaacagacgtggaaaattatcctggatattcagaggtaattcaaggaccttggctaatggatcaaatgaaaggacaagctgaggcggttggaacaagcatgatacaagatcatataaagtctgtggatttaaaaaaaactccatttaaagcagttggagatagtggtcaagtatatacagctgaatcaataattatttctacaggagcccaagcaagatggctcaaattagactcggaacaaaatttcagaggatttggtgtatctgcatgtgctacatgtgatggatttttcttcaaagataaaactgttgcagttgtaggaggaggaaatgcagctgtagaggaagcaatgtttttaacaaagtttgcatctaaagttcaactgattcatc

SEQ ID NO: 223722 - DNA, 592 bp, Unknown
  Bacterial polypeptide expressing nucleotide sequence isolated from the Sargasso Sea
atgtcgaatgtcacccatgaaaaagtcgtcatcataggtgccggtgccgccggcctgacagctgccatctacaccgcgcgcgccaatctctcgccggtgatcatcgctggcctgcagcccggcggtcagatgacaatcaccaccgatgtcgagaactatcctggtttcgccgaggtgatccaggggccctggttgatgaccgagatgcagtcgcaggctgaaaatgtcggcgcgcgggtcatctatgacatcgttacagggctcgacgtctcgtcgcggccgttccggatgacgctcgatgccggggacgagatgacagccgatgtggtgattgtcgccaccggcgcctcggccaaatggctggggcttgaatcggaacagacattcaacgggcgcggcgtgtctgcctgtgccacctgtgacggctttttctaccgtgaccgcgatgtggcggtgatcggcggcggtaacacggccgtcgaggaagcgctctatcttgccaatatctgcaaatcggtgacgctggttcaccgccgtgacacgctgcgtgccgagcagatcatgcaggaccgcctgctgcgccaagacaaga

SEQ ID NO: 223723 - DNA, 661 bp, Unknown
  Bacterial polypeptide expressing nucleotide sequence isolated from the Sargasso Sea
tatgacacaaaatccaactaaacacacaaaagtgttaataattggatccggacctgctggatacacagctgcggtttatgcggcgagggcaatgttaaaacctattatggtttctggtatggaaccaggtggacaattaactacaacaactgatgttgaaaactatcctggttttgctgaagtaattcaaggaccatggctaatggaacaaatgagagaccaagctaaagctgtaggtacagaaatgattgaagatcatatttcttcagtaaatttaaaatctaaaccttttgaggctattggagatggtggtcaaaaatataccgcagattcaattataatttcaaccggtgctcaagcaagatggttgaatattgagtctgaacaaaaatttagaggatttggtgtatcagcttgtgcgacatgtgatgggtttttctttaaagataaaacggttgcagttgttggcggtggaaatgctgcggttgaagaagcaatgtttcttacaaaatttgcatcaaaggtacaattaattcacagaagagattccttaagagctgaaaaaatgcttcaaagtaaattaatggctaataaaaaaattgaaattatttgggatagtattgttgaagaagttattggagacaatgatccaaaaaatgtt

SEQ ID NO: 223724 - DNA, 522 bp, Unknown
  Bacterial polypeptide expressing nucleotide sequence isolated from the Sargasso Sea
tatgagtcaaaatccaactaaacacacaaaagtgttaataattggatctggtccagccggatacacagccgcggtatatgctgctcgtgcaatgttaaatccaattttagtttatggtgcagaacctggtggacaattaacaactacaacagatgtagagaattatccgggatttgcagacgtaatccagggtccatggttaatggatcaaatgaaagatcaagctaaagcagttggaacagaaatgattgaggatcatattgcatctgtgaatttgaaatcacaacctttcgaagcaatcggcgacagtggacaaaaatatagtgctgatagcataattatttcaacaggtgctcaagcaagatggttaaatataaaatcagaacaggaatttagaggatttggagtttctgcttgtgcaacttgtgacggtttcttttttaaaaataaagaagttgctgtagttggaggaggtaatgcggcggttgaagaagcaatgttccttacaaagtttgcatctaa

SEQ ID NO: 223725 - DNA, 532 bp, Unknown
  Bacterial polypeptide expressing nucleotide sequence isolated from the Sargasso Sea
tatgaataataaatcagctaaacatacaaaagtgttaattcttgggtcaggaccagccggatatacggcggctatttatgctgccagagctttattaaagcctattctagtctttggatctgagcctggaggacaacttaccacaaccactgatgtggaaaattttccaggtttcgccaaagtgattcagggtccgtggttaatggaagaaatgaaaggtcaggcaaaagctgttgggacagagatgatacaagatcatattagtaaagttgatttatctaataagccttttactgctcatggtgacagcggccagatttacactgcagatagtattattatatctactggtgctcaagctagatggttaaatttagaatctgaacaaaaattcagagggtttggtgtttcagcctgtgctacgtgtgatggatttttttttaaagataaagaggtagctgtagttggaggtggaaacgcagcagttgaagaggcgatgtttcttacaaagttgcatcaaaagttaaattaa

SEQ ID NO: 223726 - DNA, 696 bp, Unknown
  Bacterial polypeptide expressing nucleotide sequence isolated from the Sargasso Sea
aatggaaactattaaaagaaagcttgtaatactaggttcaggtccagccggatatacagcagccgtttatgcagcaagagcggggctagagccttgtttggtaactggcatggaacaaggaggtcagttgacaaccactactgacgtagagaattggccaggtgatagcgacggtctacaaggtcctgagttgatggataggatgttaaaacatgtagaatctttagatgtggaagtgatatttgatcacattgaatctgcaaacttatcggggccttttgttcttgttggtaatgtcaataattatgatgctgagtcattgattattgcaacaggagcttcagctcaatatctaggacttgaaagtgagcaaaattatatgggaaaaggagtgagtgcttgtgccacttgtgatgggtttttctacaaagataaggatgttgctgtggtaggaggaggaaatacggcagtagaagaagcattgtatctttcaaatttatgttcatctgtaactctcatccatagaagagactcgctaagggcagaaaaaattttacaagaaagattattcaagaaagaaaaggaagggaatgtcaaaatcatatggaatcacgaattaatagaggttctcggagatgattcagttgtgaatggtatcaagataaaaagtacaaaggatgaaaaagaaacaaaaat

SEQ ID NO: 223727 - DNA, 442 bp, Unknown
  Bacterial polypeptide expressing nucleotide sequence isolated from the Sargasso Sea
aatgaataataaaccaacaaaacatacaaaagtgttaattcttggatctggtccagccggttatacagctgctatttatgcggctagagcaatgctcaaaccaatacttgtgcacggatctcaaccgggaggacaattgactacaaccacagatgttgaaaattatcctggatactcaaaagtgattcaaggtccttggcttatggatgagatgaaaggtcaagcggaagctgttggaacagaaatgatacaagatcacataagcaaagttgatttaactaaaaaacctttcacagcaactggtgatagcggacaaatttacactgcagatagtttcataatttcaacgggcgcacaagctagatggttaaatttgaagtctgagcaggaattcagaggtttcggagtttcagcttgcgctacgtgcgatggattttttctt

SEQ ID NO: 223728 - DNA, 864 bp, Unknown
  Bacterial polypeptide expressing nucleotide sequence isolated from the Sargasso Sea
catgtcagacaatcataacaaattaataattttaggttcaggtcctgctggttatgcagcaagtatttatgcagccagagctggacttaatccaatcataattgcaggcatgcaggaaggtggtcaattaactaccacaactgatgttgaaaattggcctggtgatagtgacggtctccaaggaccagaactgatggaaaggatgaaaaaacatgcacaagactttgatgttgagataatcaatgatcatataaatgaggtttcattgactcaaaaaccatttatcctaaaaggagttaacgagtattcatgtgactctctaattattgcaactggtgctagcgctatgtatcttggtcttccctcagaaaaaaaatacttaggtaaaggtgtttccgcttgtgcaacatgtgatggttttttctataaagatcaagatgttgcagttattggaggaggaaatactgcagctgaagaagcactttacttagcaaatatatgttccaaagtgtatttaattcacagaagagatgaattaagagcagaaaaaattttacaagatagaatatttaaacaagaggaagcgggcaaaattgagattttatgggatacacaacttaaggaaatttgcggcgatgatatgggagttacatcaataaaattagacaataaaggttctgaaatttctaggaaagtaatgggtgttttcattgcaatcggccacaaaccaaatactgaaatatttaatggacaattagatatggataatggttacattatcatcaaatcaggtttaaacggatcagtcacaagctcttctgttgaaggtgtttttgctgctggtgatgtatcagaacaaattta

SEQ ID NO: 223729 - DNA, 658 bp, Unknown
  Bacterial polypeptide expressing nucleotide sequence isolated from the Sargasso Sea
atgaatcaaaatccaactaaacacacaaaagtgttaataattggatctggtccagccggatatacagctgcggtttatgctgcaagagcaatgttaaaaccaattatggtttctggtatggagccaggtggacaattaactacaacaactgatgttgaaaactatcctggttttgctgaagtaattcaaggaccatggttaatggaacaaatgcgagaccaagctaaagctgttggcactgaaatgatagaagatcatattgcatcagtcaatttacaatcaaaaccttttgaggctattggagacggtggacaaaaatacactgcggactcgattataatatctacaggagctcaggcaagatggttaaatattgaatctgaacaaaaatatagaggatttggtgtatcagcttgtgccacatgtgatggttttttctttaaagataaaactgttgctgttgtaggtggtggaaatgctgctgttgaagaagcaatgtttcttacaaaatttgcatcaaaggttcaattaattcacagaagagattctttaagagctgaaaaaatgcttcaaagtaaattaatggcaaacaaaaaaattgaaattatttgggatagtgttgttcaagaagttataggagataatgatcctaaaaatg

SEQ ID NO: 223730 - DNA, 860 bp, Unknown
  Bacterial polypeptide expressing nucleotide sequence isolated from the Sargasso Sea
ttatgcagcaagagctgggcttgcaccattaatgatttctggtttagaacaaggtggacaactcatgattacaactgacgttgaaaactatccaggttttgaaaaaccagttcagggaccatggctaatggagcaaatgaagaatcaagccgaatcatttggaacaagaattttattagattttgttaaggatgtagatttagaaacattaccctttaaacttaagacagaaaaacaagtaataaaatctaattccattgttattgcaactggcgctaaagctaattggctaaatataaaaggtgaacaagaatttatgggatttggagtttcggcttgtgcaacatgtgatggtttcttttttaaaggtaaaaatgttgctgttgtgggtggtggtaatacagctgtagaagaagctttgtttttatctaatttatgtaaaaaagtatttgttattcacagaagagaaacattaagagcagaaaaaatcctacaggaaaggttgtttcaaaaaaaaaatgttgactttatttggaatagtaatgttacagaaataaatggaaatttagaaaaaaaagagcttcagtcgattaccattaaaaataaaaagaatgaaataaataaattatctattgatggtttttttgttgcaataggtcatagtccagcaacaactttattcaaaaataaattacaaatggatagtgatggttatatttttacggaaccaaattcaacaaaaacagatatagaaggagtttttgctgcaggtgatgttacagatagattatatagacaagccagtaactgccgccggaatggggtgtatgagcgcaatagaagcagaaagtttccttagt

SEQ ID NO: 223731 - DNA, 524 bp, Unknown
  Bacterial polypeptide expressing nucleotide sequence isolated from the Sargasso Sea
tatgaataataaatcaactaagcacacaaaagtgttaattcttggatctggcccagctggttatacagcggctatttatgccgctagagcaatgctaaaaccaatacttgttcatggctcacaaccagggggacaattaaccacgaccacagatgttgaaaattaccctggatattcaaaggtgattcaaggcccctggcttatggaagaaatgaaaggccaagctcaagctgtaggcacagagatgatacaagatcatataagtaaagttgacttaacaaaaaaaccttttactgcaacaggtgatagtggtcaggtttacactgcagatagttttataatttcaacaggagcacaagcaagatggcttaatctaaaatctgagcaagaatttagaggatttggagtttcagcatgcgctacttgtgacggatttttctttaaagaaaaagaagtggctgtagttggaggaggaaatgccgctgttgaagaggcaatgttcctcaccaaatttgcttcgaaag

SEQ ID NO: 223732 - DNA, 927 bp, Unknown
  Bacterial polypeptide expressing nucleotide sequence isolated from the Sargasso Sea
tatgagtcaaaatccaactaaacacacaaaagtgttaataattggatctggtcctgccggatatacagcagctgtttatgcagctcgagcgatgttaaatccaattttagtttatggttctgaacctggtggacaattaacaacaacaactgatgttgaaaattttccaggatttgcagatgtaattcaaggtccatggttaatggatcaaatgagagatcaagcaaaagccgttggaacagaaatgattgaagatcatataggatcagttaatttaaaatctacaccatttgaagctgtgggtgatagtggacaaaaatatactgcagacagcataataatatcaactggtgcgcaggcaagatggttaaatataaaatctgagcaagaatttagaggatttggagtttcagcatgcgctacatgtgatggtttcttttttaaagataaagaagttgccgtagttggaggtggtaatgctgcagttgaagaagccatgtttcttacgaaatttgcatcaaaagtaaaattaattcatagaagagatagtttaagagctgaaaagatgcttcaaaaaaaattgatggaaaataaaaaaattgaaattgtttgggactctgttgttgaagatgttttgggtgatagtgagcccaaaaacgttaagggtataaaaattaaaaacttaaaaacagaaaaaacagaagaaatcaaattagatggcctatttattgctattggtcatgatccagcaacacaactcttcaaagaccaattagaaatggataaagaaggctatctaattacaaaaccagactcaactgaaacaaatattcctggtgtttatgctgcaggagatgttaaggataaaacatttagacaagcggttacagctgcgggaatgggatgtatggctgctttagaggctga

SEQ ID NO: 223733 - DNA, 856 bp, Unknown
  Bacterial polypeptide expressing nucleotide sequence isolated from the Sargasso Sea
aaacccccatcttgtttctgccctgaaccaggcggtcaactaactattacaactgatgtagaaaactatcctggatttggagatgttattcaaggtccttggctaatggaacaaatgaaagaacaagccttaaaggttgggacagagtttcataatgatattattagcaatgtaagttttgaaaaaaaacctttttctgctcaaactgaatcaggattagaatttaagtcaaaatctgtaataattgcaacaggggctcaagccaggtggttaaacatagaatcagagaataaatttaaaggatttgggatttctgcttgtgcaacatgtgatggatttttttttaaagatcaaaaaatcatagttgttggtggaggtaatagtgcagttgaggaagcactatatttaacaaattttgcatctaaggtaatcttagttcatagaagagataaacttcgtgcagaaaaaattcttcaagaaagactattcaaaaatccaaaaatagaagtgatttggaatcatattgtgcatgaatttataggatcagatgaacctttatctttaaagaaaattttactaaagaatgttaataataaaaatgaaaaaattatagaagcaactggagcatttattgctattggtcatgatccttctacagcattatttaagaataaaatcgatatggacaatgaaaactatattattacaaaatctgatagtactgagaccaatataaagggtatttttgctgctggtgatgttaaagataaaatttatagacaggcagttactgctgctggtatgggttgtatggcggctttggaggctgagaaatttatcgctgagagttattaac

SEQ ID NO: 223734 - DNA, 628 bp, Unknown
  Bacterial polypeptide expressing nucleotide sequence isolated from the Sargasso Sea
aatgaataataaatcaacaaaacatacaaaagtgttaattcttggatctggtcccgctggctatactgcggctatttatgcggccagagcgatgcttaaaccaatacttgttcatggttctcaacctggagggcaattgactactacaactgatgttgagaattaccctgggtatgcaaaagtgattcagggaccatggctaatggacgaaatgaaaggtcaagcggaagctgttggaacagaaatgatacaagatcacataagtaaagttgatttaacgaaaaaacctttcactgcaactggtgatagtggacaaatttacactgcagatagtttcataatttccacaggggcacaagctagatggttaaatttgaagtctgagcaagaattcagaggtttcggagtttcagcttgcgctacgtgcgacggatttttcttcaaagagaaagaggtagctgtagttggcggaggaaacgcagctgttgaagaagcaatgttcctaactaagtttgcttcaaaagtttatctaattcatagaagaaatgaattaagagcagaaaaaatgcttcaagcaaaattaaaagcaaacaaaaaaatagaaattatttgggatagtgttgttgaa

SEQ ID NO: 223735 - DNA, 846 bp, Unknown
  Bacterial polypeptide expressing nucleotide sequence isolated from the Sargasso Sea
tcttggatctgggcctgccggctatactgctgcaatatatgctgctagagccctacttaaaccaatattagtttttggatctgagccgggtggacaacttacaacaactacagatgttgagaattttcctggttttgcgaaagtgattcaaggaccttggttaatggaagaaatgaaaggccaagctcaatctgtaggtacggaaatgattcaagatcatattaaaaaagttgatctttcaaaaaaacctttttcagctcatggggacagtggtcaagtttatactgctgatagtattattatttctacaggtgcccaagcacgatggttaaatttagaatcagaacaaaagtttaggggatttggagtatctgcttgtgcaacatgtgacggttttttctttaaagaaaaagaagttgcagtagttggaggtgggaatgctgcagtagaagaagcaatgtttttaacaaaatttgcttctaaagtttatcttatacatagaagaaatgagttaagagcagaaaaattattacaagaaaaacttaaagctaacaaaaaaattcaaattatttgggatagtgtagttgaagaagttactggaacagatgaacccaaaggggttagtggagttaaaataaaaaatataaaaactaataaaacttctgatctaaaagtggatggtctattcatagcaattggtcacgacccagctacatctttatttaaagatcaattaaaaatggataaagaaggttatttgatcaccaaaccagactccaccgttacgaatataccaggggtatttgctgctggagatgtgagagataaaattttagggcagcagta

SEQ ID NO: 223736 - DNA, 662 bp, Unknown
  Bacterial polypeptide expressing nucleotide sequence isolated from the Sargasso Sea
tatgagtgaaaatccaactaaacacacaaaagtgttaataattgggtcaggtcccgctggatatacagcagcaatttatgctgcaagagcaatgttaaaaccaatattagttcatggtatggaacctggtggccaattaacaacaacaactgatgttgaaaattttcctggatttaaagatgtaatacaagggccatggcttatggatcaaatgaaaggtcaggcagaagtagttggaactgaaatgatacaagatcatattgcatcagtggacttaaaatctaagccatttaaagctgttggagatagtggccaaatttatgaagcagactcaataattatttcaactggagctcaagctagatggttaaatattgactcagaacaaagcttcagaggttttggtgtatctgcatgtgcaacatgtgatgggtttttctttaaagacaaaactgtagcagttgttggaggtggaaatgctgcagttgaagaagctatgtttttaacaaaatttgcttcaaaagttcaacttatacacagaagagatagtttgagagcagaaaaattacttcaaaagaaattaatggaaaataaaaaaattgaaataatttgggactctgttgttgatgaagttattggggataatgatcctaaaaatgtaa

SEQ ID NO: 223737 - DNA, 456 bp, Unknown
  Bacterial polypeptide expressing nucleotide sequence isolated from the Sargasso Sea
tatgagtcaaaatccaactaaacacacaaaagtgttaataattggatccggtcccgctggatatactgcagcagtatatgctgcaagagcgatgctaaatccgatattagtatatggttcagcgccaggaggacagctaacaactaccactgatgttgaaaattatcctggctttgcagatgttatccaaggtccatggttaatggatcaaatgaaagatcaagctaaagcagttggaactgaaatgattgaagatcacattgcatcagtaaatcttaaatctaaaccttttgaagccaatggtgacagtggacaaaaatatacagcagatagcatcatcatttcgacaggtgctcaagcaaggtggttaaatttagactctgaacaagaattcagaggatttggtgtttctgcatgtgcaacttgtgacggcttcttttttaaaaataaagaggt

SEQ ID NO: 223738 - DNA, 727 bp, Unknown
  Bacterial polypeptide expressing nucleotide sequence isolated from the Sargasso Sea
aatgacaaaaaaaatagaaacagatgtactgatcattggttcaggtccagctggatacacagcggcaatttatgcagctagggcaaatttaaaacctcacctagtatcaggattagaacctgggggacaattaacaattacaaccgacgtcgaaaattatcctggatttggagaagtgatacaaggtccatggctaatggaacaaatgaaggaacaagctgtaaaagtaggaacgaaatttcatcacgatatagtaaataaggttgaatttgatataaatccttttcatgctcagactgactcaggtattgaattcattactaaatcgataattattgcaacaggagctcaagcaagatggttaaatttagattctgaaaacaaatttaaaggctttggaatttctgcttgcgcgacctgcgatgggttcttttttaaagatcagaatataattgttgttggcggtggaaatagcgctgttgaagaagctctttacttaacaaactttgcttctaaagtaactttagttcatagacgagataaattacgtgcagaaaaaattcttcaagaaagactttttaaacatccaaaaatagatgtaatctggaatcatgttgttgatgaatttattggtgtagatgaacctatttcacttaaagaagtgaaactaagaaatgttaatgataatgctgaaaaaattgttaatgcaactgggagcattcattgc

SEQ ID NO: 223739 - DNA, 629 bp, Unknown
  Bacterial polypeptide expressing nucleotide sequence isolated from the Sargasso Sea
aatggataacttgcattcacctttaataattctagggtctggtccagctggctacactgctgcactgtatgcatcaagagcaaatcttaacccagtgcttatcacgggattagaaattggaggccaactgacaacaactactgatgtagaaaattggcccggggattacgataatctccaaggaccaatacttatggatagaatgaaagcacatgttgaaaagttcaatactaagataatcatggatcatattaaggatgtgaagcttgatgtacgaccatttgtattaatcggtgatgatacggagtatacttgtgattctttaataattgctacaggtgccagcgctaaatacctaggattagaatcagaaaaacaatatcttggtaaaggtgtctcggcttgtgctacatgcgatggattcttttataaaaatcaagaggtaattgtcattggtggaggtaacacagctgtagaggaagcattatatttgtctaatattgcttctaaagtcactctaatacataggagagataagctcagagccgaagctatgttggttgataagcttaatcaaaaaataaaagaaggaaaaatagatgttatttggaatgctgtccttgcgagtg

SEQ ID NO: 223740 - DNA, 571 bp, Unknown
  Bacterial polypeptide expressing nucleotide sequence isolated from the Sargasso Sea
aatggctaatattaaagaagttacaattattggttcaggtcctgctggttatacggctgcaatttactctgccagagctaatttaaaacctattcttattagcggtcttcaacccggtggccaattaacaattactaccgatgttgaaaattatcctggttatgaaaaccccatccaaggcccatggctgatggaacaaatgcaaaagcaagcacaattagttggtacagaaatattaaatacccaagtaactaaagttgagtttaataactcattaaaaaaaatttttcttgatgatggtagtattattgaatctaaaactgtgatcataagtactggagctcaagcaaggtggctaggactggaaaatgaagaaaaatttcaaggtcatggtttatcggcatgtgcaacatgtgatggcttcttttttaaagataggaaagttgcagtaataggtgggggaaacagtgctgctgaagaggctttatttcttactaaatttgcatccgaggtatttcttattcatcgaagagaccagcttcgagcagaaaaatttttacagatcgcctaa

SEQ ID NO: 223741 - DNA, 445 bp, Unknown
  Bacterial polypeptide expressing nucleotide sequence isolated from the Sargasso Sea
atgagtgaaaatccaactaaacacacaaaagtgttaataattgggtcaggtcctgctggatatacagcagcaatttatgctgcgagagcaatgttaaaaccaatattagttcatggtatggaacctggtggccaattaacaacaacaactgatgttgaaaattttcctggatttaaagatgtaatccagggcccatggcttatggatcaaatgaaaggtcaggcagaagtagttgggactgaaatgattcaagatcatattgcatcggtggacttaaaatctaagccgtttaaagctgttggagatagtggtcaaatttatgaggcagactcaattattatatcaacaggagctcaagcaagatggttaaatattgactcagaacaaagcttcagaggttttggtgtatctgcatgtgcaacatgtgatggatttttctttaaag

SEQ ID NO: 223742 - DNA, 493 bp, Unknown
  Bacterial polypeptide expressing nucleotide sequence isolated from the Sargasso Sea
atgaataataaatcaactaaacacacaaaagtgttaattcttggatcaggtccagcaggttatactgcagcgatatatgctgctagagcaatgttgaagccaattttggtgcatggttctcagccaggcggtcaattaaccactactaccgatgtagaaaattaccctggttattctaaagtaattcaagggccttggttaatggaagaaatgaagggtcaggctaaagctgtaggaaccgaaatgatacaagatcatataaataaagtagagttgtcaaaaaaacctttctcagttgttggtgatagcggccaagtttatactgctgatagtataattatatcaactggagctcaagcaaggtggttaaatttaaaatcagaacaaaattatagaggttttggagtatcagcatgtgcaacttgtgacggtttcttttttaaagataaagaagttgctgtcgttggtggtggaaatgctgcggtgaagaagc

SEQ ID NO: 223743 - DNA, 651 bp, Unknown
  Bacterial polypeptide expressing nucleotide sequence isolated from the Sargasso Sea
aatgaataataaatcaactaagcatacaaaagtgttaattcttggatcgggcccagcaggctatacagctgctatttatgcggctagagcaatgttgaagccaattttagtccatggatcacaaccggggggtcaattaaccacaacgacagatgtggaaaattatcctggttacgcaaaagcaattcaaggtccttggcttatggaagaaatgaaaggtcaagcagaagcagttggaacaattatgatacaagatcatattaataaagtagatttatcaaaaaagcctttcgcagctgtaggagatagtggtcaaatttatacagctgattcaatcattatttcaactggtgctcaagctagatggttgaatttaaaatcggagcaaaattttagaggttttggagtctcagcatgtgccacatgtgatgggttttttttcaaagacaaggaagttgcagttgttggtggtggaaacgctgcagtagaagaagcaatgtttttaacaaagtttgcctctaaagttaaacttatacatagaagaaatgaattaagagcagaaaagatgctgcaagaaaaattaaaatcgaataataaaattgaaattatatgggatagtataattgaagaggtaataggaaaaaatgaacc

SEQ ID NO: 223744 - DNA, 771 bp, Unknown
  Bacterial polypeptide expressing nucleotide sequence isolated from the Sargasso Sea
tatttacgctgcaagggccaacctggaaccagtcttatttgaagggttagaatctggtgggcagttaatgctcactacagatgttgaaaattatccaggctttgatcaaggaattatgggtcctgaaatgatgcaggtatttaaaaaccaagctgaaaggtttggaacaaaaattttaactgagactgtagattcaatagaaaagattgaaaatggatttaagctaacaacttcgaaaaatacttatgagttcaaaactgtaattatttcatctggggcatcagcaaactggcttgatgtaaagggagaaaaagagctgcaaggacatggtgtttcggcttgtgcgacttgtgacggtttcttttttaaagataaaaatgtaatagttgttggtggaggagattcagctatggaagaagctttatttctaactaaattcgcaaaaaatgtaactgttgtccatagaagagattcctttagagcaagtaaaataatgcaagacagggtgcttggtcacgaccaaattgatgtctcgtggaacaaagaagttgtggaaattaaaggtgagggtcaagtttcatctgttcttcttaaagatagtcaaacaagcgaaattgaagaaaaagaaattgatggagttttcatagctataggacacacaccaaatgtaagttttttgaatggatttctggagcttgatgaaaaaggatatataaagactgggtctacaactgctactagtactagcgtccctggtgtctttgcagcagg

SEQ ID NO: 223745 - DNA, 512 bp, Unknown
  Bacterial polypeptide expressing nucleotide sequence isolated from the Sargasso Sea
tatgagtcaaaatccaactaaacacacaaaagtgttaataattggatcaggtccagctggatacactgcagcagtttatgctgcacgtgcaatgttaaatcctattttagtttatggatctgagccaggaggacaattaacaacgacaactgatgttgaaaattatccaggattttctgaagttattcagggaccatggttaatggatcaaatgaaagaacaagcaaaagcagttggaactgaaatgattgaagaccatattggatctgtaaatttaaaaagttcaccatttgaagcaattggagatagtggtcagaaatacactgctgatagtataataatttctacaggtgctcaggcaagatggttaaatttagactcagaacaagagtttagaggatttggcgtctctgcttgcgcaacatgtgatggttttttttttaaaaataaagaggttgcagtagttggtggaggaaatgcagctgtcgaagaagcaatgtttcttacaaaat

SEQ ID NO: 223746 - DNA, 718 bp, Unknown
  Bacterial polypeptide expressing nucleotide sequence isolated from the Sargasso Sea
atagtcaacgacacgatacaaagctatgatttagatgaagaaataatcgttttgaagggagatcagggcgaatattttgccaagacacttgttgttgctacaggcgcttcagcgaggtatttaggcttggaatctgaagctaaattcttgggtagaggtgtatccgcgtgcgctacctgtgatggctttttctacaaggacaagaatgttgcggtagttggaggaggcaatactgcagttgaagaggcgttgtatctagcaaatatagcttcacatgttgacatcattcataggagagactcttttagggcggaaaagattctggtatcacgtgtcctagaaagggtccaggaaggaaagattactattctatggaatcatgttctggctgaagtccttggtgatggaggtggtgtgacaggagtaaaggcgttaaataaaatagacaatactataaataacataaatttagatggcgtttttatagcaattggtcacacaccgaatacatcgatttttcaaggtcagttggaaatggatggtggttatatcctgactggaaaaaaaggcgccctagccactcaaacgagcaccccaaatatttttgctgccggggacgtggctgatcctatttatcgtcaagccattacatctgctggctcagggtgcatggctgcgctagacgtagaaaagtatttggaaagttcaaacgcgtgag

SEQ ID NO: 223747 - DNA, 520 bp, Unknown
  Bacterial polypeptide expressing nucleotide sequence isolated from the Sargasso Sea
atgagtaaaattaaaaataatgttcttataattggatctggaccagcaggttataccgctgcaatttatgcagctcgcgcaaatcttgaacctcatatagtatctggcttagagcctggtggtcaacttactattaccactgatgtagaaaactaccctggttttggcgatgttattcagggaccttggttgatggaagaaatgaaaaaacaagctctcaacgtagggacaatattccataatgatatagttacttcggtgaaatttgataattatccattcatatccaataccgaatcaggcaaagaatttatttcaaaggcagttataattgctactggtgctcaagcgaggtggttaaacatagaaagtgaaaataaatttaaaggttttggaatatctgcatgtgccacttgtgatggatttttttttaaagatcaaattgttattgttgttggtggaggaaatagcgcagtagaagaagctttatttcttacaaaatttgcttcaaaaagtaatt

SEQ ID NO: 223748 - DNA, 844 bp, Unknown
  Bacterial polypeptide expressing nucleotide sequence isolated from the Sargasso Sea
atgaaagaaaaaattaatacagaagtactaattattggatctggtccagctggttatactgcagcaatttatgcagcgcgagcaaaccttaagccgcatttagtttctggtttagaacctggaggacaattaacaatcactactgatgttgaaaactatcctgggtatggagacactattcaaggaccttggttaatggaagaaatgaaaaaacagtctttaaatgtaggtactattattcataatgatatggtaacagaagtagattttaattcttatccttttatttctaaaactgattcaggattaatttttgaaagcaaaacagttataatatctacaggtgcccaagcaagatggcttggcattaaaagtgaagaaaaatttaaaggatatggaatttcagcttgcgcaacttgtgatggatttttttttaaagatcaaaaagttgctgttattggaggtggtaatagtgcagtagaagaagcactttatttaactaattttgcttcgaaagtaacattgattcatagaagagacgaattaagagctgaaaaaatcttacaagataggctttttaaaaatccaaaaattaatgttatttggaataaaactgttgaagagtttattgggaacgatgaaaaaccatctttagaatcattagttttaaaagatactaaagataattctgaatcaaagctaagtgtaaatggcgcctttgttgctataggccatgatccttcaacttcattatttattaataaagttcaaatggatgaagataattatattattacaaaaccagatagtactgaaacaagtgtagaaggaatatatgctgctg

SEQ ID NO: 223749 - DNA, 559 bp, Unknown
  Bacterial polypeptide expressing nucleotide sequence isolated from the Sargasso Sea
ttaggcagaggagtttctgcgtgcgcaacatgcgatggttttttctaccgtgatcaagaggttgctgtaattggcggtggaaatactgctgctgaagaagctctatatctttcccgtatttgctcaaaagttcatctcgttcatcgaagggataagctgagagcagaaaaaattcttcgagatagagttgctgaagctgaaagtgaaggcaaaattgagatgcattggaattctcaattagacgaggtacttggagatgataagggtgttcactcaattcaaatagtgactgacgaagagagtaaaaaacttgatttaacaggcgtatttatagctattggtcatcaccctaatactgaaatatttaaaggccaacttgaaatgaaaaatgattacatcaccattaaatcaggaacggatggaatggctactgctaccagtgtgcctggagtctatgcagcaggcgatgtttcagatcaaatttatcgacaagctattacatctgcaggatttggctgtatggctgcacttgatgctgagaagtttttatctgagtagt

SEQ ID NO: 223750 - DNA, 835 bp, Unknown
  Bacterial polypeptide expressing nucleotide sequence isolated from the Sargasso Sea
taccggagcagagcaaggaggtcaattaactactactacggacgtagaaaattggcctggagattatgacggcctccaaggcccagaattaatggaacgaatgaaaaagcacgcagaaatgtttaatgttttaattgtaaatgatcatataggccaaacagaattatctgaaaaaccttttaagctcaagggtagtaagaattggtcatgtgattcactcattatttcaactggagcaagtgctaaatatttaggtttgccatctgaaaaagaatttttaggcaaaggtgtttctgcttgtgcaacttgtgatggctttttctaccgtgatcaagaggttgcagtagtgggaggaggtaatactgctgctgaagaagctttatatctttctcgtatttgctcaaaagtccatctaattcacagaagagataagctcagagctgaaaaaattcttcgagatagagttgctgacgaagtagaaaaaggaaaaattgagatgcattggaattctcaattaaatgaagttcttggggatgaaagaggagtaaacgcaattaaaatattgaccgacgatgataagaaaaaacttgatctgaatggagtttttattgcaattggtcatcaccctaacactgaaatttttaaaggtcagctcgagatgaaaaacgattatattacaataaaatcagggactgatggcatggccacttctacaagtgtgcctggagtatatgcagcaggtgatgtctcggatcaagtatataggcaagccattacctcagctggatttggttgcatggccgctttagatgcagaaaagtttttatctgaataa

SEQ ID NO: 223751 - DNA, 694 bp, Unknown
  Bacterial polypeptide expressing nucleotide sequence isolated from the Sargasso Sea
agtgacgctgactgagcgccctttccgtctaaaaggcgataacggtgaatacacctgtgatgcgctgatcatcgcaacaggcgcttctgcccgttacttaggtctggagtcagaagaagcgttcaagggacgcggcgtatcagcttgtgcgacctgtgatggtttcttctatcgcaatcagaaagttgcagtcattggtggcggtaacacagccgttgaagaagcgctttatttaagtaatatcgccgccgaagtgcacttaattcatcgccgtgacactttccgctcagagaaaattcttatcgaccgtttaatggataaagtagctaacggcaacattatcctgcacctagatcaaaccatggaagaagtggttggtgatgctatgggtgtgactggcctgaaaatgaagagcaccaaagatggcgctatcacagatctggcagttgccggtgtgttcgtggccattggtcatagcccaaatactgggattttcgaaggccagttagaaatgaacaacggctatctgaaggtgcaaagcggccttcaaggtaatgcgacccaaaccagcattgaaggtgtgtttgctgcaggtgacgttatggaccaacattaccgtcaagcgattacctctgcgggtacaggctgtatggcagcattagatgctgagcgttacttagacgctaaaaaataa

SEQ ID NO: 223752 - DNA, 592 bp, Unknown
  Bacterial polypeptide expressing nucleotide sequence isolated from the Sargasso Sea
atgagcacatcctcacaccaccgcctgatgattcttgggtccgggccagcaggttatacggccgctgtttatgccgctcgcgccaatctcaatcctgtcgtgattactggcctgcaacagggtgggcagttaacgaccaccaccgaggtggaaaactggccaggagggacccacgatctgcaagggccgcagctcatgcagcaaatgcaagagcacgtcgaacggctcgaggcgagcgtggtctttgatcatatcgaaagcgtcgacctctcagcacgccccttcactgtgaagggcacagcagaatacaccagcgacgccctaatcatcgccacaggggcctcggcgcagtatttgggcctgccctctgagtcagcgtttatgggtaagggcgtcagcgcctgcgccacctgcgacgggtttttctatcgcaatcaagaggttgccgttgtaggtggcgggaataccgctgtcgaggaggcactctacctcagcaacctgtgctccaaggtgcacttgattcaccgtcgcgacagcctgcgagctgagaaaattcttcaggatcgactcatgcaaagggcgaaggaaggca

SEQ ID NO: 223753 - DNA, 823 bp, Unknown
  Bacterial polypeptide expressing nucleotide sequence isolated from the Sargasso Sea
atgagtcaaaatccaactaaacacacaaaagtgttaataattggatcaggtccagctggatacactgcagcagtttatgctgctcgtgcaatgttaaatcctattttagtttatggatctgagccaggaggacaattaacaacgacaactgatgttgaaaattatccaggattttctgaagttattcaagggccatggttaatggatcaaatgaaagaacaagcaaaagcagttggaactgaaatgattgaagaccatattggatcagtaactttaaaaagttcaccatttgaagcaattggtgatagtggtcagaaatatactgctgatagcattattatttctactggggctcaagcaagatggttaaatataaaatcagaacaggaatttagaggatttggagtttctgcttgtgcaacttgtgacggtttcttttttaaaaataaagaagttgctgtagttggaggaggtaatgcagcggttgaagaagcaatgttccttacaaaatttgcatctaaagtaaaattaatccacagaagagatagtttaagagctgaaaaaatgcttcaaaaaaaattaatggaaaataaaaaaatagaaataatttgggactctgtagttgaagatgttttaggtgataaagatcctaaaaatgtcaaaggaataaagattaaaaatgttaaaacaaataaaatacaagaattgaaacttgatggcgtattcattgctattggtcatgatccagcgacttcactattcaaagatcaacttaagatggataatgaagggtatttaattactaaacccagattctactgaa

SEQ ID NO: 223754 - DNA, 670 bp, Unknown
  Bacterial polypeptide expressing nucleotide sequence isolated from the Sargasso Sea
tatgaatgaaaaaatagaaaatgatgtcttaattatcggatctggaccagcaggctatactgctgcaatctatgcagcaagagcaaatttaaaacctcatttagtttcaggtttagaaccaggaggtcaactaacaatcactacggatgtagaaaactatccaggatttgaaaatgttattcagggtccttggcttatggaacaaatgaaagagcaagctgtaaaagtaggaactatttttcataacgatattgtaacttcagtagattttgaaaaaaatccatttacttccaaaactgagtcaggaaaagaatttatatccaaatcaataattattgcaacaggtgctcaagcaagatggttaaatttggaaagtgagaaaaaatttaaaggtttcggtatttctgcttgtgcaacttgcgatggatttttcttcaaagatcagcaagttgctgttataggtggaggcaatagtgcagtagaggaagcaatgtttttgacaaaatttgcttcaaaagttttgctaatccatagaagagatagtttgcgagcagaaaaaattttgcaagaaagagtatttaacaataaaaaaattgaagtaatttggaacaataaggtttctgaatttgttggagaagaaaatccaaatgaattaaaaaaactgatttta

SEQ ID NO: 223755 - DNA, 557 bp, Unknown
  Bacterial polypeptide expressing nucleotide sequence isolated from the Sargasso Sea
tatgaaaacttataaaagcgatacaattattgttggatccggcgctgctggttacactgctgctatatatgcagctagggctaatatgaaacctattttagtaaatggccaacaacccggtggccagatgactattacaacagatgtagaaaattatcctggtttcaaagatgttatacaaggaccgtggcttatggatcaaatgaaggcgcaagcagaaggagttggcacaaaaattattaatgacaccattacagaatgtaactttaaactaaaaccttttaaattaattggagatagtaaatctatttattatggaaaaacaacaataattgcaacaggtgcaacggcaagatggttaggaatcaaaagtgaagaaaaattcaaaggttatggagtatcagcatgcgcaacttgtgatggctttttctttaaaaacaaaatagttgctgtggttggcggaggcaatacagctgttgaagaagctctatatttaacattacatgcaaaaaaagtatttttaattcatagaagagataaattaagagcagaaaaaa

SEQ ID NO: 223756 - DNA, 556 bp, Unknown
  Bacterial polypeptide expressing nucleotide sequence isolated from the Sargasso Sea
atgaatcagaatccatctaaacacacaaaagtgttaataattggatctggacctgctggatacacagctgcggtttatgctgcaagagcaatgcttaaacctataatgatttctggtatggaaccaggtggacaattaacaactactactgatgtagaaaattatcctggatttgcaaaagtaattcaaggtccttggttaatggaagaaatgcgagaccaagctaaagctgttggaactgaaatgattgaggatcatatttcatctgtaaatttaaaatctaaaccatttgaagctattggggaaagtggccaaaaatatacggcagactcaattattatatcaactggagcccaagcaagatggttgaatattgaatctgaacagaaatatagaggttttggagtatctgcgtgcgcaacatgtgacggttttttctttaaagaaaaaacagttgcagttgtcggtggtgggaatgctgcggtagaagaagccatgtttcttacaaaatttgcatcaaaagtaaaactgattcatagaagaaactctttaagag

SEQ ID NO: 223757 - DNA, 577 bp, Unknown
  Bacterial polypeptide expressing nucleotide sequence isolated from the Sargasso Sea
atgagtcaaaatccaactaaacacacaaaagtgttaataattggatctggtcctgccggatacacagctgcagtttatgctgctcgagctatgttaaatccaattctagttcatggatctgagccaggtggtcaattaacaacgacaactgatgttgaaaactttccaggatttgcagaggttatacagggtccttggttaatggatcaaatgaaagaacaagctaaagctgttggtacagaaatgatagaggatcacattagtaatgttaatttaaaatcttctccgtttgaggcaactggggatagtggtcaaaaatatactgctgacagtataataatttctacaggtgctcaggcaagatggttaaatttagactcagaacaagagtttagaggatttggcgtctctgcttgcgcaacatgtgacggtttcttttttaaaaataaagaagttgcagtagttggaggtggcaatgcagctgttgaagaggcaatgtttcttacaaaatttgcatctaaagtaaaattaattcacagacgagatagtttaagggctgaaaaaatgcttcaaaaaa

SEQ ID NO: 223758 - DNA, 499 bp, Unknown
  Bacterial polypeptide expressing nucleotide sequence isolated from the Sargasso Sea
atgaatcaaaatccaactaaacacacaaaagtgttaataattggatccggtcctgctggatataccgctgcagtttatgctgcaagagcaatgttaaaacctattatggtttctggtatagagcctggtggacaattaactaccacaactgatgttgaaaattatcctggttttgccgaagtaattcaaggaccatggttgatggaacaaatgcgagaccaagctaaagctgtaggtacagaaatgattgaagatcacatctcttcagtaaatttaaaatcaaaaccttttgaagcaataggagatggtggtcaaaaatataccgcagattcaattataatttcaactggagctcaagcaagatggttaaatattgaatctgaaaaaaaatttagaggatttggtgtttcagcttgcgcaacatgtgatgggtttttctttaaaggtaaaacagttgcagttgttggtggaggaaatgcagcagttgaagaagcaatgt

SEQ ID NO: 223759 - DNA, 529 bp, Unknown
  Bacterial polypeptide expressing nucleotide sequence isolated from the Sargasso Sea
tatgaatcaaaatccaactaaacacacaaaagtgttaataattggatccggtccagccggatacactgcagcagtttatgcggctcgagcaatgcttaatccagttttagttcatggtatggagcctggaggccaattgactactactactgatgttgagaattatcccggatttgcggaagtaatacaaggtccttggcttatggatcagatgaaagaacaagctaaagcggttggtacagaaatgatagaagatcatatctcctcggttaatcttaagtcaaaaccctttgaagccacaggagaaagtggtcaaaaatatacagctgactcaataataatatcgactggtgcccaagcaaggtggctaaatttaaaatctgagcaagagtatagaggttttggtgtatcggcatgtgcaacatgtgatggatttttttttaaagaaaaaactgttgctgttgtaggtggtggaaacgcagctgttgaagaagctatgtttttaacaaagtttgcatcaaaagttaaa

SEQ ID NO: 223760 - DNA, 616 bp, Unknown
  Bacterial polypeptide expressing nucleotide sequence isolated from the Sargasso Sea
atgagtaaaattgaaaataatgttcttataattggatctggaccagcaggttataccgctgcaatttatgcagctcgcgcaaatcttaaaccacatttagtatctggcttagagcctggtggtcaacttactattaccactgatgtagaaaattaccctggtttcggagatgtaattcaaggaccttggttgatggaagaaatgaaaaagcaagctctaaatgtaggcacaatattccataatgatatcgttacttctgtaaattttgataataatccattcatatcaaatactgaatcaggcaaagaatttatttcaaaggcagtaataattgcaactggggctcaagcaagatggctaaatttagaaagtgaaaataagtttaaaggttttggaatatcagcatgtgccacttgtgatggatttttttttaaagatcaaattgttattgtggttggtggaggaaatagtgcagtagaagaagccttatttcttacaaaatttgcttctaaagtaattcttattcacagaagggattcattaagagcagaaaaaatattacaagatagacttttcaaaaataataaaattgaaataattgggaaagtaaagtaaa

SEQ ID NO: 223761 - DNA, 500 bp, Unknown
  Bacterial polypeptide expressing nucleotide sequence isolated from the Sargasso Sea
tatgagtcaaaatccaactaaacacacaaaagtgttaataattggatccggtccagctggatatactgctgcagtctatgctgcaagagcaatgcttaaacctattatggtatcaggaatggaaccaggaggacaattaacaactactactgatgtagaaaattatcctggatttgcagaagtaatacaaggtccatggttaatggaacaaatgagagatcaggctaaagctgttggaactgagatgattgaagatcacattgctagtgtaaatttaaaatccaaaccatttgaagctgtaggagatggtggacagatatataccgctgattcaattattatttcaacgggggcacaagcaagatggttgaatatagattctgaacaaaaattcagaggatttggagtttctgcttgcgcaacatgtgatggctttttctttaaagacaaaacagtagctgttgtaggtggaggaaatgctgcagttgaagaagctatgt

SEQ ID NO: 223762 - DNA, 645 bp, Unknown
  Bacterial polypeptide expressing nucleotide sequence isolated from the Sargasso Sea
aatgaaagaaaaaattaataccgaagtactaattattggatctggtccagctggttatactgcagcaatttatgcagcgcgagcaaaccttaagccgcatttagtttctggtttggaacctggaggacaattaacaatcactactgatgttgaaaattatcctgggtatggagacactattcaaggaccttggttaatggaagaaatgaaaaaacagtctttaaatgtaggtactattatccataatgatttggtaacagaagtagattttaattcttatccctttatttctaaaactgattcaggattaatttttgaaagcaaaacagttataatatctacaggtgcccaagcaagatggcttggcattaaaagtgaagaaaaatttaaggggtatggaatttcagcttgtgcaacttgtgatggatttttttttaaagatcaaaaagttgctgttattggaggtggtaatagtgcagtagaagaagcactttatttaactaattttgcctcaaaagtaacattaattcatagaagagacgaattaagggctgaaaaaatcttacaagatagactttttaaaaatccaaaaattaatgtcatttggaataaaactgtagaagagtttattggaaatgataaaaa

SEQ ID NO: 223763 - DNA, 902 bp, Unknown
  Bacterial polypeptide expressing nucleotide sequence isolated from the Sargasso Sea
tcggggcccagctggctatgctgcaggtatttatgcagctagagcaggacttgagccattattaattaccggtgcagaacaagggggtcaactaactaccactacggacgtagaaaattggcctggagatcatgacggcctgcaaggtcctgaattaatggagcgaatgaaaaaacacgcagaaatgtttgacgtacttattgtaaatgatcatatagaccaaacagaattatctaaaaaaccttttaaactcaaaggtagtcaaaattggtcatgtgattcactcattatttcaactggagcaagtgctaagtatttgggtttgccatccgaaaaagaatttttaggcaaaggtgtttctgcttgtgcaacttgtgatggttttttctaccgtgatcaagaggttgcagtagttggaggtggcaatactgctgctgaagaagctttgtatctttctcgtatttgttcaaaagtccatctaattcacagaagagataagctcagagctgaaaaaattctccgagatagagttgctgacgaagtagacaaaggaaaaattgagatgcattggaattctcaattgaatgaggttcttggagatgacagaggagtaaacgcaattgaaatattgaccgacgatgataataaaaaacttgatctgaatggagtctttattgctataggtcatcatcctaacactgaaatttttaaaggtcagctcgagatgaaaaatgattatattacaataaaatcaggaactgatggcatggccacctctactagtgtgcctggagtatatgcagcaggtgatgtctcggatcaagtatataggcaagctattacctcagctggatttggttgcatggctgcactagatgcagaaaagtttttatctgaataat

SEQ ID NO: 223764 - DNA, 169 bp, Unknown
  Bacterial polypeptide expressing nucleotide sequence isolated from the Sargasso Sea
tggatacattataatcaagtctggtttagacggttcggtcacgcaaacatctgttcctggggtttttgcagctggtgatgttgctgataaagtttacagacaagcaattacatctgcagggtttggttgcatggctgcattagatgctgaaaaattcttatctgattaa

SEQ ID NO: 223765 - DNA, 490 bp, Unknown
  Bacterial polypeptide expressing nucleotide sequence isolated from the Sargasso Sea
atgagtcaaaatccaactaaacacacaaaagtgttaataattggatccggtcctgctggatacacagccgctgtttatgctgcaagagcaatgctaaaacctattctagttcatggcatggaaccaggtggtcaactaacaacaactactgatgttgaaaattatccaggttttgcagaagtaattcaagggccatggttaatggaacagatgaaagaacaggcacaagctgttggaactgaaatgattgaagatcatattgattctgtaaatttaaaatcaaaaccatttgaagcaattggggatggaggccaaaaatatactgcggactcaatcataatttcaacaggagctcaagcaaggtggttaaatattgattctgaacaaaaatttagaggatttggagtatcggcatgcgcaacatgtgatggttttttctttaaagaaaaaacagtagcagttgttggtggaggaaaatgcggccagttga

SEQ ID NO: 223766 - DNA, 541 bp, Unknown
  Bacterial polypeptide expressing nucleotide sequence isolated from the Sargasso Sea
tatgagtcaaaatccaactaaacacacaaaagtgttaataattggatccggtccagctggatacacagcagctgtctatgcggcgcgagctatgttagatccaattttggttcacgggtcagagccaggtgggcaattaacaacaactactgatgttgaaaactttcctggatttgctgaggttattcagggaccctggttgatggatcaaatgaaagaacaagcaaaagctgttggcacggaaatgttagaagatcatattggatcagtaaatttaaaatctactccatttgaagccgttggagaaagtggtcaaaaatttactgctgatagtattattatttcaactggagcccaagcaagatggcttaacttaaaatcagaacaagaatttagaggttttggtgtatcagcttgtgctacttgtgacggatttttctttaaagaaaaagaggtggcagttgttggtggtggaaatgctgctgtagaagaagcaatgtttcttacaaaatttgcatcaaaagtaaaattaattcataga

SEQ ID NO: 223767 - DNA, 790 bp, Unknown
  Bacterial polypeptide expressing nucleotide sequence isolated from the Sargasso Sea
atgaatcaaaatccaactaaacacacaaaagtgttaataattggatctggtcctgccggatatactgctgctgtttatgcagcacgagcaatgttaaatcctattcttgtgcatggatctgagcctggtggacaattgactacaacaactgacgtagaaaattatccaggtttcgctaatgtaattcaagggccttggcttatggatcaaatgaaagaccaagcaaaagcagttggaactgaaatgattgaagaccatattggatctgtaaatttaaaaagttcaccatttgaagcaattggtgatagtggtcagaaatatactgctgatagcattattatttctactggagctcaagcaagatggttaaatataaaatcagaacaggaatttagagggtttggagtttctgcttgtgcaacttgtgacggtttcttttttaaaaataaagaagttgctgtagttggaggaggtaatgcagcggttgaagaggcaatgttccttacaaagtttgcatctaaagtgaaattaatccacagaagagatagtttaagagctgaaaaaatgcttcaaaaaaaattaatggaaaataaaaaaattgaaataatttgggactctgtagttgaagatgtgttaggtgataaagatcctaaaaatgtcaaaggaataaagattaaaaatgttaaaacaaataaaatacaagaattgaaacttgatggcgtattcattgctatcggtcatgatccagctactcaactttttaaagatcaattaaaaatggataatgagg

SEQ ID NO: 223768 - DNA, 626 bp, Unknown
  Bacterial polypeptide expressing nucleotide sequence isolated from the Sargasso Sea
tatgagtcaaaatccaactaaacacacaaaagtgttaataattggatccggtccagccggatacacagcagctgtatatgcagcaagggcaatgctaaacccaattttagtttatggctcagcgccaggaggacaattaactaccactactgacgttgaaaattatccgggttttgcagatgctatacagggtccatggttaatggatcaaatgagggatcaagccaaagcagttggaactgaaatgattgaagatcatatagcttcggtaaatttaaaatctaaaccctttgaggcaattggggatagtggtcaaaaatactcagctgatagtattattatttcgactggtgctcaagcaagatggttaaatttaaaatctgagcaagaatttagaggatttggagtttcggcgtgtgctacttgtgatggtttcttttttaaaaataaaaaagttgcagttgtaggtggtggtaatgctgctgttgaggaagcaatgttcttaacaaaatttgcgtctaaagtaaaattaatccacagaagagatagtttgagggctgaaaaaatgcttcaaaagaaattaatggaaaacaaaaaaattgaaattatttggggactctgtagtt

SEQ ID NO: 223769 - DNA, 772 bp, Unknown
  Bacterial polypeptide expressing nucleotide sequence isolated from the Sargasso Sea
tcccgagctcatggaaacacttaaagcacatgccgaacgcctaaaggtacctttaatttttgaccacattaagtcttgtgatttaagtcagcaaccactctcgctcagtggcgaataccatgactacacctgcgacagtctcattattgccactggggcatctgcacgctatctcgggctgccgagtgaaaaagcgttcatgggcaaaggcgtctctgcctgcgcgacctgcgatggctttttctaccgtggcaaagcagtggccgtggtcggcggcggtaatacggcggttgaagaagcgctctacctcagcaacctcgcctcacacgtgaccttgattcatcgccgcgacgagctcagagcagaaaaaatgctgcaaaaaaggctgtttgaaaagatagacgaaggcaagatcagcatggcttggtgcagcacgttagatgaagtattgggtaatgaatccggggtcaccggggctcgactcaagagcacgcaatccgatgaaactcacgatatcgccgtggatggcgttttcattgccattggccacgacccgaacaccggtattttcaaagggcaactggacatgaacggcgagggttacttacacattcaatccgggataacaggcaacgcaacggcaaccagcaaggcgggtgtttttgccgccggggatgtcgcggattctgtctatcgacaagccatcacctccgcgggcagcggctgcatggcggcccttgatgcagaaaaattcctggatcatgctcaataa

SEQ ID NO: 223770 - DNA, 646 bp, Unknown
  Bacterial polypeptide expressing nucleotide sequence isolated from the Sargasso Sea
tatgagtcaaaatccaactaaacacacaaaagtgttaataattggatccggtccagccggatacactgctgcagtttatgctgcaagagctatgctaaaacctattatggtttcaggcatggagccaggaggacaattaacaactactactgatgttgaaaattatcctggatttgcagaagtaatacaaggaccctggctaatggaacaaatgcgagaccaagccaaagctgtgggtactgaaatgattgaagatcatatttcttcagtaaatttaaaatctaaaccatttgaagctataggtgatggtggtgaaaaatatacagctgactcaataataatttcaacaggagctcaagcgagatggctgaatatagaatctgaacaaaagtttagaggatttggtgtatcagcgtgcgcaacatgcgatggatttttcttcaaagaaaaaacagttgcagttgtaggaggaggaaatgctgctgtggaagaggcaatgtttctaacaaaatttgcttcaaaagttcagttaattcatagaagagatgaattaagagcagaaaaacttctacaaaaaaaattaatggaaaataaaaaaatagaaattatttgggatagcgtagttgaagaagtaattggtgatgaa

SEQ ID NO: 223771 - DNA, 871 bp, Unknown
  Bacterial polypeptide expressing nucleotide sequence isolated from the Sargasso Sea
atgactgaaaaaatagaaaatgatgtcttaattattggctctggaccagcaggctatactgctgcaatctatgcagcaagagcaaatttaaaaccgcatttagtttcaggtttagaaccaggaggtcagctaaccatcactacggatgtagaaaactatccaggatttgaaaatgtaattcagggtccttggcttatggaacaaatgaaagaacaggcagtaaaagtaggaactatctttcataatgatattgtaacttcagttgattttgaaaaaaatccatttacttccaaaactgagtcaggcaaagaatttgtgtccaaatcgataattattgcaacaggcgctcaggctagatggctgaacttggaaagtgaaaaaaaatttaaaggatttggtatttctgcttgtgcaacttgtgatgggtttttcttcaaagatcagcaagtagcagtgattggtggaggtaatagtgcagtagaagaagcaatgtttttgacaaagtttgcttcaaaggttttgttaatccatagaagagatagtttacgagctgaaaaaattttacaagaaagactgtttaacaataaaaaaattgaagtaatttggaatagtaaggtttctgagttcgttggagaagaaaatccaaatacattaaaaaaaattattttagagaacacattagatagcaccaaaacaactatagatgtaaatggtgcttttatagctataggacatgatcctgctacgtcactttttattgataagttaaaaatggatgaagagaattatataattactaaacctgatagtactgagacaagtataaagggagtttttgctgcaggagatgtaaaagataaaattacagaca

SEQ ID NO: 223772 - DNA, 786 bp, Unknown
  Bacterial polypeptide expressing nucleotide sequence isolated from the Sargasso Sea
aatgaataataagtctactaaacatacaaaagtgttaataattggatctggtcctgctggttatacagctgccatttatgccgcaagagcaatgttaaagccaatattggtgtttggttctgaacctggtggtcagttaacaacaacaaccgatgttgaaaattttcctggatattcaaaagttattcaaggaccttggttaatggaggagatgaaaggtcaagcaaaagcagtgggcacagaaatgatacaagaccacataagtgaagtggatatatcaacaaaacctttcaaagctattggtgatagcggtcaagtttatactgctgatagttttattatatcaactggtgcacaagcccgatggttaaatttaaagtcagaaaaagaatttagaggatttggagtatctgcatgcgccacttgcgatggtttcttttttaaagaaaaagaagtagccgttgtgggtggaggtaatgctgctgtggaggaagctttattcttaactaaatttgcatctaaagtaaaacttatacatagaagaaacgaattgagagctgaaaaaatgcttcaagcaaaacttaaggcaaataaaaaaattgaaataatttgggatagtgttgttgaagatatattgggagaaaaaaatccaaaatcagttaaaggtattaaaattaaaaatgttaaaacaaaaaaagttagtgagattaaaatagatggactttttattgctataggacatgatcctgctacttcattatttaaaggtcaattgaatatggataa

SEQ ID NO: 223773 - DNA, 748 bp, Unknown
  Bacterial polypeptide expressing nucleotide sequence isolated from the Sargasso Sea
atgaaagaacacgtaaaaaaatttaaaactgaaataatcatggatcaaattaaactagtcaatctaaaaaataagccttttgagttaacaggagacgatgcaatttacacgtgcgatagcctaataatagcgactggcgcatctgcgaaatatctagggttagagtctgaaaaaaaatatctaggtaaaggtgtctctgcatgtgcaacatgtgatggttttttctatcgtgatcaagaagttattgttgttggtggaggcaatacggcagttgaagaagcactatatctctcaaacattgcatctaaagtaacattaatacacagaagggatactttaagggctgaagcaattcttgttgacagaattaaggaaaaagaaaaagacggcaaggttgtctttgagtggaaacatacgcttgatgaagttcttggcgatgaagaaaaagttactgcagtaaaagtcaaacatgtagagactggtgaaacaaaaaaaataaactgctctggtgcatttatcgctataggccataaaccaaatactgatatttttagaaattctcttgatatggatcaaactggttacttaactatacaaggtggttcgactggtaacgctacgcaatgctcagtcacaggtgtatttgctgccggtgatgtatctgattcagtctatagacaagcaataacttctgcgggcgctggttgtatggctgcacttgatgcagaaaagtatttagacaaatagc

SEQ ID NO: 223774 - DNA, 571 bp, Unknown
  Bacterial polypeptide expressing nucleotide sequence isolated from the Sargasso Sea
atgtctgatacccgtcattcccgagtgattattctcggttccggccctgccggttacagcgccgctgtctacgctgcccgggccaatctcaagccgttgctgatcaccggcatgcaggcgggcggtcagttgaccaccactactgaagtcgacaactggccgggcgatgtccatggcttgactggcccggtgctcatggaacgcatgaaagagcacgccgagcgctttgaaaccgagatcgtcttcgaccatatcaaccaggtcgacttctcgaaaaagccttacagcctgaccggtgacagcggtgtgtacacctgcgatgcactgatcattgccactggtgccagtgcgcgttacctgggcctgccgtcggaagaagcgttcatgggcaagggtgtttcggcctgcgccacttgcgatggtttcttctaccgcaacaagccggttgccgtggtcggcggtggcaacactgccgtggaagaggcgctgtacctggccaacatcgccagcaccgtgaccctggttcaccgccgcgagaccttccgcgccgagaagatcctgatcgacaagc

SEQ ID NO: 223775 - DNA, 750 bp, Unknown
  Bacterial polypeptide expressing nucleotide sequence isolated from the Sargasso Sea
tgatgaatgagcttaaagaacaggcagaaaggtttggtacaaaagttgaaattgattttatatcaaaagttgatttttcaaatgataagggtggaatgcataagctatacactcaaaatggagatgaaataaaatctaagacagtcataattagtactggtgcctcagcaaaatatcttgggttacccagcgaaaaaagacttattgggggaggagtttcagcatgcgcagtgtgtgacggttttttttataaaaatcaggatgttgctattgtcggtggtggtgacactgcaattgaagaggcaacatatttagcaaaaatatgtaatactgtaaccatgcttgtaagaaaagatcattttagagcatcaaaagcaatgcaaaataggctatctaattataacaatataaaagtgctatttaatcatgaagttattgaagttatgggtgaaaatgttgttgatggtctcaaaataaagaataatcttacaaatgatttatcagagttagaaataacaggtttatttattgctattggccattcaccaaatactgatatctttaaaggcatagttgatatggatgacagtggatatatacttacagataaaatttctactaagacaaatattccaggagtttttgcagcaggagatgtccaagataaagattaccgtcaagcaataacagcagctggaacaggatgtatggcagcacttgatgcagaaagatatctacaagaggtttaaa

SEQ ID NO: 223776 - DNA, 844 bp, Unknown
  Bacterial polypeptide expressing nucleotide sequence isolated from the Sargasso Sea
tatagttcacggctctcaaccaggtgggcaattaaccacaactacagatgttgaaaactacccaggatacgcaaaagcaattcaaggtccgtggttaatggaagaaatgaaaggtcaagctgcagctgttggaactgaaatgatacaagatcatattaaaaaggtggatttatcaaaaaaaccttttacagcagagggagatagtggccaagtttatactgcagattcaattattatttcaacgggagcgcaagcgagatggttaaatttaaaatcagaacaaaactttagaggatttggagtatcagcttgtgcaacatgtgacggatttttctttaaagataaagaggttgctgttgtaggtggaggtaatgctgctgtagaggaagctatatttttaacaaaatttgcaacaaaagttaaattgattcatagaagagataagttgagagcagaaaaaatgcttcaagaaaaattaaaagctaacgagaaaattgaagttgtttgggatagtgttgtagaagatgttttaggaacaaatgagcctaaaggagttaatgccattaaaattaaaaatgttaaagataataaaattaaagaattgaaagttgatggattatttattgctataggtcatgatcctgctacgcaattatttaaagatcaattaaagatggatgaagaaggttacttaattacaaaaccagattctacaatcacaaatatacctggagtatttgcggctggcgatgttaaagataaaatttttagacaagctgtaactgctgcgggaatgggctgtatggctgcacttgaagcagaaaagcatttatcagataaataa

SEQ ID NO: 223777 - DNA, 908 bp, Unknown
  Bacterial polypeptide expressing nucleotide sequence isolated from the Sargasso Sea
aatgtcagagaatcataataaactaataattttaggttcagggccttctggatatgcagcaggaatatacgccgcaagggctggcttaaatcctattattattgctggcatgcaagaaggtggacaacttacaacaactacagatgttgaaaactggcctggcgatagcgatggacttcaagggccagaactaatggaaagaatgaaaaaacacgcattacagtttgatgttcaagtcatcaatgatcatattgatagtgttgacctatccaaccaaccattcaaattatatggaaattctgaatatgaatgtgagtcattaattatttcaactggtgcaagtgcaatgtatttaggtcttccttctgaaaaagaatatctaggaaaaggtgtttcagcttgtgccacatgtgatggatttttttatagagatcaaaaagttgcagtaattggtggtggcaatactgctgcagaagaagcactttatttatctaatatatgttctaaagtgtatttagttcataggagagatgaacttagagcggaaaagattttacaagatcgtatttttaaacaagaacaagaaggtaaaattgaaattttatgggatacgcaattaacagaagttattggagacgataaaggtgtcactagtatcaaattagatactaagggtgaagaatcaacaaaggatgttatgggtgtttttatcgctattggtcacaaaccgaatactgaaatgtttagtgatcaattagaaatggataacggttatattattatcaaatctggtctcaacggatcagttacaagcacttctgtcaaaggtgtttttgcagcgggagatgtgtcggatcaagtgtatcgtcaagctattacttccgcaggctttggctgtatggctgctt

SEQ ID NO: 223778 - DNA, 590 bp, Unknown
  Bacterial polypeptide expressing nucleotide sequence isolated from the Sargasso Sea
atggttaaatatagattcagaaaataagtacaaaggttttggcatttccgcctgtgcaacttgtgatggattcttttttaaagaccaaaatataattgttgttggtggaggaaacagtgctgtagaagaagcactttatttgacaaattttgcatcaaaagttactttggtgcatagaagagacaaactacgtgcagaacagattcttcagcaaagattattaaaccaccctaaaatagacgtaatatggagtcatgttgttcaagaattcataggctcagaagaacctttatctttaaataaaataaaactaaaaaatattaatgataatagtgaaaggatagttgaggcaacaggagcatttatagctattggtcatgatccttctacatctctttttaaaaataaaatccaaatggatgatgaaaattatataattacaaaatctgatagtactgaaacaagtataaaaggtgtttttgcagctggtgatgttaaagataaaattttcaggcaagcagtaactgctgctggaatgggttgtatggctgctttagaggctgaaaagtttattgcagaaaactattaac

SEQ ID NO: 223779 - DNA, 472 bp, Unknown
  Bacterial polypeptide expressing nucleotide sequence isolated from the Sargasso Sea
aatgaaaccaaaaacaattgaaaatgtaactataattggatctggccctgcaggttatacagcagcaatatatgcagcacgttcaggcctgaacccattaatgatctcaggacttgagccgggagggcaactgatgattacaacagatgttgagaatttccctggatttgaaaaacctatacaaggcccctggctaatggagcaaatgcaaaaacaagctttatcagttggtgcaagagttgagttaggcatggtcactagcgtaaattttaaaaattttccttttgaaatttctaccgaaaaaaaaaaaatcttttcttactcaaccattatatccacaggagctcaagctaggtggttggacgtagatggagaaaaaaaatatagaggtcatggagtatctgcatgcgcaacctgcgatggttttttctttaaaaataaaacggttgcagtaattggaggaggtaatact

SEQ ID NO: 223780 - DNA, 889 bp, Unknown
  Bacterial polypeptide expressing nucleotide sequence isolated from the Sargasso Sea
tatgaatcaaaatccaactaaacacacaaaagtgttaataattgggtctggcccagccggatatactgcagcagtttatgctgcaagagctatgttgaatccaattttagttcatggaatggaacctggtggacaattaactacaactacagatgttgagaattatcctggatttgcaaaagtaattcaagggccttggctgatggaccaaatgaaggatcaagctaaagctgttggaactgaaatgattgaagatcatatttcatctgttaattttaagtctaagccttttgaagctattggtgaaagtggtaaaaaatatactgcagattcaattatcatttccacaggagctcaagcaagatggttaaatctcgagtctgaaaaaaaatttagaggctttggagtttctgcatgtgctacatgtgacggtttcttctttaaagaaaaaactgttgcggtagttgggggtggaaatgctgccgttgaagaagcaatgtttctcacaaaatttgcatcaaaagtaaaactaatacatagaagagataagttacgggcagaaaaaatgcttcaaaaaaaactcatggataacaaaaaaattgaaattatttgggactcagtcgttgaagaaattgtaggagatgaaaaccctaaaaatgttaaaggcttaaaaatcaaaaatgttaagaataacaacatgagtgatttaaaaatagatggattatttattgcgattggtcatgatcctgcaactcaactgtttaaagatcaattaaaaatggataaggaaggttatttgattacaaagcctgactccacagaaacaaatgttccaggaatatttgctgctggcgatgtgaaagacaaaatttttaagacagctgttaca

SEQ ID NO: 223781 - DNA, 919 bp, Unknown
  Bacterial polypeptide expressing nucleotide sequence isolated from the Sargasso Sea
aatgagtcaaaataaagaacatcaaactaaagtattaataattggttctggaccagctggatatactgcagctgtgtatgcggctagagcaatgctaaaaccaataatggttgcaggtttcgaaccaggcggacaattaactacaaccaccgatgttgaaaattaccctggtttttcaaaagtgatacaaggtccatggctaatggatgagatgaagaaacaagcagaagcggttggaacaatatttattaatgatgttgtaaaaaaagttgatacctcaaataaaccttttgtatctgaaactgagaatggaaaagtttttaaaagtgatagcataataattgcaaccggtgctcaagcaagatggcttaaaatacccaacgaagaaaagtttagaggttttggaataagcgcctgtgccacgtgtgacggtttcttctataaagataaaaaggttgcggtagttggtggtggtaatgctgcagttgaagaggcattattcttaactaaatttgcatcaaatgtaacattaattcatagaagagataacttgagagccgaaaaaatgttacaagaaaaacttaagagtaataaaaaaattaatattatttgggataccatagttgaaaaagcgaatggtgaagataatcctaaaagtttaaattcaattacgattaaaaataaaaaaagtggtgaagtgaaagatttaaaaattgatgggttattcgttgcaattggtcacgacccagcaacaaaaatttttaaagataaaataaatatggataatgaaggttatattttaacaaagccggactcgacaagtacaaatgtaccaggagtatttgctgcaggtgatgtaaaagacaaatatacagacaagcagttacagctgctggtatgggttgtatggctgcgctcg

SEQ ID NO: 223782 - DNA, 482 bp, Unknown
  Bacterial polypeptide expressing nucleotide sequence isolated from the Sargasso Sea
tatgagtgaaaatccaactaaacacacaaaagtgttaataattgggtcaggtccagctggatatacagcagcaatttatgctgcaagagcaatgttaaaaccaatattagttcatggtatggaacctggtggccaattaacaacaacaactgatgttgaaaatttccctggatttaaagatgtaatacaagggccatggcttatggatcaaatgaaaggtcaagcagaagtagttgggactgaaatgattcaagatcatattgcatcggtggacttaaaatctaagccgtttaaagctgttggagatagtggtcaaatttatgaggcagactcaattattatatcaacaggagctcaagcaagatggttaaatattgactcagaacaaagctttagaggttttggtgtatctgcatgtgcaacatgtgatggatttttctttaaagacaaaactgtagcagttgttgggggtggaaatgctg

SEQ ID NO: 223783 - DNA, 952 bp, Unknown
  Bacterial polypeptide expressing nucleotide sequence isolated from the Sargasso Sea
ggttcaggtcctgcaggatatacagctgcaatttatgcagcaagagcaaatcttcaaccattgctcgtcacaggatttaattctggtggaattcctggtggccaattaatgactacaacatttgttgaaaattatccaggttttccagatggtgtacttggtcctgaattaatggatctaatgaaagctcaagccgaaagatggggtactaatttatacgaaagtgatgttgtctcaataaatactgattcacatccctttgaattaaaaactttagaaggaactataaaatctaactcaattattattgcaactggagcaagtgcaaatagattaggtgtgataaatgaagataaattctggagtaaaggaataagtgcgtgtgcaatatgtgatggagcaaccccacaatttagaggtgaagaattagctgttattggagggggtgactctgcatgtgaagaagcagcatatctcacaaagtatggaagcaaagtgcatttgattgttagatcagaaaaattaagggctagcgcagcaatggtagatagagtaaaagctaatccaaagatagaaattcattggaacacaaaagttaataaagcggatggctctgaatggcttgagaaaatagaaactattcaccctctagaaggtaaaggggaaattaatataaaaggtcttttttacgcgatagggcacacaccaaatacaaagttcttagccaacaaaattgatttagataataaaggatatattgcttgcaaatcaggaaggccagaaacatctattgaaggcatcttcgcagcaggtgacgttgttgattctgagtggagacaaggagttaccgccgcaggaactgggtgcatggcagcattagctaccgaaaggtggctagccgagaaaaacttagcaaaaactatagtcagagaaacaccagaaccagaaaaaa

SEQ ID NO: 223784 - DNA, 879 bp, Unknown
  Bacterial polypeptide expressing nucleotide sequence isolated from the Sargasso Sea
tggtccagctggctatactgctgcaatatatgctgctagagcccttcttaaaccaatattggtcttcggatctgaaccgggtggacaacttacaacaacaacagatgttgagaattttcctggttttgcaaaagtaattcaaggaccttggttgatggaagaaatgaaaggccaagctcaagctgtaggtacggagatgatacaagatcatattaaaaaagttgatctttcaaaaaaacctttttcagctcatggagatagtggtcaagtttatactgctgatagcattattatttctacaggcgctcaagcaagatggttaaatttaaaatctgaacaaaaatttaggggatttggagtgtctgcttgtgcaacatgtgatggttttttctttaaagaaaaagaagttgctgtagttgggggtggaaacgctgcagtagaggaagcgatgtttttaactaaatttgcttcaaaagttcatctaatacacagaagaaatgagttaagagcagaaaaattattacaagaaaaacttaaagctaacaaaaaaattcaaatcatttgggatagtgtagttgaagaagtaatgggaaaaaatgagcccaaaggagttgatggaataaaaataaaaaatgtaaaaactaataaaactactgaacttaaagttgatggtttatttatagcaataggtcacgacccagctacagctttatttaaagatcaattaaaaatggataaagaaggttatttaatcactaaaccagactcaactattacaaatataccaggagtatttgctgctggagatgtcaaagataaaattttcagacaagcagtaactgctgctgggatgggttgtatggctgcactggaagctga

SEQ ID NO: 223785 - DNA, 918 bp, Unknown
  Bacterial polypeptide expressing nucleotide sequence isolated from the Sargasso Sea
ttattcttggatcaggtcctgccggctatacagcagctatttatgcggctagagctatgcttaaaccaatacttgttcatggttctcaacctgagggacaattaactaccactacagatgttgaaaattatcctggatactcaaaagtgattcaggggccatggctaatggatgaaatgaaaggtcaagctgaagcagttggcacagagatgatacaagatcatataagtaaagttgacttaagaaaaaaaccttttacagcaacaggagatagtggtcaggtttacactgcagatagttttataatttcaacaggagcacaagctagatggttaaatttaaaatctgaacaagaatttagaggatttggagtttcagcatgtgctacttgtgacgggtttttctttaaagaaaaagaagtggctgtagttggtgggggaaacgccgccgttgaggaagcaatgtttctaactaaatttgcttcaaaggtttatttaatacataggagaaatgaacttagggcagaaaaaatgcttcaagcaaaattaaaatctaataagaaaatagaaattatttgggatactgtagttgaagatgttatcggcactaaagagccgaagactgttaatgcattaaaaattaaaaatgtaaaagataataaagttaaagagcttaaagttgatggtttatttattgccataggtcatgatccagcaacatctttgtttaaagatcaacttaatatggacaaagaagggtatttaattacaaaacctgactctactgaaacaaatattccaggagtttttgctgcaggagacgtaaaggataaaatttttagacaagctgttaccgctgcaggaatgggttgtatgtcagcacttgaagctgaaaagtatctatcagagactagttaag

SEQ ID NO: 223786 - DNA, 667 bp, Unknown
  Bacterial polypeptide expressing nucleotide sequence isolated from the Sargasso Sea
aagccttttaatttgtcaggtacatcaaattacacctgtgatgcattattaatttcaacaggtgccagcgcaatgtatttagggctgccgtctgaaaaggagtttttaggcaaaggagtttctgcttgtgcaacatgtgatggatttttttacaaagaccaagaagttgccgttattggtgggggtaatactgctgtagaggaagcattatatctatcgaggatatgttcaaaagtttaccttattcataggagagatgaattaagagctgagaaaattcttcaagatagagtattcgatcaagaaaaagctggaaaaattgaaattctttgggatacgcaacttaaagaagtagttggtgatgatatgggagtaacgggagtaaaacttgataacaaagggaatgaaataacaaaagatgtaatgggtgtctttattgcgattggtcacaaacctaatactgaaatttttgaaaaccaattagagatggataatggatatattattatcaaatctggattaaatggttctgtcacctcagcctcaattgaaggtgtttttgctgcaggggatgtatctgatcaaatttatagacaggctgtcacgtcagctggttttggctgcatggctgcattagatgcagaaaagtatttatctgaaaaatagt

SEQ ID NO: 223787 - DNA, 451 bp, Unknown
  Bacterial polypeptide expressing nucleotide sequence isolated from the Sargasso Sea
tatgagtgaaaatccaactaaacacacaaaagtgttaataattgggtcaggtcctgctggatatacagcagcaatttatgctgcgagagcaatgttaaaaccaatattagttcatggtatggaacctggtggccaattaacaacaacaactgatgttgaaaattttcctggatttaaagatgtaatccagggcccatggcttatggatcaaatgaaaggtcaggcagaagtagttgggactgaaatgattcaagatcatattgcatcggtggacttaaaatctaagccgtttaaagctgttggagatagtggtcaaatttatgaggcagactcaattattatatcaacaggagctcaagcaagatggttaaatattgactcagaacaaagcttcagaggttttggtgtatctgcatgtgcaacatgtgatggatttttctttaaagacaaa

SEQ ID NO: 223788 - DNA, 672 bp, Unknown
  Bacterial polypeptide expressing nucleotide sequence isolated from the Sargasso Sea
attaaatcctgttattatcgctggagctgaacctggtggacaattaacaacaactactgaagtagaaaattggcctggcgacagtgatgatcttcaaggacctgatttaatggaaagaatgaaaaaacatgctgaaaaatttggtgttaaaattattaatgatcatatttcaaaggtaaatcttgagcagtcgccatttcttcttaatggaacaaattcttatgaagctgatacgctgataatagctactggtgcatctgctaaatatttaggtctgccatcagaacaagagtttcttggcaaaggtgtctcagcatgtgcaacttgtgatggtttcttttataaagaccaagaggtagctgtaattggcggaggaaatactgcagctgaagaggcactttatctcgctaatatttgttctaaggtacatttagttcatagaagagacgaattaagggctgagaaaatacttcaagatagagtatttaagaaagctgatgaaggggtaattaaaatatactgggacaatgaattagaggaggttctaggagatgctagcggtgttacaggtattaaactaaaaaataaagatagttcaatgtcgtcgattgatttacatggagtattcattgcaattgggcataacccaaataccgaaatatttgatggtca

SEQ ID NO: 223789 - DNA, 463 bp, Unknown
  Bacterial polypeptide expressing nucleotide sequence isolated from the Sargasso Sea
atgagtcaaaatccaactaaacacacaaaagtgttaataattggatccggccccgccggatacactgcagcagtttatgctgctcgtgcaatgttaagtcccattttggtttatggatctgagccaggaggacaattaacgactacaactgatgttgaaaattatccaggattttctgaagttattcaagggccgtggttaatggatcagatgaaggaacaagcaaaagcagttggaactgaaatgattgaggaccatattggatctgtaaatttaaaaagctcaccgtttgaagcaattggtgatagtggtcagaaatatactgctgatagtattattatatctactggggcacaagctagatggttaaatataaaatcagagcaggaatttagaggttttggagtttcagcatgtgctacatgcgatggtttcttttttaaagataaagaggttgctgtag

SEQ ID NO: 223790 - DNA, 478 bp, Unknown
  Bacterial polypeptide expressing nucleotide sequence isolated from the Sargasso Sea
tatgagtcaaaatccaactaaacacacaaaagtgttaataattggatctggtcctgccggatacacagcagcagtttatgcggctcgtgcaatgttaaatcctattttagtttatggttctgaacctggtggtcaattaacaacaactactgatgttgaaaattatccaggattttctgaagttattcaaggtccatggttaatggatcaaatgaaagaacaagcaaaagcagttggaactgaaatgattgaagaccatattggatctgtaaatttaaaaagttcaccatttgaagcaattggtgatagtggtcagaaatatactgctgatagcattattatttctactggagctcaagcaagatggttaaatataaaatcagaacaggaatttagaggatttggagtttctgcttgtgcaacttgtgacggtttcttttttaaaaataaagaagttgctgtagttggaggaggtaat

SEQ ID NO: 223791 - DNA, 739 bp, Unknown
  Bacterial polypeptide expressing nucleotide sequence isolated from the Sargasso Sea
aatgaataaaattgaaaataatatccttattatcggatccgggccggcaggttataccgctgcaatatatgcagcaagagcaaacctaaagcctcacttagtttctggcttggaaccaggtgggcaacttactattacaactgatgttgaaaattatccaggatttggtgatgtcatacaaggtccatggcttatggaagaaatgaaaaaacaagcacttaatgtaggtacaatatttcataatgatattgtcacatctataaattttaataataatccatttgtatcaaaaactgagtccggaaaagagtttgtttcaaaagccgttattattgcaactggtgctcaagcaagatggttgaatatagaaagtgaaagtaaatttaaaggttttggtatatcagcatgtgctacttgtgatggatttttttttaaagaccaaaaagttattgttgtaggaggtggaaatagtgcagtagaagaagcattatttcttactaagttcgcctcgaaggtcatacttgttcatcgaagaaactcattaagggctgaaaaaatacttcaagatagactttttaaaaataataaaattgaaatattatgggacaataaagttattgaatttttaggggataataatcctctaactttaaaacaagtcgttttagagaatactaaaaatggtgaaagatctaatattgatataagtggtgcatttattgcgattggtcatgatcca

SEQ ID NO: 223792 - DNA, 583 bp, Unknown
  Bacterial polypeptide expressing nucleotide sequence isolated from the Sargasso Sea
tatgagtcaaaatccaactaaacacacaaaagtgttaataattggatctggtccagccggatacacagcagcggtatatgctgctcgtgcaatgttaaatccaattttagtttatggtgcagaacctggtggacaattaacaactacaacagatgtagagaattatccgggatttgcagacgtaatccagggtccatggttaatggatcaaatgaaagatcaagctaaagcagttggaacagaaatgattgaggatcatattgcatctgtgaatttgaaatcacaaccttttgaagcaatcggcgacagtggacaaaaatatagtgctgatagcataattatttcaacaggtgctcaagcaagatggttaaacataaaatcagaacaagaatttagaggctttggagtttcggcttgtgcaacatgtgatggtttctttttcaaagataaagaagttgcggtagttggtggtggaaatgctgctgttgaagaggcaatgttcctcacaaaatttgcatcaaaagttaaattgatccatagacgagatagtttaagagcagagaaaatgcttcaaaaaaaatta

SEQ ID NO: 223793 - DNA, 889 bp, Unknown
  Bacterial polypeptide expressing nucleotide sequence isolated from the Sargasso Sea
ctcactgctgcgacatatgctgcccgagccaacctggaaccgttggtttttgagggtagtcaacctggtggtcaattaaccattaccaccgatgttgaaaattatcccggattccctgaaggtatacttggaccagagctgatggataaatttcgtgatcaggccaaacgctttggtgcagaatgtcattttaaacatgttaccaaggttgatcttagtgaccgtccatttaaggtgtgggttgcagatgaaacctataccagtgataccattattattgcgactggagctacggcacgtttattgggcctggaatctgaaacaagactaatgggtcacggcgtctcagcatgtgcaacgtgcgatggattcttttttaaagataaaaaggtgtttgttattggtggtggagattctgctatggaagaagcgaactttcttacaaagtttgcgtcagaagtgcaaattgtacatcgtcgtgatgccttaagagcatcaaaaatcatgcaggaccgcataatgaataatcccaagatcactatacaatggaatacagcacttgaggacatagaggggaatgaagctaatggtgtaagtggtgtgagcttgcgggatacgtgcacagatgaagttagacaggagccgtgtgatggtgtattccttgccattggtcatgtccctaacacggaattatttgatgcagtgctggatcttgatgatcaaaaatacatccgtaccattgatgccagcagcaggacttccattgccggagtatttgcttgtggagatgtccaagatcatgtctatcgacaagcaattactgctgcaggaactggttgtatggcagctatggatgcagaaaaatatctggagtccttagcggcttagt

SEQ ID NO: 223794 - DNA, 514 bp, Unknown
  Bacterial polypeptide expressing nucleotide sequence isolated from the Sargasso Sea
ttgctcggcgtatcggctgagcaaaagccgaagcagcgccattttgaccttctcgtgatcggtggcggctctggtgggctcgccgcctcgaaggctgccgcggagcttgggaagcaggttgctgtgtgcaattttgtgaaaccatcgccgcaaggaaccacctgggggctgggcggcacctgtgtcaacgtcggctgcattccgaagaagctgatgcaccatgcggcgcagctcggggagtcacgcaaggactcgatctggtatggctgggaggtgccaatcgacgagggcgaggatcgaaatcgcgaccagtttctcgtcccagaggccaaacacagctgggagacgctggtgaagaatgtgcaaggctacatcaagtcgaccaactttgcgtacaaggcgcagtgccggagcaacaatgtcgagtatctcgacgcgttcgcgagcttcaccagtcccacgagcgtcgaggccctctacaagacaggagagacgaccaccatcaccgccgatg

SEQ ID NO: 223795 - DNA, 259 bp, Unknown
  Bacterial polypeptide expressing nucleotide sequence isolated from the Sargasso Sea
gaccttcaattatctgggtttatttatagccataggacataaaccaaatactgatttgttttctggtcaacttgatatgaacaacggttatataaaaatacactcgggtcttgatggaaattcaaccgcaacgagcattcctggtgtatttgctgcaggtgatgtttcagatcatatttataggcaagctataacctcagctggatccggatgtatggctgctttagatgctgaaaaatatctagcggaacttaaatga

SEQ ID NO: 223796 - DNA, 592 bp, Unknown
  Bacterial polypeptide expressing nucleotide sequence isolated from the Sargasso Sea
atgagcacatcctcacaccatcgcctgataattcttgggtccgggccagcaggctataccgccgctgtgtatgccgctcgcgccaatctcaaccctgtcgtgattaccggtctgcaacagggcgggcaattaacgaccaccacagaggtggaaaattggccgggcgggactcacgatttacagggtccgcagctgatgcagcaaatgcaagagcacgtggaacggctcgaggcaagcgtggtatttgatcacatcgagagcgtcgatctgtctgcgcgccccgtcacactgaagggtactgcggcgtacacttgcgacgccctgattatcgccacaggcgcctcggcacagtatttaggcctcccctctgaatcagcctttatgggcaaaggcgtcagcgcctgcgcgacctgcgacgggttcttctatcgcaatcaggaggtggcggtcgtgggcggcggcaataccgctgtcgaagaggcactttatctcagcaacctctgctccaaggtgcacttgattcaccgtcgcgacagtctgcgcgccgagaaaattctgcaggaccgactgatgcagagagcggaggaaggaa

SEQ ID NO: 223797 - DNA, 616 bp, Unknown
  Bacterial polypeptide expressing nucleotide sequence isolated from the Sargasso Sea
atgagacaaaatccaactaaacacacaaaagtgttaataattggatctggtccagccggatacacagcagcagtttatgctgctcgtgctatgctaaatcctattttagtttatggcgcagaaccaggtggacaattaacaactactacagacgttgaaaattttccaggatttgctgacgtaattcaaggaccatggttaatggatcaaatgaaagagcaagctaaagctgtaggaacagagatgattgaagatcatattgcatcggtgaatttaaaatcccaaccttttgaagcaattggtgatagtggtcaaaaatatactgctgatagtataattatttcaactggtgctcaagcaagatggttaaatataaaatctgaacaagaattcagagggtacggagtctctgcatgtgcaacgtgtgatggtttcttttttaaagataaggaagttgctgtaattggtggaggtaatgctgctgttgaagaggcaatgtttcttacaaaatttgcgtcaaaagttaaattaatccacagacgtgacagtttgagggctgaaaaaatgcttcagaaaaaattgatggaaaataaaaaaatagaaattatttgggact

SEQ ID NO: 223798 - DNA, 690 bp, Unknown
  Bacterial polypeptide expressing nucleotide sequence isolated from the Sargasso Sea
tatgagtcaaaatccaactaaacacacaaaagtgttaataattgggtccggtccagccggatacactgctgctgtttatgctgcaagagctatgcttaaacctattatggtttcgggcatggagccaggtggacaattaacaaccacaactgatgtagaaaattatcctggatttgcagaagtaatacaaggaccctggttaatggaacaaatgcgagaccaagcgaaagctgtgggcactgaaatgattgaagatcatatttcttcagtaaatttaaaatctaaaccatttgaagctgtaggagatggtggtgaaaaatataccgctgactcaataataatttcaacaggagcccaagcaagatggctgaatatagagtctgaacaaaagtttagaggatttggtgtatcagcgtgcgcaacatgcgatgggtttttctttaaagaaaaaacagttgcagttgtaggaggaggaaatgctgctgttgaagaggcaatgtttttaacaaaatttgcttcaaaagttcagttaattcatagaagagatcagttaagagcagaaaaacttctacaaaaaaaattaatggaaaataaaaaaatagaaattatttgggacagtgtagttgaagaagtaattggtgatgaaaacccaaaaaatgttaagggattaaaaattaaaaatgtaaaaac

SEQ ID NO: 223799 - DNA, 593 bp, Unknown
  Bacterial polypeptide expressing nucleotide sequence isolated from the Sargasso Sea
catgtctaacaatcataacaaattaattatcttaggttcaggtccagctggttattcagcaagtatttatgcagctagagcaagtctaaatccaataattattgctggctctcaagaaggaggtcagcttacaaccacaactgatgtagaaaattggccgggtgatagtgatggtcttcaaggtccagaattaatggatagaatgaaaaaacattcacagcaatttggagtcgaaattgttaacgaccatataaatgaagttgatctatcctctagaccattcgtattaaaaggcactaattcatatacatgcgattctttaattatatcaacaggtgctagtgcgatgtatttggggcttccctcagaaaaagaatatttaggcagaggtgtttcagcatgtgcaacttgtgatggtttcttctataaagatcaagaagtagttgttattggcggaggaaatacagctgttgaagaggccttgtatctttcaagaatctgttcaaaagtttatttagttcacagaagagatgaattaagagctgaaaaaatattacaagaaagagtatttaaagaggagtctaatggaaaaa

SEQ ID NO: 223800 - DNA, 611 bp, Unknown
  Bacterial polypeptide expressing nucleotide sequence isolated from the Sargasso Sea
catggaaaatattaaaagaaaactcattattttggggtctggtccggccgggtatacagctgctgtgtatgctgctagagctggcttagaaccttgcttaataactgggatggaacaaggaggtcaacttacaaccactacagatgtagagaattggccaggtgatagcgatggtcttcagggtcctgaactgatggataggatgctaaaacatgtagaatcattagaagttgaagtaatctttgatcatattgaggatgcagatttatcttcaaaacccttttctttaacgggaaatgttagtagttatgacacagattctatgattattgcaacaggagcttctgcacagtatttaggtctagaaactgaacagcaatatatgggaaaaggtgtcagtgcgtgtgctacttgtgatgggttcttttataaagataaggatgttgccgttatcggaggtggcaatacagctgttgaagaagctttatatttatcaaatctctgttcttctgtaactcttatacacaggagggatacattaagagctgaaaaaatattacaagaaagattatttaaaaagcaacaagaaggtaatatcaaaattattttgg

SEQ ID NO: 223801 - DNA, 622 bp, Unknown
  Bacterial polypeptide expressing nucleotide sequence isolated from the Sargasso Sea
catacaaaagtgttaattcttggatcgggtcctgctggctacacagcggctatttatgcggccagagctatgcttaaaccgatacttgttcatggttctcaacccggaggacaattaactaccactacagatgttgaaaattaccctggatactcaaaagtgattcaggggccatggctaatggacgaaatgaaaggccaagcagaagctgtaggcacagaaatgatacaagatcatataagtaaagttgatttaacaaaaaaaccttttacagcaacaggtgatagtggtcaggtttacactgcagatagttttataatttcaacaggagcacaagcaagatggttgaatttgaagtctgaacaagagtttagagggtttggagtttcggcatgcgcgacttgcgacggatttttctttaaagaaaaagaagttgctgtagttggaggaggaaatgccgccgttgaagaagcaatgttcctaactaaatttgcttcaaaggtttatttaatacataggagaaacgaactcagggcagaaaaaatgcttcaagcaaaattaaaagcaaacaaaaaaatagaaataatttgggacagtgttgttgaagacgtattaggcacaa

SEQ ID NO: 223802 - DNA, 674 bp, Unknown
  Bacterial polypeptide expressing nucleotide sequence isolated from the Sargasso Sea
attatccgaacgacccttcaaactcatgggtagtcaaaattggtcatgtgattcacttatcatttcaactggagcgagtgcaaaatatctaggattaccatcagagaaagagtttttaggcagaggggtttctgcctgtgcaacgtgcgatggttttttctaccgtgatcaagaagttgctgtgattggaggcgggaatacagctgctgaagaagctttgtatctttcacgcatatgctcaaaggttcacctcgttcatcgaagggacaaacttagagcagaaaaaattcttcgagatagagtcgctaaagcagaaagtgaagggaaaattgagatgcattggaattctcaattaaatgaagtgctcggagacgaaaaaggagtccactcgattaaaatagtggctgataaagatagtaaaaagcttgaattaactggtgtctttatagctattggtcatcaccctaatactgaaatttttaaaggtcagcttgagatgaaaaatgattacatcactatcaaatcaggaacggatggcatggccacagctacgagtgtgcctggtgtttacgccgcaggagatgtttcagatcaaatttatcggcaggctattacttcagctggatttggatgcatggctgcactcgatgctgaaaagtttttatcagagtaat

SEQ ID NO: 223803 - DNA, 480 bp, Unknown
  Bacterial polypeptide expressing nucleotide sequence isolated from the Sargasso Sea
tatgaatcaaaatccaactaaacacacaaaagtgttaataattggatctggtccagccggatatacagctgcggtttatgctgcaagagcaatgttaaaacctattatggtttctggtatggagccgggtggacaattaactacaacaactgatgttgaaaactatccaggttttgctgaagtaattcaggggccatggttaatggaacaaatgcgagaccaagctaaagccgtaggtacggaaatgattgaagatcacatctcttcagtaaatttaaaatctaaaccatttgaggctataggggatggtggtcaaaaatatactgcagattcaattataatttcaactggagctcaggcaagatggttaaatattgagtctgaacaaaaatttagaggatttggagtatcagcttgtgcaacatgtgatgggtttttctttaaagataaaacggttgcagttgttggtggtggaaatgc

SEQ ID NO: 223804 - DNA, 628 bp, Unknown
  Bacterial polypeptide expressing nucleotide sequence isolated from the Sargasso Sea
aatgaataataaatcaacaaaacatacaaaagtgttaattcttggatctggaccagccggttatacagcagctatttatgcggctagagctatgcttaagcctatacttgttcatggttctcaacctggaggacaattaaccaccaccacggatgttgagaattaccctggatactcaaaagtgattcaggggccatggctaatggacgaaatgaaaggccaagccgaagctgtaggtacagagatgatacaagatcatataagtgaagttgatttaacaaaaaaaccttttacagcaaaaggtgatagtggtcaggtttacactgcagatagttttataatttcaacaggagcgcaagcaagatggttgaatttgaaatctgaacaagagtttagaggatttggagtttcggcatgcgcgacttgtgacggatttttctttaaagagaaagaagtggcagtagttggtggaggaaatgccgccgttgaagaggcaatgtttctaactaaatttgcttcaaaagtttatttaatacataggagaaacgaacttagggcagaaaaaatgcttcaagcaaaattaaaatctaataagaaaatagaaattattttgggatacagtagttga

SEQ ID NO: 223805 - DNA, 883 bp, Unknown
  Bacterial polypeptide expressing nucleotide sequence isolated from the Sargasso Sea
aatgaaagaaaaaattaataccgaagtactaattattggttctgggccagctggttatactgctgcaatttatgcagcacgggcaaaccttaagccacatttagtttctggtttagagccaggaggacaattaacaatcactactgatgttgaaaactatcctgggtatggagatacaattcaaggaccatggttaatggaagaaatgaaaaaacagtccttaaatgtaggtactattatccataatgatttggtaacagaagtagattttaattcttatccctttatttctaaaactgattcaggattaatttttgaaagtaaaactgttataatatctacaggtgctcaagcaagatggctcggcattaaaagtgaagaaaaatttaaaggatatggaatttcagcttgtgcaacttgtgatggatttttttttaaaaatcaaaaagttgctgttattggaggtggtaatagtgcagtagaagaagcactttatttaactaatttcgcttcgaaagtaacattaattcatagaagagacgaactaagagctgaaaaaattttacaagatagacttttccaaaatccaaaaattaatgttatttggaataaaactgtagaagagtttattggaaatgatataaaaccatctttagaatcactagctttaaaagatactaaagataactctgaatcaaagttaagtgtaaatggtgcctttgttgctataggtcatgatccttcaacttcgttatttatgaataaagttaaaatggatgaggataattatattattacaaaacctgatagcacagaaacaagtatacctggaatatatgcagctggtgatgtgaaagataaaatttataggcaagccgtcact

SEQ ID NO: 223806 - DNA, 453 bp, Unknown
  Bacterial polypeptide expressing nucleotide sequence isolated from the Sargasso Sea
tatgaatcaaaatccaactaaacacacaaaagtgttaataattggatctggtccagccgggtatacagctgcggtttatgctgcaagagcaatgttaaaacctattatggtttctggtatggagccaggtggacaattaactaccacaactgatgttgaaaattatcctggttttgccgaagtaattcaaggaccatggttgatggaacaaatgcgagaccaagctaaagctgtaggtacagaaatgattgaagatcacatctcttcagtaaatttaaaatcaaaaccttttgaagcaataggagatggtggtcaaaaatatactgcagattcaattataatttcaactggagctcaggcaagatggttgaatattgaatctgaacaaaaatttagaggatttggtgtttcagctttgtgcacgtgtgatggctttttctttaaagataaaac

SEQ ID NO: 223807 - DNA, 908 bp, Unknown
  Bacterial polypeptide expressing nucleotide sequence isolated from the Sargasso Sea
tgggtcaggcccagctggttatactgctgccgtttatgctgcaagagctatgctaaagccaatacttgttcatggcattcagccaggtggccagctaaccactacaacagatgttgaaaactatccaggttttgcaaatgtcattcaaggtccatggttaatggatcaaatgaaagaacaggctcaagtggtaggtacagagatgattgaagatcatatagcttctgtaaatttaaaaaataaaccatttgaagcatttggtgagagtggacagaaatacactgcagacagcattataatttctactggagcacaagcaagatggttaaatttaaaatcagagcaagatttaagaggtttcggtgtttctgcatgcgcaacttgtgatggtttcttttttaaagagaaaacagttgctgttgttggaggtggaaatgcagcagttgaggaagcaatgtttttaacgaaatttgcttctaaagtgaaattaattcatagaagagataagttaagagctgaaaaaatgctccaaaaaaaattgatggaaaataaaaaaattgaaataatttgggacagtgttgtagaagatgttttgggtgacaaagatccaaaaaatgttacaggaataaagattaaaaatgttaagacaaataattttcaagaattgaaagttgacggtttgtttattgccatcggtcatgacccagccactcaattatttaaagatcaacttaaaatggataaagaaggatatttgataacaaaacctgattcaactgagacaaatatatctggagtttttgctgcaggagatgtgaaagataaaatctttagacaggcagtaactgcagctggaatgggctgtatggcagcccttgaagcggaaaaacatttatctcatacataat

SEQ ID NO: 223808 - DNA, 799 bp, Unknown
  Bacterial polypeptide expressing nucleotide sequence isolated from the Sargasso Sea
tatgagtcaaaatccaactaaacacacaaaagtgttaataattgggtctggtccagctggatatactgcagctgtctatgcagcaagagcaatgttaaatccaattttagtttatggttcagagccaggaggacaattaacaacaacaactgatgttgaaaattttccaggatttgctgatgttattcaaggtccatggcttatggatcaaatgaaagagcaagcaaaagcggttggaacagaaatgattgaagatcacataagttctgtcgatttaaaaaaaacaccttttgaagcggttggggacactggacaaaaatacactgctgatagcattataatttcaacaggtgcacaagcaagatggttaaatttaaaatctgaacaagagttcagagggtttggagtatctgcatgtgcaacatgtgatggttttttctttaaagacaaagaggttgcggttgttggtgggggcaatgcagctgttgaagaagcgatgtttcttactaaatttgcatcaaaagtaaaattaattcatagaagagataatttaagagctgaaaaaatgcttcaaaaaaaacttatggagaataaaaaaattgaaattatttgggatagcgttgttgaagatgtaattggtgataaagatcccaaaaatgttaaaggaattaaaattaaaaatgttaaaacaaataaaattgatgaaattaaattagatggtgttttcatcgcaattggacatgatccagctacacaattatttaaaaatcaactaaacatggataatgagggctattta

SEQ ID NO: 223809 - DNA, 910 bp, Unknown
  Bacterial polypeptide expressing nucleotide sequence isolated from the Sargasso Sea
gggccagctggttatacagctgctatatatgcggctcgtgcaaatcttcagcctcatctagtttctggattagagcctgggggacaactcaccataacaactgatgttgaaaactatcctggatttggaaatgtaattcaaggaccttggttaatggaagaaatgaaaaaacaagcacttaatgttggtacaatatttcataatgatattgttacatcagtgaattttgacaacaatccattcatatctataacagaatcaggtaaagaatttatatcgaaatctataattatcgcaactggtgctcaagcgagatggttaaacatagatagcgaaaacaaattcaaaggatttggcatatctgcatgtgcgacttgtgatggatttttttttaaagatcaaaaagttattgtcgttggaggtggaaacagtgcggttgaggaagcattatatctcactaagtttgcctcaaaagttatacttgttcatagaagagactcattaagagctgaaaaaatacttcaagataggctttttaaaaatgaaaaaattgagctgttgtgggacagtaaagttattgaatttgttggtaaagaaaatccacaaactttaaaacaagttatcttagaaaatactaaaaatggaaaacaatcaaagattgatattgatggagcatttattgcaattggtcatgatcctgctacttcattatttaaaggtaaagtagatatggataatgaaaattatattattacaaaaaatgatagcactgaaactagtataaaaggtgtatttgcagcaggagatgtaaaagacaaaatatacaggcaggctgtaactgcagcaggaatgggatgtatggctgctttagaagctgagaagtttattcagaaagtaattagcctgacga

SEQ ID NO: 223810 - DNA, 931 bp, Unknown
  Bacterial polypeptide expressing nucleotide sequence isolated from the Sargasso Sea
aatgaataataaatcaacaaaacatacaaaagtgttaattcttggatctggaccagccggttatacagcagctatttatgcggctagagctatgcttaagcctatacttgttcatggttctcaacctggaggacaattaaccaccaccacggatgttgagaattaccctggatactcaaaagtgattcaggggccatggctaatggacgaaatgaaaggccaagccgaggctgtaggtacagagatgatacaagatcatataagtgaagttgatttaacaaaaaaaccttttacagcaaaaggtgatagtggtcaggtttacactgcagatagttttataatttcaacaggagcgcaagcaagatggttgaatttgaaatctgaacaagagtttagaggatttggagtttcggcatgcgcgacttgtgacggatttttctttaaagagaaagaagtggcagtagttggtggaggaaatgccgccgttgaagaggcaatgtttctaactaaatttgcttcaaaagtttatttaatacataggagaaacgaacttagggcagaaaaaatgcttcaagcaaaattaaaatctaataagaaaatagaaattatttgggatacagtagttgaggatgttattggtactaaagagccaaaaactgtaaatgcactaaagattaaaaatgtaaaagataataaagttaaagagcttaaagttgatggtttatttattgccataggtcatgacccagctacatctttatttaaagatcaattaaaaatggataaagagggatacctaataactaaaccagactcaacagaaacaaacataccaggagtttttgcagctggcgatgtaaagataaaatttttagacaagctgttactgctgctggaatgggttgtatgtcggcacttgaggctgaaaata

SEQ ID NO: 223811 - DNA, 529 bp, Unknown
  Bacterial polypeptide expressing nucleotide sequence isolated from the Sargasso Sea
atgagtcaaaatccaactaaacacacaaaagtgttaataattggatctggtcctgccggatacacagcagcagtttatgcggctcgagcgatgttaaatccaattttagtttatggttctgaacctggtggtcaattaacaaccacaacagatgtagagaattatccaggatttgcagatgtaatccagggtccatggttaatggatcaaatgaaagatcaagctaaagcagtcggaactgaaatgattgaggatcatattgcatctgtgaatttgaaatcacaaccttttgaagcaatcggagacagtggacagaaatatagtgctgatagcataattatttcaacaggtgctcaagcaagatggttaaacataaaatcagaacaagaatttagaggctttggagtttcagcttgtgcaacatgtgatggtttctttttcaaggataaagaggttgcggtagtcggtggtggaaatgctgctgttgaagaggcaatgtttcttacaaaatttgcatcaaaaagttaaa

SEQ ID NO: 223812 - DNA, 573 bp, Unknown
  Bacterial polypeptide expressing nucleotide sequence isolated from the Sargasso Sea
tatgaataataaatcatctaaacatacaaaagtgttaattcttggatctggtccagcaggctatacagcggcaatatatgcgtcaagagccatgttaaagcccattttagtttatggttcacaaccaggaggtcaattatcaacaactacggatgttgaaaattacccaggctactcaaaggtcattcagggcccatggttaatggaagagatgaaaggtcaagctgaagcagttggaactgaaatgattcaagatcatataaacaaagttgatttatcagtaaaaccttttaaagctgtaggagatagtggtaacgtttatactgctgactcgttgataatatctaccggggcacaagctagatggttaaacataaaatctgaacaagattttagaggatttggtgtttctgcttgcgcaacatgtgatggatttttttttaaagataaagaagttgcagttgttggtggggggaatgctgcagttgaagaagcaatgtttttgacaaaattcgcatctaaagtaaaacttattcatagaagaaatgaattgagggcagagaagatgcttca

SEQ ID NO: 223813 - DNA, 828 bp, Unknown
  Bacterial polypeptide expressing nucleotide sequence isolated from the Sargasso Sea
aatggaaaataaagaaaaaacttcaaatatagaaaatgtcgtaattataggttcagggccagcaggttatacagctgcaatatatgcagcaagagcaaatcttcaacctcttttagtgacaggttttaattccggggggattcctggcggacaattaatgactacaacttttgttgaaaattatccaggtttccctgatggagtacttggacctgaattgatggacttaatgaaggctcaagcagaaagatggggtacaaatttatatgagagtgatgttgtttcaattaatactcatttgcgtccctttgaattaaaaactttagacgggactataacagcgaactcaattattattgctactggagcaagtgcaaatcgattgggagtgataaatgaagataaattttggagtaaaggaataagtgcttgtgcaatttgtgatggagctaccccacaatttagagatgaagaattagctgtcataggtggaggggactctgcatgtgaagaagcagcataccttacaaaatatggaagcaaagtgcatttgattgttagatcagaaaagttaagagctagcgcagcaatggttgatagagtaaaagctaatccaaaaattgaaatccactggaacacaatagtggagaaagctaatggttctgaatggcttgagagaatagaaattattcactcgaatgaaggtaaaggcgaaatcaatataaagggtcttttttatgccatagggcacacaccaaatacaaagttcttgtcgaacaaaattgaacttgataataaaggatatattgcttgtaaatcaggcaggcc

SEQ ID NO: 223814 - DNA, 771 bp, Unknown
  Bacterial polypeptide expressing nucleotide sequence isolated from the Sargasso Sea
aagggccggaactaatggatagaatgttaaaacatgttgaatcgttggaggttgaagtaatttttgaccacattgaatcaacagatctgtcctctaaaccgtttaccctaactggaaatgtgaattcctacatatctgattctttaataatagctacaggtgcttctgctcagtatttaggactggatagtgaacaagcctatatgggcaaaggtgtcagcgcttgcgctacttgcgacggtttcttttataaagataaagacgtagctgtcatcggcggtggaaatacagcagttgaagaggctttatacctctctaacttatgctccacggtgactttaatacacagaagggattcactaagagcagaaaagattcttcaagagagattgtttaagaaagaaaaagaaggaaacgtaaaaataatctgggaccatgaattagttgaagttttaggtgacgatgctgtagtaaatggaatcaagataaaaagtaccaaagattcaagtgagacagaactaagcctatctggattattcattgctattggccacaagcccaacactgacttatttgtagaccaaatagatatggaaaatggctacttaaaaatcatatctggaacagatggaaatagtactggaactagcattccaggagtttttgctgctggagatgtttctgaccatatttaccgacaagcaataacttctgctggatctgggtgcatggctgccctagatgctgaaaagtatttagcggaattatgaa

SEQ ID NO: 223815 - DNA, 287 bp, Unknown
  Bacterial polypeptide expressing nucleotide sequence isolated from the Sargasso Sea
tatcaaactaaaaaataaagatagctcatcatcaataatagatttacatggtgtcttcattgcaattggacacaatccaaatactgaaatattcgatggtcaactagaaatgaaagacggatatattgtcatcaagtctggtttagatggttcagttacacaaacatctgtaccaggagttttcgcagctggtgatgtcgctgataaagtttacaggcaagcaattacctctgcagggtttggatgtatggctgctttagatgcagagaagtttttatctgaataaa

SEQ ID NO: 223816 - DNA, 547 bp, Unknown
  Bacterial polypeptide expressing nucleotide sequence isolated from the Sargasso Sea
tatgagtgaaaaaccaactaaacatacaaaagtgttaataattggatctggtccagcgggttacactgcagctgtttatgctgcaagagcaatgctgaaaccaatgttagttgcaggtatgcaaccaggcggtcaacttacaattacaactgatgttgaaaactatccaggatttgctgatgtaatacaaggaccatggctaatggaacaaatgagagagcaagcaaaagcagtgggaacagatttagttgaagatcatatacaatctgtaaatttaaaatctaaaccttttgaagcaatcggcgatgggggacagaaatatactgcagactcaattataatttcaacaggtgcacaagcaagatggctaaatattgagtctgaagaaaaatttaaaggatttggagtttcggcatgtgcaacatgcgatggtttcttttttaaagataaaacagttgcagtagttggaggtggtaatgcagcagttgaagaagcaatgtttcttacaaaatttgcctcaaaagtacagttaattcacagaagaaat

SEQ ID NO: 223817 - DNA, 616 bp, Unknown
  Bacterial polypeptide expressing nucleotide sequence isolated from the Sargasso Sea
atgagtgaaaaaccaactaaacatacaaaagtgttaataattggatctggtccagctggctacactgctgcggtttatgcagcaagagctatgctgaaaccaatgctagttgcaggtatgcagccaggtggtcaactaacaattacaactgatgttgagaactatccaggttttgctgatgttatacaaggaccatggttaatggaacaaatgagagaacaagcaaaggcagttggaacagatttagttgaagaccacatacaatctgtgaatttaaaatctaaaccttttgaagcaataggcgatggtgggcaaaaatatactgcagactcaattataatttcaacaggtgctcaagcaagatggttaaacattgaatctgaagaaaaatttaaaggatttggagtttcagcatgtgcaacatgcgatggtttctttttcaaagataaaacagttgcagtagttggtggtggtaatgcagcagttgaggaggcaatattccttacaaaatttgcatcaaaagtacaattaattcatagaagaaatgaactaagagcagaaaaacttttacaaaaaaaattaatggaaaataaaaaaattgagattatttgggact

SEQ ID NO: 223818 - DNA, 559 bp, Unknown
  Bacterial polypeptide expressing nucleotide sequence isolated from the Sargasso Sea
tttgggtaaaggagtttcagcatgtgcaacttgtgatggcttcttttataaaaataaaaaagttcttgttgttggtggaggcaatactgcagttgaggaagctctttatttatcaaatatagcatcgtcggtaactttaattcacagaagagatagtttaagggctgaaaaaattctacaagacaaattatttaaaaaagagaatattgaaattatgtgggattcagagttagccgaagttaaaggtgataatatgggtgtaacttctgctgttataaaatcaaaaaaagattcgagtgaacaagatattgcttttgatggtgttttcattgcgattgggcataaaccaaatacagatatatttgctgatcagttagatatggatgaaggttatattattgttaaaaatgattctgattatgcaactcaatcaaacgtaccaggtgtttttgctgcaggtgatgtgacagataaaatatataggcaggctatcacatctgctggctcgggttgcatggcagcactagatgcagaaaaatttattgattctttggaataa

SEQ ID NO: 223819 - DNA, 688 bp, Unknown
  Bacterial polypeptide expressing nucleotide sequence isolated from the Sargasso Sea
tatgagtgaaaaaccaactaaacatacaaaagtgttaataattggatctggtccagcgggctacactgctgcagtttatgcagcaagagctatgcttaagccaatgctagttgctggtatgcaaccaggtggtcaattaacaatcacaactgatgttgagaactacccaggctttgccgatgtgatacaaggaccatggttaatggaacaaatgagagagcaagcaaaagcagtaggaacagatttggttgaagatcatattcaatctgtaaatctaaaatctaaaccttttgaggcaattggcgacggtggacaaaaatatactgcagactcaattataatttcaacaggcgcacaggcaagatggttaaatattgaatctgaagaaaaatttaaaggatttggagtttcggcatgtgctacatgtgatggtttcttttttaaagataaaacagtggcagtagttggaggtggtaatgcagcagttgaagaggcaatgtttcttacaaaatttgcctcaaaagtacagttaattcacaggagaaatgaacttagagcagaaaaacttttgcaaaaaaaattaatggaaaacaaaaaaattgaaattatctgggactctgttgttgaggaagtaataggcgatgaagatccaaaaaatgtcaaagggttaaaaatcaaaaatattaaa

SEQ ID NO: 223820 - DNA, 946 bp, Unknown
  Bacterial polypeptide expressing nucleotide sequence isolated from the Sargasso Sea
atgaaagaaatagaaaaaaacttggttataattggttctggttcagctggtttgacagcagcaatttatgcggcacgtgctaacctctctccattagtaattgagggactccaaccaggtggtcagttaacaattactactgatgttgaaaattatcctggtttttctgatattgttcaaggtccgtggttgatggatcaaatgaaagctcaagcaaaaaatgttggtgctgaaataattaatgatttggttgtacaggtagactttaaatcaaaaattaaaaaaattatttgtgatagtaaattattaattaatgctaagtcagtaattatttgtacgggggctcaagctagatggttaggactagagagcgaattaaaatataatgggaagggtgtttcagcatgtgcaacctgtgatgggtttttttataagaataaaactgttgcagtaattggtggaggaaatacagccgtggaagaagcattatatttatcaaacttatgttccaatgtaattttaatacatagaagagataaattaagggcagaaaaaattttgcaagatagattgtttaaaaaacagaatattgaagtgacttgggatcatacattagaggaaattttaggtgatgaaaaaggtgtaaataaaataaaattattatcaaaaaaaacaaacaagtttaaaatgttagctatagatggagtttttgttgccataggacatatcccagctactgactgcttcaaaaattcaatacaattagacaaagaaggttacatagttctcaaagaaaaaggaacaacaagaacagatattgaaggggttttcgtcgctggagattgtgtagataaaatatatagacaagctgtaactgcagctgggatgggttgtatggctgcattagatgcagaaaaatggttgcaagaaaattattctaattaat

SEQ ID NO: 223821 - DNA, 940 bp, Unknown
  Bacterial polypeptide expressing nucleotide sequence isolated from the Sargasso Sea
aatgcctgaaaaaacaaagctattaataatcggttctggtcctgctggatacaccgcagccgtttatggttctagagctttgctagaaccaatacttttgcagggtatacaacctggtggtcaactcacaattacaactgaagttgaaaactggccaggagtaaaagaaatacagggtcctgatcttatgactaatttagaaagtcatgctaagtccgcaggaacaagaattatgaatgaaacaattattaaattgaatttaaaaaaatatccattcattgcaatatcagaaggtggaaataaatatgaagcagaatccattatacttgcaactggggcccaagcaaaatggcttggtttgaaatcagaagagaagtataaaggttttggagtatcagcctgtgcaacatgtgatggttttttctttagaaacgaaataattacagtgattggtggtggaaatactgccgtagaagaagctctatttcttactaattttgcaagaaaagtaattttaattcacaggagagatactttaagggctgaaaaaatacttcaagaaagactatttaaaaatccaaaagtagaggttatttggaacagtcaattaaaggaaataattggaacagacaatcccttaagtgtggagggaataagaattgaaaaccttttagataaaaaagaattagaaatttcatgcaaaggtgtttttattgctattggccacgccccatcaaatgaattaattataaatcaacttgaaacacataatggcggttatgttgttacgaaaccaaattcaacagagacttctataccaggagttttcgccgctggggatattacagattttaaatacagacaagcagttactgccgctggaatgggttgtatggctgctttagaagtagaaaaatttttggcagagaagataaactag

SEQ ID NO: 223822 - DNA, 949 bp, Unknown
  Bacterial polypeptide expressing nucleotide sequence isolated from the Sargasso Sea
aatgaataataaatcacctaaacatacaaaagtgttgattcttggatctggaccagccggctatactgctgcaatatatgctgctagagccctacttaaaccaatattggtttttggatctgagccgggtggacaacttacaacaactacagatgttgagaattttcctggttttgcgaaagtgattcaaggaccttggttaatggaagaaatgaaaggccaagctcaatctgtaggtacggaaatgattcaagatcatattaaaaaagttgatctttcaaaaaaacctttttcagctcatggggacagtggtcaagtttatactgctgatagtattattatttctacaggtgcccaagcacgatggttaaatttagaatcagaacaaaagtttaggggatttggagtatctgcttgtgcaacatgtgacggttttttctttaaagaaaaagaagttgcagtagttggaggtgggaatgctgcagtagaagaagcaatgtttttaacaaaatttgcttctaaagtttatcttatacatagaagaaatgagttaagagcagaaaaattattacaagaaaaacttaaagctaacaaaaaaattcaaattatttgggatagtgtagttgaagaagttactggaacagatgaacccaaaggggttagtggagttaaaataaaaaatgtaaaaactaataaaacttctgatctaaaagtggatggtctattcatagcaattggtcacgacccagctacatctttatttaaagatcaattaaaaatggataaagaaggttatttgatcaccaaaccagactcaaccgttacgaatataccaggggtatttgctgctggagatgtgagagataaaatttttaggcaagcagtaaccgctgctggaatgggttgtatggctgcactagaagctgaaaagcatttatctagtaaataa

SEQ ID NO: 223823 - DNA, 637 bp, Unknown
  Bacterial polypeptide expressing nucleotide sequence isolated from the Sargasso Sea
aatggaaaaaaagcatactaagttattaatactaggttcagggccagctggatatacagcggcattgtatgcatcaagagcaaatctaaagccacttctcgtaacaggtctagaaattggtgggcaattgaccactaccacggatgttgaaaactggcctggcgacagtgatgggttgcaaggcccagacttaatggaaaggatgaagaaacacatagaaaaatttgatactgagattgttgttgatcatatcaaagagacagacctttctcaaaaaccatataaactgataggtgataatacagcctatacatgtgattcattaattattgcaactggtgccagtgctaaatatttaggtctagagtcagaaaagacatatcttggcaagggggtttcagcgtgcgcaacatgtgatgggtttttctataaaaatctagaagttattgttataggtggaggtaatacagctgttgaagaagctttatatttatctaatattgcctcaaaagtaactttgatacataggcgagataaattaagagctgaagctatgctggttgataaattaaaccaaaaaataactgataataaaattgaagtaatatggaatgcaaatttagttgaagtcttgggt

SEQ ID NO: 223824 - DNA, 964 bp, Unknown
  Bacterial polypeptide expressing nucleotide sequence isolated from the Sargasso Sea
aatgaccgataaagtaagcgcaacatcaaaagaaattcctcatgaaaaagtggttatcattggcgccggtgctgcaggattgacagcgggaatttacacggcgcgtgcgaatttgtcgccggtaatcattgccgggctgcagccgggtgggcaaatgactattacaaccgatgttgaaaattatccaggctttgctgaagttatccaggggccttggttaatgaccaaaatgcaggaacaggctgaaaacgttggcgcccgtgtgatttatgaccttgttgtcggcctagatacatctactaggccatttcttcttaccttcgactcaggcaaggcgatcaaagctagttcagtgattttggcgactggagctcaggcccgttggctagggttagaatcagaaaccctcttcaatggccgcggtgtttcggcgtgtgcaacttgtgatgggtttttctttaaagatagagatgtcgcggttgttggagggggcaatacagctgttgaagaagcgctatatctctcaaaaatttgccggtctgtaactcttgtacaccgtcgtgactcgcttcgtgcagaacagatcatgcaagaccgtctgttgaaaaaagataacgttgcgattgaatggaaccgcaaagtttctgaagttattggcgatgatattggggttactggattgaatctggcttcaaccattgatgatggttataaaactatttctgttcatgggatgtttgtagcgattggccatgtccctgcgactgcagcttttctaggtgaagtgaatcttgatgaagagggctatatcattgccgaggcaggtggaactcgtacatcggtagatggtgtttttgctgcaggtgattgtgttgataaaatctataggcaagcggtcacggcagcgggtatgggttgtatggccgcgctagacgctgaacggtggcttggcgagcgggaatag

SEQ ID NO: 223825 - DNA, 1147 bp, Unknown
  Bacterial polypeptide expressing nucleotide sequence isolated from the Sargasso Sea
atggagaataaagagaagatttcaaatgtagaaaatgttgtaattataggttcgggacctgcgggttacaccgctgcaatatatgccgcacgagcaaatcttcaaccattactcgtaacaggatttaattctggtggaattcctggtgggcaattaatgactacaacatttgttgaaaattatccaggcttcccagatggagtactgggtcctgaattgatggatctaatgaaggctcaagcagaaagatggggcactaatttatacgaaagtgatgtagtttcaattaataccgattcacatccctttgaattaaaaactttagaaggaattataaaatctaactcaattattattgcaactggagcaagtgcaaatagattaggcgtaattaatgaagataaattctggagtaaaggaataagtgcttgtgcaatatgtgatggagccaccccacaatttagagatgaagaattagctgttattggagggggcgactctgcatgtgaagaagcagcatatctcacaaagtatggaagcaaagtgcatttgattgttcgatcagaaaaattaagggctagcgcagcaatggttgatagagtaaaagctaatccaaagataaaaattcattggaacactaaagttgataaagcggatggttctgaatggcttgagagaatagaaactattcactctcaagaaggtaaaggggaaatcaatataaaaggtcttttttacgcgatagggcacacacctaatacgaagtttttaggaaacaaaatcgatttagataataaaggctatattgcttgcaaatcaggaaggccagaaacatctattgaaggtatcttcgcagcaggtgatgttgttgattctgagtggagacaaggagttaccgctgcaggaactggatgcatggcagcattagctactgaaagatggttagccgagaaaaacttagcaaaaactatagtcagagaaactcccgaaccagaaaaaaaacttaattcatcagattttaatgaagaagaagttaatgaagatactttcgattcaaattctgaatggcaaaaaggcagttatgcattgaggaaactttatcacgagagtaaaaaacctatcttagtaattttcagttccccaagct

SEQ ID NO: 223826 - DNA, 577 bp, Unknown
  Bacterial polypeptide expressing nucleotide sequence isolated from the Sargasso Sea
tatggaacaacaattaataattctaggttcaggcccagcaggttatacagcagctgtttatgctgctagagctaatttaaaaccgcttttaataaccggcttagaagttggtggacaattaacaactactacagaagtagagaattggcctggagattttgaagatctacaaggtcctgatcttatggttcgtatgcaaaaacatgcagaaaagtatgatgtagatatacgaactgattacgttaagagtgttgatctatcaaatcagcctctagtgctgcatggtgaaaaagacacttacgaaacaaaaagtttaattatagccactggtgctagtgctaaatatcttggtttagatagcgaaaaagcatttttaggaaaaggtgttagtgcttgcgctacatgtgatggattcttttataaagatcaagaagttgcggttattggtggcggaaatactgccctagaagaagctttatatttgagcaatatatgttcaaaagtacacttaattcatagaagagatgaatttagaggcgaaaaaattttacaagatagagtattcaaaaaagttgaa

SEQ ID NO: 223827 - DNA, 688 bp, Unknown
  Bacterial polypeptide expressing nucleotide sequence isolated from the Sargasso Sea
agcggtagatttcaaaaaaaaccctttgtctcttactggtgaaaaagatgaatatgtttctgattcattaattattgcaacaggggcttcggcaaaatatctaggcttagcgtcagagaaagcttttttagggagaggtgtaagtgcttgtgcaacatgcgatggttttttctataaagaccaagaagttgctgttataggtggaggtaacacagcagttgaagaggctctttatttgtctaatatttgttcaaaagttagtgttattcatcgtagagatgagtttagagctgaaaaaatcctacaagatcgcctttttaaaaaggttgaggaaggcaaaatagaactagtactaaattcaaatcttgatgaagttattggagatgaagtagttaatgccattaaagttaaagacaacaatggaaatttaaaggaactaaaagttcagggtgtttttgttgcaattggtcataaaccaaatacagatatatttgaaggccatttagatatggaaggtggttatatcaaaacaaatactggatttaatattggatcaacatcaacttcagttccaggagtatttgcagctggtgatgttgcagattatacctatagacaagcgataactagtgctggatttggttgtatggcggctcttgatgcagaaaattatctttcaagtagttaa

SEQ ID NO: 223828 - DNA, 604 bp, Unknown
  Bacterial polypeptide expressing nucleotide sequence isolated from the Sargasso Sea
tgcgtctgctaaatatcttggattagagagtgaaaaaaaatacttgggtaaaggtgtaagcgcatgcgcaacatgtgatggatttttttataaagaccaacaagttgctgttattggtggtggaaatacagcattcgaagaagcattatatctttcaaatatttgttctaaagtttttttaattcatagacgatcttcatttagagctgaaaagattttgcaagagagagtatttaaaaaagttgaagaagataaaatcgaattaatattggattcgaatttaaaagatatacagggtgaaaacgttgtatcaaaaataattgttgagaacaatgatggcgaagaaactgaaattaatcttgaaggtgtatttattgcgattggtcacacgccaaatacaacaatattcaacaaccagcttgacatgaaagatggttatattgtcacaaaatcaggatttcatattggatcgacagccacatctgttcctggtgtttttgcagctggagatgttgccgatttcaattatagacaagcaataacaagtgcaggctttgggtgcatggcagctctagatgctgaatcgtatttatcaggtatttag

SEQ ID NO: 223829 - DNA, 628 bp, Unknown
  Bacterial polypeptide expressing nucleotide sequence isolated from the Sargasso Sea
tatgagtcaaaatccaactaaacacacaaaagtgttaataattggatccggccctgccggatacactgcagcagtttatgctgctcgtgcaatgttaaatcccattttggtttatggatctgagccaggaggacaattaacaactacaactgatgttgaaaattatccaggattttctgaagttattcaaggaccatggttaatggatcagatgaaagaacaagcaaaagcagttggaactgaaatgattgaagaccatattggatctgtaaatttaaaaagttctccgtttgaagcaactggtgatagtggtcagaaatacactgctgatagtattattatatctactggggcacaagctagatggttaaatataaaatcagaacaagaatttagaggttttggagtttcagcatgtgctacatgcgatggtttcttttttaaagataaagaagttgctgtagtcggtggaggaaatgctgctgtagaggaagcaatgtttcttacaaagtttgcttcaaaagtaaaattaattcacagaagagacagtctaagagctgaaaagatgcttcaaaaaaaattaatggaaaataaaaaaatagaaattatttgggattccagtagttga

SEQ ID NO: 223830 - DNA, 465 bp, Unknown
  Bacterial polypeptide expressing nucleotide sequence isolated from the Sargasso Sea
tatgagtcaaaatccaactaaacacacaaaagtgttaataattggatctggtcctgccggatacacagctgcggtttatgcggctcgtgcgatgttaaatccaattttggtttatgggtctgagccaggtggtcaattaacaacgacaactgatgttgaaaattttccaggatttgcagaagtaatacaaggtccttggttaatggatcaaatgaaagaacaagctaaagctgttggtacagaaatgatagaggatcacattagtaatgttaatttaaaaacttctccgtttgaggcaactggagatagtggtcaaaaatatactgctgacagtataataatttctacaggtgctcaggcaagatggttaaatttagactcagaacaagagtttagaggatttggcgtctctgcttgcgcaacatgtgatggtttcttttttaaaaataaagaggttgctgtagt

SEQ ID NO: 223831 - DNA, 937 bp, Unknown
  Bacterial polypeptide expressing nucleotide sequence isolated from the Sargasso Sea
catggcaaaacactctaaaatattaattcttggatcagggcctgcaggatacacggctgcaatatacgctgcaagagcaatgctaaaaccaattcttgtttttggttcagaaccaggtggtcaactaactactacaactgatgtggaaaacttcccaggatattcaaaagtaattcagggaccgtggttaatggaagaaatgaaaggtcaagcaaaagctgttggcacagaaatgatacaagatcatataaaaaaagttgatctatcaaaaaaaccttttgaagctattggagatagtggtcaagtttatagtgcagatagttttattatttctacaggagctcaggcaaggtggttaaatttaaaatcagaacaagaatttagagggtttggtgtttcagcatgcgcaacatgcgatggtttcttttttaaagaaaaagaagttgctgttgttggaggtggaaatgctgccgtagaagaagcaatgtttttgacgaagtttgcctcaaaagttaaactaattcatagaagaaatgaattaagggcagaaaaaatgctccaagcaaaattaaaagcaaataaaaaaattgaaattatctgggatagcgttgttgaggatgttatcggggacactaatccaaaatcagtcaaagctatcaaaattaaaaatgtaaaaactaataaaactaccgaattgaaagttgacggactttttatagcaataggtcatgacccagctacttcgcttttcaagggtcaattaaatatggataaagagggatatattataactaatcccgactctacaataactaatgtgccaggagtttttgcagctggcgatgttaaagataaaatattcaggcaggcagttactgcagctgggatgggttgtatggctgcacttgaggctgaaaaacatttgtcttcaaaatga

SEQ ID NO: 223832 - DNA, 763 bp, Unknown
  Bacterial polypeptide expressing nucleotide sequence isolated from the Sargasso Sea
atgagtcaaaatccaactaaacacacaaaagtgttaataattggatccggtccagctggatatactgctgcagtttatgcggcgcgtgcaatgttaaatccaattttagtttatggatctgagcccggaggacagttaacgacaacaactgatgttgaaaattatcctgggtttgctgatgttattcaaggaccttggttaatggatcaaatgaaagatcaggccaaagcagttggaacagaaatgatccaagatcatattcagtcagtcaatttaaaatctacaccatttgaggcagtaggagatactggtcaaaaatttactgcggatagcattattatctcaactggtgctcaagcaagatggcttaatataaaatcagaacaagaatttagaggctttggggtttcagcgtgtgctacatgcgatggatttttctttaaagaaaaagaagtagcagtagttggtggtggaaatgcagctgtagaagaggcaatgtttcttactaaatttgcgtcaaaagtaaaattaattcatagacgagatagtttaagagctgaaaaaatgctccaaaaaaaattaatggagaataaaaaaattgaaatcatttgggatacagtcattgaagatgtaataggtgataaagagcctaagaatgtcaaaggtatcaaagtaaaaaatgtgaaaacaaataaaatagaagaaattaaggttgatgggttgtttgttgcaattggtcatgatccagacaacttctctatca

SEQ ID NO: 223833 - DNA, 751 bp, Unknown
  Bacterial polypeptide expressing nucleotide sequence isolated from the Sargasso Sea
tatgggtcctgaaatgatgcaggtatttaaaaatcaagctgaaaggtttggaacaaaaattttaactgagactgtagattcaatagaaaagattgaaaatggatttaagctaacaacttcgaaaaatacttatgagttcaaaacagtaattatttcatctggagcatcagcaaactggcttgatgtaaagggagaaaaagagctccaaggacatggtgtttcggcttgtgcgacttgtgacggtttcttttttaaagataaaaatgtaatagttgttggtggcggagattcagctatggaagaagctttatttctaactaaatttgcaaaaaatgtaactgttgtccatagaagagattcgtttagagcaagtaaaataatgcaagacagagtgcttggtcacgaccaaattgatgtcttgtggaacaaagaggttgtggaaattaaaggtgagggtcaagtttcatctgttcttcttaaagatagtcaaacaaacgaaattgaagaaaaagaaattgatggagttttcatagctataggacacacaccaaatgtaagttttttaaacggatttctagagcttgatgaaaaaggatatataaagactgggtctactactgctaccagtactagcgtccctggtgtctttgcagccggagatgttgctgactcaatttatagacaagccgtaactgcagccggtaccggatgccaagcagcaattgatgctgaaaggtggcttgaaaattaa

SEQ ID NO: 223834 - DNA, 928 bp, Unknown
  Bacterial polypeptide expressing nucleotide sequence isolated from the Sargasso Sea
tatgagtcaaaatccaactaaacacacaaaagtgttaataattggatccggtcctgctggatacactgctgcagtttatgctgctcgtgcaatgttaaatcctattctagtttatggagctgaacctggtggacaattaacaactacaactgatgttgagaattatccaggatttgcagatgtaatccaaggtccatggttaatggatcaaatgaaagatcaagctaaagcagttggaacagaaatgattgaagatcacattgcatctgtgaatttgaaatcagaaccttttgaagcagttggagacagtggacaaaaatatactgctgacagcataattatttcaacaggtgctcaagcaagatggttaaatattaaatcagaacaagaatttagaggctttggagtttcggcttgtgcaacatgtgatggtttctttttcaaagataaagaagttgctgtagttgggggaggtaatgctgctgtagaagaagcaatgttcctaacaaaatttgcatctaaagttaaattgatccacagacgtgatagtttgcgagcagaaaaaatgcttcagaaaaaattgatggaaaacaaaaaaatagaaattatttgggactccgttgtagaagatgtaattggtgacaaagagcccaaaaatgtaaaaggaataaaaattaaaaatgttaaaactaataaagttgaagaactaaaacttgatggagtgtttattgctattggtcatgacccagctacctctttgttcaaagaacaattagatatggataatgatggttatttaattacaaaaccagactcaactgagactaatataccaggcgtttatgctgctggagatgttaaggacaaaacatttaggcaagcagttacagctgctggaatgggatgtatggcagctttagaggctgaa

SEQ ID NO: 223835 - DNA, 628 bp, Unknown
  Bacterial polypeptide expressing nucleotide sequence isolated from the Sargasso Sea
atgaatcaaaatccaactaaacacacaaaagtgttaataattgggtctggcccagccggatatacagcggcagtttatgctgcaagagctatgttaaatccaattttagttcatggaatggaacctggtggacagttaactacaactactgatgtggaaaattatcctggatttgcaaaagtaattcaagggccttggctaatggaccaaatgaaagatcaagctaaagctgttggaactgaaatgattgaagatcatatctcatctgttaattttaagtctaagccttttgaagctgtgggtgaaagtggtaaaaaatatactgcagactcaattatcatttctacaggcgctcaggcaagatggctaaaccttgagtctgaaaaaaaatttaggggttttggggtttctgcatgtgctacatgtgacggtttcttttttaaagaaaaaactgttgcagtagttggtggtggaaatgctgccgttgaagaagcaatgtttctcacaaaatttgcttcaaaggtaaaactaatacatagaagagataagttacgagcagaaaaaatgctacaaaaaaagcttatggataataaaaaaattgagattattttgggactcagtcgttgaa

SEQ ID NO: 223836 - DNA, 937 bp, Unknown
  Bacterial polypeptide expressing nucleotide sequence isolated from the Sargasso Sea
atgacaaaacattctaaagtattaattctaggatctggaccagccggctatacagcagcaatttatgccgcaagggcgatgttgaagccaatattagtatttggctctgagcctggaggtcaattaacaactactacagatgttgagaattttccaggttactcaaaagtaattcagggaccatggttgatggaggaaatgaaaggtcaagcaaaagcagttggaactgaaatgattctggatcatataaaaaaagtagatctttcaaaaaaaccttttacagctacaggagatagtggtcagatttataccgctgacagttttataatctcaactggagcacaagcaagatggttaaacttaaaatccgaacaggaatttaggggatttggagtttcagcttgcgcgacttgcgatggtttcttttttaaagaaaaagaggtagcagttgttgggggtgggaatgcagctgtagaagaagcaatgtttttaactaaatttgcatccaaagttaaactcattcatagaagaaatgaattaagagctgaaaaaatgcttcaagcaaaattaaaggcgaataaaaaaattgaaattatatgggacagtgttgttgaagacgtaattggagaaaaaaatccgaaatctgttaaagcaataaaaattaagaatgttaaaactaataaaacttctgagataaaagtagatggactttttattgctataggacacgatccagcaacctcactttttaaaggtcaattaaatatggataaagagggatatatagttaccaaaccagactctactgtgactaatgtacctggtgtttttgcagcaggagatgttaaagataaagtgtttagacaagcagttactgcagcaggaatgggttgtatggctgcactcgaagtagaaaaatttttatcatcaaaataat

SEQ ID NO: 223837 - DNA, 868 bp, Unknown
  Bacterial polypeptide expressing nucleotide sequence isolated from the Sargasso Sea
atgagtcaaaatccaactaaacacacaaaagtgttaataattgggtctggtcctgctggatacactgctgcagtttatgcggcgagagcaatgttgaatccaattttagtttatggggcggagcctggaggccaattaaccacaacaacagatgttgaaaactttcctggatttgctgatgtcattcaaggtccatggcttatggatcaaatgaaagaacaagcaaaagcagttggaacagaaatgattgaagatcatataagttcagtaaacttaaaaacgacaccttttgaggctgtaggtgacactggtcaaaaatatactgctgatagcataataatttccacaggtgcccaagctagatggttaaatattaaatctgaacaagagttcagaggatttggtgtatcggcatgtgcaacatgtgatggttttttctttaaagacaaggaagttgctgttgtaggtggaggtaatgcggctgttgaggaagcaatgtttcttacaaaatttgcgtcaaaagtaaaattaattcacagaagagatagtttaagagctgaaaaaatgcttcaaaaaaaacttatggaaaataaaaaaattgaaatcatttgggatacagttgttgaggatgtaattggagataaagatccaaaaaatgttaaaggaattaaagttaagaatgtgaaaacaaataaaattgatgaaataaaattagacggtgttttcattgctattggtcatgaccctgcaacgcaattatttaaagatcaacttagtatggataatgagggttatttgataacaaaaccagattcaacagagactaatgtaccaggtgtttatgcagctggggacgtaaaggataaaa

SEQ ID NO: 223838 - DNA, 940 bp, Unknown
  Bacterial polypeptide expressing nucleotide sequence isolated from the Sargasso Sea
atgacagaaaaaatccatcataagttaatagtccttggatcgggaccggcgggttacacagccgcactttacgcagccagatctaacctgcaaccagcactcataaccggagtggaggttggcggccagttaaccacgacaaccgaagtagagaactggccgggcggccacgcggaactgcagggacccgaactgatgatgcagatggcagaacatgtagaacggttcgaagccagcatcgttaacgaccacattcataccgcaaaactatccaaagatgcgctaattcttatgggtgaccaagccgagtactcttgcgatgcattgattatcgcgaccggtgcctccgcaaagtatttaggcctggagtcagaagaacacttcaagggaaaaggcgtcagtgcttgtgcgacctgcgatggttttttctatcgaggtcaggaagtagccgtcatcggaggcggatccacagcagtcgaagaagcgctctatctttcaaacattacgaaaaaagtttatctggtgcatagaagagaccaattacgcgcagaaaaaatcctacaggaccgcttactcgctaaagacaatatagaaccaatttggaactctcagttagaagaggttttgggcgatgacagcggcgtaactgggatggtcatcaagtcgaacgatggggataaaaacacaatagacctgtctggagttttcattgccataggccacacacccaacactgacatcttctctgatcaattagatatggaaaacgggtacattaaaatactcagcggcacagacggcaatgcgactgctaccaatatgcctggggtatttgccgcgggagacgttgctgatcacatttatcgccaagctatcactagcgcgggttttgggtgtatggctgcgctagatgctgaaagatatttggacgctctctgaa

SEQ ID NO: 223839 - DNA, 940 bp, Unknown
  Bacterial polypeptide expressing nucleotide sequence isolated from the Sargasso Sea
atgtcagacaatcataacaaattaataattttaggttcaggtcctgctggttatgcagcaagtatttacgctgccagagctggtttagatccaatcataattgcaggtatgcaggaaggtggtcaattaactactacaactgatgttgaaaattggcctggtgatagtgacggtcttcaaggaccagaattaatggaaagaatgaaaaaacatgctcaagagtttgatgttgagataatcaatgatcatataaatgaggtttcgttgactcaaaaaccatttaccttaaaaggagttaacgagtattcatgtgattctctaattattgcaactggcgctagtgctatgtatcttggtctgccctcagaaaaaaaatatttaggtaaaggtgtttccgcttgtgcaacatgtgatggttttttctataaagatcaagatgttgcagttattggaggaggtaataccgcagctgaggaagcattgtacttagcaaatatatgttcaaaagtatatttagttcacagaagagacgaattaagggcagaaaaaattttacaagataggatattcaaacaagaggaagctggaaaaattgagattttatgggatacacaacttaaagaagtttgtggcgataatatgggtgtcacatcaataaaattaaataataaaggttctgaaatttccaaggaagtcatgggtgtttttattgcaataggtcataaaccaaatactgaaatatttgatggacaattagatatggacaatggttatatcatcatcaaatcaggtttaaacggatcagttacaagctcttctgttgaaggtgtttttgctgccggtgacgtatcagaccaaatttataggcaagcagtaacctctgcaggatttggctgtatggccgcgttagacgctgaaaaatatttatctgaatcataat

SEQ ID NO: 223840 - DNA, 526 bp, Unknown
  Bacterial polypeptide expressing nucleotide sequence isolated from the Sargasso Sea
gatgggttttttttataaggatgaggaagttgcagttgtcggtggtggaaatactgctgcagaggaagcattgtatttaacgaatttatgcaaaaaggttcatctcatccacagaagagattccttaagagcagaaaaaattcttcaagatagaatctttgaaaaagctaacgaaggaaaaataaatctaatttggaacaatgaactaaaagaaataaaaggcgatggaaacattgtgactcatctaaatctcagcaattataatgatattcaagtgaaaggagtttttatagccataggacataacccaaataccgaaatctttaaaaatcaaatagatatgaaagatggatacatactcatcaacactggtctaaatggaaatgttactggtacatccgttccaggagttttcgcggctggtgatgttgcagattcagtatacagacaagctattacttcagccggttttggatgcatggctgcgttagatgctcaaaaatttatcgaggaaaataatatttaa

SEQ ID NO: 223841 - DNA, 940 bp, Unknown
  Bacterial polypeptide expressing nucleotide sequence isolated from the Sargasso Sea
atgtcagagaatcagaataaattaataattttaggttcaggacctgctggatacgcagcaggaatatatgctgctagggctggactaaatcctataattattgccggcatgcaagaaggtggacaacttacaacaactacagatgttgaaaactggcctggcgatagtgatggacttcaaggtccagaacttatggaaagaatgaaaaaacatgcattacaatttgatgttcaggtcataaatgatcatattaatagtgttgacctatcgaaccaaccattcaaattatatggaaattctgaatatgaatgtgagtcattaattatttcaactggtgcaagtgcaatgtatttaggtcttccctctgaaaaagaatatctaggaaaaggtgtttcagcttgtgccacatgtgatggatttttttatagagatcaagaagttgcagtaattggtggcggcaataccgctgcagaagaggctctttatttagcaaatatatgttctaaagtgtatttagttcataggcgagatgaacttagagctgaaaagattttacaagatcgtgtttttaaacaagaaaaagaaggtaagatcgaaattttatgggatacgcaattaaaagaagttatcggagacgataaaggtgtcactagtatcaaattagacactaaaggtgaagaatcaacaaaggacgtcatgggtgtttttattgctattggtcacaaaccaaatactgaaatgtttagtgatcaattagaaatggataatggttatattattatcaaatctggtctcaacggatcagttacaagcacctctattgaaggtgtttttgcagcgggagatgtatcagaccaagtgtatcgtcaagctattacttctgcaggctttggttgtatggctgctctagatgcagaaaaatatttatcagaaaaataat

SEQ ID NO: 223842 - DNA, 791 bp, Unknown
  Bacterial polypeptide expressing nucleotide sequence isolated from the Sargasso Sea
aatgtctaacgatcatcacaaattaattatattaggttcaggtcctgctggttatgctgcaggtgtttatgctgcaagagcaggattaaatccaattattattgctggcatgcaagaaggtggccagctaacaacaaccactgatgttgagaattggccaggagatagcgatggtcttcaaggcccagaactaatggacagaatgaaaaaacatgttgaacaatttgatgtaaaagttattaatgatcatatcaatgaagtagatcttaaaactaaaccatttaagttaattgggacgtccgaatacactagcgatgctcttattatagcaactggtgctagtgcaatgtatttaggccttccctctgaacaaaactatctaggaaaaggagtatcagcttgtgcaacatgtgatggtttcttttacaaagatcaggaagttgctgtaataggcggaggaaatacagctgctgaagaagctttatacttatcaagaatatgttcaaaagtatatttagttcacagaagagatgagttaagggctgaaaaaattcttcaagatagaatatttaaagaagaaaaagctggcaaaattgaaatattatgggactcacaacttaaggaagttttaggtgatgatatgggcgtgaatggaatgatgattgatactaaaggcagtgaagttaagaaagatgttatgggaatatttattgcaataggacacaagccaaatactgatatcttcaataataagttagatatggaaaatggttacatattaattaaatcgg

SEQ ID NO: 223843 - DNA, 916 bp, Unknown
  Bacterial polypeptide expressing nucleotide sequence isolated from the Sargasso Sea
aatggatgatctagcaataattggttcaggtcctgctggttatacggcaggaatttacgctgggagggccaaccttaaaccagtactttttgagggcttagaatcaggtggtcaattgatgttgacaactgatgtcgagaactatccaggttttgatgaaggcattatggggcctgaaatgatgcaagttttcaagaaacaggctgaaagatttggaacaaaaattttaaccgaaacagtcagtaaaattgaaaaaattgaagaaggttttaaattaacaacgtcaaaagatacctatgagtttaagtcagtaataatatcttcaggggcttcggcaaattggctcggggttaagggtgaaaaagaattacaaggttatggggtttcagcttgtgcaacttgtgatggttttttctttaaagataaaaatgtaattgtggttggagggggcgactctgcgatggaagaatctctatttctaacaaaatttgcgaaaaaagttacagtagttcatcgtagagatgagtttagagcaagcaaaataatgcaagaaagagttttgaaccatgaacaaattgaagttgcctggaataaagaggtaattgaaattaaaggtgataaacaagtatcttccgtaattctgaaagatagtaactcaaatgaggaggaagaaaaagagattgatggtgttttcgtagctataggtcacacaccaaatgttgagtttcttgatggttttgttgaactagacgaaaaaggatacattaaaactggcttcacaagttctacaagtacaagtatgtctggggtgtttgcttcaggtgatgtcgctgattctatctacaggcaagcagtaactgcagctggaactggatgccaagcagcaattgatgctgagagatggcttgaaaattaa

SEQ ID NO: 223844 - DNA, 961 bp, Unknown
  Bacterial polypeptide expressing nucleotide sequence isolated from the Sargasso Sea
atgaccgaatctatacatcataaattaatcatccttggatctgggccggcgggctattctgcggctgtttatgcggctcgtgccaatcttaagcctgtcatcatcactggatctgaaccgggtggacaactcatgaccacaacggatgttgagaattggccaggcgatcctgagggcttattgggccctgcgctaatggatcggatgctggaacatgcaaaaagattcgatacagaagtcatttacgatcacattgagagtgcggaacttggctcaaggcctttcactttaaatggaggcaatgctaaatatactgctgatgcattgattattgcaaccggatccaccgccaggtatctgggcttggaatcagaagaaaaatacaaaggaaaaggtgtttctgcctgtgcgacttgtgatggtttcttctataaggatcaagatgtaatagttgttggcggtggaaatgttgccgttgaagaggcaatttacttatcgaatattgcaaaaaacgtgactctaatccatcgaagagatgaactgagagcggagaaaatgcttcaagaaaaactgtttgaaaaaaccggtgaaaatggaaatattaaaatcctctgggatcacgttttggatgaagtgcttggagacgaatccggcgttaatggcattgtttgctccaatgtcaatgaaccatcagatcaaactcagcttgatgttcaaggcgtatttattgccattggtcacgatccaaacacatcgttctttggcgatggtttaaaactggatgattccaattacatcattcttgatgagtccaatgctcgattttccactcaaacaagcatagaaggcgtatttgcagctggagatgtcgctgatcctgtatacaggcaagctgttacctctgcgggaagcggctgcatggctgcgctggatgcagagaaattcttggaacaaagctagt

SEQ ID NO: 223845 - DNA, 934 bp, Unknown
  Bacterial polypeptide expressing nucleotide sequence isolated from the Sargasso Sea
atgcattcaaaagttctaataataggttcaggtcccgcaggatatactgctgcaatatatgcggcaagggcaatgctcgagccgactttagttcaaggtttgcagccaggtgggcaacttactataacaactgatgttgaaaactatcctgggtacggggatgtaatacaaggtccatggttaatggaacaaatgcaagaacaagcaaaaaatgttggaactaatattataaatgacattataaaaagtgtagactttaaatgtaagccatttaaggctattagcgagtcgggaactgaatatactgccgactcagtgattatctcaacaggagctcaagcaagatggcttggattagactctgaaaaaaaatttcaaggatatggcgtttcagcttgtgcaacttgtgatggcttcttttttaaggaaaaaaaggtagcagtcatcggcggtggtaattcagctgttgaggaagctttatatttaacaaactttgcatctaaagtgtaccttgttcataggcgtgatgaacttcgagctgaaaaaattcttcaagatagattgtttaaaaatgaaaaggttgaatgtgtgtgggatagcgaactaaaagaaatagttggcgatgaagatcctctaaatgtaaaaagtataaacattaaaaatacaaaaactaacgaaaccagtagtatcgagctagacggtgtctttgttgctatagggcatgatccagctactcaaatttttagggaccaagtcgaaatggatgaagatggatatataattacaaaacctgactcaacacttacaaacgttgaaggtgtatatgcagcaggagatgtaaaggataaaatttatcgtcaggcggttactgcagctggtatgggttgcatggcagcgcttgaggcagaaaaatacctagctgaattatcttaat

SEQ ID NO: 223846 - DNA, 946 bp, Unknown
  Bacterial polypeptide expressing nucleotide sequence isolated from the Sargasso Sea
tatgagtcaaaatccaactaaacacacaaaagtgttaataattgggtctggtcccgctggatatacagcagctgtttacgcggcaagagcaatgttaaatccaattttagtttatggttcagagccaggtggacaattaactacaacaacagatgttgaaaattttccagggtttgctgatgttattcagggtccttggcttatggatcaaatgaaagagcaagcaaaagcagttggaacagaaatgattgaagatcatataagttctgtcgatttaaaaaaaacaccgtttgaagccattggggacactggtcaaaaatacactgctgatagcattataatttcgacaggtgcacaagcaagatggttaaatttaaaatcagagcaagagttcagaggttttggagtatccgcatgcgcaacatgtgatggttttttctttaaagacaaagaagtagctgtcgttggaggaggtaatgcagctgttgaggaagcgatgtttcttacgaaatttgcatcaaaagtaaaattaattcacagaagagataatttaagagctgaaaaaatgcttcaaaaaaaacttatggagaataaaaaaattgaaattatttgggacagtgttgttgaagacgttattggtgataaagatccaaaaaatgttaaaggaattaaaatcaaaaatgttaaaacaaataaaattgacgaaattaaattagatggtgtcttcatcgcaattggacatgatccagctacgcaattatttaaaaatcagctaagcatggacaaagaaggttatttgataactaaaccagattcaacggagactaacgtaccaggcgtttatgcggctggagatgtaaaagataaaacattcagacaggcagtgactgctgctggtatgggttgtatggcagcactagaggctgaaaagtttttatcacattaa

SEQ ID NO: 223847 - DNA, 940 bp, Unknown
  Bacterial polypeptide expressing nucleotide sequence isolated from the Sargasso Sea
atgtcggacaaccatcataagttaatcattttaggttcagggccagctggatatgctgcaagtatctatgcagccagagcaggtctagagccaatcatcattgcaggtatgcaagaaggtggtcaattaactacaactactgatgttgaaaattggcccggcgatagcgatggtctgcaggggccagaattaatggatcgtatgaaaaaacatgcacaacaatttgatgttgatgtaattaatgatcatattaatagtgttgaacttaaagagaggccatttaaactgcaaggaacatcagaatacacatgtgatgctctaattattgccaccggcgcaagtgctatgtatcttgggctgccatctgaaaaagaatatttgggtaaaggtgtttcggcatgtgcaacatgcgatggctttttttataaagatcaagaagttgctgttattggtggcggaaatactgctgcagaagaagccttgtatttatcaagaatatgttcgaaagtttatcttatccatagaagagatgagctaagagcagaaaaaattctacaggatagaatttttgacgaggaaaaaaatggaaaaatagaagtcttatgggattcacagctttctgaagtgctgggtaatgatatgggtgtaactgggattaaaatagatactaaaggaaatatttctgaaaaaagcgtaatgggagtatttattgcgattggtcacaagccaaatacagatatatttgatggtcagttagatatggataatggatacataataattaattctggtttgaatggatcagttacaagatcttcaattgatggagtttttgctgcaggtgatgtttcagaccaaatatacagacaagctgttacatctgcaggttttggatgtatggcagcattagacgctgaaaaatatctctccgaaaagtaat

SEQ ID NO: 223848 - DNA, 949 bp, Unknown
  Bacterial polypeptide expressing nucleotide sequence isolated from the Sargasso Sea
atgagtcaaaatccaactaaacacacaaaagtgttaataattggatccggtccagctggatatactgctgcagtttatgcggcacgtgcaatgctcaatccaattttagttcatggctctgagcccggaggacagttaacaacaacaactgatgttgaaaattacccgggatttgctgatgttattcaaggaccttggttaatggatcaaatgaaagatcaggcaaaggcagttggaacagaaatgatccaagatcatattcagtcagtcaatttaaaatctacaccatttgaggcagtaggagatactggtcaaaaatttactgcggatagtattattatttcaactggtgctcaagcaagatggcttaatattaaatcagaacaagaatttagaggctttggagtttcagcgtgtgctacatgtgatggatttttctttaaagaaaaagaagtagcagtagttggtggtggaaatgcagctgtagaggaggcaatgtttcttactaaatttgcttcaaaagtaaaattaattcatagacgagatagtttgagagctgaaaaattgcttcaaaaaaaattaatggagaataaaaaaattgaaatcatttgggatacagtcattgaagatgtaataggtgataaagaacctaaaaatgttaaaggtattaaagtgaaaaatgtgaaaacaaataaaatagaagaaattaaggttgatggattgtttgttgcaattggtcatgatccagcaacttctctattcaaagatcaattaaaaatggataatgaaggatatttgattaccaaaccagattctactgaaactaatgttcctggagtttacgctgcaggagatgtgaaagataaaacttttagacaggctgtaaccgctgcaggaatgggatgtatggctgctctcgaggccgaaaagcatctttcgcataaataaa

SEQ ID NO: 223849 - DNA, 949 bp, Unknown
  Bacterial polypeptide expressing nucleotide sequence isolated from the Sargasso Sea
ttggtagataaatctcaaaaaaaaataattattttaggatcagggcctgctggctatactgctgctatttatgcagcaagagctaatcttaatccaattcttatcactggaatagaaaagggtggtcagttaatgacaacaacagatgttgaaaattggccgggagatcatgatgggcttcttggaccagatcttatgaacagaatggaaaagcatgctcttaaatacaatgtagaaatcatttttgatcatataaaagaagttaatttccaaaacgcgccatacattttagttggagattctgatacatataacgcagatgcgttgattatttctactggcgctagtgcaaaatatttgggtctagaaagtgagaaaagatttatgggaaagggtgtatctgcttgcgctacttgtgatggcttcttttataaagaaaaaaatgtttgcgttgtgggtggtggaaatacagcagttgaggaagcattgtatttatcaaacattgcaaaacatgtaactttaattcacagaagagatagcttaagagcagagaaaattttgcaaaatcgtttgtttgataaaaaaaatgtttcaatagagtggtcgtataccttgcaagaagtaaaaggaaatgacatgggtgttacatctattgctatagaatctacagatcaaaagcaagttaaagaaatacctacagacggcttatttatagcaataggtcataatcctaatacagaaatatttaagggccatctttcaatggacaatgagggttatttggaagttaacccgaataaaacagaatatgcaacccaatgcgataaagctggcatttttgctgcaggtgatgtaattgataaagtatatcgacaagccattacatccgctggaactgggtgcatggctgcacttgatgcagaaaaatatttagaatcattaagctaat

SEQ ID NO: 223850 - DNA, 916 bp, Unknown
  Bacterial polypeptide expressing nucleotide sequence isolated from the Sargasso Sea
aatgcttgatttagcaattattggttcgggacctgctggttacactgccggcatatacgcttcaagagctagtttgaaacccgttctttttgagggcttggagtctggtggccagcttatgttaacaacagacgtagaaaactatccaggttttgattcggggataatgggtcctgatttaatgcaaatatttaaaaaacaggctgaaaggtttggtactgagataaaaaccgaaactattaattcgattaaaaaaatagatggtggttttagtcttaaaagcgccaaagattcttatgaatttaaatcagtaattatttcatccggagcttctgcaaaatggctcgacataaaaggagaaaaagagcttcaaggacacggtgtttctgcttgtgcaacatgtgatgggttcttttttaaggaaaaggaagtaattgttgtaggtgggggagattctgcaatggaggaggcactcttcttaactaagtttgcaacgaaggtttatattgtccacagaagagattcttttagagcaagtaaaattatgcaagatagggttttggacaatgataaaatcgaagtgctctggaataaagaggtgactgaaattcatggatctgaaagtgttgagtctgtgtctcttgctgatactaaagatggttcttcttctgaggtaaatatagatggtgtgtttatggcaattggccatactccaaacgtagatttcctagatggattagttgaactagatgaaaaaggatatgtaaaaactgggttcacaactgaaactagcacctctgttcccggagtcttcgcagcaggtgatgttgccgattcaatttatagacaagcagtaacggctgctggaactggctgccaagcagcaattgacgctgaaaggtggcttgaccattaa

SEQ ID NO: 223851 - DNA, 523 bp, Unknown
  Bacterial polypeptide expressing nucleotide sequence isolated from the Sargasso Sea
atgtgatggctttttttataaggatcagattgtaacggttgtgggtggaggaaatacagctgcagaagaagcattgtacttatcaaatatttgttctcaagtaaacttagttcacagacgtgacgagttgagagctgaaaaaattttacaagatagggtctttgataagcaaaacataaaaatatattggaattcaacattaaatgaagtgcttggggatgaattggtagttaatgcagttgaattgataacagaaaacaaaaaaaataaaatcgaatcagctggggtattcattgccattggtcatcaaccaaatactagtatttttgaaaaccaattagatatgaataacggttatataattattaattctgggttaaatggctccgttaccgcaaccagcgttccaggcgtatttgcagctggcgatgtatcagaccaaatttatagacaagcgataacttcagctggttttggatgtatggcagcgttggatgcagataaatatttatctaatcaataa

SEQ ID NO: 223852 - DNA, 976 bp, Unknown
  Bacterial polypeptide expressing nucleotide sequence isolated from the Sargasso Sea
catgaacgacaacggcaggtctcagcacgaaaaggttgtcatcatcggctccggcccagcaggctggaccgcggcgatctatgctgcccgcgccgagatgaatccgttcgtgatcgaggggaacatcagccgaacgatgattccgggcggtcaactcatgttcacgactgaggtcgagaattacccgggtttcaaagacggggtcgacggtcaggcccttatgttggagatgaaggctcaggcactccgtttcgacacccgtgtgctcacggaggatgttgtggacatcgataaggacgtgcatccgttccggctcaccacgacgaacggaactgttgtaaccgctgacgccttgattctcgccactggggctaatgcaaactggctgggccttcctaacgaggagcggctggcacagagcggtggcggcgtgagtgcctgtgcggtctgtgatggggcgttgccacacttccgggataaggtgctggcggtgatcggcggtggagataccgcgatggaggacgccctctatctcacgaaattcgccaaggaagtagtaatcattcatcggcgcgacgagctgcgagcgtcgaagatcatggcagagcgcgccatggagagcgagaagatcacctttgcctggaacaccgtcgtgaccgaagtgctcggtgacgacgttatcactggtcttcagcttaaggacgtacattcgggtgagccgcgggaactcgaagtcgggggactattcgttgcgataggccactcacctaacacgggatttctgaagggcgtggtcgaactgaaggacaatggctacgtcgatactccgatcccgtggcgtacacagacctcggtgcccggaatcttcgcggctggtgacgtgatggacgactactatcgacaagccgtcaccgcggctggcactggctgtatggccgccctagaggccgagcgatggttggctcacgggggatga

SEQ ID NO: 223853 - DNA, 655 bp, Unknown
  Bacterial polypeptide expressing nucleotide sequence isolated from the Sargasso Sea
atgactgaaaaaatagaaaatgatgtcttaattattggctctggaccagcaggttatactgctgcaatctatgcagcaagagcaaatttaaaaccgcatttagtttcaggtttagaaccaggaggtcaactaaccatcactacggatgtagaaaactatccaggatttgaaaatgtaattcagggtccttggcttatggaacaaatgaaagaacaagcagtaaaagtaggaactatctttcataatgatattgtaacttcagttgattttgaaaaaaatccatttacttccaaaactgagtcaggcaaagaatttgtgtccaaatcgataattattgcaacaggcgctcaggctagatggctgaatttggaaagtgaaaaaaaatttaaaggatttggtatttctgcttgtgcaacttgcgatggatttttcttcaaagatcagcaagtagcagtgattggtggaggtaatagtgcagtagaagaagcaatgtttttgacaaaatttgcttcaaaggttttgttaatccatagaagagatagtttacgagctgaaaaaattttacaagaaagactgtttaacaataaaaaaattgaagtaatttggaatagtaaggtttctgagttcgttggagaaaaaatccaaatacattaaa

SEQ ID NO: 223854 - DNA, 946 bp, Unknown
  Bacterial polypeptide expressing nucleotide sequence isolated from the Sargasso Sea
atgaataataaatcaactaaacatacaaaagtgttaattattggatcaggtccagctggttatacagctgcaatttatgcagcaagagctttattaaaaccaatattggtatttggagcagaaccaggtggtcaattaacaacaacaacagatgttgaaaatttcccaggattttcaaaggtgattcaaggtccttggttaatggaagaaatgaaaggtcaggcagcagcggttggtacagaaatgatccaagatcatattggcaaagttgatttatcaaaaaaaccttttgttgcgacaagtgacaatggtcaagtttatacagctgactcaattataatttccacaggagctcaagcaagatggttaaatctcgactcggaaacaaaatttaggggatttggagtttctgcatgcgctacgtgtgatggtttcttttttaaagataaagaagttgcagtagttggaggcggaaatgctgcggttgaagaagcaatgtttttaacaaaatttgcatccaaagttcatttaattcatagaagaaatgaattaagagcagaaaagttacttcaggaaaaattaaaagctaataaaaaaattgagattatctgggacagcgttgttgaggaagttttaggaacagatgagccaaaagttgtaaacgggattaaattaaaaaatgtaaaaaataattattcatcagaattaaaagtagatggcttattcattgcgattggtcatgatcctgcaacatcgttatttaagaatcaaattgagatggacaaagaaggttatttaaaaacaaaacctgactcaacaattacaaatgttccaggagtatttgccgctggtgacgtaaaagataaaatatttagacaagctgtcactgctgcaggtatgggatgtatggcggcccttgaggcggaaaaatatttatctcactaag

SEQ ID NO: 223855 - DNA, 952 bp, Unknown
  Bacterial polypeptide expressing nucleotide sequence isolated from the Sargasso Sea
atgaaaaataattcaaaaaaacattccaaagttttgattataggatctggtcctgcgggatatactgctgcggtttatgcagctagagcaatgttaaagcctatgcttgtgcatggtatggagcctggaggacaattatcaacaactaccgatgtagaaaattatcctggattttcaaaagttatccaaggaccttggttgatggatcaaatgagagatcaagcaaaagctgtcggaacggaaatgattgaagatcatatttcgtcggtaaatttaaaatctaaaccgtttgaagctgttggagatggtgggcaaaaatataccgcagattcaattattatttcaactggagctcaagccagatggcttaatatagaatctgaacaaaagtttagaggatttggagtttctgcatgcgcaacttgtgacggctttttcttcaaagataagactgttgcagtagttggaggaggtaacgcagctgttgaggaagcaatgtttttaactaaatttgcatcgaaagttaaattaatacatagaagaaatgctttgagagctgaaaaaatgcttcaaaagaaactaatgtcgaataaaaaaattgaaattatttgggataccgttgttgaagaagtaattggagataatgaaccaaaaaatgttaaaggattaaaaattaaaaatgtaaaaacaaataaagttgaagaaataaaaatagatggcttgtttatcgctatcgggcatgatcctgctacctctctttttaaaggtcagttaaatatggataaagaaggatatatagttactaaaccagactctacagttactaatgtgcctggtgtttttgcagcaggcgatgttaaagataaaatatttagacaagcagttactgcagctgggatgggatgtatggctgcacttgaggcagaaaaacatttgtcttctaaagcttaat

SEQ ID NO: 223856 - DNA, 937 bp, Unknown
  Bacterial polypeptide expressing nucleotide sequence isolated from the Sargasso Sea
tatgagtacaaatattgaaaatattctaattgttggttcaggatctgctgggctaactgcagcaatttatgcagcgagagcaggatttagccctttggttttaacaggcattcaacctggcggccaattaactataactactgatgtagaaaattacccaggttttcaagatgttgttcaaggcccgtggttaatggaacaaatgcagaaacaagcagaaaacgttggtgctagaatagaatatgatttaattgttgatcttgataaagacgtgtggcccttcaaagtaaaaacagattcaggaaaagaaatacaagctgaaacaatcatcattgcaactggtgcacaagcaagatggttaggaattgaaagtgaggaaaaatataatggaaaaggcgtttcagcatgcgcaacttgtgatggtttttttttcaaaaacaaaaatgttgcagtaattggtggaggaaatactgctgtagaggaagctttatatttatcaaacttatgtcaaaatgttaccttgatacacagaagagatgagttaagagctgaaaaaattcttcagaatagactgtttgataaaaaaaatatcaatattttatggaataacaaagttgatgaaattttaggtgatgattttggtgtaaatgctcttaaactaatttcaactaaagatggatcagaaacagtaacaaagattgatgggatatttatagctattggacatgatccatcaacattagttttcaaaaacaaaatagatttagatcaagacaattacattattacaaagtcaggtgagactactacttcagttccaggcatattcgctgcaggtgattgtgtagataaaatttacagacaagctgtgaccgcggctggtatgggctgtatggcggcgttggatgccgaaaaatggttagctaatcataaataa

SEQ ID NO: 223857 - DNA, 940 bp, Unknown
  Bacterial polypeptide expressing nucleotide sequence isolated from the Sargasso Sea
atgacagataatactcattcaaaattattaatccttggttctggacctgctggctatactgcagctatctatgcatcaagagcgatgttagagccgactcttctaacggggattgaaccaggtggccaaatgacaataactactgatgtagaaaattatccaggttttgcagatattattcaaggtccatggttaatggatcagatgaaagagcaagcaataagtgttggaacaaatatagtttttgataccattgttgatgtcgatttatcaaataagccttttaaactaaaatctgattcagaaaaagaatatacatgcgatgctttaatcattgcaactggtgctcaagcaaactggttagggctagaatcagaaaataaatttaaggggtatggtgtttcagcatgtgcaacttgcgatggctttttttacaaagataaaacagttgttgtagttggaggaggaaatactgccgctgaagaagcaatttttttaactaactttgcaagtgaagtaaaattaattcatagaagagactcattgcgtgctgagaaaattcttcaaaaaagattaatggaaaataaaaaaattgaaattatttgggatacagaaattacagagatagttggtgatgaagatcccttaagtgtaaaccaggttgttttaaaaaataagaaaacaaatagtatagagaatctcaaagctgatggcgtttttgttgcgattggacatagtccttcctctttaatatttcaaaatcaattagatatgaatgacgcgggttatatttttactgcggctgattcaactaaaacaaatattaacggtgtttttgcagccggtgatgttacagatgataaatatagacaagccgttacagccgcaggtatgggctgtatggcagcacttgaagtagaagaatatttatctgaataaa

SEQ ID NO: 223858 - DNA, 946 bp, Unknown
  Bacterial polypeptide expressing nucleotide sequence isolated from the Sargasso Sea
atgaaacaaaatccaactaaacacacaaaagtgttaataattggatccggtcctgctggatacactgctgccgtttatgcagcaagagcaatgctaaatcctgtattagtttatggatcagagccaggcggccaattaacaacaactactgatgttgaaaattttccagggtttgcagatgttattcaaggaccttggttgatggatcaaatgaaagaacaggcaaaagcagttggaacagaaatgattgaagatcatattggttcggtaaatttgaaatccaaaccatttgaagcagtaggtgatagtggacaaaaatacactgctgatagtattattatttctactggtgctcaagccagatggcttaatttgaaatctgaacaagagttcagaggtttcggagtttctgcgtgtgctacttgtgatggttttttctttaaagataaagaagtagctgttgttggtggtgggaacgcagctgtagaggaagctatgtttcttacaaaatttgcatctaaagtaaaattaatacacagaagagatagtttgagagctgaaaaactgcttcaaaaaaaattaatggaaaacaaaaaaattgaaattatttgggattctgttgttgaagatgtagttggcgaaaaagatcccaaaaatgttaaagcagttaaaatcaagaatgtaaaaactgataaaacagatgaaataaaattggatggtttgtttattgcaataggccatgatccagctacacaattatttaaaaatcaactagatatggacaaagaaggatacttaattacaaaacctgactccactgaaacaaatgttccaggtgtatatgctgctggagatgtgaaagataaaacttttagacaggcagtaactgctgcaggaatgggttgtatggctgctttagaagctgaaaaattcttatctcactaat

SEQ ID NO: 223859 - DNA, 961 bp, Unknown
  Bacterial polypeptide expressing nucleotide sequence isolated from the Sargasso Sea
atgaccgaatcaatacatcataaactaatcatacttggctctgggccagcaggctattctgcggctgtttatgcggctcgtgcaaatcttaaaccagtcataatcactgggtctgaaccgggtggacaactcatgactacgacggatgttgagaattggcctggcgatcctgagggcttgttgggccctgcgctaatggatcggatgctggaacatgcaaagagatttgataccgaaattatatatgatcatatagaaagcgcagagcttggatcgaggccctttgtcctgaatggaggaaatgcaaaatatacaacggatgcattgatcatcgcaacaggatcaacagccagatacttaggcttagagtcagaggaagaatttaagggcaagggtgtatctgcttgtgctacttgcgatggttttttctataaagatcaggatgtaatagtcgttggtggtggaaatgttgcagttgaggaagctatttatctatccaatattgcaaagaatgtgacgctgatacatagaagagatgagctcagagcagaaaaaatgcttcaagataaactttttgaaaaaacagataataaaggaaatataaaaatcctatggaaccatgttttggatgaagtactgggagatgaagctggagtaaatggcattatttgttcagatgtcaatgatccatcaaacaaaactgaattgaatgttcaaggtgtctttatagccattggtcacgatccaaatacgtctttctttggtgataatttaaaattagatgaatctaattacataattttagatgattccaatggtcgatttgccactcaaacaagtatagaaggggtgtttgcagctggagatgttgctgatcccgtatacagacaagctgtgacttctgcgggaagtggttgcatggctgcattagacgcagagaaattcttggaacaaagctagt

SEQ ID NO: 223860 - DNA, 943 bp, Unknown
  Bacterial polypeptide expressing nucleotide sequence isolated from the Sargasso Sea
aatgtctcaataccatcataccaaagtgcttattatcggaagtggacctgccggatataccgctggcgtttatgctagccgggcaatgctctcaccaatacttattcaaggcattgagccaggaggccagttaacaacaactacagaagttgaaaattggccaggggatacagaagttcaggggccagatctgatggtaagaatggaagcccatgctaaagagatgggctgcgaaataataggagatatagtaacaaaattagaggtccatagcagaccatttgttgcgacgtgtgatagcggaaagaaatacacagccgatgctattattcttgctactggtgcaagagccaaatggttaggattaccatcagaagaaaaatataaaggctttggcgtatctgcctgtgcgacttgtgatggctttttctacagagggcaggaaatagccgtaattggcggcggaaatacagcagtagaagaagctctcttcctcactaactttgcctcaaaagttaccttagtccacaggcgagatgagctaagagctgagaaaatactgcaggatagattatttaagaaccctaaaattgaaccaatttggtttcatgaactgaatgaagttatagggacggaatcccccttgggtgtcgaagcaatccgtattaaaaacacaatgaacggtaagctatctgatgtgccatgcaaaggcgtttttgttgcaattggacacgctcctgctactgagttggtaaaaaacattttagacacacataacggaggttatgtaaaagttgagcctggaagcaccagaacttcagtaccaggtatttttgcagcaggggatttaaccgatcatatctatagacaggctgtaacaagtgcgggaatgggctgcatggctgctcttgatgcagaaaagtttattgccgaaagcaactaa

SEQ ID NO: 223861 - DNA, 574 bp, Unknown
  Bacterial polypeptide expressing nucleotide sequence isolated from the Sargasso Sea
caacggccgtggtgtgtctgcctgcgctacttgtgatggtttcttttaccgcaatcaaaaagttgcagtagtaggtggcggtaatacagcagtcgaagaagcgctgtatttagctaatatcgcctcagaagtgcatttagtgcaccgtcgcgatacttttaaggcggaaaaaattctggttgaccgtttaatggcgaaagtggcctctggcaacattattctgcacacccaccgtgagctggaagaaattctgggtgacgatatgggcgtgaatggcatgcgcttaaaatcgaccaatggccagccaacggaagatgtagcagtagctggtgtatttatcgctattggtcataaaccaaacaccgatatttttgcgggtcagttggaaatgaacggcggttacctgaaagtacaaagtggtactgaaggcaacgccactcaaaccagtattgaaggtgtatttgccgctggcgacgtgtcggatcatatctaccgtcaggctattacctcagcaggcacaggctgtatggctgctttagatgctgagcgttatttagacgctttagcaaagtaa

SEQ ID NO: 223862 - DNA, 952 bp, Unknown
  Bacterial polypeptide expressing nucleotide sequence isolated from the Sargasso Sea
atgaataataaatcaactaagcatacaaaagtgttaattcttggatcaggtccagcggggtacacagctgcgatttatgctgctagagcaatgttaaagccaattttagttcatggttcgcaaccagggggacaattaaccacaacaactgacgtagaaaattaccctggttactcaaaagttattcaggggccttggctaatggaagaaatgaaaggccaggctaaagcagtgggaactgaaatgatacaagatcacattaataaagtagatttatctactaagccttttaaggttgttggagatagtggtcaaatttataccggggactcaattattatttcaacaggggctcaagcaagatggttaaatttggattccgaaaaaaaatttcgaggttttggagtttcagcttgtgctacttgtgatggattcttctttaaagataaagaagttgcagtagttggtggtggaaacgctgcagttgaagaagcaatgtttttaactaagtttgcatctaaagttaaacttattcatagaagaaatgaattaagagcagaaaaaatgctacaagaaaaattaaagtctaataaaaaaattgaaattatctggaatagcatcgttgatgaagtgcttggaacaaatgatccaaaaagtgttaaaggaataaagattaaaagcacaaaagataatacttttaaagaattaaaagttgatggattgttcattgcaataggtcatgacccagcaacttctttatttaaaaatcaattaaaaatggataaagaaggatatttaattacaaaaccagattctacagaaacaaatatacctggagtatttgcagctggagatgttaaagataaaatttttagacaagctgtaacagctgctggaatgggatgcatgtctgctttggaggctgaaaaatatctttctaattctaagtaag

SEQ ID NO: 223863 - DNA, 828 bp, Unknown
  Bacterial polypeptide expressing nucleotide sequence isolated from the Sargasso Sea
attgggaaaatacggcttatcccctatttcggagcaacccatggaaaccgcccaacactgtcgattactcatacttggctccggacctgccgggtataccgccgccgtctacgcagcacgtgcaaacctctctcccgtgttggtgaccggcattgcgcaaggcgggcaactcatgacgactaccgacgtcgacaattggccaggagatccgcatggcctgaccggtccggatctcatggcgcgaatgcttacccattccgagcggtttggcacgcagatcatttttgatcatatccacacagcaaaactggataagcgcccttttaccctcgagggcgatgccggcacctatacctgtgacgcactcatcatcgccaccggagcttctgcgcaatacctgggtcttgagtcagaggaggcttataagggcaaaggagtatcggcctgcgccacctgcgacggcttcttctatcgtgacaagccggttgcggttatcggtgggggaaacaccgccgtcgaggaggcgctttatctttcagacatctgctccgatgtgaccctggtgcatcgacgggacagtctccgagcagaggccatccttcaggatcaacttttttcccgaactggtgacgaggggaacatatccctggcctggaatcacactctcagcgaggtgctcggagacgacagcggggtcactggcatccagatccaggatacacattcgcaccaagatcgtcagattgatgtccatggtgtattcattgctattggccatacgcccaacactgaacttttcaccgatcagctcgacattcagggagggta

SEQ ID NO: 223864 - DNA, 745 bp, Unknown
  Bacterial polypeptide expressing nucleotide sequence isolated from the Sargasso Sea
atgagtcaaaatccaacaaaacacacaaaagtgttaataattggatccggtcctgccggatacactgctgcagtttatgctgcaagagcaatgcttaaacctatactagttcatggaatggaaccgggtggacaattaacaactacgactgatgttgaaaattttcctggttttgcagaagtaattcaaggaccttggttaatggatcaaatgaaagagcaagcacaggcagttgggactgaaatgattgaagatcatatcgcatctgtaaatttaaaatcaaaaccttttgaagcagttggagatggtggccaaaaatatacagcggactcaattatcatatcaactggggctcaagcaagatggttaaatattgattctgaacaaaaatttagagggtttggagtatccgcgtgcgcaacatgtgatggttttttctttaaagaaaaaacagtagcagttgttggtggtggaaatgcagctgttgaagaagcaatgtttcttacaaaatttgcatcaaaagtacagctaattcatagaagagataaattaagagctgaaaagttacttcaaaaaaaattaatggaaaataaaaaaattgaaattatttgggatagtgtagttgaggaagtggttggtgatgaagacccaaaaaatgtaaaaggtttaaaaattaaaaatgttaagacagatgagatcaaaggaattaaaaatagatggtctttttattgctataggacatgac

SEQ ID NO: 223865 - DNA, 579 bp, Unknown
  Bacterial polypeptide expressing nucleotide sequence isolated from the Sargasso Sea
tatgaatcaaaatccaactaaacacacaaaagtgttaataattggatctggcccagctggatatactgctgcagtttatgctgcaagagcaatgcttaagcctataatggttactggcatggagccaggtggccaactaactactacaactgatgttgaaaactatccagggtttgcagaagctatccaaggtccctggttaatggagcaaatgaaagaacaggctcaagctgtgggcaccgagatgatacaggaccatatatcgtccgtaaattttaaagcaaaaccttttgaagctatcggagatggcggacaaaaatatactgctgatacaattataatttctactggagctcaagctagatggctaaatatcgagtctgaacaaaaatttagaggctttggagtatctgcatgcgcaacatgtgatggatttttctttaaggacaaaactgttgcagttgttggaggaggaaacgcagcagttgaagaggcaatgtttcttacaaaatttgcatcaaaagtaaaacttattcacagaagaaacgaattgagagctgagaaaatgttacaaaaaaa

SEQ ID NO: 223866 - DNA, 679 bp, Unknown
  Bacterial polypeptide expressing nucleotide sequence isolated from the Sargasso Sea
gatgaataataaatcaactaaacatacaaaagtgttaatacttggatcaggtcctgcaggctataccgctgctatttacgcagcaagagcaatgttaaagccaatattagtgcatggttctgaaccaggcggacaattaactactacaactgatgttgaaaactatccaggatattcaaaagtcattcaagggccttggctaatggaggagatgaaaggccaggctaaagcagttgggactgaaatgattcaagatcacatcagtaaagtcgatctgtcaaaaaaacctttcacagcgattggtgacagtggtcaaatttatacggctgatagttttataatctcaactggtgctcaagccagatggctaaatctaaaatctgaaaaagattttagaggttttggggtttcagcttgcgctacttgtgatggtttttttttcaaagaaaaagaagtagctgttgtaggtggaggtaatgctgctgtagaagaagcaatgtttcttacaaaatttgcatctaaagtaaaacttatacatagaagagatgaattgagagcagaaaaaatgttgcagactaaattaaaagcgaacaaaaaaattgaaataatttgggatactgttgtagaagatattgtaggaactaaagatcctaaaagctgtaactggtgtaaaaattaa

SEQ ID NO: 223867 - DNA, 540 bp, Unknown
  Bacterial polypeptide expressing nucleotide sequence isolated from the Sargasso Sea
tttcggcctgtgcaacctgtgatggatttttctataaaggccgagacgtagcggtagtgggcggtggtaatacggcggttgaagaagcgctgtatctttctaacatttgccgatctgtgaccttagttcatcggcgtgactcacttcgggcagagcaaatcatgcaagaccgcttactgaaaaaagataatattgccgttgaatggaaccggttggtcgttgaggtgttgggcgatgatacaggggtgaccgggttaaggttggcttcaactactggtgatgaggacaaagagatttcggttcatggaatgtttgttgcgattggccatgatccggcgaccggtgcttttgccgatgcagtaaaacttgatgatgagggctatatccttgccgatgctggtggcacccgaacatcggttgatggtatttttgctgctggtgattgtgtcgataaaatctatcgacaagcagtcactgcagcgggcatgggttgtatggcggcccttgatgctgaacgttggcttggcgagcaggaataag

SEQ ID NO: 223868 - DNA, 943 bp, Unknown
  Bacterial polypeptide expressing nucleotide sequence isolated from the Sargasso Sea
atgactgagaaaatagaaaatgatgtcttaattattggatctggaccagcaggctatactgctgcgatctatgcagcaagggcaaatttaaagccccatttggtttcaggtttagaaccagggggccaactaactatcactacagatgtagaaaactatccgggattcgaaaatgttattcagggtccttggcttatggaacaaatgaaagagcaagctgtaaaagtaggaactatttttcataacgatattgtaacttcagtaaattttgaaaaaaatccgtttacttccaaaactgagtcaggaaaagaatttttatccaaatcaataattattgcaacaggtgctcaagcaagatggttgaatttagaaagtgaaaaaaaatttaaaggatttggtatttctgcttgtgcaacttgcgatggatttttcttcaaagatcagcaagtagcagttataggtgggggcaatagtgcagtagaggaagcaatgtttttgactaaatttgcttcaaaagttttgctaatccatagaagagatagtttgcgagcagaaaaaattttacaagagagactatttaacaataaaaaaattgaagtaatttggaacaacaaggtttctgaatttgttggagaagaaaatccaaatgtattaaaaaaactgattttagaaaatacattagatggtaccaaaacgactatagacgtaaatggtgcatttatagcaataggacatgatcctgctacatcactttttattgataagttaaaaatggatgatgaaaattatataattactaaacctgatagtactgagacaagtattaagggagtctttgcagctggtgatgtaagagataaaatttatagacaggctgtaactgctgctggtatgggttgtatggctgctttagaagctgaaaggtatataacggaaagctaat

SEQ ID NO: 223869 - DNA, 721 bp, Unknown
  Bacterial polypeptide expressing nucleotide sequence isolated from the Sargasso Sea
tatggataacaatcagaaattaataatattaggttcgggaccggctggttacagtgcgagtatttatgcagctcgtgctggcctaaatccaacattaattacaggatttgaagttggtgggcaacttacgaccacaaccgatgtagaaaactggccgggagattatgaagatcttcagggtcctgacttgatgattagaatgcagaatcatgctgaaaaatatggtgtcaatatcgttaatgaccagatcgaaaaagttgatttgagtggtgaggtaaaaatcttggaaggaatgaataagtattcatgtaaatctttaattattagtaccggagcatcagcaaaatatttaggtcttccatctgaagataagtatttagggaagggagtaagtgcatgtgctacttgtgatggctttttttataaggatgaggaagtagctgttgttggaggaggaaatactgctgcagaagaagctttatatttaacaaatttatgtaaaaaggtgcaccttatacacagaagggataccttgagagcagaaaaaattcttcaagatagaatcttcgaaaaagctgacgaaggaaaaataaatttggtttggaataatgaactcattgaaattaaaggggatgataatgtagttactcatttaaatctcagtaatcatgatgatataaatgtgaaaggagttttcatagcaattggccataacccgaac

SEQ ID NO: 223870 - DNA, 829 bp, Unknown
  Bacterial polypeptide expressing nucleotide sequence isolated from the Sargasso Sea
atgacaaataataaactaataattcttgggtcagggcctgcaggctacgcagcatctatttatgcagcaagagcaggattaaatcctgtcattatcgctggagctgagcctggcggacaattaacaacaactactgaagttgaaaattggcccggcgacagtgatgatcttcaaggacctgatttaatggaaagaatgaaaaaacatgctgaaaaatttggtgttgagattattaatgatcatatttcaatggtaaaccttaagcagtcaccatttcttctaaatggaacagactcttatgaagctgatacattgataatagctactggtgcatctgctaaatatttaggcctaccatcagagcaagagtttcttggtagaggtgtctcagcttgtgcaacctgtgatggtttcttttataaaggccaagaggttgctgtaattggcggaggaaatactgctgctgaagaggctttgtatctcgctaatatttgttcaaaagttcatcttgttcatcgaagagatgaattaagagcagagaagatacttcaagatagaatatttaagaaggctgatgaggggaaaatcacaatacactggaatagtgaattagaggaggttctaggagatgctagcggtgttacaggtattaaactaaaaaataaagatagttcgatgtcgtcaattgatttacatggtgtattcattgcaattggacataacccaaatacagaaatatttgatggtcagcttgatatgaaagatggatacattgtaattaagtccggtttagatggttcagttacacaaacatctgtacctggagttt

SEQ ID NO: 223871 - DNA, 952 bp, Unknown
  Bacterial polypeptide expressing nucleotide sequence isolated from the Sargasso Sea
atgaataaaaaatcaacaaaacatacaaaagtgttaattcttggatctggtcctgctggctacacagcggctatttatgcggctagagcaatgctcaaaccaatacttgtacatggttctcaacccggaggacaattaactacaactacagatgttgaaaattaccctggatactcaaaagtgattcaaggtccatggcttatggatgaaatgaaaggccaagccgaagctgtaggaacagagatgatacaagatcatatcagcaaagttgacttaacaaaaaaacctttcatagcaacaggtgatagcggtcagatttacactgcagatagttttataatttcaacaggagcacaagcaagatggttaaatttgaaatctgaacaagagtttagaggatttggagtgtcagcctgtgctacttgtgacggatttttctttaaagaaaaagaagtagctgtagttggtggaggaaatgctgctgttgaagaggcaatgttcctcactaaatttgcctcgaaggtatatttaatacatagaagaaacgagttaagagcagaaaaaatgcttcaagctaaattaaaatctaataagaaaatagaaataatttgggatacagtagttgaggatgtcatcggtactaaagatccaaaaactgttaatgcattaaaaattaaaaatgtaaaagataataaagttaaagatcttaaagttgatggtttatttattgccataggtcatgatccagctacatctttatttaaagatcaacttaaaatggacaaagaagggtatttaataacaaaacctgactctactgaaacgaatattccaggagtttttgctgcaggagatgtaaaggataaaatttttagacaagctgttaccgctgctggaatgggttgtatgtcagcacttgaagccgaaaaatatctatctgagtctaattaag

SEQ ID NO: 223872 - DNA, 949 bp, Unknown
  Bacterial polypeptide expressing nucleotide sequence isolated from the Sargasso Sea
atgagtcaaaatccaactaaacacacaaaagtgttaataattggatccggtccagctggttacacagctgcagtttatgctgctcgtgcaatgttaaacccaattttggtttatggatctgaacctggaggtcaattaacgacaactactgatgttgaaaattatcctgggtttgctgatgttattcaaggaccttggttaatggatcaaatgaaagagcaagcaaaagcggttggtactgagatgatagaagatcatatcggatcggtaaatttaaaatcgactccatttgaggcagttggtgatagtggtcaaaaatttactgcagatagtattattatttcaactggtgctcaagcaagatggttgaacataaaatcagagcaagaatatagaggtttcggagtgtccgcatgtgctacatgtgatggatttttctttaaagaaaaagaagttgcagttgttggtggtggtaatgctgctgtagaggaagcaatgtttctcacaaagtttgcttcaaaggtcaaattaattcacagacgtgacagtctgagagcagaaaaaatgcttcaaaaaaaattaatggaaaataaaaaaattgaaataatttgggatactgtaattgaagacgtgattggcgataaagaacctaaaaatgttaaaggtattaaagtaaaaaatgtaaaaacaaataaaattgaagaaatcaaagttgacggtttatttgttgcaattggtcatgatccagcaacttctctattcaaagatcaattaaaaatggacaatgagggatatttaattaccaaaccagattctactgaaactaacgttcctggagtttatgctgcaggtgacgtgaaggataaaacttttagacaggctgtaactgctgctggtatgggatgtatggctgctcttgaagccgaaaagcatctttcaaacaagtaaa

SEQ ID NO: 223873 - DNA, 1378 bp, Unknown
  Bacterial polypeptide expressing nucleotide sequence isolated from the Sargasso Sea
atggagaataaagagatcacttcaaatgtagaaaatgttgtaattattggttcaggtcctgcaggatatacagctgcaatttatgcagcgagagcaaatcttcaaccattgcttgttacaggatttaattctggtggaattcctggtggccaattaatgactacaacgtttgttgaaaattatccaggttttccagatggtgtacttggtcctgaattaatggatctaatgaaagctcaagccgaaagatggggtactaatttatatgaaagtgatgttgtctcaataaatactgattcacatccctttgaattaaaaactttagaaggaactataaaatctaactcaattattattgcaactggagcaagtgcaaatagattaggcgtgataaatgaagataaattctggagtaaaggaataagtgcttgtgcaatatgtgatggagcgaccccacaatttagaggtgaagaattagctgttattggagggggcgactctgcatgtgaagaagcagcatatctcacaaagtatggaagcaaagtgcatttgattgttagatcagaaaaattaagggctagcgcagcaatggtagatagagtaaaagctaatccaaagatagaaattcattggaacacaaaagttaataaagcggatggctctgaatggcttgagaaaatagaaactattcactctctagaaggtaaaggggaaatcaatataaaaggtcttttttacgcgatagggcacacaccaaatacgaagttcttaggcaacaaaattgatttagataataaaggatatattgcttgcaaatcaggaaggccagaaacatctattgaaggcatcttcgcagcaggtgacgttgtcgattctgagtggagacaaggagttaccgctgcaggaactgggtgcatggcagcattagctaccgaaaggtggctagccgagaaaaacttagcaaaaactatagtcagagaaacaccagaaccagaaaaaaaacttaattcatcagattttaatgaagaagaagttaatgaagatactttcgattcaaattctgaatggcaaaaagggagttatgcattaaggaaactttatcacgagagtaaaaaacctatcttagtaatttttagttctccaagttgcggcccatgtcatgttttaaaacctcagttaaaaagggtaattaaagaacttgatggtgcagttcttggcgttgaaatagatattgataaagatcaagatattgcaaaacaagctggtattaatggcacaccaacagttcaactttttaaagaaaaattattaaaaaaacaatggcaaggtgttaaacaaagaagtgagtttaaagaagcgataaaaaatattatctaaa

SEQ ID NO: 223874 - DNA, 247 bp, Unknown
  Bacterial polypeptide expressing nucleotide sequence isolated from the Sargasso Sea
tgctcaggtgttttcatagctatcggacatcaaccaaacacaggtatatttaaagagtatttagatatgcacgataatggttacataaaagtgaatggcggaagtgacggaaattccactgcaacaagtatctcgggggtttttgcagcaggtgatgtctcggattctatatatcgtcaagcaattacatcagcaggttcaggctgcatggcagctctcgatgctgagaaattcttagatgaatagc

SEQ ID NO: 223875 - DNA, 922 bp, Unknown
  Bacterial polypeptide expressing nucleotide sequence isolated from the Sargasso Sea
gatggctgatattaaggatgttattattataggttcaggacctgctggatatactgctgcaatatacgctgcacgggccaatttaaagcctattttagtgagtggttttcagcctggcggtcaacttaccataaccactgatgtagaaaactatccagggtacgaagatcctattcaaggaccatggttaatggaacaaatgcaaaagcaggccgcacatgttggtactgaaataatcaattcacaagtaacagaagtttttttaaacgaaaaaattaaaaaattaaatttagataatggcacaactctaaataccaaaactgtgataattagcacaggagcacaagcgagatggcttggtttagataatgaggctaaatttcaaggtcatggactatctgcttgtgcaacttgtgatggttttttctttaaagataaagaggttgctgttattggtggtggaaatagtgcagctgaggaagcattatttttaactaaatttgcaacaaaagtttatcttgttcacagaagagataaactaagagctgaaaaaatattacaagatcgattaaaacaaaattctaaaatagagtttatttggaatagtgaagtaactaaatttaatggcagtgatgatttagagtcaatagacttgttgaataaacaagataataaaatttcaaatctcaaaatagatggtgtttttattgcgataggtcatgatccagctacacaattatttaaaggtcaactaaaaatggatgatggtggatacattattacagatccagatagcacaaaaacctcgattgaaggagtatttgctgcaggggatgttaaagataagatttatagacaagctgttaccgctgcaggtatggggtgtatggcagctttggaagttgagaagtatttagattga

SEQ ID NO: 223876 - DNA, 660 bp, Unknown
  Bacterial polypeptide expressing nucleotide sequence isolated from the Sargasso Sea
gatgtctgccgttcgtcatgcccgcgtcatcattctgggttccggccctgccggttacagcgcggcggtgtatgccgcgcgcgccaacctgaaaccgctgctgatcaccggtatccaggccggcggccagctgaccaccaccaccgaggtggacaactggccgggtgacccgcatggcctgactggcccggcgctgatgcagcgcatgcaggagcacgccgagcgcttcgagaccgagatcgttttcgaccatatcaacgccgtggatctggccggcaagccattcaccctggtcggcgacagcggtacctacagctgcgacgcactgatcatcgcgaccggtgccagtgcgcgttacctggggttacccagtgaagaggcgttcatggggcgcggcgtttcggcgtgcgcgacctgcgatggcttcttctatcgtggccgcgaggtcgcggtggtcggtggcggtaataccgctgtggaagaggcactgtacctggccaacatcgccagcaaggtgaccctgattcaccgccgcgagaccttccgtgccgagaagatcttgcaggacaagctgcgcgcgcgcattgccgaaggcaagatcgagctgcagctcaatgccgaggtagatgaggtgttgggcgatgccagcggcgttaccgg

SEQ ID NO: 223877 - DNA, 940 bp, Unknown
  Bacterial polypeptide expressing nucleotide sequence isolated from the Sargasso Sea
atgtcagacaatcataacaaattaataattttaggttcaggtcctgctggttatgcagcaagtatttacgctgccagagctggtttagatccaatcataattgcaggtatgcaggaaggtggtcaattaactaccacaactgatgttgaaaattggcctggtgatagtgacggtctccaaggaccagaattaatggaaagaatgaaaaaacatgcacaagagtttgatgttgagataatcaatgatcatataaatgaggttttattgactcaaaaaccatttaccttaaaaggagttaacgagtattcatgtgattctcttattattgcaactggtgctagtgctatgtatcttggtctgccctcagaaaaaaaatatttaggtaaaggtgtttccgcttgtgcaacatgtgatggttttttctataaagatcaagatgttgcagttattggaggtggtaatactgcggcagaagaagcattgtacttagcaaatatatgttcaaaagtatatttagttcatagaagagatgaattaagagcagaaaaaattttacaagataggatatttaaacaagaggaagctggcaaaattgagattttgtgggatacacaacttaaagaagtttgtggcgatgatatgggtgttacatcaataaaattagacaataaaggttctgaaatttcaaaggaagtcatgggcgtttttattgcaataggccataaaccaaatactgaaatatttgatggacaattagatatggacaatggttacatcatcatcaaatcaggtttaaatggatctgtcacaagctcatctgttgaaggtgtttttgctgccggtgacgtatcagatcaaatttataggcaagcagtaacctcggcaggatttggatgtatggcagcgttagatgctgaaaaatatttatctgaatcataat

SEQ ID NO: 223878 - DNA, 808 bp, Unknown
  Bacterial polypeptide expressing nucleotide sequence isolated from the Sargasso Sea
ggtcagctaatgcttactaccgatgttgagaattatcctggttttgttgatggaataatgggccctgagctaatgcaagttttcaaaggacaggctgaaagatttggcacagaaattaagacagaaattattgactcaattgaaaatattgatggaggttttaagttaaccagtagtaaaggtgagtacgaatttaaatctgtaattattgcatcgggtgcgtcagccaggtggcttggcgttgaaggtgaaaaagaacttcaaggatatggtgtttctgcttgtgcaacctgcgatggattcttttttaaagaaaaggaagtagcagtagttggtggtggagattcagcaatggaagaggctttgtttctaaccaagtttgcaacaaaagtatatgtgatacatagaagagatcagtttagagctagtcaaataatgcaggatagggttttaaatcatgaaaaaattgaagttatttggaacagtactgttgaaaaaattattggtgatggtgctgtgtcttctgtagttctaaaaaatactgaagatggttcagagtctgaacttaacttagacggcgtttttgtagcaattggtcatgatccaaacatagagtttcttaacaatttcgtagaattagatgaaaagggatatataaaaactgggtttacaacagacactagtacttctgttcctggggtctttgccgcaggagatgttgcagattccatatatagacaagcaattactgcagcgggaaccggttgtcaggcagctattgattctgaaagatggttagatcattaat

SEQ ID NO: 223879 - DNA, 946 bp, Unknown
  Bacterial polypeptide expressing nucleotide sequence isolated from the Sargasso Sea
tatggaaactattaaaagaaagcttgtaatattaggttctggtcccgccggatatacagcagcagtttatgctgcaagagcagggctcaagccttgtttagtaacaggtatggaacaaggaggtcaattaaccaccactactgacgtagagaattggccgggtgatagcgatggtctacaaggtcctgagctgatggataggatgttaaagcatgtagagtctttggaagttgaagtgatatttgatcacattgaatctgcaaacttatcagagccttttgctcttgtaggtaatgttaataagtatgatgctgagtcattgatcattgctacaggagcctcagctcaatatctagggcttgaaagtgagcagagttatatgggaaaaggagtcagtgcttgcgccacttgtgatgggtttttctacaaagataaggatgttgctgtagtaggaggaggaaatacggcagtagaagaagctttatatctttcaaatttatgttcatctgtaactctgatccacagaagagactcactgagggcagaaaaaattttacaagagagattattcaagaaagaaaaagaagagaatgtcaaaatcatatgggaccatgaattaatagaagttctcggagatgattcagttgtaaatggcatcaagataaaaaatacaaaggatgaaaaagaaacaaaaataaatttatctggtttatttattgctattggacataaaccaaacactgacttgttcaaggatcaattggatatggaaaatggatatattaaaataacttcaggttcaaatggaaatagcacagaaactagtgtgccaggtgtctttgctgcgggtgatgtttctgatcatatttatagacaagctataacatcagcaggatcaggctgcatggctgcattagatgctgagaagtatttagcggaaaaataa

SEQ ID NO: 223880 - DNA, 880 bp, Unknown
  Bacterial polypeptide expressing nucleotide sequence isolated from the Sargasso Sea
tatgacaaataacaaactaataattcttgggtcagggcctgcaggctacgcagcatctatttatgcggcaagagcaggattaaatcctgttattatcgctggagctgaacctggcggacaattaacaacaacaactgaagtagaaaattggccgggcgacagtgatgatcttcaagggcctgatttaatggaaagaatgaaaaaacatgctgaaaaatttggtgttgagattattaatgatcatatttcaaaggtagatctagagcagtcaccatttcttctgagtggaacagattcttatcaagctgatacgcttataatagctactggtgcatctgctaaatatttaggtctcccatcagaacaagaatttcttggtagaggtgtatcagcttgtgcaacctgtgatggtttcttttataaaggccaagaggtcgctgtaattggtggaggaaataccgctgctgaagaggctttatatctcgctaatatttgttcaaaagttcatcttgttcatagaagagatgaattaagagcagagaagatacttcaagatagaatatttaaaaaggctgatgaaggggtaattgaaatacactgggacagtgaattagaagaggttctaggagatgctagcggtgttacaggtattaaactaaaaaataaagataactcaatgtcgtcgattaatttgcatggagtattcattgcaattggacataacccaaacaccgaaatatttgatggtcagctagatatgaaagatggatacattgtaattaagtctggtttagatggctcagttacacaaacatctgtacctggagtttttgctgctggcgatgttgcagataaagtttacagacaagcaattacttct

SEQ ID NO: 223881 - DNA, 664 bp, Unknown
  Bacterial polypeptide expressing nucleotide sequence isolated from the Sargasso Sea
ccatttatcctaaaaggagttaacgagtattcatgcgattctctaattattgcaactggtgctagtgctatgtatcttgtctttccttcagaaaaaaaatatttaggtaaaggtgtttccgcttgtgcaacatgtgatggttttttctataaagatcaagatgttgcagttattggaggcggtaatactgcggctgaagaagcattatacttagcaaatatatgttcaaaagtatatttagttcacagaagagatgaattaagggcagaaaaaattttacaagataggatatttaaacaagaagaagctggcaaaattgagattttatgggatacacaacttaaagaagtttgtggcgatgatatgggtgtcacatcaataaaattagacaataaaggtactgaaatttcaaaggaagtcatgggtgtttttattgcaataggccataaaccaaacactggaatatttgatggacaattagatatggacaatggttacatcatcatcaaatcaggtttaaacggatctgtcacaagctcatctgttgaaggtgtttttgctgccggtgacgtatcagatcaaatttatagacaagcagtaacctccgcaggatttggctgtatggcagctttagatgctgaaaaatatttatctgaatcataat

SEQ ID NO: 223882 - DNA, 949 bp, Unknown
  Bacterial polypeptide expressing nucleotide sequence isolated from the Sargasso Sea
atgaataataagtcttctaaacacacaaaagtgttgattcttggatctggcccagcaggatatactgctgcgatttatgctgctagagctatgcttaagccgatattggtgttcggctcagaacctggtggacaattaaccacaactactgatgttgaaaactttccaggttattcaaaagtaattcaaggaccctggctaatggaagaaatgaagggacaggcaaaagccgtgggtactgaaatgattcaagatcacatatgcaaagtagatctttccaaaaaaccttttgaagctgtgggtgatagcggtcagcgatatacagctgatagctttattatatcaaccggagctcaagcgcgatggttaaatataaaatcagaaactgaatttagaggatttggtgtatcagcttgcgcaacatgtgatgggttcttttttaaacaaaaagaagttgctgttgttggcggaggtaatgcagcagtagaagaagctatatttttaacaaaatttgcatcaaaggttaaacttatacatagaagaaatgagttaagagcagaaaaaatgcttcaagcaaaattaaaagcaaataaaaaaattgaaattatatgggatagtgttgttgaagacgtgtttggagaaaaaaaccctaaatcagttaaaggtataaaaattaaaaatgttaaaacaagcaaagttagtgagattaaggtggatggactttttattgctattggacatgatcctgctacttcgctgtttaaaggtcaattaaatatggataaagagggatacatagtcaccaaaccggactctacgattactaatgtgccaggagttttcgcagctggtgatgttaaagataaaatattcaggcaggcagttaccgcagctgggatgggctgtatggctgcactggaagctgaaaaacatttatcatcaaaatgag

SEQ ID NO: 223883 - DNA, 937 bp, Unknown
  Bacterial polypeptide expressing nucleotide sequence isolated from the Sargasso Sea
atgacacagcaattaataatattaggatcaggtccagcaggatatactgcagccgtttacgcagcaagagcaaatttaaaacctctattaataacagggttagaagtcggtggacaattaacaactaccactgaagtagaaaattggcctggcgattttgaagatctgcaaggaccagaccttatggttcgcatgcaaaaacatgctgaaaagtatcaagtagatatacgcaatgattatattaaaaaggtagatttatcaaaccaacctcttctgctgcatggcgaaaaagaatcttatgaaacaaaaagtttaataattgctacaggagcaagtgcaaaatacctaggcttagatagtgaaaaagcttttcttggtaaaggagttagtgcatgcgctacatgtgatgggtttttttataaagatcaggaagttgcagtagtaggtggcggtaacacagctctagaagaagccttatatttgagtaatatctgttctaaggtacatttaatacatagaagggatgaatttagaggggaaaagattttacaagatcgagtgcataaaaaggtatctgagggcaaaatttcattaatacttaattctacacttaaggaagttcttggcgatggtgctgtttcagctataaacatacttaataatgatggaacagaaagcaatttatcggttgaaggtgtttttatagcaattgggcacactcctaatacggatatctttaaagacaaattagacatgaaagatggctatattattactaaaacaggttttaatcttggttctacatcaacatccgttaaaggagtttttgcagctggagatgtagcagattataactacagacaagcaattaccagtgctggttttggttgcatggctgctctagatgctgaacactacttatctaatttagattagc

SEQ ID NO: 223884 - DNA, 952 bp, Unknown
  Bacterial polypeptide expressing nucleotide sequence isolated from the Sargasso Sea
catgagccaagtcactcatagcaaactgctgatcttagggtccggcccggcgggttacactgccgccgtctatgccgcccgtgccaacctcaatccgctgctcatcaccggcatgcagcaaggcggtcagctgacgaccaccaccgaagtggagaactggcccggtgaccccgaggggctgaccggtccggccctgatggagcgcatgaaagagcatgcggagaagttcgacacccgcatcctgtttgatcacatcaatgaagtgcaactgacccagcgtccgttccgtctcaagggcgacaacggtgaatacacctgtgatgcgctgatcatcgccaccggggcctccgccaagtatctgggcctgccttccgaagaggccttcaagggccgcggcgtctccgcctgcgccacctgtgacggcttcttctatcgcaatcaggaagtggccgtggtcggcggcggcaacaccgccgtggaagaggcgctctatctggccaacatcgccaagaaggtgcacctcattcaccgtcgcgacgagttcagcgccgagaagatcctgatcaagcgtctgcacgacaaggtggccagcggcaatatcgtactgcacacccaccagactctggacgaagtgctgggcgacgacatgggggtgaccggcgtgcgtctgcgcaacacccagaacgacaccaccaccgacctgccactgatgggcgtcttcatcgccatcggtcaccagcccaatacccagatcttcgccgaccagctggatatgcagaacggctatctgaaggtgcgtggcggcctcgacggcttcgccacccagaccagcatcgaaggggtctttgccgccggtgacgtggctgaccacacctaccgccaggccatcacctcggccggtaccggctgtatggccgccctcgatgccgagcgctatctggacgcgcaataa

SEQ ID NO: 223885 - DNA, 937 bp, Unknown
  Bacterial polypeptide expressing nucleotide sequence isolated from the Sargasso Sea
atggaacagcaattaataattctaggttcaggtccagcaggttacacggcagctgtttatgctgctagagctaatttaaaaccgttattaataacaggtttagaagttgggggacagctaacaactactacagaagtagagaattggcctggagattttgaagacttacagggccctgatcttatggttcgcatgcagaaacatgcagaaaaatatgatgtagatatacgaactgattacgttaagagtgttgatctatctaatcagcctctagtactgcatggtgaaaaagatacttatgaaacaaaaagtttaattatagcgactggtgctagcgctaaatatcttggtttggaaagtgaaaaagcatttttaggtaaaggcgtcagtgcttgtgctacatgtgatggattcttctataaagatcaagaagttgcagttattggcggtggaaatactgccctagaagaagccttgtatttaagcaatatatgttcaaaagtacacttaattcatagaagagatgagtttagaggggaaaaaattttacaagatagagtatttaaaaaagttgaagaaggaaaaatatcattaattttagactctacactaaaagaagttattggaggtgatgcagtttcaggaatagttattctcaataatgatggcagtgagagcaacttaccagtagaaggagtttttatagctataggacatacacctaatactgatattttcaaggataaattagacatgaaggatggttatattgtcactaaaactggttttgatataggttctactgcaacttcagtttcaggtgtttttgcagctggagatgtagcagattataactataggcaagcagtaactagtgctggttttggatgtatggccgcattagatgctgaacactatctatctaatctagattaac

SEQ ID NO: 223886 - DNA, 951 bp, Unknown
  Bacterial polypeptide expressing nucleotide sequence isolated from the Sargasso Sea
gtatgagtgaaaaaccaactaaacatacaaaagtgttaataattggatcagggccagctggttatactgctgccgtttacgctgcaagagccatgcttaaaccaatgttagttgctggtatgcaaccgggtggtcaattaactataactactgatgttgagaactaccctggatttgcagatgttattcaaggaccatggttaatggaacaaatgagggaacaggcaaaggcagttggaaccgatttagttgaagatcatatccaatcagtaaatttaaaatctaaaccgtttgaggcaattggtgatggaggacaaaaatatactgcagactcaattattatttctactggagcacaagcaagatggttaaacattgagtctgaacaaaaatttaaaggatttggagtatcggcatgtgcaacatgtgatggctttttttttaaagataaaacagttgcagttgttggtgggggaaatgctgcagtagaagaagctatgtttcttacaaaatttgcatcaaaggtacaattaattcatagacgagatgaacttagagctgagaaactattacaaaaaaaattaatggaaaataaaaaaattgagattatttgggactcagttgttgaagaagtaataggtgatgatgagccaaaaaatgtaaaaggattaaaaattaaaaatgttaaaactaacgaaacatcagatttaaagatagatggattatttatagctattggacatgatcctgctacatctttatttaaagatcagctagaaatggatagtacaggctatttaattactaaaagcgattctaccgagaccaacattccaggagtttacgcagctggagatgtgaaggataaaatttataggcaggcagtaactgcagcaggaatgggttgtatggctgcattagaggcagagaaatatttagctgcaaattaat

SEQ ID NO: 223887 - DNA, 955 bp, Unknown
  Bacterial polypeptide expressing nucleotide sequence isolated from the Sargasso Sea
aatgtctgaatctatcgaaaaagtaaaatgtcttattgtaggatctggtcctgcaggtttcacagccgctatttatgcatcaagagcaaacatggctccagtgttgtaccaaggaatgcagcctggtggtcaattaaccaccacaacagatgttgacaattaccctggttatccagaaggtgttaacggtactcaaatgatggtagatttagagaatcaagccaaacgttttggaacagacgttcgaatgggaatgattacaaaagtagatttcactggacctgtacataaggtatgggtggacgatactaaagaaattcattctgataccattattatttcaacaggtgcatctgctcgttacttaggacttgagtccgaacaacattatttagccaacggtggtggggtttcagcttgtgctgtttgtgatggattcttttataaaggtcaagataccataattgttggtgcaggagattctgcttgtgaagaagcttcatatttggccaatatatgtaccaaagttactatgttggttagaagagatgagtttagagcctctaaaattatggctgaaagagtaaggggaattaataatattgagatattacacaatacagaattggatgaggtattgggagatggaaatgtagttactggcgttagagtggttaataatcaaacacaagccaaacacgaaataccttgtactggagctttcattgcaataggtcacacgcctaatactcaggtatttagcccatggttagaaatggatgaaacaggttatattgtaaatgttccggggtcatcaaaaaccaatgttgaaggtgtttttgtttcgggtgatgctgccgatcacgtttaccgtcaggcggtaacagcagctggtacaggttgcatggctgcattagatgccgaaaggtatttagctgcaaaaggactacattag

SEQ ID NO: 223888 - DNA, 706 bp, Unknown
  Bacterial polypeptide expressing nucleotide sequence isolated from the Sargasso Sea
atgcacaggaaagtaattataatcggttcgggtcccgctggcttaacggcagcggtctatgcagcccgagccaatctagaaccactcgtttttgaaggctcccagcctggcggtcagctaacaataaccacagacgttgagaattttccagggtttcccgatggtattatggggccagagctgatggatcacatgaggaaacaagcgcaacgttttggagcgacatgcgagtataagaccgtagacaaggtagaactcttaaaaaacccttttatcgtttgggttaaggatgagaaatacacagcggactctgtgattatatctactggtgcttctgcccgtttattggggctggagtctgaagctgagctaatgggatatggtgtatctgcgtgtgcaacatgcgatggtttctttttcaaggaaaaagaagttttggttgttggtggtggagactcggccgcggaggaggcaatctttttgacgaagtttgcttctaaggtaacgattgttcacaggagagatgagcttagggcatcgaagattatgcaggaacgagtctttgaaaataataacatagagattatgtggaacagcgcagttgaggatattactggaaataaagacactggagtaactggggcagtaatcaaagacactatatcaggtaaaacaaaaaacattacctgtgacggggtttttatgg

SEQ ID NO: 223889 - DNA, 949 bp, Unknown
  Bacterial polypeptide expressing nucleotide sequence isolated from the Sargasso Sea
atgtcagaaaaaccaactaaacatacaaaagtgttaataattggatcaggtcctgctggatatactgcagcagtttacgcagcaagagcaatgctaaaaccaatattagtctacggttctgaaccaggtgggcaacttacaacaaccaccgatgtagaaaattatccaggttttgcaaaagctatacagggaccatggttgatggagcagatgaaagaacaagctcatgcagttggtacagagatgattgaagatcatatttcatctgtaaacttaaaatctaaaccttttgaagcaataggtgatggtggtcaaaaatatactgcagactcaataattatatcaacaggtgcacaagcaagatggcttaatttaaagtcagaacaagaatttaggggatttggtgtatcggcatgtgcaacatgtgatggttttttctttaaagataaagaagttgcagttgttgggggtggaaatgcagctgttgaagaggcaatgtttttaaccaaatttgcatctaaagtaaaattaatacatagacgggataaattaagagctgaaaaattattacaaactaaattgatggaaaataaaaagatagaaataatatgggacagtgttgttgaagaggtaattggtgatgacaatcccaaaaatgtaaaaggtattaaaataaaaaatgttaaaactaatgaggtaactgaggtgaatttagacggtgtttttattgcaattggtcatgatcctgcaacagaattatttaaagaccaacttaaaatggataatgagggatatttagtaacaaaatctgattccactgaaaccaacgttcctggagtttttgcggcgggagacgtaaaggataaagtgtttaggcaagctgtaacagctgccggaatgggctgcatggcagcacttgaggcagaaaaacacctctcacataattaaa

SEQ ID NO: 223890 - DNA, 961 bp, Unknown
  Bacterial polypeptide expressing nucleotide sequence isolated from the Sargasso Sea
atgactgaatctatacatcataaattaatcatccttggatctgggccggcgggctattctgctgctgtttatgcggctcgtgccaatctaaagcctgttatcatcactgggtctgaacctggtggacaactcatgactacgacggatgttgagaattggccaggcgatcctgagggcttattaggccccgctcttatggatcgaatgctggaacatgcaaaaagatttgatacagaagtcatttacgatcacattgagagtgcggaacttggctcaaggcctttcactttaaatgggggtaatgccaaatacactgctgatgcattgattattgcaacaggatcaaccgccagatatttaggcttagagtcagaggaaaaatttaagggcaaaggtgtatctgcttgtgctacttgcgatggttttttctataaagatcaggatgtaatagtcgttggtggcggaaatgttgcagttgaggaagctatttatttatccaatattgcaaagaatgtgacgctgatacatagaagagatgaactcagagcagaaaaaatgcttcaagataaactttttgaaaaaacagataacaaaggaaatataaaaatcctatggaaccatgttttggatgaagtactgggagatgaagctggagtaaatggcattatttgttcagatgtcaatgatccatcaaacaaaactgaattggatgttcaaggtgtctttatagccattggtcatgatccaaatacgtctttctttggaggtaatttaaaattagatgaatctaattacataattctagatgattccaatggtcgatttgccactcaaacaagtatagaaggggtatttgcagctggagatgttgctgatcccgtatacagacaagctgtgacctctgcggggagtggttgcatggctgcattggatgcagaaaaattcttagaacaaagctagt

SEQ ID NO: 223891 - DNA, 808 bp, Unknown
  Bacterial polypeptide expressing nucleotide sequence isolated from the Sargasso Sea
gacaattacacagatgtagaaaattaccctggctttgctgatattattcaaggtccatggctcatggatcaaatgaaagatcaagctcttagtgttggaacaaatattgtgtttgatactattattgatgttgatttatcaagcaaaccgttctctttacaatctgactcaggtaaaaattacacatgcgatgcattaataatttcaacaggagctcaagcaaaatggctaggtctagagtcggaaaataaatttaaaggttacggagtttcagcatgtgcaacctgcgatggttttttttataaagataaaacagttgttgttgttggcggaggaaatactgcagctgaagaagctatttttttaaccaactttgctagtgaagtaaaattaatacatagaagagactcattaagggcagaaaaaattcttcaaaaaaggctcatggataataaaaagattgaaattatctggaactcagaaattacagaaataattggtgatgaaaatccgttaagtgtgaagcaggttgtcctaagaaataacaaagatgacagcacaaaactcatagatactgatggtatctttgtggctattgggcatagtccagcttcaatgatattcaaaaatcaacttaatatggatgataaaggttatatctttactgaagctgactcaacaaaaacaaatgtagaaggtgtttttgcggcaggagatgttacggatgataaatatagacaagctgttacggctgcaggtatgggatgcatggctgctcttgaagttgaagagtttttatctgaataaa

SEQ ID NO: 223892 - DNA, 955 bp, Unknown
  Bacterial polypeptide expressing nucleotide sequence isolated from the Sargasso Sea
aatgagccaagtcagacacagtaacctattgattttaggttcaggtcccgcaggatacacggccgcagtttatgctgcgcgcgcaaacttaaagcctgtgatgatcacaggtatgcagcaaggtggtcagttaaccaccacgactgaagttgaaaactggccaggtgatgcagaagacttaacgggtccagcattaatggaacgtatgcaaaagcatgcggaaaagtttgatactgaaatccttttcgaccatatcaatgaagtgacgctgactgagcgccctttccgtctaaaaggcgataacggtgaatacacttgtgatgcgctgatcattgcgacaggcgcctctgcccgttacttaggtctggagtcagaagaagcgttcaaaggacgcggcgtatcggcttgtgcgacctgtgatggtttcttctatcgcaatcagaaagttgcagtcattggtggcggtaacacagccgttgaagaagcgctgtatttgagtaatatcgccgccgaagtgcacttaattcatcgccgtgacaccttccgctcagagaaaatccttatcgaccgtttaatggataaagtagctaacggcaacattatcctgcacctagatcaaaccatggaagaagtggttggtgatgctatgggtgtgactggcctgaaaatgaagagcaccaaagatggcgctatcacagatctggccgttgccggtgtgttcgtggccattggtcacagcccaaatactgggattttcgaaggccagttagagatgaacaacggctatctaaaggtgcaaagtggccttcaaggtaatgcgactcaaaccagcatcgaaggtgtgtttgccgcaggtgacgttatggaccaacattaccgtcaggcgattacctctgcgggtaccggttgtatggcagcattagatgctgagcgttacttagacgctaaaaaataa

SEQ ID NO: 223893 - DNA, 952 bp, Unknown
  Bacterial polypeptide expressing nucleotide sequence isolated from the Sargasso Sea
catggaaaataattcaaaaaaacattcgaaagtgttgattataggatccggtcctgctggatatactgctgctatttatacagctagagcaatgcttaaacctattctagtttatggatctgagccaggtggtcaaatgacaacaacaactgatgtacaaaattatcctggatactctaatgttattcaaggaccatggttaatggatcaaatgaaagaacaagcgaaagccgttggaactgatatgattcccgaccatattagtaaagtcgatctgagcaagagaccctttaaagccacgggtgatagtggacaagaatacacagctgattcaattataatttcaactggtgctcaagcaagatggctaaatttaccatctgaacaaaagtacagaggatttggagtttcgggatgcgcaacatgcgatggtttcttttttaaagataaagaagtagcggttataggtgggggaaatgcagcagtagaagaggcaatttttctgactaaatttgctacgaaagttaaacttatacatagaagaaatgaattacgtgcagaaaaaatgctgcaaaaaaaattaatggaaaataaaaaaatcgaaattatttgggattccgtccttgaagaagttttgggaaatgaaaaaccaaaaggtgtaactggaattaaaatcaaaaatgtaaaaacaaataaaactactcaacacaatgtgcatggactatttattgctataggacatgatccagcaacatctctatttaaaggccaattggatatggataaagaaggttatttaattacaaaaccagattctactcaaacaaataagccaggtgtttttgctgctggagacgtaaaagacaaagtttttagacaagcagttacagcagccggaatgggctgtatgtctgctcttgaagctgaaaaatttttgtctacaaaaaattaa

SEQ ID NO: 223894 - DNA, 497 bp, Unknown
  Bacterial polypeptide expressing nucleotide sequence isolated from the Sargasso Sea
tatgagtgataatccaactaaacacacaaaagtgttaataattggatccggtcctgccggatacaccgcagctgtttatgcagcacgagcaatgttaaatccaattttggtctacggttctgctcctggtggacaattaagtacaacaacagatgtagaaaattatcctggttttgctgatgtaattcaaggaccttggttgatggatcaaatgaaagatcaggctaaagctgtaggaacagaaatgattgaagatcatatttcttcagtaaatttaaaatctgtgccatttgaagctttaggagacagtggccaaaaatatactgcggatagcataattatttcaactggtgcacaagcgagatggttaaatttagagtcagaacaaaaatttagaggctttggagtttctgcatgtgctacttgtgatggtttcttctttaaagataaagaagttgcagttgttggtggtggtaacgcagctgttgaagaagcaa

SEQ ID NO: 223895 - DNA, 940 bp, Unknown
  Bacterial polypeptide expressing nucleotide sequence isolated from the Sargasso Sea
aatgtcagagaatcataataaattaataattttaggttcaggacccgctggatatgctgcgggaatatacgcagcacgtgctggtttaaatcctataattattgctggcattcaagaaggtgggcaacttacaacaactactgatgttgaaaactggcctggagatagcgaaggacttcaagggcctgagcttatggaaagaatgaaaaagcatgcattacaatttgatgttcaagttgtaaatgaccatattaatagcgttgacctatcaaaccaacctttcaaattatacggaaattcagaatacgaatgtgagtcattaatcatctcaactggcgcaagtgcaatgtatttagggttaccctctgaaaaagaatatctaggaaaaggagtttcagcttgtgctacatgtgacggatttttttatagagatcagaaagttgcagtaattggtggagggaatactgctgcagaggaagcactttatttgtctaatatatgctctaaagtgtatttagttcataggagagatgaacttagagcggaaaagattttacaagatcgtatttttaaacaagaacaggaaggtaaaattgaaattttatgggatacgcaattaacagaagttgttggagacgataaaggtgtcactagtatcaaattagatactaaaggtgaagaatcaacaaaggatgttatgggtgtttttatcgcaattggtcacaaaccaaatactgaaatgtttactaatcaattagaaatggataacggttatattattattaaatctggtctcaacggatcagttacaagcacctccattgaaggtgtttttgcagcaggagatgtatccgatcaagtctatcgtcaagctatcacgtccgcaggctttggctgcatggctgcacttgatgcagagaaatatttatctgaaaaataa

SEQ ID NO: 223896 - DNA, 580 bp, Unknown
  Bacterial polypeptide expressing nucleotide sequence isolated from the Sargasso Sea
atgacaaataaaaaactaataattcttgggtctggacctgcaggctactcagcatctatatatgcagcaagagcaggattaaatccagttattatagctggagctgaacctggtggacaattaactacaactactgaagtagaaaattggcctggcgacagcgatgatcttcaaggacctgatttaatggaaagaatgaaaaagcatgctgaaaaatttggtgttgagattattaatgatcatatttcaaaggtaaatcttaatcattcaccatttcttctaaatggaacagattcttatcaagctgaaacgctgataatagctactggtgcatctgctaaatatttaggtctaccatcagaacaagagtttcttggtagaggtgtctcagcttgtgcaacctgtgatggtttcttctataaaggccaagaggttgcagtaattggtgggggaaataccgctgctgaagaggctctgtacctcgctaatatttgctcaaaagttcatctagttcatagaagagatgaattaagagcagagaagatacttcaagatagaatatttaagaaggctgatgagg

SEQ ID NO: 223897 - DNA, 574 bp, Unknown
  Bacterial polypeptide expressing nucleotide sequence isolated from the Sargasso Sea
tatgaatcaaaatccaactaaacacacaaaagtgttaataattggatctggtccagccggatatacagctgcggtttatgctgcaagagcaatgttaaaacctattatggtttctggtatggagccaggcgggcaattaactaccacaactgatgttgaaaactatcctggttttgctgaagtaattcaaggaccatggttaatggagcaaatgcaagaccaggctaaagcagtaggcacagaaatgatcgaagatcatatttcttcagtaaatttaaaatcaaaaccttttgaggcaataggagatggtggtcaaaaatatactgcggattcaattataatttcaaccggagctcaggcaagatggttaaatattgaatcggaacaaaaatttagaggatttggtgtatcagcttgtgcaacatgtgatggatttttctttaaagataaaactgttgcagttgtaggtggtggaaatgctgcagttgaagaagcaatgtttcttacaaaatttgcatcaaaagttcaattaattcatagaagagattctttaagagctgaaaaaatgcttcaa

SEQ ID NO: 223898 - DNA, 943 bp, Unknown
  Bacterial polypeptide expressing nucleotide sequence isolated from the Sargasso Sea
atgggtaatattcatagttccaccttaatactaggttctggagcagcaggacttactgctgcaatttatacagcccgagcaaaccttaaacctactctaatccacggaattcagccgggcggacaaatgacaataacaactgatgtagaaaattaccctggatttgcagatgtaattcagggaccctggttgatggaacaaatgagtgcgcaagcggaaaatgttggtaccaacatgataaatgatatcattacagaggccagcctatcttcaaaaccatttgagctaactggtgattccggcaaccaatatacttgcgacgccttgataataagtacgggtgctcaggctaagtggcttggcctagaaagtgaagacaaattccaaggatttggtgtttctgcatgcgcaacttgtgatgggttcttttttcgggataaaaatgtagttgtaataggcggaggcaatactgcagtagaagaagcactctatctcactaatcatgcaaataaggtaactttaattcataggcgggatacattgcgtgcagaaaaattgcttcaagaccgccttatgaaaaataaaaaaatagaaatagtttggaatacggtagtaaaagaaattttgggtaaagaggaaggtactttaaaggaattaaccggtgtgaaagttgaagatcttaaggaaaataaaacttcggagataccaacagatggtgtgtttgttgctataggccacgttccaaataccggtatttttaatggtcagctaaacatggataaagaaggttatattattaccaagccagatagcacggctactaatatagaaggcgtatatgcggcgggtgatgttcaagaccctatttaccgtcaagctgttacagccgccggcactggatgcatggctgctctagaggcagaaaagtatttaagcgtataat

SEQ ID NO: 223899 - DNA, 563 bp, Unknown
  Bacterial polypeptide expressing nucleotide sequence isolated from the Sargasso Sea
tatgaatcaaaatccaactaaacacacaaaagtgttaataattggatccggcccagctggatatactgctgcagtttatgctgctagagcaatgcttaaaccaattatggtttctggaatggaaccaggtggacagttaacaactacaactgacgtagaaaattatcctggtttcgctgaggtaattcaagggccatggttaatggatcaaatgcgagaacaagcaaaggctgtgggaactgaaatgattgaagatcatatttcttcagtaaatctaaaatctaaaccatttgaagctattggtgacggtggacaaaaatacactgcagactcaattataatttctaccggagctcaagcacgatggctgaatatagagtcagaacaaaaatttagaggctttggagtatctgcatgtgcaacatgtgatgggttcttttttaaggataaaactgttgctgtagttggtggaggtaatgctgcggtagaagaggcaatgttcttaacaaaatttgcttctaaagttcaattaattcacagaagagatgcactagagcagaaaa

SEQ ID NO: 223900 - DNA, 955 bp, Unknown
  Bacterial polypeptide expressing nucleotide sequence isolated from the Sargasso Sea
aatgagccaagtcagacatagtaacctattgattttaggttcaggtcccgcaggatacaccgctgcagtttatgctgcgcgcgcaaacttaaagcctgtgatgatcacaggtatgcagcaaggtggtcagttaacgaccacgactgaagttgaaaactggccaggtgatgcagaagacttaacgggtccagcattaatggaacgtatgcaaaagcatgcggaaaaatttgatactgaaattctgttcgatcatattaatgaagtgacgctaactgagcgccctttccgtttaaaaggcgataacggcgaatatacctgtgatgcgctaatcatcgccactggcgcctctgcccgttacctaggacttgagtctgaagaagcgttcaaaggacgcggcgtatcggcctgtgcaacctgtgatggtttcttctatcgtaatcaaaaagttgcagtgattggtggtggtaacacagccgttgaagaagcactatacctaagcaatatcgccgccgaagtgcacttaattcaccgtcgcgacaccttccgctcagaaaaaattcttatcgaccgtttaatggataaagtcgccaacggcaacattatcctgcatctagaccaaaccatggaagaagtggttggtgatgcaatgggtgtaacaggtctaaaaatgaagagcaccaaagacggttctatcactgatctagccgttgccggtgtgttcgtggccattggtcacagcccaaacacagggatttttgaaggccaattagagatgaacaacggctatttgaaggtgcagagtggtctccaaggtaacgccacgcaaaccagtatagaaggcgtgtttgccgcaggtgatgtgatggaccaacattaccgtcaagcgattacctctgcgggtacaggttgtatggcagcattagatgccgagcgttacttagacgcgaagaaataa

SEQ ID NO: 223901 - DNA, 1000 bp, Unknown
  Bacterial polypeptide expressing nucleotide sequence isolated from the Sargasso Sea
catgcccgcaacttccacgaaacacgccaaagttctgattctcggttccggtcccgccggctatacggcagcggtctatgcggcgcgcgccaacctgtcgccggtgctcgtcacgggcctcgcccagggcggccagctgatgaccacgaccgacgtcgaaaactggcctgccgacgcccacggcgtgcaaggcccggaactgatggggcgcttcctggagcatgccgagcgcttcaacactgaaatcattttcgaccacatccacacggccaagctggacgaaaagccgattcgcctgatcggcgatgcgggcgaatacacctgcgactcgctgatcatctcgaccggcgcatcggcgcagtatctcggcctgccgtccgaagaagcattcatgggcaagggcgtgtcggcttgcgccacctgcgacggcttcttctacaagcaacaacatgtggccgtgatcggcggcggcaataccgcggtcgaggaagccctctacctcgccggtatcgcaaagaaggtcacggtgatccatcgccgcgacaagttccgcgccgaaccgatcctgatcgaccgtctgctggcaaaggaaaaggaaggcgtggtcgagatcaagtggaacagcacgctcgacgaagtgaccggcgaccagtcaggcgtgaccggcctgcgtatcaagaacacgaaaaccggcgacaccactgatatcgcggtgcagggcatcttcgtcgcgatcggccacaagccgaacacggatattttcgaaggccagcttgagatgaagaacggctacatcatcaccaagggcggcctgaacggttttgccacggcaaccagtgtgcctggcgtgttcgcggcgggcgacgtgcaggatcacgtgtatcgtcaggcgatcaccagcgcgggcacgggctgtatggccgcactcgacgcccagcgctatctggaaagcgtcgaagaaattggcgagcacgtgatgagcgcggaagccgagcgttga

SEQ ID NO: 223902 - DNA, 946 bp, Unknown
  Bacterial polypeptide expressing nucleotide sequence isolated from the Sargasso Sea
tatgagtcaaaatccaactaaacacacaaaagtgttaataattgggtctggtcctgctggatacactgctgcagtttatgcggcgagagcaatgttaaatccaattttggtttatgggtcggagcctggaggccaattaactacaacaacagacgttgaaaactttcctggatttgctgatgttattcaaggtccgtggcttatggatcaaatgaaagagcaagcaaaagcagttggaacagaaatgattgaagatcatataagttcagtaaatttaaaaacaaaaccttttgaggctgtaggtgacactggtcaaaaatatactgctgatagcattataatttccacaggtgcccaagcaagatggttaaatattaaatccgaacaagagtttagaggatttggtgtatcagcatgtgcaacttgtgatggttttttctttaaagataaagaggttgctgttgtaggtggaggtaatgcggctgtcgaagaggcaatgtttcttacaaaatttgcttcaaaagtaaaattgattcacagaagagatagtttgagagctgaaaaaatgcttcaaaaaaaacttatggaaaataaaaaaattgaaatcatttgggatacagttgttgaggatgtaattggagataaagatccaaagaatgttaaaggaataaaagttaaaaatgtaaaaacaaataaaattgatgaaataaaattagacggtgttttcattgctattggtcatgaccctgcaacgcaattatttaaagatcaacttaatatggataatgagggttatttgataacaaaaccagactcaacagaaactaatgtaccaggtgtttatgcagctggagacgtaaaggataaaacatttaggcaagcagtaactgctgctggtatggggtgtatggcagcactagaagctgaaaagtttttatctcattaa

SEQ ID NO: 223903 - DNA, 769 bp, Unknown
  Bacterial polypeptide expressing nucleotide sequence isolated from the Sargasso Sea
aatgaataataaatcatctaaacatacaaaagtgttaattcttggatcgggacctgcgggttatacagccgcaatctatgcggctagggcaatgttaaagccaattttagttcatggctcccaacctggaggtcaattaactacaactactgatgtcgaaaattacccaggatattcaaaagcgattcaagggccttggttgatggaagaaatgaaaggtcaagctgaggcagtaggaactgaaatgattcaagaccacatcaacaaagtagatttatcttcaaagccttttaaagttgtgggtgatagtggtcaaatttatactgcagatgctattattatttcgacaggggctcaagctagatggttaaacctaaaatctgagcagaattttagaggttttggtgtttctgcttgtgctacttgtgatggttttttctttaaagataaagaggtagcagttgtaggtgggggtaatgcagcagtagaagaagctatgtttttaaccaaatttgcttcgaaagttaaattgattcatagaagggacaagttgagagcagaaaaaatgcttcaagaaaaattaaaagctaataaaaaaatagaaataatttgggatagcattgtcgaagatgttttaggaaaaactgaacctaaaagtgttaatgcaattaagattaaaaatgttaaagacaataaaaccaaagaattgaaagtggatgggcttttcatcgctataggacatgatccggcaacatcattattcaaaaat

SEQ ID NO: 223904 - DNA, 925 bp, Unknown
  Bacterial polypeptide expressing nucleotide sequence isolated from the Sargasso Sea
catgaatacaatcattataggaagtgggccagctggatacacagcggcaatctatgcagctagagctgatcttaaaccaataatatatactggtttagaaccaggtggtcaactaactactacaactgaagtagataattttcctggatatccccaaggtattgatgggccaaccatgatgaatgaattaagagaacaagcagaaagatttggaacaaaagttgaagttgattttatttcaaaagtagaattttcaaaagaaaaaggaggagtgcataaaatttacactcaaaatggtgatgaaatacaaacaaagacgataataatatgtacaggtgcttctgctaaatatcttggtcttccaagtgaacaaaaacttattggcggtggagtttcagcttgtgcagtttgtgacgggttcttttacaagggtcaagatgttgctgtagtaggtggaggagatagtgcaattgaggaggcaacatatttagcgaaaatttgtaataatgttacaatgttagttagaaaggatcattttagagcttcaaaagcgatgcaacatcgcttaagcaattttaaaaatattcatgttctttttaattctgaaatagatgaagtattgggcgataatgtagttgagggaataaaaattaaaaataatatcacaaatgagtattctgaaattaatattactggactattccttgccattggtcatactccaaatacagagattttcaaaggtattgttgatatggatgatggcggatatatactaacagataagacttcaacaaaaacaaatatacctggagtatttgctgcaggtgatgtccaagataaagattataggcaagcaattactgctgcaggtactggctgtatggcagctctagatgctgaaagatatttacaagaaatttaa

SEQ ID NO: 223905 - DNA, 934 bp, Unknown
  Bacterial polypeptide expressing nucleotide sequence isolated from the Sargasso Sea
atgacaaataataaaataataattcttgggtcaggacctgcaggctacgcagcatctatttatgcagcaagagcaggattaaatcctgttattatcgctggagctgaacctggtggacaattaacaacaactactgaagtagaaaattggcctggcgacagtgatgatcttcaaggacctgatttaatggaaagaatgaaaaaacatgctgaaaaatttggtgttaaaattattaatgatcatatttcaaaggtaaatcttgagcagtcgccatttcttcttaatggaacaaattcttatgaagctgatacgctgataatagctactggtgcatctgctaaatatttaggtctgccatcagaacaagagtttcttggcaaaggtgtctcagcatgtgcaacttgtgatggtttcttttataaagaccaagaggtagctgtaattggcggaggaaataccgcagctgaagaggcactttatctcgctaatatttgttctaaggtacatttagttcatagaagagacgaattaagggctgagaaaatacttcaagatagagtatttaagaaagctgatgaggggataattgaaatgcactggaacagcgaattagaggaggttctaggagatgctagcggtgttacaggtattaaacttaaaagcaaagaaggctcaatgttgtcaattaatttacacggtgtattcattgcaattggccataatccaaataccgaaatatttgatggtcagctagacatgaaagatgggtacattgtaattaaatctggtttagatggctcagtcacacaaacatctgtgcctggagtttttgctgctggcgatgttgctgataaagtttacagacaagcgattacttctgcagggtttggatgtatggcagctttagatgctgagaagttcctatctgattaaa

SEQ ID NO: 223906 - DNA, 916 bp, Unknown
  Bacterial polypeptide expressing nucleotide sequence isolated from the Sargasso Sea
aatggatgatttagcaataattggttctggtcctgctgggtatacagctggaatttatgctgcaagggctaacctggaaccagtcttatttgaagggttagagtctggtggacagttaatgctcactacagatgttgaaaattatccaggttttgatcaaggaattatgggtcctgaaatgatgcaggtctttaaaaatcaagctgaaaggtttggaacaaaaattttaactgagactgtagattcaatagaaaagattgaaaatggatttaagctaacaacttcgaaaaatacttatgagttcaaaactgtaattatttcatctggagcatcggcgaactggcttgatataaagggagaaaaagagctacaaggacatggtgtttcggcttgtgcgacttgtgacggtttctttttcaaagataaaaatgtaatagttgtcggtggaggagattcagctatggaggaagctttatttctaactaaattcgcaaaaaatgtaactgttgtccatagaagagattcatttagagcaagtaaaattatgcaagacagggtactaagtcacgaccaaattgatgtctcgtggaacaaagaagttgtggaaattaaaggtgagagtcaagtttcatctgttcttctcaaagatagtcaaacaaacgaaatggaagaaaaagaaattgatggagttttcatagctataggacacacaccaaatgtaagttttttaaatggatttctagagcttgatgaaaaaggatatataaagactgggtctactactgctactagtactagcgtccctggtgtctttgcagcaggagatgttgctgactcaatttatagacaagccgtaactgcagccggtaccggatgccaagcagcaattgatgctgaaaggtggcttgaaaattaa

SEQ ID NO: 223907 - DNA, 445 bp, Unknown
  Bacterial polypeptide expressing nucleotide sequence isolated from the Sargasso Sea
tatttgttcaaaagtccatctagttcatagaagagatgaattaagagcagagaaaatacttcaagatagaatatttaagaaagctgatgatgggataattgcaatacactggaacagtgaattagaagaggttttaggagatgcaagcggtgtgacaggcattaagctaaaaaacaaagatgcctcaatgtcgtcaattgatttacaaggtgtatttattgcaattgggcataatccaaatacagaaatatttgaaggtcagctagatatgatagatggatacattgtaattaagtctggtttagatggttcagtaacacaaacatctgtacctggagtttttgctgctggcgatgttgctgataaagtctatagacaagcaattacatctgcagggtttggatgtatggcagctttggatgccgagaagtttctatctgaataa

SEQ ID NO: 223908 - DNA, 682 bp, Unknown
  Bacterial polypeptide expressing nucleotide sequence isolated from the Sargasso Sea
aatcttcaagaggagccttttaaattgaaaggaacttcagagtattcttgtgattcactaattattgctactggtgcaagtgcaatgtatttagggctaccatctgaaaaagaatatcttggtaaaggtgtttcagcttgtgcaacttgtgatgggtttttttataaagatcaagaagtagctgtgattggtggaggtaatactgccgctgaagaagcattatatctagctaatatatgttcaaaagtttatctagttcatagaagagatgagcttagagcagaaaaaatacttcaagatagaatctttaaccaagaaaaagctggaaaaattgaaattttatgggattcacaactttcagaagttattggtgatgaaatgggtgttacaggaattagacttgataataaaggtacagaaataataaaaaatgtcatgggtgtatttattgctataggacataaaccaaatacagatatatttaaagaccaactagaaatggataatggatatattattataaaatcaggattagatggttctgttactagttcatctgtggaaggtgtttttgctgctggagatgtttctgatcaaatatatagacaagctgttacttcagccggttttggttgtatggcagcactagatgccgaaaagtttttatctgagaaaaaataac

SEQ ID NO: 223909 - DNA, 1033 bp, Unknown
  Bacterial polypeptide expressing nucleotide sequence isolated from the Sargasso Sea
ttgactaaccatgccgtgcatacctttgcgttaaaagaagtgcttttaattctaacattagttactatatacccttacataatgaataataaatcaacaaaacatacaaaagtgttaattcttggatcaggtccagccggctatacagcagctatttatgcggctagagctatgcttaaaccaatacttgttcatggttctcaacccggaggacaattaactaccactacagatgttgaaaattatcctggatactcaaaagtgattcaggggccatggctaatggatgaaatgaaaggtcaggctgaagcagtgggcacagagatgatacaagatcatataagtaaagttgacttaacaaaaaaacctttcacagcaacaggtgatagtggtcaggtttacactgcagatagttttataatttcaacaggagcacgagcgagatggttaaatttaaaatctgaacaagaatttagaggatttggagtttcagcatgtgctacttgtgacgggtttttctttaaagaaaaagaagtggctgtagttggtgggggaaatgccgccgttgaagaagcaatgtttctaacgaaatttgcttcaaaggtttatttaatacataggagaaacgaacttagggcagaaaaaattcttcaagcaaaattaaaatctaataagaaaatagaaattatttgggacactgtagttgaggatgttattggcactaaagagcctaaaactgttaatgccttaaaaattaaaaatgtaaaagataataaagctaaagagcttaaagttgatggtttatttattgccataggtcatgatccagcaacatctttgtttaaagatcaacttaaaatggacaaagaagggtatttaattacaaaacctgactctactgaaacgaatattccaggagtctttgctgcaggagatgtaaaggataaaatttttagacaagctgttactgctgctggaatgggctgtatgtcagcacttgaagctgaaaaatatctatctgagactagttaag

SEQ ID NO: 223910 - DNA, 265 bp, Unknown
  Bacterial polypeptide expressing nucleotide sequence isolated from the Sargasso Sea
catgctcgaaattgatgaaatgcatggaaatattgtaaaggttaatccacttgttaattggacatttgacaaaacatgggattatgtaaaatcaaataattgcccgtataacaaattactcgatcacggctatcctagtattggttgtgaaccatgtactagaccgataaagatcggtgaagacatacgtgcaggtcgttggtggtgggaaaatgacacaaacaaagagtgtggtcttcatatgaaccacgcacaattaaattaa

SEQ ID NO: 223911 - DNA, 763 bp, Unknown
  Bacterial polypeptide expressing nucleotide sequence isolated from the Sargasso Sea
atgaaaaataaaattattgaatggaatcgtcaatttagagatgcatcgattgatcaatttctttcatactttctgaataagtatgatgatcgatatgttgtagcatctagcttaagctatgaagatcagattaatacgcatgttagtcttaagattagacctaatgcacgtatatttatattagatactggtagacttcataaggaaacatatgatgtgatcgaccaaacatctttattatatgattttaaatatgaaatacttaaacctaatgagcgagatgtatccaatatggttaataaatttggattgaatttattctatgatagtatagacaatcgcaaaaagtgttgttcagttcgtaaagtagaaccgttatctagagttcttagtacggctgatgtttgggtaacgggtttacgaagtcagcaatctgttactagaacttctttagagttagtgcaatgggatgatacgtttaatttgcttaaattaaaccctctagcaaattggacagaggatgaggtgaaagagtttgttcgtattaataaaattccctttaataaattgcatgaaaaaggatatcctagtattggctgtgaaccatgtactagggctataaaagatgatgaagatattcgttcaggacgttggtggtgggaggatcctgagcataaagagtgtggtcttcatgttgttaatggaaagctgcaatcaaaaaaaataacaaacaataacgcaaaaggaaatcttaatgactaac

SEQ ID NO: 223912 - DNA, 725 bp, Unknown
  Bacterial polypeptide expressing nucleotide sequence isolated from the Sargasso Sea
gccggagctcgcagcgaaggttgagcgtctcgatgcgcttctggattcgatcgccgcgcgtcacgccaacgtgaagcttgccagcagccttgcggcggaagacatgctgctcacgcacgcgattctgtcgcgtggcgtgaagatcggcatcttctcgttgaacacgggacgcctgcacgcggaaacgcttggcatgattgatcgcgtgaaagagcgctacggttacgatatcgagcagtttcatccgcaggctgccgcggtggaagaatatgtcggctcgcatggtctgaatgcgttctatgaaagcgtcgatctgcgcaagcgctgctgtgagatccgcaaggtcgaaccgctgaaccgcgcgttgtcggacgtcagcgcgtgggtgacgggtcagcgtcgcgagcagtcggtgacgcgtgccgaactgcatgaggaagaattcgatgcggcgcgcaatatcgccaagttcaatccgctgacggactggaccgaagccgaagtatgggattatctgaaagcattggatgtgccggtcaatccgctgcatgcgcgcggttacccgagcatcggctgcgagccttgtacccgcgcgattcgccctggtgaagacagccgggcaggccgctggtggtgggagtcgcgcgatacgaaggaatgtggtctgcatatcaccacgattacgcagatcccggtccacagcagcgagaacgcctcggcataaa

SEQ ID NO: 223913 - DNA, 655 bp, Unknown
  Bacterial polypeptide expressing nucleotide sequence isolated from the Sargasso Sea
gtttgaatgggcatttgataatcttcatccaaaattagcaaaggcatcaagttttggtgcagaagatgcagcaattattgatatgatgtttaaaattaattctgattccagattgtttacacttgaaacaggaagattgcctaaagaaacttttgatgcaattgaacaagttgaacaacgttacaatacaaaaattgaaaagttgtatcctgatccaaatgaagttgaaaaaatgattgaagaaaaaggcttgaactgtttctatgatagtattgaaaatagaaaactctgttgtggtattaggaaagttcacccaatgaacaaaatgcttgcaacacttgatggttggattaccggtcttagaaatgatcaaaaccagaatcgttctggtgctagcatgctcgaaattgatgaaatgcatggaaatattgtaaaggttaatccacttgttaattggacatttgacgaaacatgggattatgtaaaatcaaataattgcccgtataacaaattactcgatcagggctatcctagtattggttgtgaaccatgtactagaccgataaagatcggtgaagacatacgtgcaggtcgttggtggtgggaaaatgacacaaacaaagagtgtggtcttcatatgaaccacgacaattaa

SEQ ID NO: 223914 - DNA, 414 bp, Unknown
  Bacterial polypeptide expressing nucleotide sequence isolated from the Sargasso Sea
aaaaaggcttggactgtttctatgaaagtattgaaaatagaaaactttgttgtggtatagaaaaagttcacccaatgaacaaaatgcttgcaacacttgatggttggattaccggtcttagaaatgatcaaaaccagaatcgttctggtgctagtatgctcgaaattgatgaaatgcatggaaatattgtaaaagttaatccacttgttaactggacctttgacgaaacatgggattatgtaaaatcaaataattgtccgtataacaaattactcgatcagggctatcctagtattggttgtgaaccatgtactagaccgattaagatcggtgaagacatacgtgcaggtcgttggtggtgggaaaatgacactaacaaagagtgtggtcttcatatgaaccacgacaattaaa

SEQ ID NO: 223915 - DNA, 754 bp, Unknown
  Bacterial polypeptide expressing nucleotide sequence isolated from the Sargasso Sea
catgagcagcgcgaccaccaccgcgctgacgccggagctcgccgcgaaggtcgagcgcctcgacgcgctgctcgcgcagatcggtgcgcgtcacgagaaggtgaagttcgcgagcagcctcgcggcggaagacatgctgctcacgcatgcgatcctgtcgaagggcgtgcgcatcggcatcttctcgctgaacacgggccgcctgcacgcggaaacgctcggcatgatcgaccgtgtgcgcgagcgctacggctacgagatcgagcagttccatccgcagcaggacgcggtcgaccagtatgtcgccgagcacggcctgaatgcgttctacgagagcgtcgagctgcgcaagtcgtgctgccacatccgcaaggtcgagccgctgaatcgcgcgctcgccgacgtcggcgcatgggtcaccggccagcgccgcgagcagtcggtcacgcgggccgagctgcacgaggaagagcaggacgaagcgcgcgggatcgcgaagtacaacccgctcgccgactggacggaaagcgacgtgtgggcgtaccttaaggcgtttgacgtgccggtgaacccgctgcatgcgcgcggctacccgagcatcggctgcgagccgtgtacgcgggcgatccgtcccggcgaggacagccgagcgggccgctggtggtgggagtcgcgcgatacgaaggaatgcgggctgcacatcacgacgatcacgccgattcccgcggaagccgttgccggcgccacgcactga

SEQ ID NO: 223916 - DNA, 721 bp, Unknown
  Bacterial polypeptide expressing nucleotide sequence isolated from the Sargasso Sea
tatgggaaaattcactcaacaagaactagatgaagtaaacaaaactctgtctacacctgaggattgtttgaaatgggcatttgataaccttcatccaaaattagcaaaagcatcaagttttggtgcagaagatgcagcaattattgatatgatgtttaaaattaattctgattccagattgtttacacttgaaacaggaagattacctaaagaaacttttgatgcaatagaacaagttgaaaaacgttacaatacaaaaattgaaaaattgtttcctgatcaaaatgaagttgaaaaaatggtagaagaaaaaggcttgaactgtttttatgacagtattgaaaacagaaaactttgttgtgctattagaaaagttcatccaatgaataaaatgctagcaacacttgatggctggattaccggtctaagaaatgatcaaaatcagaatcgttctggcgctagcatgcttgaaattgatgaaatgcatggaaatattgtaaaggttaacccactagttaactggacctttgaccaaacatgggattatgtaaaatcaaataattgtccatataacaaattacttgatcaaggttatcctagcattggttgtgagccatgtactagacctattaagatcggtgaagacatacgcgcaggtcgttggtggtgggaaactgacacaaacaaagaatgtggtcttcatatgaaccacgacaattaa

SEQ ID NO: 223917 - DNA, 721 bp, Unknown
  Bacterial polypeptide expressing nucleotide sequence isolated from the Sargasso Sea
atgggaaaattcactcagcaagagctagatgaagcaaacaaaactctgtctacacctgaggattgtttgaaatgggcatttgataatcttcatccaaaattagcaaaggcatcaagttttggtgcagaggatgcagcaattattgatatgatgtttaaaattaattctgattccagattgtttacacttgaaacaggaagattgcctaaagaaacttttgatgcgatagaacaagttgaacaacgttacaatacaaaaattgaaaagttgtatcctgatccaaatgaagttgaaaaaatgattgaagaaaaaggcttgaactgtttctatgatagtattgaaaatagaaaactctgttgtggtattaggaaagttcacccaatgaacaaaatgcttgcaacacttgatggttggattaccggtcttagaaatgatcaaaaccagaatcgttctggtgctagcatgctcgaaattgatgaaatgcatggaaatattgtaaaggttaatccacttgttaattggacatttgacgaaacatgggattatgtaaaatcaaataattgcccgtataacaaattactcgatcagggctatcctagtattggttgtgaaccatgtactagaccgataaagatcggtgaagacatacgtgcaggtcgttggtggtgggaaaatgacacaaacaaagagtgtggtcttcatatgaaccacgacaattaaa

SEQ ID NO: 223918 - DNA, 445 bp, Unknown
  Bacterial polypeptide expressing nucleotide sequence isolated from the Sargasso Sea
atggaaatagcaattttagctttgggatgtttttgggggcctgaaattaaattcagtaaacttgaaggtatatataaaactgaagttggatattgcggcggtaacaataaaaaaactaactataaagaagtttgtacaggaaacactaaccatgcagaagttgttaaattagattttgatccaaaaataatatcttatgaaaaaattctagaatttttttttgaattccacgaccccacaactttaaactcccagggctacgattttggaactcagtacagaagtgaaatattttatttaaacgaaaatcaaaaacatactgccaacaaggtaaaagagaaatataataaaaaattctcaggaaaaattgttacaaagttatcacttgcaaaaaattattgccctgcggaggagtatcatcaaaagtacttagaaaagatttaaa

SEQ ID NO: 223919 - DNA, 415 bp, Unknown
  Bacterial polypeptide expressing nucleotide sequence isolated from the Sargasso Sea
atgaaagttatatcgttagttttatttttaatattacctgttaattacgcattttctgaaaatttaaataaggcttattttgcaggtggatgtttttggtgtatggaagaatcatttgaaaaactagaaggtgtcaaagaagtaatttctggttattcgggcggcactacatctaatccaacatataaagaagttacttttggagatacgggacattttgaggttgtagagattatttataataacaatattatttcttatgatgaattgttaaaaaatttttggataaatattgatccattcgatgcgtttggtcaattttgtgacaaaggttatagttatagatctgtagcattttttcaaaatgcatatgaaaaaagtcaaatgaaaaaagtattcagaaatagaaaataaa

SEQ ID NO: 223920 - DNA, 580 bp, Unknown
  Bacterial polypeptide expressing nucleotide sequence isolated from the Sargasso Sea
aatgaaaaaatttttatcaataattttctttcttatttctgcaaacagctttgcaaattcaccaaattttgaaagagcttattttgctggagggtgtttttggtgcatggaagagtcttttgaaaatattcttggtgtttcaaaagttatctctggttattcaggtggcactacagaaaatccaacttataaagaagttacatatggaaacacaggtcattttgaagttattgaagtcatatatattccagaagtagttagctatgaaaaactcttagaagaattctgggtaaatattgatccatttgatgctgtaggacaattttgtgacaagggatatagttatagatcagtggcattttatcaaaatgataagcaaaaaaacttaattgaaaatagtattaaggaaatagagaaaaaatttaaaaaaaaagtagtaacttatgtaagaaaatttgataaattttacatggcagaggctgttcatcaagattattaccaaataaattttcttaattacttaagatataaaaaaggatgtagacgcgaagcaatattaaatagtatttggggatcttaa

SEQ ID NO: 223921 - DNA, 604 bp, Unknown
  Bacterial polypeptide expressing nucleotide sequence isolated from the Sargasso Sea
atgaaatacctcttatctctaatagttgctctttcaatatttgttaaccctgtaaacgcttttgcagaggaattgattcttgcaggaggttgtttttggtgtttagaacatgatttagagtcattaaaggggataaattttgtagaaagtggctattcaggtggagatttgcaaaatcctacttacgaaaatcatgaaggacatcaggaagtggttttggtaaactatgaatccaaattggtaactttgcccgagatacttaggctttacttcagaaatattgatcctttagacggcaagggtcaattttgtgatcgtggagattcttataggccagtgatatttttcaaagataaaactgaggaaagtgatgcaattaatgcaattgtttccgcctctaatgaattgcgggtgccattagaaaaaatatctgtagaactaaaatcaaaaggtcaattttggttggctgaagaatatcatcaggattttgctgagagaaatgaattaaaatataagttctatagattctcatgcgggagagatcagaggttggataaattatggggcgataacgctagatcaacaaatctttggaatgaatgat

SEQ ID NO: 223922 - DNA, 391 bp, Unknown
  Bacterial polypeptide expressing nucleotide sequence isolated from the Sargasso Sea
atgaataaacgaaatgaaaatctgactgaattgcaatattatgtgactagggagtctggaacagaacgtccttttacaggacctcatctaaatgagaaatcagatggcactttcacatgcatttgttgtagtacaccattatttgcttcaacccataagtatgattcagggtctggatggccgagtttctacgatacagaatataaaatgaatatttctgagcacagagataatagtcatttcatgatccgaacagaagtgaaatgtgcaaattgtgatgcccatctaggacatctttttaatgacggaccaaagccaactggtcttagatattgcataaatggaaatgcaatgagctttgagaagaaagagaaacttaatggcaaataat

SEQ ID NO: 223923 - DNA, 460 bp, Unknown
  Bacterial polypeptide expressing nucleotide sequence isolated from the Sargasso Sea
tatgattcaaaaagctttatttggtgcaggttgtttttggggtgttgaagagcacttcagaaaattaaaaggtatagaaaaaacagctgtaggatactctggaggtaagactgaaaatcccacctacgagagtgtttgttatgaaaatactgatcatgctgaagttttgcaagttgagtttgatgatgaaataattacttatgaaaccattgtggaagaattttggaaatgtcatgatccaactacagttgatagacaaggtcctgatgttggtcgtcagtatcgatcagtaatatattatttagacgatttgcaaaaaaacattgctcaaaaatcaatggaaaaacatcaaccttcattcaataatatgattgtaactgaaattactaaagctgatactttttatagagctgaagaatatcatcaaaaatatattcaaaaaagagctatctctgaataa

SEQ ID NO: 223924 - DNA, 163 bp, Unknown
  Bacterial polypeptide expressing nucleotide sequence isolated from the Sargasso Sea
atggaaatagcaattttagctggtggttgtttttggggtatggaggatttgatgaggaagattcctggtgtacagaaaacgcgtgttggctacacgggtggacacttaaaaaacccaacttacaaagatgtctgcacagaaactactggccatgccgaggcaa

SEQ ID NO: 223925 - DNA, 284 bp, Unknown
  Bacterial polypeptide expressing nucleotide sequence isolated from the Sargasso Sea
agttaaattagattttgatcctaaaattatttcttatgaggaaatccttaattatttttttgaaattcatgacccaacaactttaaattctcagggaccagattttggaactcaatacagaagtgaaatattttatttaaatgatttacaaaaaaatattgctgaaaaagtaattgaaaaagaaaacattaaattatcaggcaaagttgtgacaaaaatttcactagttaaaaattattgtacagctgaagaatatcatcaacgatatttggaaaaaagataaa

SEQ ID NO: 223926 - DNA, 475 bp, Unknown
  Bacterial polypeptide expressing nucleotide sequence isolated from the Sargasso Sea
catgcacaaaatattaaaacccgtctttattctatttttaacattaacaacacaaataagtccttatttaggcaaccttaatctacacgcacaatcaaaagactctataatcttggctggtggatgtttttggtgtgtggaagctgattttgaaaaagtgaacggggtcagtgaggtcatttctggttacactggtggatttgtagaaaacccgacctacaagcaggtcgtaaaaggtggcacagggcactatgaagccgtcattattcattttgaccccgaaataataacaacaaaagatattctatataaattttttcgttctatcgaccccactgatgctggtggacagttctgtgatcggggtcatagctataagtcagctatttttgccaaaccaaatcaaattttaattgcaaaaaatgcccttctagaggcggaagcaattctaggtgaaaagattgttacccctatc

SEQ ID NO: 223927 - DNA, 543 bp, Unknown
  Bacterial polypeptide expressing nucleotide sequence isolated from the Sargasso Sea
aatgaaaaaaactcttagttttttattaattatattctttattcaattaaactcacaaaacaataaagaagcatattttgcatcaggttgtttttggtgtgttgaatcaatttacgaaagtttaataggtgttagtaaagtagaatcgggctattcaggtggttacactcagaatcctacgtactattccgttttaacgggaaaaacaggacatgcagaaagcataaaggtttattatgatgctgaaaaaatatctttcaaagaactagttaaggttttttttggatcacatgatccaacaactttgaacagacaaggacctgatagaggaacacactacaggtcgattgcattttacagcaatgacaatgaaaagaaaattataaacgaagaaattaatcgtctactaaaaaataaaacctacccaaaaattgttactgaggtcaaaaagttcgaaaaattttatatcgctgaagattatcatcaagattataagcagaaaaatcccaataacgcatacatttggaatgtttctgttccaag

SEQ ID NO: 223928 - DNA, 445 bp, Unknown
  Bacterial polypeptide expressing nucleotide sequence isolated from the Sargasso Sea
atggaaatagcagttttagctttgggatgtttctggggcccagaaaaaaaatatggtcaattagatggcatctacagaacagaggttggatattgtggaggaaacagtcctaatacaaactatagggaagtttgtacaggaacaactaatcatgcggaagctgtaaaattagaatttgatcccaaagttattacatatgagcaaataattaaaagattttttgaatttcatgatccaactacacttaattctcaaggtcctgattttggaacacaatacagaagtgagatcttctaccttaatgaagaacaaaaaaatattgctcaaaaagtaatagacgaagaaaatttaaagttatctggaaaagttgtgactaagctatctgagttgaaaaattactgtactgctgaagaatatcatcagaagtatctagaaaaaagataga

SEQ ID NO: 223929 - DNA, 345 bp, Unknown
  Bacterial polypeptide expressing nucleotide sequence isolated from the Sargasso Sea
gatgaaaaagtttcttactgtttatagtctctttttaagtgttctgttattttcttctgagaatgaatctaccagccatgtagagaaaatcgtactaggttctggttgcttttggggagcggagaaaggttatgaggcgcttgatggagtcatagatgctgtatcaggttacgctgatggagaaggggtaagaccaacttatagagatattacaaagttctctaataaatttaacccaaataatcatgctgaggttgtagaggttacctacaacaaaaatttgatcacacttgaagaattgataattcattatttggaatctcatgatcccactcagctaaatag

SEQ ID NO: 223930 - DNA, 301 bp, Unknown
  Bacterial polypeptide expressing nucleotide sequence isolated from the Sargasso Sea
atagaagttgtcaaagttacatttgatcctaaaataatctcatatgaagatataactagactattcttcgaaatccacgatccaactacccttaatcgtcaaggacctaatgtaggttatcagtatcggtcagaaattttttatactacagaagaagagagggtgtctgcccaaaaagtattggatgaagtgaataaaaaacttaacggtaaagtggttacagttataagaaaagaaaaaaattattgtaaagcagaagaataccatcaaaaatactttcaaaaacaaagtaaaaaatgac

SEQ ID NO: 223931 - DNA, 577 bp, Unknown
  Bacterial polypeptide expressing nucleotide sequence isolated from the Sargasso Sea
aatgaaatttttaactatcataatttttatcatatccttcataactgcagcagaggcaaaccaaaaaagtaaggcatattttgctggtgggtgtttttggtgcatggaagaatcctttgaaaaattaagtggagttgaaaaggtaatatcaggctactctggcggcactacagaaaacccaacttacaaagaagtagtttatggtaaaactggccattttgaagttgttgaaattatctatgacaaagaaattatttcttttaaagaattgctgaatattttttggaaaaatatagatcccttcgatccttatggacaattttgtgataaaggatatagctacagatcagttgctttttatcaaaacgatgaggagagaaaacttatagaaaatagcataagagaactaaagaataaatttaataaagaaatcgtcacttacgtaagaagttttaataaattttaccaggctgaagtttatcaccaagatttttatgtaaaaaaatttcaaagatatttggaatataaaaaagcttgtagaagagaagaaattttaaacaatatttggaatctttaa

SEQ ID NO: 223932 - DNA, 154 bp, Unknown
  Bacterial polypeptide expressing nucleotide sequence isolated from the Sargasso Sea
catcgttaatgttcaagatacatcacatgggatgattatgactgaggttaagtgtagtaaatgtgactcacatttaggtcatgttttccccgatggccctgaaccttctgggttaaggtattggattaattccattgttttgaattttgtataa

SEQ ID NO: 223933 - DNA, 234 bp, Unknown
  Bacterial polypeptide expressing nucleotide sequence isolated from the Sargasso Sea
aatatttttttgaaattcatgatccaacaactttaaattctcaaggaccagattttggaacccaatatagaagtgaaatattttatttaaatgatcagcaaaaaattactgctgaaaaaataatagaaaaagaaaacgtcaaattatcaggaaaagtagtaacaaaaacttctttagttaaaaattattgcccagctgaagagtatcatcaaagatatttagaaaaaagataaa

SEQ ID NO: 223934 - DNA, 535 bp, Unknown
  Bacterial polypeptide expressing nucleotide sequence isolated from the Sargasso Sea
ttctcattaattgttgtattttcaatactcgtaaatcctataaatactttcgctgaagaagtagtactagcgggaggatgtttttggtgtttagaacatgatttagaatcattaagaggtataaattcagtaataagtggatactctggaggcgatttgcaaaaacctacatatgaaaatcataatgggcatcaagaagtggttttagtaaattatgattcagaagtagtaactttatcagaaatatacaggttatattttagaaatattgatccacttgatggaggaggtcaattttgtgacagaggagattcttatagaccagtaattttttttgaaaattcagacgataagaatgaagctagcaaatctctcctttcggcttcaaaggaattaggggttaatttagaaaaaattaatgttgaactaaaaccaaaaagtcagttctgggaagcagaagcttatcatcaggattttgctaatagaaatgaattgaaatataagttctatagattctcttgtggaagagatcagc

SEQ ID NO: 223935 - DNA, 340 bp, Unknown
  Bacterial polypeptide expressing nucleotide sequence isolated from the Sargasso Sea
tatggaaatagcagtactagctttaggatgtttttggggacctgaaattaaatttagtaaattgtatggtgtttaccggaccgaagttggatattgtggtggagaaacacaaaatacaaattatagagaagtttgtactggatccacaaatcatgctgaagcagtaaagttagaatttgatcctaaaataatttcatatgaagaaatacttcaaaatttttttgatttccatgatcctactactttaaattctcaaggtcctgactttggaacccaatatagaagtgaaatattttatcttaatgaaaaacaaaaaaatatagctcaaaaattaattgat

SEQ ID NO: 223936 - DNA, 421 bp, Unknown
  Bacterial polypeptide expressing nucleotide sequence isolated from the Sargasso Sea
aatgaaatattttttacctctaatagttgctctttcaatacttattaaccctttaaatgcttttgcagatgaattgattcttgcaggaggttgtttttggtgtttagaacatgatttagagtcattaaaggggataaattttgtacaaagtggatattcaggtggagatttacaaaatcctacctacgaaaatcataaaggacatcaagaagtggttttggtggactatgattcccaattgataactttacccgagatacttaggctgtatttcagaaatattgatcctttggatgcaaatggtcaattttgtgatcgtggagattcttataggccagtgatcttttttaaagatacaactgaggaaattgatgcaaaaaatgcaattttttcggcatctaatgagttgcgagttcattag

SEQ ID NO: 223937 - DNA, 328 bp, Unknown
  Bacterial polypeptide expressing nucleotide sequence isolated from the Sargasso Sea
atggaaatagcaattttaggattaggatgtttttggggaccagaaattaagtttagtaaacttgatggagttataaaaacagaagtgggttattgtggaggtaacaatgctgaaacaaattacaaagaagtatgcactggtataactaatcatgctgaggtagttaagttagattttgatcctaaggtaatatcttacgagaaaattcttgaatatttttttgaaattcatgactcaacaaccttaaattctcaaggaccagattttggaactcaatatagaagtgaaatattttatttaaatgatcacctaaaaaattattgctgaa

SEQ ID NO: 223938 - DNA, 310 bp, Unknown
  Bacterial polypeptide expressing nucleotide sequence isolated from the Sargasso Sea
aacaacaaaacccatgcgggaagtgttaaaattagatttcgatccaaaaatttatatcttataaaaaaatttcttgaatatttttttgaaattcatgatccaacaactctaaactctcaagggccagattttggaacacaatacagaagtgaaattttttatttaaatgagaatcaaaaaacaattgcaggaaatgttattaataaagaaaacgaaagactttctggaaaagttgtaactaaactatcacaagtaaaaaactattgtccagcagaagaataccaccagagatatttagaaaaaagataaa

SEQ ID NO: 223939 - DNA, 112 bp, Unknown
  Bacterial polypeptide expressing nucleotide sequence isolated from the Sargasso Sea
tatggctagagcaatttttgctgggggatgtttttggggaatggaagaattaattcgaatgcgccctggcgttctaacacccgcgttggaacacagggggacatgtcagtaa

SEQ ID NO: 223940 - DNA, 193 bp, Unknown
  Bacterial polypeptide expressing nucleotide sequence isolated from the Sargasso Sea
ttcccagatgtgggaactcaatatagaagtgagattttttatgaagatgaaaagcagaaacaagacgctttggaagttttaaaagaatttaacgaaaaattaaatggtaaaattcagacaaacatctcaaaaattaaaaactataataaagctgaagaatatcatcaaaaatatattgaaaaaaacaggtaat

SEQ ID NO: 223941 - DNA, 475 bp, Unknown
  Bacterial polypeptide expressing nucleotide sequence isolated from the Sargasso Sea
tatgtcaaaagttaatattatagaaactccattttggtgttctgcaacacctgaagaaagagctacagctattgaaaatttaacagatgagcaaagacttgttgctcttgaagacggtactgaaagaccttttgctaatgcttattgggataataaggaaaagggcatttatgttgatatcatttcaggcgaaccattattttcatcgactgacaaatttgattctggaacaggttggccaagctttgatcgatcaattgaagggatcaatattaaagagatttcagatactagtttaggaatgatccgcaccgaagtacggagtgaatatggtgatacccacttaggacatttattcaatgatggtcctactgaaactggcttgagatactgtataaattctgcatctttatcctttattccagtaagtgatcttgaagaaaaaggttacggagattatttaaaattattttaa

SEQ ID NO: 223942 - DNA, 445 bp, Unknown
  Bacterial polypeptide expressing nucleotide sequence isolated from the Sargasso Sea
atggaaatagcagttttagcacttggatgtttttggggccctgaaattaaatttagtaaaattgaaggtatcattaaaacagaggttggatattgtggaggtaacagtcctactacaagctacaaagaagtatgcactggtaacacaaatcatgcagaagttgttaaacttgattttgacgaaaaaattataacttacgaaaaaatcttaaaaacattcttcaaaatgcatgatcctacaacattaaattcccaaggaccagattttggcacacagtacagaagtgaaatattttatctaaataacacgcaaaaagatatagctgataaagtattaagagatgtaaatgaaagactttcaggaaaaattgttactaaaatatctttattaaaaaattattgtccagcagaagaatatcaccaaaaatatttagaaaaaagataaa

SEQ ID NO: 223943 - DNA, 904 bp, Unknown
  Bacterial polypeptide expressing nucleotide sequence isolated from the Sargasso Sea
aaaaatcagcgcggggaaactgcattgatgcttgccgcctcggaaggccatcttgaaattgcacaattgcttttgagatctggagcttcccggctgattaaagatcgttttggccgaaccgcgtggatgcatgctatcgatggcggaaatgtagaattggtcaagttgctcgcaaagggtggctatccggcttccgaaaagttgatttttgccgccagcaggggacacaccgaagccgtcgaaattatgttaaacctcaatgcggatccggattcccgtgacgaaaggcaatggaatgcattaatgtgggccgcgaaaaacggacatactgccacagtccagcttttgctaaaaacaggcctcgatatcaactccatgggttccaaaaactggacccctttgatgcttgctgcggggggaggtcatgctgataccgcaagagttttgctggagtcgggggctgattacagcatccgtgatcaggaccaatggactgccttgacctgggctgcaatgaaaggacatctgcctctggttaagctaatcctgtatttcggtgcttcaatcgacgagaaaggttccgatggagcaactcctttgatctgggcagcctcccaggggcatacagacgtggttaaaattttattgaataaaggggccaatcctctcatcgaggatgatcatggtaaaactgcactggtgcatgcattactgaaaaaccacctgcaatcggcacagttgctttataaaggcggagccgatttaaatatcaatctgctttatgcagctaagagaggatttcctgaaatggtgacctaccttctaaaacaaggtgcggatcacagttggattaccgagaaacaggaaactcctctcattctggcatcttggcgaagaatcataa

SEQ ID NO: 223944 - DNA, 580 bp, Unknown
  Bacterial polypeptide expressing nucleotide sequence isolated from the Sargasso Sea
aatgaaagttactttttttattattttaattttttttaatttatcaacaatcttaaatgcgcaaaatttatctaaggcttattttgccggtggatgtttttggtgtatggaagaatcgtttgaaagactagaaggagttaaggaagttatttcaggctattctggaggaataaccgaaaacccaacctatagagaagtaacttatggagatacagggcattttgaagttgttgaaataatttatgatgaagaaaaaatctcttacgaaaatttattaaaaaatttttggattaatattgatccatttgatgcttatggtcaattttgtgataagggatatagctatagatctgttgctttttatgagaatgaattacagaaagaattaattgaaagagatgtaaagaaatttgaaaagaaatttgaaaagaaagttgttacttacataaaaaaatttgaaattttttacaaagctgaagataaacatcaagattattatgaagtatattttgaaaattaccttagatataaaaaggcatgtagaagagagaaaatattagataatatatggggttcttaa

SEQ ID NO: 223945 - DNA, 418 bp, Unknown
  Bacterial polypeptide expressing nucleotide sequence isolated from the Sargasso Sea
atgcaaaaatttattggtggtattggttgtttttgggatgagacaaaatttgaaaagattcctggtataatttctactgaatgtggatattgtggaggaaaaaatccaactgtaagttatgaacaagtttgtggtggaaataccgaacatgtagaagttgtaaaagttgaatttgatccaaaaatactctcttatgaggaagtaactaaattattttttaaatttcatgatccaaccacactaaatcgccaaggtccaaatcttggctatcagtatcgttcagaaatattttacagtactgatgaagaaaaagaaattgctcacaaggttttaaacgaagtaaacaataagctagatggagcggtagtcacaaaaatatcaaaagaaaaaaactattgtagagctgaagaatatcatc

SEQ ID NO: 223946 - DNA, 173 bp, Unknown
  Bacterial polypeptide expressing nucleotide sequence isolated from the Sargasso Sea
aatgaaatttaatacaaaattaatcttatatttatgtttatgcccctcagttttattttttacagcatttaattcttcaaatgctgaaggtataaaaaaggctctttttgcaggaggttgtttctggtgtatggaggcagactttgaaaagataccaggtattatagaggtag

SEQ ID NO: 223947 - DNA, 277 bp, Unknown
  Bacterial polypeptide expressing nucleotide sequence isolated from the Sargasso Sea
atgaaaaaatttttatcaataattttctttcttatttcttcaaccagctttgccaattcaccaaattttgaaaaagcttattttgctggaggatgcttttggtgtatggaggagtcttttgaaaatattcttggtgtctcaaaagttatctctggctactcaggtggcactacagaaaatccaacttataaagaagttacatatggaaacacaggccattttgaggttattgaagtcatatatattccagaagtggttagctatgaaaaactcttag

SEQ ID NO: 223948 - DNA, 358 bp, Unknown
  Bacterial polypeptide expressing nucleotide sequence isolated from the Sargasso Sea
ttgtctaaagcttattttgcaggtggatgtttttggtgtatggaagagtcatttgaaaaacttaaaggagtaaaggaagttatttcaggctactcaggaggtataacagcaaatcctacttacagagaggttacttatggcgacacaggacattttgaagttgttgaaataatatacgataaaaaaaaaatttcttatgaagaactattaaaaaatttttggattaatattgatccatttgatgcttacggtcaattttgtgataaaggatatagctataggtctgttgcattttatgaaaacgaaatgcagaaagagttaatagaaagagacgtaaaaaaattgaaaaaaaattgaa

SEQ ID NO: 223949 - DNA, 178 bp, Unknown
  Bacterial polypeptide expressing nucleotide sequence isolated from the Sargasso Sea
atgaagtattttttcataattttcttttttttaataaatataaatttttcatattctgctcaaaaagataaggcatatttcgctgggggatgtttttggtgtgttgaggagtcatttgaaaaattaaaaggtgtggaagaagtaatttctggttattctggaggtattactgaaaacc

SEQ ID NO: 223950 - DNA, 454 bp, Unknown
  Bacterial polypeptide expressing nucleotide sequence isolated from the Sargasso Sea
atgaaaactgcttatttctcacttggatgtttctggagcccgcaattagaatttgaaaaaatcaagggcgttaaaaaggctgaggtaggttattgcggcggtgatgacccaaatacaacctatgaaaaagtttgttctggttcaacaaatcacgctgaaactataaaggtagagtttgatgaaaacgaaatttcatacgaggaattagtaagatttttttttaaaattcatgatccaacccaattaaatagacagggaccagatataggaacacaatatagatcagaaatattttataaagacgaaaatcaaaaaaaaattgcagaaaaaataaaaaaagaatttaatgaaagattaagcggaaaagtagtcactaatatttcaaaagagaagctttatcaacctgctgaggaataccaccagtattacttaaaaagaaaaggtgtattatgaa

SEQ ID NO: 223951 - DNA, 190 bp, Unknown
  Bacterial polypeptide expressing nucleotide sequence isolated from the Sargasso Sea
gatggatgaaagcactaaggcgacatttggcggaggctgtttctggtgcctggaagcagttttccaacaagtaatgggggtcatcaaggtggtttccggatacgctggaggagtatcaccgaaaccaagttacgaagcggtctgcagcgggttgaccggccacgcggaagtggtacaaattgaatatgat

SEQ ID NO: 223952 - DNA, 276 bp, Unknown
  Bacterial polypeptide expressing nucleotide sequence isolated from the Sargasso Sea
attttgatccaaaaattattacttatgagaaaattttaaattttttttttaaaattcacgatccgacaactttgaattctcaaggtccagattttggaactcagtacagaagtgaaattttttatttaaatacaaaacaaaaagaaattgctgaaaaagtaataaaattaaaaaacaatgatttttcgggaaaaattgtaaccaaactatctttgctaaagaattattgtatagccgaggaatatcatcaaaagtatttggataaaaaattttaga

SEQ ID NO: 223953 - DNA, 382 bp, Unknown
  Bacterial polypeptide expressing nucleotide sequence isolated from the Sargasso Sea
acttaacggtgtacttaaaactgaagttggattttgcggtggtaaaagtccgaagacctcatatagagaggtttgtactggtgaaactaatcatgcagaagtagtaaaaattgagtatgatgaaagtaaaatatcctacgagcaaattttaaattatttttttgaaattcacgatcctacaactttaaatcaacaaggttatgacattggaacgcagtatagaagtgaaattttttataataatcagagtcaaaaaaaaattgctgaggagacactaaataagattaacaaaaaattaaacggaaaaattgtgacaaatgtatctgagaccaaaaattattgtaaggctgaagaatatcaccaaaaatatctagaaaaataa

SEQ ID NO: 223954 - DNA, 451 bp, Unknown
  Bacterial polypeptide expressing nucleotide sequence isolated from the Sargasso Sea
atggaaactggaatatttgctgctggctgtttttggaaacctgatttagagtttgaagaactcaagggtgtgaaaaaaactgaagtgggttattgcggaggtaatagcgctaatacaacctacgaaaacgtatgcactggggaaactaatcatgctgaagtagtcaaagtttattatgatgaaaatattatttcctacgaggagctagtcaaattttttttaaagattcataatccaacaaccctaaatagacagggaccagatattggaactcaatatagaagcgaaattttttatattactgaaaaacaaaaagagattgctcaaaaaattttgtctgaatcaaataaagaatttaatggcaaaatcgtaacaagaatttcaaaagagttaaactattgtaaaggtgaagattaccatcaaaaatatcttaaaaagagaggtgcgtaat

SEQ ID NO: 223955 - DNA, 226 bp, Unknown
  Bacterial polypeptide expressing nucleotide sequence isolated from the Sargasso Sea
aatgaaatatttcttacctctattaattgctatttcaatatttatttaccctgtaaacgttttcgcagaggaattgattcttgcaggaggttgtttttggtgtttagaacatgatttagagtcattaaaggggataaattttgtacaaagtggctactcaggtggagatttacaaaatcctacatacgaaaatcatgaaggacatcaaggaagtagtttttggtag

SEQ ID NO: 223956 - DNA, 538 bp, Unknown
  Bacterial polypeptide expressing nucleotide sequence isolated from the Sargasso Sea
attgcaaacctcagcatttggccaagatttaggaaaagtatattttgctggaggttgtttttggtgcatggaagaatcatttgaaaaaaaagaaggagttatcgaagtgatttcaggttactcaggtggtaatacaaaaaatccaacatacgaagaagttacatatggaaatacaggacattttgaagttattgaaattatttatgataaaaataaaacaaattttaaagatctactcgatcatttttggataaatattgatcctttcgataagtatggccaattttgtgataaaggttatagttataggtctgtagctttttatcagaatgataaacaaaaagatttaattgaaaacagtattgtgaagttagaaaaaaaatttaataaaaaaattgtaacttatgttagaaaatttgatgaattttttaaggcagaagcaatacatcaagactattatcaagttaaatttctaaattacttacgttacaaaaaagcctgtggaagagaaaaaatattagataaaatttggaattaa

SEQ ID NO: 223957 - DNA, 248 bp, Unknown
  Bacterial polypeptide expressing nucleotide sequence isolated from the Sargasso Sea
gatgctgcctctattgctgttgatgctgctggtgcagcccggctcagccctggctgcaccccaacaggaagcggtctttgccggcggttgtttctggtgccttgagcatgatcttgagaccttgcccggggtgatctcggccgagagcggttacagcggtgggcggattgacaatcccacctacaagcaggtgagtcgtggcagtactggccatgccgagagcgtgctggtgcgctttgacccgcagc

SEQ ID NO: 223958 - DNA, 184 bp, Unknown
  Bacterial polypeptide expressing nucleotide sequence isolated from the Sargasso Sea
tatgatattaggaacacaatatagaagtgaaatattttatacatctgaaaatcaaaaaaaaattgctcaagaagtattgaataataaaaataaattatttaatggaaaaatagttacaaatatttctgaaaaaaaaaattattgtagagctgaagattaccatcaaaaatatttggaaagataa

SEQ ID NO: 223959 - DNA, 262 bp, Unknown
  Bacterial polypeptide expressing nucleotide sequence isolated from the Sargasso Sea
atgaaagttctttttttaagttttttaattttatttaaaacatctgcaattttaagtgctcaaagtttatctaaagcttattttgctggcggatgcttttggtgtatggaagaatcatttgagcaacttaaaggggttaatgaagttatttcaggatattctgggggcataactgcaaatcctacatatagagaggttacttatggagatacaggacactttgaagttgttgaagtaatctatgataaagaaataattctta

SEQ ID NO: 223960 - DNA, 522 bp, Unknown
  Bacterial polypeptide expressing nucleotide sequence isolated from the Sargasso Sea
attgaaaaaaattttattttttgttttatttttttgttcaactgcacttagccaagagaatggaaaagcatattttgccggtggttgtttttggtgtatggaagaatcatttgaaaaaaaagaaggtgtactggaagtaatctcaggatattcaggaggaactacagaagatccaaactatgaagaggtaacatatggaaacaccggacattttgaagtggtagaaattctatttgacaaaagtaaaactaattttgaagaattgctaaatcatttttggaaaaatattgatccttttgatgaatacggacaattttgtgataaaggttatagctatagatctgttgctttttatcagagcaataaagaaaaagatttaattgaaaatagtattaaaaaattagaaaaaaaatttaaaagaaaaattgttacttatgtaagaaaatttgaaaaattttatattgcagaagaaaaacatcaaaatttctacattgaaaaatttgcaagtttcttgagatataa

SEQ ID NO: 223961 - DNA, 228 bp, Unknown
  Bacterial polypeptide expressing nucleotide sequence isolated from the Sargasso Sea
aatgaagtattttttcataattttcttttttttaataaatataaatttttcatattctgctcaaaaagatagagcatattttgctggtggatgtttttggtgtgttgaggagtcatttgaaaaattaaaaggtgtggaagaagtaatttctggttattctggaggtattactgaaaacccaacttacaaagaagttacgtatggaaacactggtcactttgaagttgt

SEQ ID NO: 223962 - DNA, 445 bp, Unknown
  Bacterial polypeptide expressing nucleotide sequence isolated from the Sargasso Sea
aatggaaatagcagttttagctttaggatgtttttggggacctgaaaaaaaatttagtaaactttatgggataataagaactgaagtcggatactgtgggggtaatagccctataacaacttataaagaagtttgtacaggtactacaaatcatgcagaggtagttaaattagaatttgatccaaaaaaaatttcttataaagaaatattggagtacttctttaaaatgcatgacccaactaccttaaattcgcaagggccagattttggaactcaatatagaagtgaaattttttattttaatacagttcaaaaaaatattgctgagaaagtaatagaagaagaaaatcaaaaattaaacggtaaattagttacaaagatatctatgattaaaaattattgtatagcagaagaatatcatcaaaaatacctagacaaaatatag

SEQ ID NO: 223963 - DNA, 295 bp, Unknown
  Bacterial polypeptide expressing nucleotide sequence isolated from the Sargasso Sea
tcatgctgaggttgttaagcttgattttgatgaaaaaattataacatatgaaaaaatcttaaaaactttttttcaaattcatgatcctaccaccttaaactctcaaggaccagattttgggactcaatatagaagtgaaatattttatctaaatgatgatcaaaaaaaaatagcccaaaaagtattgcaagatattaatcaaagattatcaggtaaagttgttacgagaatttctttattaaaaaattattgtcctgcagaagaatatcatcaaaaatatttggaaaaaagataa

SEQ ID NO: 223964 - DNA, 376 bp, Unknown
  Bacterial polypeptide expressing nucleotide sequence isolated from the Sargasso Sea
atgagcaaaaaaaatctagatcatttatctgaagagcaacgttatgtgactcaagaaaagggaactgaggcaccttatacaggtgatttattgcataacaaagagagcggcacttatcagtgtgtatgttgcagtgctgatctttttagctcagatacaaaatttgattcaggaactggatggccaagcttttatgatgtgatgagttcagaagtggtaaaagttgaggtcgataatagtcatggcatgatcagacaagaggttttatgtggagtttgtggtgcacatttgggccatgtctttagcgatgggccacaaccaaccgggcttcgctattgcattaactctctgtctctggagtttgagaaagattaac

SEQ ID NO: 223965 - DNA, 535 bp, Unknown
  Bacterial polypeptide expressing nucleotide sequence isolated from the Sargasso Sea
ggaattgattcttgcaggaggttgtttttggtgtttagaacatgatttagagtcattaaaggggataaattttgtacaaagtggctattcaggtggagatttgcaaaatcctacttacgaaaatcatgaaggacatcaggaagtggttttggtaaactatgattccaaattggtaactttacccgagatactcaggctgtatttcagaaatattgatcctctggacggcaatggtcaattttgtgatcgtggaaattcttacaggccagtgatctttttcaaagatgcaactgaggaaagtgatgcaacaaatgcaattgtttccgcttctaatgaattgcgagtaccattagaaaaaatatatgtagaactaaaatcaaaaggtcaattttggttagctgaagaatatcatcaggattttgctgagagaaatgaattaaaatataagttctatagattctcatgtgggagagatcagaggttggataaattatggggtgataacgctagatcaagaaatctctggaatgaatga

SEQ ID NO: 223966 - DNA, 238 bp, Unknown
  Bacterial polypeptide expressing nucleotide sequence isolated from the Sargasso Sea
gatgataaggactatatattttggaggtggttgtttctggtgtctagaatcaatatatcttaaaataaaaggagttgttgatgttaaacccggatatatgggtgggtcaacgattaaccctacttatgaagaggtttgtgaaggaagcactaaccatgttgaggttgctaaagttatgtttgatacaactataaaattaagtgatttattaaaagttttttttttcattcatgatccg

SEQ ID NO: 223967 - DNA, 403 bp, Unknown
  Bacterial polypeptide expressing nucleotide sequence isolated from the Sargasso Sea
tatggtaaaagcgttatttggagcaggttgtttttggggagttgaagaatattttagaattataaacggtgttttaaaaacagaagttggttattcaggtggatttacagaaaatccaacttatcaaactgtttgtgaaggtaatacagatcatgtagaggttatctctttagagtttaatgaaaaaataattacttataaagatttaatcgatcatttttggaactgtcatgatccaactactttaaatagacaaggtcctgatataggaagacaatatagatcagttattttttatttatcagaagatcaaaaaaatattgctgaaaaatcaaaattagaaaatcaaaaacaattcaacaatcaaagagttacagaaattaccaaagcttataaatttttt

SEQ ID NO: 223968 - DNA, 202 bp, Unknown
  Bacterial polypeptide expressing nucleotide sequence isolated from the Sargasso Sea
atgcaataccctgatgttggaactcagtatagaagtgaaatattttatgaagatgaagaacaaaaaaaagaggctgaagaagttttaaacgaaacaaacaaacattttaatggaaaaattcaaaccaatatctcaaaatttaaaaattattgtaaggcagaagagtatcatcaaaaatatatagaaaaaaagaatcaatgaa

SEQ ID NO: 223969 - DNA, 365 bp, Unknown
  Bacterial polypeptide expressing nucleotide sequence isolated from the Sargasso Sea
tatgtttaagttcctgaaaaacattatgaataataaggaggtaaatttaactaatgatgcttattcattacatagaatattaaaaacagatatcaaaaaagatcctaatctagaagaagatgaaataatttttggatgtggttgtttctggggggctgaaaaatgtttttggaaacttcccggagttatcacaacatctgtaggttatgcaggaggagaaaaaaacaatccaacttattatgaagtatgttccggcttaactggtcattcagaagttgtaagagttatatgggataaaagggaaattgatgtaagtgatttattaaaaatgttttgggaatgtcatgatcctactcaaaaaaaca

SEQ ID NO: 223970 - DNA, 397 bp, Unknown
  Bacterial polypeptide expressing nucleotide sequence isolated from the Sargasso Sea
atggcagaagaatttgattttagccatttaagcccagaagcattccatgtgctccgtgaagcagggacagaacgtgcctggagcggggaatacaacaaactttattccaaaggaaattacaactgccggggatgcggcaatcaactatttgaaagtgacacgaagtttgactccggttcaggatggccgagctttgaccaggcaattgatggaagcgtcattgaactggaagaccgttcctatggaatgcttagggtggaagtgcaatgctcacgctgtaaaagccatctgggacatgtatttcccgatggacctcgagaaaccaccggtaagcgctattgcatgaacagtctcagcctcacttttgagggaaagccggaaaacccctctgaataag

SEQ ID NO: 223971 - DNA, 322 bp, Unknown
  Bacterial polypeptide expressing nucleotide sequence isolated from the Sargasso Sea
tatgaaaaaagctatttttggtatgggatgtttttggggtccagaagaaaaattttctaaagtaaaaggtgtcacaaatactgaagttggatactgcggtggaaccacagacaaaaccacttatgaagaagtgtgtacaggaaaaacaaatcatgcagaagttgtaaatgtagaatttgatgaaaaaacaatatcatattcagatatggtaaaaatattttttgaaatgcacgatgcaactacccttaataaacaaggtttagacataggaactcaatatagaagtgaaattttctatatagatgaagaacaaaaaaaaatt

SEQ ID NO: 223972 - DNA, 454 bp, Unknown
  Bacterial polypeptide expressing nucleotide sequence isolated from the Sargasso Sea
atgacaaaagcattatttggagctggttgcttttggggtgttgaagagtattttaaaaaaattcctggagttttaaatacaaaagtaggttattcaggaggaaatacagaaaaccctacatatgaatctgtttgttatgaaaataccaaccatgctgaagttatagaaatagagtttgatactaatcaactatcttatgaatatttactttctcatttttggaaatgtcatgacccaacaacaaaagatagacaagggccagatattggagcacagtatagatcaataattttttattataatgatgaacaaaaaaattctgctgaaaaatctagaaataaatatcagaaagaatataaagatactattgttactgaaattataaaagtacaaaagttttatcaagctgaagattatcatcagaattacatagaaaaaatcaaaaatttgtaag

SEQ ID NO: 223973 - DNA, 187 bp, Unknown
  Bacterial polypeptide expressing nucleotide sequence isolated from the Sargasso Sea
tttgtataaatttttagtcatgagatttttattatttatatttttaaacttaataattacaaattcagtattggcatctgaaaaaagtaaagcatattttgctggtggttgtttctggtgcatggaagagtcttttgaaaaattaataggtgttgaaaaagtgatttcaggatactctggaggaaaa

SEQ ID NO: 223974 - DNA, 445 bp, Unknown
  Bacterial polypeptide expressing nucleotide sequence isolated from the Sargasso Sea
atggaaatagcagttttaggattgggatgtttttggggtccagaaataaagtttagtaaacttgatggagtgattaaaactgaagtaggatattgtggtggtaatagcgttcaaactagttacaaagaagtctgtacaggtgaaacaaatcatgctgaagtagtaaagttagattttgatcctgaaataatatcatatgaaaaaattgtaaaatatttttttgaatttcatgatccaacaactttaaactctcaaggtccagattttggaacacaatatagaagtgaaattttttacttaaacgataaacagaagataatggcagaaaaaatattaaatgaagaaaataaaaaattatctggaaaagttgtaactaaaatttcagaagtcaaaaactattgtccggctgaagaatatcaccaaaaatatttagaaaaaagataag

SEQ ID NO: 223975 - DNA, 520 bp, Unknown
  Bacterial polypeptide expressing nucleotide sequence isolated from the Sargasso Sea
tgctcaagatttagaaaaagcatattttgctggaggttgcttttggtgcatggaagaatcatttgaaaaaaaagaaggcgttatagaagtaatttctggctattcaggtgggactacacaaaacccaacatacgaagaagttacatatggaaacacaggacattttgaagttattgaaattgtttatgataaaaacaaaacaaatttcaaagatttgcttgatcatttttggattaatatagacccatttgatgaatatggtcaattttgcgacaaaggttatagttatagatctgtagctttttatcaggatgacaaacaaaaagatttaataaaaaatagtattagtaaattagaaaaaaaatttaataaaaaaattgttacttatgtgaggaaatttgaagaattttataaagctgaagcaatacatcaagattattatcaagttaaatttttaaattatttaagatataaaaaggcttgtggaagagaaagaatattagataaaatttggaattaa

SEQ ID NO: 223976 - DNA, 427 bp, Unknown
  Bacterial polypeptide expressing nucleotide sequence isolated from the Sargasso Sea
atggaaatagcagttttagctttaggatgtttttggggacccgaaattaaatttagtaaaatttatggaataactagaactgaagtaggttactgtggcggcaatagttctaaaacaacgtacaaagaagtttgcaccggaactactaaccatgcagaagtagtaaaattagaatttgacacaaagctaatttcttattccaaaattttagaatatttttttgaatttcatgacccaacaacattaaatgcacagggaccagatataggtacgcaatatagaagtgaaattttttacctaaatgatactcaaaaacaaattgctaaaaaaattatagattcagagaaccaaaaactttcaggaaaagtagttacaaaaatatcattattaaaaaattattgtcctgcagaagaatatcatcaaaaat

SEQ ID NO: 223977 - DNA, 574 bp, Unknown
  Bacterial polypeptide expressing nucleotide sequence isolated from the Sargasso Sea
agttttatactttagttttttaattttatttttttcaaccaaggtggcgatttctcaaaatatagagaaagcttattttgctggaggttgtttttggtgtatggaggaatcatttgaaaaacttaaaggtgtagaagaagttatttcaggttattcgggtggtataactgcaaatccaacatacagagaagttacttatggagacactggtcattttgaagttgttgaaataatttatgatagtgaaaaaatttcttatgaagaactgttaaagaatttttgggttaatattgatccttttgatgcttatggtcaattctgtgataaaggatacagctatagatctgttgctttttatgaaaatgaaacccaaaaaaatttaatagaaaaagatgttaaaaagttagaaaaaaaatttaataaaaaagttgttacatatataaaaaaatttgaaattttctacaaagcagaagacaaacatcaagattattaccaggaatattttgaaaattatttaagatataaaaaagcctgcaaaagggagagaatattaagcaatatttggggttcctaa

SEQ ID NO: 223978 - DNA, 221 bp, Unknown
  Bacterial polypeptide expressing nucleotide sequence isolated from the Sargasso Sea
aatgaaaaaattattatcaattattttcttattactttcttcaacgagctttgcaaattcaccaaattttgaaagagcttattttgctggtgggtgcttttggtgcatggaggagtcatttgaaaatattcttggtgtttcaaaagttatttctgggtattcaggtggcactacagaaaacccaacctacaaagaggtcacatatggaaatacaggtcatt

SEQ ID NO: 223979 - DNA, 604 bp, Unknown
  Bacterial polypeptide expressing nucleotide sequence isolated from the Sargasso Sea
atgaaatattttttacctctaataattgctttttcaatattaattaatcctgtaaacacttttgcagaggaattgattcttgcaggaggctgtttttggtgcttagaacatgatttagagtccttaaaaggaataaattttgtacaaagtgggtattcaggtggagatttacaaagtcctacctatgaaaatcatgaagggcatcaggaagtggttttggttaactatgattcccaattgttaaatttacctgagatacttaggctctatttcagaaatattgatcctcttgacggcaagggtcaattttgtgatcgtggagattcttataggccagtgatcttttttaaaaatgaaactgaggaaagtgatgcaaaaaatgcaattttttcggcctctaatgagttacgagtaccattagaaaaaatatctgtagaactaaaatcaaaaggtaaattttggttggctgaagaatatcatcaggattttgctgagagaaatgaattaaaatataagttctatagattctcatgtgggagagatcagaggttggataaattatggggggataacgctagatcaataaatctttggactgagtgat

SEQ ID NO: 223980 - DNA, 580 bp, Unknown
  Bacterial polypeptide expressing nucleotide sequence isolated from the Sargasso Sea
aatgaaaattcttttttttatttttttaattttatttaattcatcaacaatttcaaaagctaaagatttatctaaagcttattttgctggcggatgtttttggtgcatggaagagtcatttgaaaaacttaaaggagtagaagaagttatttcaggttattctggaggcataactgcaaatcctacatatagagaagttacccatggtgatacaggacattttgaagttgttgaaataatttatgataaagaaaaaatttcttatgaagaattattaaaaaatttttggattaatattgatccatttgatgcttatggtcaattttgtgataaaggatatagttatagatcagttgcattttatgaaaataataaacaaaaagacttaatagaaaaagatgtaaaaaaatttgaaaaaaaatttaaaaaaaaagtggttacttatataaaaaaatttgaaattttttataaagcagaggataaacatcaaaactactatcaagaatattttttaaattatttaagatataagaaagcatgcagaagggaaaaagtactagaaaatatttggggttcttaa

SEQ ID NO: 223981 - DNA, 559 bp, Unknown
  Bacterial polypeptide expressing nucleotide sequence isolated from the Sargasso Sea
ttgataagttttatttttttttatgcaacaaatgttgttaaatctgaaatatcaaaagcttattttgcaggtggatgtttttggtgcatggaagaggtttttgaaaagacagaaggtgtgattgaagtagtatcaggatactcaggtggaatctcaaaaaatcctacttataaagaagttacatatggtgacacaggacatttcgaggttgttgaagttgtttataataaatcaaaaataaattttgaaaatctagcaaatattttttggaaaaatatcgatcctttcgataaggcaggtcagttttgtgataaaggatacagttataggtctgttgcgttctatacaaataatgacgaaaaaaaacttatagaggatgatattcaagaaattgagaaaaaatttaatcaaaaagtagttacatatattaggaaatttgaaatattttataaagcagaggaacatcatcaagattattataaagagaaatttttaaattatttgttatataaagagggatgtggaagacaaaggaaattagataatatttggcaatgaa

SEQ ID NO: 223982 - DNA, 145 bp, Unknown
  Bacterial polypeptide expressing nucleotide sequence isolated from the Sargasso Sea
aatgaatagtgtcatatatttaggtggaggttgtttttggtgcactgaatcagtatttaagagagttaatggaattgtttcaatatctcctgggtatatgggaggtgataatcctaatcctacatacgaagaggtatgtgaaggg

SEQ ID NO: 223983 - DNA, 226 bp, Unknown
  Bacterial polypeptide expressing nucleotide sequence isolated from the Sargasso Sea
atggcaaataacacagaaaataaaaaagctgtatttgcagctggttgtttttggggagttgaatccacatttcaacaaatggatggagtgaaatctacaacagtaggatacattggtggaaaagttaaaaatccttcatatgaactggtatgtactggattgacaggacatgcagaagcagtagagattgtttataatcctaatgaagttacttttgaaaaactgt

SEQ ID NO: 223984 - DNA, 220 bp, Unknown
  Bacterial polypeptide expressing nucleotide sequence isolated from the Sargasso Sea
atcaggaatttgggtaacggatcaaaagcagttagttgaagcagaagaaagtcttaaggcttatgaagagtcgttacttgcttctggtttcgaagaaattaaaacgacagtagaaatgcaagaaaatttttactatgcggaagaataccaccaacaatatttacataagaatccgaatggatattgcggtattgctggaacaggtgtgctttgcaaataa

SEQ ID NO: 223985 - DNA, 247 bp, Unknown
  Bacterial polypeptide expressing nucleotide sequence isolated from the Sargasso Sea
gaaaaaattcttgaatatttttttgaaattcatgacccgacaactcttaattctcaaggaccagattttggaacacaatatagaagtgaaattttttatttaaacgataatcaaaaaataactgcagaaaatattatagataaagaaaacaaaagactatctggaaaagttgtaactaaattgtcagaagttaaaaactattgtccagctgaggaataccaccaaagatatttggaaaaaagataga

SEQ ID NO: 223986 - DNA, 248 bp, Unknown
  Bacterial polypeptide expressing nucleotide sequence isolated from the Sargasso Sea
tatgcaaatatttataggtggaattggttgcttctgggatgaaactgaatatcaaggtgttcctggtattatttcaacagaatgtgggtattgcggtggaaaaaatccaaaagtgacttatgaacaagtttgtggcggcgatactgaacacatagaagttgttaaagtcgcattcgatcctaaaataatttcttatgaagacgtagctagattattctttaaaatccacgatccaacaactcttaatc

SEQ ID NO: 223987 - DNA, 781 bp, Unknown
  Bacterial polypeptide expressing nucleotide sequence isolated from the Sargasso Sea
gattatagctgaataccaagctctcctaattgagggaggttatggaaaaattagaacaaagctggagcctttagataacttttatcttgctgaagaatatcatcaggattatttaaaaaagaatcctaatggctattgcccagacctatcaacaggaattgtttttaacgatgaagaaaaaattttcgaggataatgaataccttcttacgggaaagcaaatattagttctagactctaaaaattattgtccttactgtgaaaaatttaaggatgatgtgactagtagctataaaggaagcatccccttgagctatagaacttctgatcagttacatggccttgaaattaaatctcctacctgggctactccatctttaatttttcttgaaaatggaaaagagattttttcgtatcagggatacataaatcaaaaagatttttatcaattattgggtaaatttaaattaggaaattcagaggcatataacgtcgcatttaacaaaggaattgatgcacgcttttgcaaagaatatcaaatttttaaaaatacaccagatggcatctttatagataagctcagtggagaacctctttttgatacaagaaatagatttgtctcaaggtctggttggttatcttttacgaaacctgttgatggatctgtatatgaacttcctgataatagttatggcatgaaaaggactgaaataagatcagtttcctcggatatacatttgggacatgtatttgatgatggtccaaatggcatgccaacgata

SEQ ID NO: 223988 - DNA, 277 bp, Unknown
  Bacterial polypeptide expressing nucleotide sequence isolated from the Sargasso Sea
ttagattttgatcctaatgtaatttcttacgagaaaattcttgaatatttttttgaaattcatgatccaacaacattaaattctcaaggaccagatttcggaactcaatatagaagtgaaatattttatttaaataatcaacaaaaaattactgctgaaaaaatgatagaaaaagaaaacgtcaaattatcaggaaaggtagtaacaaaaacttctttagttaaaaattattgcccagctgaagagtatcatcaaagatatttggaaaaaagataaa

SEQ ID NO: 223989 - DNA, 370 bp, Unknown
  Bacterial polypeptide expressing nucleotide sequence isolated from the Sargasso Sea
tttaaattaggtgaatcggaagcttacaatgtcgccttcaacgagggaacggatgcgaggttttgtaaacagtatgagatttttaaagatacacccgatggtgtttttattgataaattaagtggcgcaccactatttgatacgagtgatcgttttgattcaaaaagtggatggttatcttttactaaatcagttgacggtgcggtctacgaactagaggataatagtcatggtatgcagcgggttgaaattcgctcagtttcatcgggtattcatttaggccatgtttttaatgatggtcccaatggccaacctaggtattgtataaatgcgacggtacttgaatttaagcaaagggataatctttaaa

SEQ ID NO: 223990 - DNA, 574 bp, Unknown
  Bacterial polypeptide expressing nucleotide sequence isolated from the Sargasso Sea
taattttattgtcatctgtatctttattttttttgtcaataatcaatcatattctcaagaattgaaaaaaacttattttggtggcgggtgtttttggtgcatggaggagtctttcgataaggtagaaggtgtcaccaatgttgtctctggttattcggggggagtaaaacctaatccgacttacaaagaggtaacttatggtgatactggtcatattgaagtggttgaaataacatacgatacaagcaagatcggttttgaggaattgttaaatgttttttggaaaaatattgatccttttgatgcggcaggtcaattttgtgacaaaggttatagttataaatccgctgcattttatatgaatgatgatcagaagaaactaatagaaaaaagtattaaggtcatagaaaatgattttaataataaagttgttacttttgttaaaaaatttgaaaaattttatccagcagaggattatcaccaaaattattatcaaacaaattttataaattacttactttataaaaaagggtgtggtagagagagtaaattagaaaatatctggcaaaaatga

SEQ ID NO: 223991 - DNA, 510 bp, Unknown
  Bacterial polypeptide expressing nucleotide sequence isolated from the Sargasso Sea
attgaaaaagattttattttttattttatttttttgcacaacagcattcagtcaagagaatggaaaagcatattttgccggtggttgtttttggtgtatggaagaatcatttgaaaaaaaagaaggtgtattagaagtaatctcaggatattcaggaggaactacagaagacccaaactatgaagaggcaacatatggaaacactggacattttgaagtggtagaaattctatttgacaaaagtaaaactaattttgaagaattgctaaatcatttttggaaaaacatcgatccttttgatgaatacggacaattttgtgataaaggttatagctatagatctgttgctttttatcagagcaataaagaaaaagatttaattgaaaatagtattaaaaaattagaaaaaaaatttaaaagaaaaattgttacttatgtaagaaaatttgaaaaattttatattgcagaagaaaaacatcaaaatttctacattgaaaaatttgcaagtta

SEQ ID NO: 223992 - DNA, 475 bp, Unknown
  Bacterial polypeptide expressing nucleotide sequence isolated from the Sargasso Sea
ctccgagtggcggaagcagctcgacggcgcgcagtacaatgtgctcttcgaaaagggcacggagcggcccggcaccggcgagtacaacaaattctatccgacggagggccacttcacgtgcgcggcctgcgaccagccgctctactcggcgcaggcgaagtttgacagcggctgcggctggccggcgtttgacaagattgtcaaggacgcggtggtgacggcgacggacaccacgctagggatgcggcgcgtcgagatcctgtgctccggctgcggcggccacctgggccacgtcttcgagggcgagggctttacgccgacgatggagcggcactgcgtcaactcgctcagcatgaaatttgtggatagcccgctgcccgccgaggcggtggaggagaaggtgctgccgccgttcgagaacccgatggacaaggcgaaggggctgctcggagagctgtttgggaagaaggactga

SEQ ID NO: 223993 - DNA, 775 bp, Unknown
  Bacterial polypeptide expressing nucleotide sequence isolated from the Sargasso Sea
actaaagttaaggcactgggaggaattttatcccgcagaagaatatcatcaggattatttagtcaaaaatcctaatggttattgtccgattcatgcaacggggattaaatttaatcagcaggaaaggatagtcgttgataattcatctttattgacggataaaaatattatagttattgaagcggagagtcattgtccttactgcgaaaaatttaaagaagatgtggttaatacttatcagggaacaatcccacttacttttaagttagcaacagaactcaagggactggatatcaagacacctacctgggcgacacccacgattttattttttgaagatggtagagaagtttttggtcatcaaggttatatgacatcagaggttttttatcaggcattgggcgcttttaaacttggaaaatctgaagcctataatgttgcctttaacgagggaaccgatgccagattttgtaagcagtatgaaattttcaaagatacacctgatgggatttttattgataaattaagcggcgcatcattgttcgatacagacgatcgttttgattcaaaaagtggatggttgtcttttactaaatcaattgatggcgcagtctatgaactggaggacaatagttacggtatgcaacgggttgaaattcgttcatcatcatcaggcattcatttggggcatgtttttaacgatgggcctaatggtcagcccaggtattgtattaacgccacagtacttgagtttaagcaaagagaaaatctttaa

SEQ ID NO: 223994 - DNA, 577 bp, Unknown
  Bacterial polypeptide expressing nucleotide sequence isolated from the Sargasso Sea
aatgaagtattttttcataattttcttttttttaattaatataaatttttcatattctgctcaaaaagataaagcatatttcgctgggggatgtttttggtgtgttgaggagtcatttgaaaaattaaaaggtgtggaagaggtaatttctggttattctggaggtattactgaaaaccctacttacaaagaagttacatatggaaatactggtcactttgaagttgtagaaataatctatgataaaaaagttatttcatttgagcaattactagaaaatttttgggttaatattgatccatttgatgcttacggtcaattttgtgacaaaggatatagttatagatcagttgcattttatcaaaatgaagaagaaaaaaaattaatagaaagagacataaaagatttacaaaataaatttaacaaaaaagttgttacatacattaggaattttgaaaaattttataaggcagaggaataccatcaagatttttataagattaaattagaaagatatcttagatataaaaaagcgtgtggaagagaggaattgttaaaaagaatctggagtccataa

SEQ ID NO: 223995 - DNA, 287 bp, Unknown
  Bacterial polypeptide expressing nucleotide sequence isolated from the Sargasso Sea
aatgagtttgtttggatttgttagtaaacccgcagaattgcctgacagggcaacagcattgcctgatagatcttcaccgatacgtgttgatcctaatcattacattctgcgaaataccattgtagagcccgtaccggaccagattgagaaagccgtgtttggaatgggttgtttctggggggctgagaggctcttttggtcacttccaggcgtttacagcacagcagttggttatgctggtggaataaccgcaacccctcatatgaagatgtttgttcgggacaaac

SEQ ID NO: 223996 - DNA, 916 bp, Unknown
  Bacterial polypeptide expressing nucleotide sequence isolated from the Sargasso Sea
ggttaatcaccaggatcatcgtggccagaatgtccttcacgatgcaactgtggcaggcaatcttggactggtgaaaatgatcctggaaaaaaatgctgatagcagctcaaaaaatcagcgcggggaaactccattgatgcttgccgcctcggaagcacatcttgaaattgcaaagttacttttgagatccggagcttcccggctgattaaggatcgttttggccgaaccgcgtggatgcatgcgatcgatggcggaaatgtagaattggtcaagttgctcgcaaagggcggttatccggcttccgaaaagttgatttttgccgccagcaggggacacaccgaagccgtcgaaatcatgttaaacttcaatgcggatccggattcccgtgatgaaaggcaatggaatgcattaatgtgggcggcgaaaaacggacatactgccacagtccagcttttgcttaaaacaggcctcgatatcaactccatgggttccaaaaattggacccctttgatgctttctgcggggggaggtcatgctgataccgcgagagttttgcttgagtcgggggccgattacagcatccgtgatcaggaccaatggactgccttaacctgggctgcaatgaaaggacaccttcctctggttgaactgatcctttactacggtgcttcaatcgacgagaaaggttccgatggagcaactcctttgatctgggcagcctctcaggggcattctgacgtggttaaaattttattgaataaaggagctaatcctctcatcgaggatgatcatggaaagactgcactggtgcatgcattactgaaaaaccacctgcaatcggcacagttgctttataaaggtggagccgatttaaatatcaatctgctttatgcagctaagagaggatttccttga

SEQ ID NO: 223997 - DNA, 448 bp, Unknown
  Bacterial polypeptide expressing nucleotide sequence isolated from the Sargasso Sea
aatggaaatagcaattttagcacttggatgtttttggggaccagaaattaaatttaataaattaaacggtgtaattaagactgaggtaggttactcaggaggtaataaagagagtgtaagttatgaagaagtatgcacaggaaaaactaatcatgccgaagttgtaaaaatagaatttgatagctcaaaaatatcttacgaagatatattaaattatttttttgaaatacatgacccaaccacaattgatagacaaggtctagatataggatcgcaatacagaagtgaaatattttactctaacaataatcaaaaattaattgccgaaaatattttaaaaaaatacaatcaaaaatttaacgggaaaatagttacaaaaatatctgaattaaaaagttattgtaaggcagaagaatatcatcaaaaatatttagaaaaaagattttaa

SEQ ID NO: 223998 - DNA, 445 bp, Unknown
  Bacterial polypeptide expressing nucleotide sequence isolated from the Sargasso Sea
atggaaatagcagttttagctttgggatgtttctggggtccagaaaaaaaatatggacaattagatggcatctacagaacagaggttggatattgtggaggaaacagtcctaatacaaactatagagaagtttgtacaggaacaactaatcatgcggaagctgtaaaattagaatttgatcctaaagtcattacatacgagcaaataattaagagattttttgaatttcatgatccaactacactaaactctcaaggtcccgattttggaacacaatacagaagtgaaatcttctaccttaatgaagaacaaaaaaatattgctcaaaaagtaatagacgaagaaaatttaaagttatctggaaaagttgtaactaagctatctgagttgaaaaattactgcactgctgaagagtatcatcagaagtatctagaaaaaagataga

SEQ ID NO: 223999 - DNA, 259 bp, Unknown
  Bacterial polypeptide expressing nucleotide sequence isolated from the Sargasso Sea
tatgaatgaattaaaaaaggcttactgcgcgggggggtgtttttggggcatagaggaaagctttagaacaaaaccaggtataatttccacagaggttggttatgctggtggaaaagatgaaaatgttaattacgaaaaagtttgtaaaggtaacactggccatgcagaaacagttaaaatcgaatttgatgaaaaaattataagctatgaaaaaattcttgatctttttttcaaaatgcatgattccaacacagaaaga

SEQ ID NO: 224000 - DNA, 904 bp, Unknown
  Bacterial polypeptide expressing nucleotide sequence isolated from the Sargasso Sea
ggaaatgtagaattggtcaagttgctcgcaaagggcggttatccggcttccgaaaagttgatttttgctgccagcaggggacacaccgaagccgtcgaaatcatgttaaaccttaatgcggatccggattctcgtgatgaaaggcaatggaatgcattaatgtgggcggcgaaaaacggacatactgccacagtccagcttttgcttaaaacaggcctcgatatcaactcaatgggttccaaaaattggacccctttgatgcttgctgcggggggaggtcattctgataccgcaagagttttgctggagtcgggggccgattacagcatccgtgatcaggaccaatggactgccttgacctgggctgcaatgaaaggacaccttcctctggttgagctaatcctgtatttcggtgcttcaatcgacgagaaaggttccgatggagcaactcctttgatctgggcagcctcccaggggcatactgatgtggttaaaattttattgaataaaggagccaatcctctcattgaggatgatcatggtaagacagcactggtgcatgcattactgaaaaaccacctgcaatcggcacagttgctttataaaggtggagccgatttaaatatcaatctgctttatgcagctaagagaggatttcctgaaatggtgagctaccttctaaaacaaggtgcggatcaaagttggatcaccgaaaaacaagaaactcctctaattctggcatctttggcgaagaatcataaatgtgcggaaattctcttaaaacaaggagcagatcctgactggactgaccaaaattcgttaagtgctttaaatcatgctgtgatgaatggagatttagagatggttaatttacttctggtccattctgcagacccaaactcta

SEQ ID NO: 224001 - DNA, 358 bp, Unknown
  Bacterial polypeptide expressing nucleotide sequence isolated from the Sargasso Sea
tatgagtaaaaaagtaataaagtctgatgctgaatgggcaacttgccttactcctgaagagtataaaattttaagggagaaaggtactgagatggcttttacaggtaaatactataatcataaagaagatggtacatatacttgtgcaggatgtgactatgaattatttagttcagaaactaaatttgattcaggtactgggtggccaagtttttatcaagccctagataaagatagaattattgaaaaagaagataatacgctcgggatgacccgggtggaaattctttgcgccagatgtgaatcacacttgggtcatgtatttaatgatggaccaaaccccacaggattacgttat

SEQ ID NO: 224002 - DNA, 244 bp, Unknown
  Bacterial polypeptide expressing nucleotide sequence isolated from the Sargasso Sea
atggaaataacaaaggctttatttggtgctggatgtttttggggtgtagaagaatactttaaaaatgttaagggagtgaagaataccaaagttggatattcaggaggcaaaactgaaaatccaacttacgaagaagtatgtagtaaggataccgaacatgcagaggttgtttttttagagtttgacatggatattataagttatgaagaaattttaaatcatttctggaaatgtcatgatccaa

SEQ ID NO: 224003 - DNA, 466 bp, Unknown
  Bacterial polypeptide expressing nucleotide sequence isolated from the Sargasso Sea
atgaagtatataaattttctttttctgtccctattatttttaacggcttgcaaatcgcaaactaatgaagttaactacgaagtaattaaaactgataatgagtggagagagcaacttgatcaaatgtcctacctggttttaagaaaagcttacactgaaagaccttacactggtaaatacgataatttttatgaaaagggtacatatctctgtgcaggttgtaatgaaccgctttataagtcgaataataaatataactccttttgtggttggccaagttttgacaaagaaattaaagataaattagtttttgatgtcgattataaattgggttatcccagaacagaaataaaatgtaagaaatgtggtggtcatttaggtcatgtatttaacgatggtccaaaagaaactacaggcattcgacattgtgtaaactctgctgcattaatttttaaaaaatcatgat

SEQ ID NO: 224004 - DNA, 199 bp, Unknown
  Bacterial polypeptide expressing nucleotide sequence isolated from the Sargasso Sea
atgataaataaagacaataaatactggaaatctaaattagatgatctaagctataaggttttaagagaggcagcaactgaaattccattttctggaaaatacaatctacatttcaaaaatggaaattacaggtgcaaaggatgtgatgcagttttatttgaaagcgattcaaagtttgatagcgggtgtggctggccca

SEQ ID NO: 224005 - DNA, 376 bp, Unknown
  Bacterial polypeptide expressing nucleotide sequence isolated from the Sargasso Sea
atgaacaaacccgacgacctcaacagcggcgcgcccgccgtgcagaaagacgacgccgaatggcgcaaacagctctccgacatcgaatatcaggtgacgcgccacgcggccaccgagcgcccctttaccggccgctatcacgatcactgggaccgcggcatctatgattgcgtctgctgcggcacgccgctgttcgaatcggacaccaagttcgacgccggttgcggctggccgagctacttcaagccgatcaacggcgaggtgatcgccgaaaaaaccgaccgctcgcacggcatgctgcgcatcgaggtgcagtgcaagaactgcggcgcgcacctgggtcacgtgttcgaagacggtccggcgccgaccggtc

SEQ ID NO: 224006 - DNA, 475 bp, Unknown
  Bacterial polypeptide expressing nucleotide sequence isolated from the Sargasso Sea
aattcaccaaattttgaaagagcatattttgccggtgggtgtttttggtgcatggaagagtcatttgaaaatattataggtgtttcaaaagttatttctgggtattcaggtggcactacagagagtccaacttataaagaggtcacatatggaaatacgggccattttgaagttattgaagtaatatatattccagaagtagtcaggtatgaaaaacttttagaagaattttgggtaaatatcgatccatttgatgctgcaggacagttttgtgacaaaggatatagttatagatcagttgcattttatcaaaatgagaaacaaaaagatttaatagaaaatagtattaaggatatagaacaaaaatttaaaaaaaaagtcgtaacctacgttagagaatttgaaaaattttacaaggcagaagctttccatcaagattattaccaaataaattttgtaaattatttaagatata

SEQ ID NO: 224007 - DNA, 226 bp, Unknown
  Bacterial polypeptide expressing nucleotide sequence isolated from the Sargasso Sea
atgaaagttttttttttaagttttttaattttatttaattcatctgcaattttaagcgcccaaaatttatcaaaagcttatttcgcaggcggatgcttttggtgtatggaagagtcatttgaacaacttaaaggagttaatgaagttgtttcaggatattcaggaggcataactgcaaatcctacttatagagaagttacatacggtgatacaggacattttgaag

SEQ ID NO: 224008 - DNA, 277 bp, Unknown
  Bacterial polypeptide expressing nucleotide sequence isolated from the Sargasso Sea
tatgtcaaaagaagaatcccaggtagctatcttaggaggtggttgtttttggtgtgttgaagctgtttttgaacgagtagatggagtgattgatgttgtctcaggatatgcaggtggacacactaaaaatcctacttataaagatgtaacaagtggtaatacaggtcatgccgaagtgtgcaaaataacctttgatacaaaacttatttcttatgatcaaatattagatgttttctggaaatctcatgaccctacgaccttaaatcgccaaggaaaa

SEQ ID NO: 224009 - DNA, 373 bp, Unknown
  Bacterial polypeptide expressing nucleotide sequence isolated from the Sargasso Sea
gtgttactggcaaacgggccatgtagaagtcgtaaaaatagactacgatacgagtgaggtaacttttgacacgcttatcgatgcctttttcattatgcatgacccgacaacactaaatcgtcaaggtccagatattggtgaacaatacaaatcagtaattttttataataatgatgaacaaaaaaatattataaaaaataaaattaaactaattgacgcaatggatattcatgaaaatcctgtagttactgaaataagagaagctgctaaattctatcccgctgaagactatcatcaagactatgccatgaagacaggcaaactttgttatcaacaaatgtatgttaaatacaactacacacccgtcccctga

SEQ ID NO: 224010 - DNA, 190 bp, Unknown
  Bacterial polypeptide expressing nucleotide sequence isolated from the Sargasso Sea
gaaaaacaaaaagctcaataccagtcaagtttgaccaatgctggttatggcgagattgtcacagaaataatccagagccaaacctttcattatgcagaggattatcatcaacaatatttagctaagaatcctgatggatattgtggacatggtggttgtggcgtttcttttaatctttcaagtgattagt

SEQ ID NO: 224011 - DNA, 577 bp, Unknown
  Bacterial polypeptide expressing nucleotide sequence isolated from the Sargasso Sea
ttgctctttcatattttttaaccccataaacacttttgcagaggaattgattcttgcaggaggttgtttttggtgtttagaacatgatttagagtcattaaaggggataaattttgtaaaaagtggctattcaggtggagatttgcaaaatcctacttacgaaaatcatgaagggcatcaggaagttgttgtggtggactatgactccaaattggtaactttacctgagatacttaggctctatttcagaaatattgatcctctggacggtaagggtcaattttgtgatcgtggagattcttataggccagtcatctttttcaaagatgcaactgaggaaagtgatgcaaaaaatgcaattgtttccgcctctaatgaattgaatgtgccattagaaaaaatatctgtagaactaaaatcaaaaggtcaattttggttggctgaggaatatcatcaggattttgctgagagaaatgaattaaaatataaattttatagattctcctgtgggagagatcagaggttggataaattatggggtgataacgctagatcaacaaatctttggaatgaatga

SEQ ID NO: 224012 - DNA, 511 bp, Unknown
  Bacterial polypeptide expressing nucleotide sequence isolated from the Sargasso Sea
gggtaaggcatattttgctggtggatgtttttggtgtatggaagaagtttatgaaaaattaagtggagtagaagaagtgatatcaggttactctgggggcactacagaaaacccaacctatagagaggtgacttatggtaaaactggtcattttgaggttgttgaaattgtctatgacaaagaaatcatttcttttaaagaattactcgatattttttggaaaaatatagatccctttgatccttatgggcaattttgcgataaaggatatagctacagatcagtcgcgttttatcaaaatgatgaagaaaaaaaactgatagaaaatagtgtaaaagtattagaaaaaaaatttaacaaagagattgttacttacgtaagaagttttgataaattttacgaagctgaagtttaccaccaagatttttatgttaaaaagtttcagagatatttggaatataaaacagcatgtagaagagaagagattttaaataatatttggaacttataa

SEQ ID NO: 224013 - DNA, 379 bp, Unknown
  Bacterial polypeptide expressing nucleotide sequence isolated from the Sargasso Sea
atggaaatagcagtattagcattaggatgtttttgggggccagaaataaaatttggaaaacttgaaggaattacaaaaacagaagtaggttactgtggaggaaataatggcaaaacaacttatgaggaagtttgttcaggaaacaccaatcatgctgaggttgttaagctagaatttgatcctataaaaatttcatatgaagaaattttgaattatttttttgaaattcataatcctacgactttaaatgcacagggtcctgatattggtactcaatatagaagtgaaatattttatataaatgaagaacaaaaaaaaattgctgaaaaaataaagaaaaaaatgataaagaattatctggcaaagttggttacaaaat

SEQ ID NO: 224014 - DNA, 403 bp, Unknown
  Bacterial polypeptide expressing nucleotide sequence isolated from the Sargasso Sea
atgaccagctccgatcgcatcgagcgcaacagtgaggactggaagcagacgctcacgcccgagcagttccaggtgacccgctgcgggggcaccgagcgggccttcacaggtgcctactgggacaacaaggccacggggatgtaccactgcgtctgctgcggggcgcctctgttcagctcgcaaaccaaattcgagtccggcacgggctggcccagcttctgggacggtgtctcccccgaggcgatcaccaccaagcgtgatctgacccacggcatggtgcgggtcgagatcaactgcgcccgttgcgatgcccatctcggtcacgtgtttcccgatggtccggcgcccacagggcagcgctactgcgtcaacagcgcctcgctcgacttccgggcgggttgag

SEQ ID NO: 224015 - DNA, 82 bp, Unknown
  Bacterial polypeptide expressing nucleotide sequence isolated from the Sargasso Sea
caccagcaatacctggcgaagaatccgggcggctattgcggcctcggcggaacaggcgtatgtctaccccctgaatcttgag

SEQ ID NO: 224016 - DNA, 454 bp, Unknown
  Bacterial polypeptide expressing nucleotide sequence isolated from the Sargasso Sea
aatgaaaactgcttatttcagtttaggatgtttttggtctccccaattagaatttgaaaaaattaaaggggtcgttaaggccgaggtaggatattgtggtggcaatgatccgaatacaacctatgaaaaagtttgctctggatcaacaaatcatgcggaaactgtaaaagtagattttgatgaaaatgtagtttcatacgaggaattagttaaagttttttttaaaattcacgatccaacacaattaaataggcaaggtccagatattggaacacaatacagatcagaaattttttacaaagataaatttcaaaaagaagttgcagaaaaaataaaaagagaattcaatgaaaagttaaacggaaagatagttactaatatttcagaagaaaaactctatcaaaccgcagaagaataccatcagtactatcttaaaagaaaatttacaatatga

SEQ ID NO: 224017 - DNA, 397 bp, Unknown
  Bacterial polypeptide expressing nucleotide sequence isolated from the Sargasso Sea
ctggcaatcgccgagcctaaccaccgcacggcctatttcgcaggtgggtgcttttggtgcaccgaaactgattttgaaaaaattgacggcgtttccgaagtcatctccggttttatgggcggcgaaaaagccaacccgtcctataatgatgttgcttcgggcagaacccaacatcgcgaaaccgtaaaggtcgttttcgacccagccagcgtcagctatcaacaacttctgagcacattttggcgcatgcacgacccgtcagacgcgactggcagttttgtcgatcggggtcgccagtacagttcagcgatttactatgtggatgccgaacagcagcgactggctgaaggtggggcgaaggctcttgatgcttcgggcaaattcgacgcgccgatag

SEQ ID NO: 224018 - DNA, 580 bp, Unknown
  Bacterial polypeptide expressing nucleotide sequence isolated from the Sargasso Sea
atgaaatttttatttttaagttttgtaattttatttttttcaaccaaagtagcaatctctcaaaacacggaaaaagcctattttgctggaggttgtttttggtgcatggaagaatcatttgaaaaactcaacggtgttgaagaagtaatttcaggttattctggtggtataactgcaaacccaacatatagggaagtgacctatggggatactggtcatttcgaggttgttgaaataatttatgataagaacaaagtatcttatgaagatttattaaaaaatttttggattaatattgatccttttgatgcatatggtcaattctgtgacaaaggatacagttatagatctgttgcattttatgagaatgaaaaacaaaaaaatttaattgaaagagatgtaaaaaagtttgaaaaaaaatttaaaaagaaagttgtaacttatatcaaaaaatttgaagttttttacaaagcagaagataagcatcaagattattaccaagaatatttcgaaaattacctaagatataaaaaagcctgcaaaagagagaaaatattaagtaatatatggggttcttgaa

SEQ ID NO: 224019 - DNA, 362 bp, Unknown
  Bacterial polypeptide expressing nucleotide sequence isolated from the Sargasso Sea
aatggaaatagcagtattagctcttggatgtttttggggacctgaaattaaattcagcaaattaaatggagttgttaagactgaagttggatattgtggtggtaactcaagcgaaacaaactatgaagaagtatgctctggaaaaaccaatcatgcagaagttgtaaaaatagagtttgataactcaaaaatttcttatgaaaaaattttaaattatttttttgaaattcataatccaaccactttaaataaacaaggccctgatataggaacacaatatagaagtgaaatattctacttaagtgaagatcaaaaaaaaattgctacaaatgttttaaaacattataacaaaaaatttgatg

SEQ ID NO: 224020 - DNA, 553 bp, Unknown
  Bacterial polypeptide expressing nucleotide sequence isolated from the Sargasso Sea
ttactattatttcttgtatcgacatcattctctcattcaaaagataaagcgtattttgcaggaggttgcttctggtgcatggaagaatcttttgaaatgttggaaggtgtagaagaagttatatctggttactcaggagggatcactgcaaatccaacatatagggaagtcacttatggagatactggtcattttgaggttgttgaaataatttatgacaaagagaaaatatcctataaagaactcttaaaaaacttctggcttaatattgatccatttgatgcttatggccagttttgcgataaaggatacagctacagatctgtagcattttatgaaaacgattatcagaaagatttaattgataaagatataaaaagattagaaaagaaatttaaaaagaaggtagtcacatatgttaaagaatttgagattttttacaaagcagaggataaacatcaagattactatcaagtatatttagaaaattatttaaaatataagaaagcatgcaaaagagagagaatacttgatattatttggggatcataat

SEQ ID NO: 224021 - DNA, 432 bp, Unknown
  Bacterial polypeptide expressing nucleotide sequence isolated from the Sargasso Sea
ggtggcttaaaaatccttcctacaaccaagtattaactggaaaaacaggtcacgcggaaagtgtaagaatatcatacaacccaaatcaaataagtttttcaaaccttgttgaagtttttttcgcatcacatgaccctacaaccctaaatagacaagggcccgatgttggtacacattatagatcaattgctttttatgagtttgacgaagaaaaaaaaattattgaacaagaaataaaaagattattagaaaatcagatatatcctgttattgtcactgaaatcaaaaaatttgaaaagttttaccttgcagaaaattatcaccaagattacaaaataaaaaatccgaacaacccatacatttggaatgtttctgttcctcgaattgaaaaatttaaatccaattatactgatttacttaaaaaagaataat

SEQ ID NO: 224022 - DNA, 121 bp, Unknown
  Bacterial polypeptide expressing nucleotide sequence isolated from the Sargasso Sea
gacggtccaggaccgcttggattgaggtactgtattaattccgccgcacttaagtttatacccaaaaacgatttggacaaagaaggataccagatctaccagagtttatttaataactgac

SEQ ID NO: 224023 - DNA, 415 bp, Unknown
  Bacterial polypeptide expressing nucleotide sequence isolated from the Sargasso Sea
atgaaatcattagcaacttttggaaccggatgtttttggtgtaccgaagcatgttttaaagaactgaatggtgttattgaagttcgaccaggatatgccggagggaaaacacataatccaagttatgagcagatatgtactggacaaactggtcatgctgaggttattagaattgtttatgatgaaaaaataatttcttttgaagaactacttagagttttctggtatgttcatgatccaacacaactaaataggcaaggcaatgatattggtacacaatatcgctcagttattttttatcattcagatgaacagaaagagctttcattggtctacaagtcaaaacttgatgagaaaaaagtttggaatgctaaaattgttacggagatcagcgcgattaataattttctttgca

SEQ ID NO: 224024 - DNA, 292 bp, Unknown
  Bacterial polypeptide expressing nucleotide sequence isolated from the Sargasso Sea
atgaaagttattatttttattattctaattttgtttaattcatcaacaattttaaaagcccaaaatttatctaaggcttattttgctggtggatgtttttggtgcatggaagaatcatttgaaaaacttgagggagttaaggaagttatttcaggttattctggaggaataactgcaaatccaacctatagagaagttacttatggtgatacaggacattttgaagttgttgaaataatttatgataaagaaaaaatttcttacgaaaaattattaaaaaactttggattaa

SEQ ID NO: 224025 - DNA, 256 bp, Unknown
  Bacterial polypeptide expressing nucleotide sequence isolated from the Sargasso Sea
tatttcctatgaaaaaatcttaaaaatattcttccaaatccatgatccgacaactttaaactctcaggggccagattttggaactcaatatagaagtgaaatattttacctaaataataatcaaaaattagtagctgaaaaaatattgaatgaagtaaatgaaagattgtctggcaaagtagttacaaagatctctcttttaaaaaattattgtccagctgaggaataccaccaaaaatatttagaaaaaagataa

SEQ ID NO: 224026 - DNA, 574 bp, Unknown
  Bacterial polypeptide expressing nucleotide sequence isolated from the Sargasso Sea
tatgaggttattttattacttttttttattatttcttatctcgacatcattctctcattcaaaagataaagcgtattttgcaggaggttgcttctggtgcatggaagagtcttttgaaatgttggaaggtgtagaagaagttatatctggttactcaggagggatcactgcaaatccaacatatagggaagtcacttatggagatactggtcattttgaggttgttgaaataatttatgacaaagagaaaatatcctataaagaactcttaaaaaatttctggcttaatattgatccatttgatgcttatggccagttttgcgataaaggatacagctacagatctgtagcattttatgaaaacgattatcagaaagatttaattgataaagatataaaaagattagaaaagaaatttaaaaagaaggtagtcacatatgttaaagaatttgagattttttacaaagcagaggataaacatcaagattactatcaagtatatttagaaaattatttaaaatataagaaagcatgcaaaagagagagaatacttgatattatttggggatcataa

SEQ ID NO: 224027 - DNA, 577 bp, Unknown
  Bacterial polypeptide expressing nucleotide sequence isolated from the Sargasso Sea
atgaaaaaatttattattgttttaattctattaattaacaccaaagctatttcacaagaattagacaaagcttattttgcaggtggatgtttttggtgtatggaagaatcatttgaaaaaaccgaaggtgttattgaggtcatctctggatattctggaggaaaaacatcaaacccaacttatgaagaggtaacatatggaaatacaggtcattttgaaacagttgaggtaatattcgataaatcaaaaactaattacaaaaccttacttgaagtattttggataaatattgacccatttgatgcccaagggcaattttgtgacaaaggttatagttacaggtctgtggcattttatcaaaatgaaaatcaaaaaaaattaattgataatagcattttaagtattgaaaaaaaatttaatcaagaagttgtaacttatgttaaagaatttaaacaattttataaagcagaagataatcatcaaaattattataatgaaaattttataaattatttgttatataaaaatgcttgtggaagagataatagattaaataaaatatggaaaaatgaataaa

SEQ ID NO: 224028 - DNA, 361 bp, Unknown
  Bacterial polypeptide expressing nucleotide sequence isolated from the Sargasso Sea
ctgttattttttacatttacattaagttgcttcatttggtcaactaatgaaagctctacatcacatatagagactatagttttaggttcagggtgcttttggggcgctgagaagggctacgaagccctagatggtgtgatagatgctgtatctggatatgctgatggagagggtgtaaaaccttcgtacagagaaattactaaattctccaataagtttaatcctgataaccacgctgaagtagtggaggtaacttttaataagaacctaatttcccttgaagaactcattgtccattaccttgaatcgcatgacccaacccaattaaatcgtcaaggaaatgacattggtacacagtaca

SEQ ID NO: 224029 - DNA, 454 bp, Unknown
  Bacterial polypeptide expressing nucleotide sequence isolated from the Sargasso Sea
aatgaaaactgcttatttctctctcggatgcttttggagtccccaattggaatttgaaaaaattaaaggagtaaaaaaggctgaggttggatattgtggaggtgatgatccaaatacaacctacgaaaaagtttgttcaggttcaacaaatcatgctgaaactgtaaaagttgagtttgatgaaaacgtagtgacctatgaagaacttgtaagggttttttttaaaattcatgatccaacacaattcaataggcaaggtcccgatattggaacacaatatagatcagaaattttctataaagatgaagaacaaaaaaaagttgctgaaaaagtaaaaaaagaatttaataagaaattaggtggaaagatagttactaatgtttcaaaagaaaaactataccaacctgcagaacaatatcaccaatattacctaaaaagagggagcataatgtga

SEQ ID NO: 224030 - DNA, 577 bp, Unknown
  Bacterial polypeptide expressing nucleotide sequence isolated from the Sargasso Sea
tatgaagtattttattataatttttaccttattaattaatacaaatttttcatattctgcacaaaaagataaagcttattttgcaggtggatgtttttggtgtgtagaggaatcattcgaaaaactaaaaggtgtggaagaagttatctctggatattctggaggtgtcactgaaaacccaacttataaagaagtaacttatggaaaaactggccactttgaggttgtagaaataatatatgacaaaacgattatttcttataaagaattactagaaaatttttggattaatattgacccatttgatgcctatggtcaattctgtgacaaaggatatagttatagatcagttgcattttattcaaatgatgagcaaaaaaatttaatagaaaaaggcattaaagaattagaaggtaaatttaacaagaaagtagtaacttatattagaaactttgaaaaattttataaagcagaggagtatcatcaggatttttataaaatcaagtttgaacgatatcttagatataaaaaagcttgtggaagagaagaattattgaagagaatttggagtcaataa

SEQ ID NO: 224031 - DNA, 244 bp, Unknown
  Bacterial polypeptide expressing nucleotide sequence isolated from the Sargasso Sea
ctacggggccatcaccaccgaaatcctggcggaccagagcttctatttcgccgaggactaccaccagcagtacctcgccaaacctggcagccgcccctactgctccgccatgccaacccagacgctgcttggtgacttcgaagggtcgaactacaaactcccgaagcaggtctgggacaagtacgactggtccatcagtcactgcgtgcttcgatccgacaacagcccgatcgccctgggctga

SEQ ID NO: 224032 - DNA, 343 bp, Unknown
  Bacterial polypeptide expressing nucleotide sequence isolated from the Sargasso Sea
attggtggcatggttcaccgtcagtgcagttgctagtatcagtcccgttttggctaaagaagacctgcctaatgcaactaaacatattgaaactatagtattaggttcgggttgtttttggggcgcagaaaaacgctatgaagccctcaacggtgtgctcgatgcggtatcgggttatgctgatgggcagggctttaaggcgacatataaaaacattacacgtagctctcgtcgttttgatgaaaacaattacgctgaggtagtcaaagttacttataacagcaacaaattaagcacagaagatcttttaaaacattactttgaaagtcatgatccgacacag

SEQ ID NO: 224033 - DNA, 265 bp, Unknown
  Bacterial polypeptide expressing nucleotide sequence isolated from the Sargasso Sea
atggcaaatgatactgaaaataagaaggctgtgtttgcagcaggttgtttttggggtgtagaatcaacatttcaacagatggatggtgtaaagtcaactactgtaggttatataggtggtaaagttaaaaatccatcatatgagcttgtttgtacgggtataactggacatgcagaagctgttgaggttgaatacaatccaaatgttgtatcattcgaaaaattattagatactttttttcaacttcatgatccaacaacttaaa

SEQ ID NO: 224034 - DNA, 151 bp, Unknown
  Bacterial polypeptide expressing nucleotide sequence isolated from the Sargasso Sea
gaggagcttgtaagatttttttttaaaattcatgacccaacccaattaaatagacaggggccagatatagggacacagtatagatctggaaatattttacaaagacgaaaatcaaaaaaaaatagcagaaaatataaaaaaagaatttaac

SEQ ID NO: 224035 - DNA, 109 bp, Unknown
  Bacterial polypeptide expressing nucleotide sequence isolated from the Sargasso Sea
tgaatataaagattattttttagctgaagaatatcatcagcagtatcttgctaaaaatccaaatggatactgtggccttcaaggcactggcattgaatgtcaaaagtaa

SEQ ID NO: 224036 - DNA, 199 bp, Unknown
  Bacterial polypeptide expressing nucleotide sequence isolated from the Sargasso Sea
tgatttaaatgaagcaatcaaatcaaaagaaatttatcaatccgaacttattaaaaataactttaatgaaattacaactgatattgagattgcgaaagaatactatctagctgaagagtatcatcaacaatatcttgctaaaaatccaaatggttattgcggtataggtggaaccggatgctctttcccaaatgaataa

SEQ ID NO: 224037 - DNA, 346 bp, Unknown
  Bacterial polypeptide expressing nucleotide sequence isolated from the Sargasso Sea
gggtcacaatgctgaaactacttacaaagaagtatgcacaggcactacaaatcatgctgaagtagttaagttagattttgatcccaaagttatatcgtatgaagaaattcttaagtatttttttgaaattcatgatccaacaactttaaattctcaaggaccagattttggaacacaatacagaagtgagatattttatttaaatgataaacaaaaaaatattgctgaaaaaatgattgaaaaagaaaacatcaaattatcaggaaaagttgtaacaaaaatttcactaattaaaaattattgcacagctgaagaatatcatcaacgatatttggaaaaaagataa

SEQ ID NO: 224038 - DNA, 532 bp, Unknown
  Bacterial polypeptide expressing nucleotide sequence isolated from the Sargasso Sea
atggctttctctaaaagtatagaaactgcatattttgctgggggttgtttttggtgtatggaggaatcttttgaaaaaactgaaggagtaattgaggtaatctcaggttactctggaggaaatactaaaaatccaacatataaagaagttacttatggaaatacaggtcattttgaaacggtagaggtccaatattacaataatgaaataagttataaaagtttattagatgtatattggaggaatattgatcctttcgatatagaaggtcaattttgtgataaaggatatagttatcgatcagttgtattttataaaaatttaaagcagaaaaaccaaatagaaaaggatattaaatatatagaaaaaaaatttaataaaaaagtagtaacttatgtgttaaaatttgataaattttataaagcagaagataatcatcaaaattattatcaagaaaactttattaattatttgctatataaaaaaggatgtggaagagaaaataaattaaatagtttatggaataaatgaa

SEQ ID NO: 224039 - DNA, 208 bp, Unknown
  Bacterial polypeptide expressing nucleotide sequence isolated from the Sargasso Sea
aatgaaatattttttacctttaataattgctctttcaatgtttatcaaccctgtaaacgcttttgcagaggaattgattcttgcaggaggttgtttttggtgtttagaacatgatttagagtcattaagggggataaattttgtacaaagtggctattcaggtggagatttactaaatcctaactacgaaaatcatgaaggacatcag

SEQ ID NO: 224040 - DNA, 306 bp, Unknown
  Bacterial polypeptide expressing nucleotide sequence isolated from the Sargasso Sea
aatgaaatatttgttacctctaataatagccttttcaatatttatgaaccctgtaaacgcttttgcagaggaattgattcttgcaggaggttgtttttggtgtttagaacatgatttagagtcactaaagggggtaaattttgtaaaaagtggctattcaggtggagatttacaaaatcccacctacgaaaatcatataggacatcaggaagtggttttggttaactatgattcccaattagtaaccttacccgagatacttaggctttatttcagaaatattgatcctctggacggcaagggtca

SEQ ID NO: 224041 - DNA, 653 bp, Unknown
  Bacterial polypeptide expressing nucleotide sequence isolated from the Sargasso Sea
tatgaaagaaaataattggttagacccattttttattcaaagtcatttaagtgaagaagagagtaatattcagataaatgttagaaatttttgtgataatgaacttaaacctacagtagttgtaagaaatagaaaaaatgaatttgatcaagacctttatccaaaatttggatcacttggagttttaggacaaacagttaaaacacacggtgggtctggtacatcaaatttggcgtatggacttgtagcttatgaatttgaaaaaatagatagcagctatagatctgcaatatctgttcaatcttcactcgtaattcatccaataaatgaatttggatctcaggaacaaaaagataaatatcttcctcaattaattaaaggagaaaaaattggttgctttggtttaacagaaagcgaagccggttccgatcctacttcaatgaaaacttcttttaaaaaaactaaagatggatacattttaaacggatcgaaaaactggattaccaattctccaattgctgatatatttatcatttgggctattgaagaaaataaagatcataaaagtattgaaggatttatattagaaaaaaattataatggactagaaacatcaacaatagaaaataagacaagtttaaaaattagtccta

SEQ ID NO: 224042 - DNA, 261 bp, Unknown
  Bacterial polypeptide expressing nucleotide sequence isolated from the Sargasso Sea
tgtcggtggccacactgaaaacccaacttatgaggaggtttgcactggtttaactggacatgctgaaggagttgagatacaatacaattctagggttattgactatagatctttagtgttattatttttttcaactcacgatccaaccacacttaatacacaaggtaatgatattggttcgcagtatagatcagcaattttcttcaaatcaaattatgaaaagaaaataataaggagtgtaatcgctgaattacaaattaa

SEQ ID NO: 224043 - DNA, 445 bp, Unknown
  Bacterial polypeptide expressing nucleotide sequence isolated from the Sargasso Sea
atggaaatagcagttttaggtttggggtgtttctggggaccagaaattaaatttagtaaaatagatggaataatcagaacagaagttggctactgtggaggaaatactacacaaactacttataaagatgtttgtactggaaatacaaaccatgcagaagtagtaaaattagaatttgatcctaaaataatttcttataataaaattttagaatttttttttgaattccatgatccaacaactttgaattctcaagggccagattttggtacacaatatagaagtgaaattttttacttaaacgaaaaacaaaagaaaattgctgaagaaattattggattagaaaatgaaaaactatctggaaaagttgttacaaaattgtcattattaaaaaattattgtgctgcagaggaatatcatcaaagatatctagaaaaaagataaa

SEQ ID NO: 224044 - DNA, 574 bp, Unknown
  Bacterial polypeptide expressing nucleotide sequence isolated from the Sargasso Sea
tatgaggttattttactactttttactattatttcttgtatcgacatcattctctcattcaaaagataaagcgtattttgcaggaggttgcttctggtgcatggaagaatcttttgaaatgttggaaggtgtagaagaagttatatcaggttactcaggagggatcactgcaaatccaacatatagagaagtcacctatggagatactggtcattttgaggttgttgaaataatttatgacaaagagaaaatatcctataaagaactcttaaaaaacttctggcttaatattgatccatttgatgcttatggccagttttgcgataaaggatacagctacagatctgtagcattttatgaaaacgattatcagaaagatttaattgagaaagatataaaaagattagaaaagaaatttaaaaagaaggtagtcacatatgttaaagaatttgagattttttacaaagcagaggataaacatcaagattactatcaagtatatttagaaaattatttaaaatataagaaagcatgcaaaagagagagaatacttgatattatttggggatcataa

SEQ ID NO: 224045 - DNA, 198 bp, Unknown
  Bacterial polypeptide expressing nucleotide sequence isolated from the Sargasso Sea
ggtggccaagtttttatgatgtcgtgagttcggatgctgtgaaagttaaggtggacaatagtcacggcatgatcagagaagaagctctttgtggatattgtgaagcgcatttaggccatgttttcagtgacggccctcaaccaacggggttacgttattgcattaactctctgtctcttgatttcaaggaggattaac

SEQ ID NO: 224046 - DNA, 526 bp, Unknown
  Bacterial polypeptide expressing nucleotide sequence isolated from the Sargasso Sea
tttgctcaagatctagaaaaagcatattttgctggaggttgcttttggtgtatggaagaatcgtttgaaaaatttgaaggagtttctaaagttatttcaggatattctggaggttcgactgaaaatcctacttatgaagaagttacttactctaatactgggcatttcgaaactatagaaataatctatgataaaaaaattacaaactataataaaatattagatcacttttggataaatattgatccttttgatgcagtaggccagttttgtgataagggatatagttatagatctgttgctttttttaaagatgacgaacaaagaaaactaataaacaaaagtaagagaaaaattgaaaaaaagtttaataaaaaagtagtaacttatgtgataaaatttgataaattctatgaagctgaaaattatcatcaggattattatagaaaaaaatttttgaactatcttagatataagaaagcctgtggaagagagaaaaaattgaatagtatatggaataaatgac

SEQ ID NO: 224047 - DNA, 376 bp, Unknown
  Bacterial polypeptide expressing nucleotide sequence isolated from the Sargasso Sea
atgaataaaaaaaatctagatcatttatctcaagaacaacattatgtcactcaagaaaaggggaccgaagctcctttttcaggagagctcttgcacaacaaagagaagggcacttatcaatgtgtttgctgtggagccgatctttttagctcaaatacaaaatttgattccggtactgggtggccaagtttttatgatgtcctgagctcggatgctgtgaaagttaaggtggacaacagtcacggcatgatcagagaggaagctctttgtggatattgtgaagcgcatttaggccacgttttcagtgacggccctcaaccaacggggttacgctattgcattaactctctgtctcttgatttcaagaaggattaac

SEQ ID NO: 224048 - DNA, 196 bp, Unknown
  Bacterial polypeptide expressing nucleotide sequence isolated from the Sargasso Sea
gccaagtttttttgaacaaatatcacctgaagcaattaaaacagaaactgatagatcccatggaatggtccgtattgaaattatgtgtgccaaatgtgatgcacatttaggccatgtttttgatgatggacccgagccaactggcaaaagatattgtgtaaattctctttctattaattacgaagagtttgaataa

SEQ ID NO: 224049 - DNA, 268 bp, Unknown
  Bacterial polypeptide expressing nucleotide sequence isolated from the Sargasso Sea
atgttatcatctttaatagtaggagcagggtgcttttggggtgttgaagttttatatgaacaaatgcctggtgttatcaatgcaacctcaggttattctggtggtcatttagataatcctagatatgaggatgttttaactggcaagacaggtcacgttgaagtggtcaagattgattatgatagcagtgaagttacttttaatgaattgattgatacattctttatcattcatgatcccgacaacgttaaatcgtcaaggacctgat

SEQ ID NO: 224050 - DNA, 400 bp, Unknown
  Bacterial polypeptide expressing nucleotide sequence isolated from the Sargasso Sea
catgtccgacaagatccagaagtccgacgcggagtggcaggagcagctaacacctaaacagtatcaggtgacacggaagcacgccacagagcgtgcattcaccggcgagtacaacggccacaaggcggacggcatctacacctgcgtaggctgtagcgctccactcttcgattccgaagccaagtatgattccggctccggctggccgagcttcttcaagtcgatcgacgagaagtctgtcgaggaggaggaagacaacagccacggcatgcgtcggatcgaggttcactgcgcgcgctgcgacgctcatctgggccacctgttcccggacggcccccagccgacaggcctccgctactgcataaactctctgtccctggaccacaaagaccgccaatga

SEQ ID NO: 224051 - DNA, 316 bp, Unknown
  Bacterial polypeptide expressing nucleotide sequence isolated from the Sargasso Sea
tggagtggggaatacaacaaacattatccaaaaggaaattacaactgccggggatgcgggaatcagttgttcgaaagtgatacgaaattcgactccggttcaggatggcccagctttgaccaggcaattgatggaagcgtcatagaattggaagaccgttcctatggaatgctcagggtggaagtgcagtgctcacgctgtaaaagccatctgggacatgttttccccgatggacctcgagaaaccaccggtcagcgatattgcatgaacagtctaagcctgacgtttgaaggaaagtcggaaaacccctcttaat

SEQ ID NO: 224052 - DNA, 251 bp, Unknown
  Bacterial polypeptide expressing nucleotide sequence isolated from the Sargasso Sea
tttgggttctggatgtttttggggagcagagaagggttacgaagctctagatggggtagttgatgcagaatctggatatgcaaatggttatggaataaaacccaattatcgatcaattattcaatttaagaataaatataaagaaaataatttcgctgaagttgttaaagttacctttaatagcaatgcaattacccttcatgaaatcttggaacatttttttgaaacacatgatccaactcaacttaata

SEQ ID NO: 224053 - DNA, 220 bp, Unknown
  Bacterial polypeptide expressing nucleotide sequence isolated from the Sargasso Sea
tacaaaatttgaatcaggaactggatggcctagtttttatgacgcacttgatgatacgattacaactaaagaagatctttcttatggcatgaaaagagttgaaataagttgtcgtaattgtaatgctcaccttggtcatgtttttccagatggacctcggcctaccggactcagatattgtgtaaactccttaagcttaagctttaatgaaaatgaataa

SEQ ID NO: 224054 - DNA, 367 bp, Unknown
  Bacterial polypeptide expressing nucleotide sequence isolated from the Sargasso Sea
gatgtggttctttcccacagatggccactttgtttgccgtggctgcggcaacccgctttacagtgctgctgcgaagttcaagtccgggtgcggatggcctgcattcgacaagtgctatgtcgattctgtcgaagtgtgggcagatcggacgctcgagcctatgcgaattgagatcacatgcgcaggctgtggtgggcacctaggccacgttttcgctggtgaacgcatgacgcccaccaatgaacgccattgtgtcaacagcgtgtccatcctccatgtcagggagcaacgccagctgccaacccttggtgaggaagtggtcacctcaatgcaaaagctggcaaaaataaggacagcggtgtcatga

SEQ ID NO: 224055 - DNA, 253 bp, Unknown
  Bacterial polypeptide expressing nucleotide sequence isolated from the Sargasso Sea
aatgaaaaaattattatcaattattttcttattactttcttcaacgagctttgcaaattcaccaaattttgaaagagcttattttgctggtgggtgcttttggtgcatggaggagtcatttgaaaatattcttggtgtttcaaaagttatttctgggtactcaggtggcactacagaaaatccaacttacaaagaggtcacatatggaaatacaggtcattttgaagttattgaagtgatatatgttccagaa

SEQ ID NO: 224056 - DNA, 847 bp, Unknown
  Bacterial polypeptide expressing nucleotide sequence isolated from the Sargasso Sea
acttgctcaagatattttgaatgagtatcaatctcttctttttgaagcgggttatgggagagtagttacccttatagagccattagacaacttttatttggctgaaaactatcatcaggattatttaaagaaaaatcctaatggttattgtccagacttatcaactggtgttgtattcaatgaaaaagaaaaagatattttagataatcaagatctgcttatcggtaagcaaatattgatcctggactcgcaaaattattgtccctattgtgagaaattaaagcttgatgtaactaatgaatacaaaggaagcattccgatgtcttatagaacatccgatcaattgcatgacttagaaattaatgctcccacttgggcaactccatctgtaatcttcttagaagacggtaaagaggttttttcacatcaaggctatattgatcaaaaagatttttatttgatgcttggaaaattcaaattaggagacacagaagcatatgatgttgcatttaataatgggactgatgcaagattttgtaaggaatatgaaatctttaaaaatactcctgatggcatatttatagataagctaagcggagagcctctatttgatactagagatcgattcgtttcaagatcaggatggctttcatttacaagaccagtagagggctcagtttatgaaaaacctgataatagttacggcatgcgtagaactgaaattcgatctgtatcttccgacattcatctaggtcatgtttttgatgatggcccaaatggattgccaagatattgtataaatgcaaccgttttagaatttgttcctagaaaaggttctatcttataa

SEQ ID NO: 224057 - DNA, 565 bp, Unknown
  Bacterial polypeptide expressing nucleotide sequence isolated from the Sargasso Sea
attaattaatcctattaatactcttgcagaagaattgattcttgcaggaggttgtttttggtgtttagaacatgatttagagtccttaaagggaataaattttgttcaaagtggttattcaggtggaaatttgcaaaatcctacctatgaaaatcatgatggacatcaggaagtggttttggttaattatgattctaaattggtaagtttatctgagattcttaggctttatttgagaaatattgatcctcttgacggtaagggtcaattttgtgatcgtggagattcttacaggccagtgatttttttcaaaggtaaaatcgaggaaagtgatgcaaaaaatgcacttttttcggcctctaatgagttgcgagtgccattagaaaaaatatctgtggaactaaaatcaaaaggtcaattttggttagctgaagaatatcatcaggattttgctgatagaaatgaattaaaatataagttttacagattctcatgtggaagagatcagaggttggataaattatggggggataacgctagatcaataaatctttggactgaatga

SEQ ID NO: 224058 - DNA, 514 bp, Unknown
  Bacterial polypeptide expressing nucleotide sequence isolated from the Sargasso Sea
tttgagcaaagcatattttgcaggtggatgtttctggtgtatggaggaatcttttgaaaaaattaaaggagtaaaagaagttatctcaggttattctggcggtatcactgaaaaccctacatatagagaagtaacatatggtgatacaggacattttgaggttatagaaattatatatgataataaaattattacttatgagggattattaaaaaatttctggattaatattgacccatttgatgcatatggtcagttttgtgacaaaggatatagttatagatctgttgctttttatgaaaatgataaacaaaaaactttgatagaaagagatcaaaaaaaacttgagaagaagtttcaaaaaaaagtagttacttatattaaaaaatttgaaaagttttataaagcagaagataaacatcaagattattatgagatttattttcaaaattatttgaaatataaaaaagcatgcagaagagaaaaaattcttaatattatatggggatcttaa

SEQ ID NO: 224059 - DNA, 382 bp, Unknown
  Bacterial polypeptide expressing nucleotide sequence isolated from the Sargasso Sea
aatggataaaatttacaaaaataaatttaagagtaacttaagtttactacaatataaagtaactcaggaaggagcaactgaaccaccattttcacataaaggttttgaaaaagatgctaaagtttttgtctgtgtttgttgtggatctaaactatttagaattgaaaataaatttgaaagtggttcaggttggccaagcttttcttctccctattcatctgaagtaattacagaacacagtgatgaaagttatggtatgattagaactgaagtaaaatgtagaaactgtaatgctcacttgggacatgtttttgaagatggacctgaaccaactggtctgagatattgtatcaatggtgttgcaatagatgggaaaaagtaa

SEQ ID NO: 224060 - DNA, 127 bp, Unknown
  Bacterial polypeptide expressing nucleotide sequence isolated from the Sargasso Sea
tcttcatgacggaccaggaccgctaggattgaggtactgcattaattccgccgcacttaagtttattgccaaaaaagatttggaacaagaaggataccagatctaccagagtttatttaataactga

SEQ ID NO: 224061 - DNA, 289 bp, Unknown
  Bacterial polypeptide expressing nucleotide sequence isolated from the Sargasso Sea
gaagtagtaaaattagattttgatcctaaagtaatatcttacgagaaaattcttgaatatttttttgaaattcatgatccaacaaccttaaattctcaaggaccagatttcggaactcaatatagaagtgaaatattttatttaaatgatcagcaaaaaattactgctgaaaaaatgatagaaaaagaaaacgtcaaattatcaggaaaagtagtaacaaaaacttctttagttaaaaattattgtccagctgaagagtatcatcaacgatatttggaaaaaagataaa

SEQ ID NO: 224062 - DNA, 577 bp, Unknown
  Bacterial polypeptide expressing nucleotide sequence isolated from the Sargasso Sea
atgaaaaaagtaataataatttttgtcgcgtttttattctctgaaatttctcattcttctgaattttataaaaaagcttattttgcgggaggttgtttctggtgtgtcgaggaatacttcgacaaacaatcaggagttatatcaactgtttctggttattcgggcggtgaattagaaaacccaacttacaaacaggtaacttatgaagacactggtcatgttgaagtggttgaggtaacttatgactctagaaaagttaattttaaacaattaatggaactacacttaaaaaatattgatccatttgatggtgccggtcaattttgtgacaaaggaaaaagctacagatcagtcattttttacaaaaaccaagaacaaaaaaatttaatttcggaaaaaattaacaaaatagaaaatatgtttggtaaaaaaacattcattctttcatggaaatttaaaagattttattcagcagaggatcatcatcaagattattacgaaaaaaaatttataaattatttattgtataaatctggttgtgggagagaaaatagacttaaagaaatatggaactaaa

SEQ ID NO: 224063 - DNA, 461 bp, Unknown
  Bacterial polypeptide expressing nucleotide sequence isolated from the Sargasso Sea
aatgaaattttttatttttattttttttattttttttaatttatcaacaattttaaatgctcaaagtttatctaaagcttattttgctggtggatgcttttggtgtatggaagagtcatttgaaaaacttcaaggagttaatgaagtcatttcaggttattctggaggaataactgcaaatcctacctatagagaagttacttatggtgatacaggacattttgaagttgttgaaataatttatgataaagaaaaaatttcttacgaggaattattaaaaaatttttggattaatattgatccttttgatgcttatggccaattctgcgacaaaggatatagttatagatctgttgcattttatgagaacaaaattcagaaagaattaatagaaagagatgtaaaaaaatttgaaaaaaagtttgaaaaaaaagttgttacttatataaaaaaatttgaaa

SEQ ID NO: 224064 - DNA, 604 bp, Unknown
  Bacterial polypeptide expressing nucleotide sequence isolated from the Sargasso Sea
atgaaattcctcttatctctaatagttgctctttcaatatttgttaaccctgtaaacgcttttgcagaggaattgattcttgcaggaggttgtttttggtgtttagaacatgatttagagtcattaaaggggataaattttgtagaaagtggctattcaggtggagatttgcaaaatcctacttacgaaaatcatgaaggacatcaggaagtggttttggtaaattatgattccaaattggtaactttacccgagatacttaggctttatttcagaaatattgatcctctagacggcaagggtcaattttgtgatcgtggagattcttataggccagtgatattttttaaagataaaactgaggaaagcgatgcaattaatgcaattgtttccgcctctaatgaattgcgagtgccattagaaaaaatatctgtagaactaaaatcaaaaggtcaattttggttggctgaagaatatcatcaggattttgctgagagaaatgaattaaaatataagttttatagattctcatgcgggagagatcagaggttggataaattatggggtgataatgctagatcaacaaatctttggaatgaatgat

SEQ ID NO: 224065 - DNA, 604 bp, Unknown
  Bacterial polypeptide expressing nucleotide sequence isolated from the Sargasso Sea
aatgaaatatttcgtacctctcattattgctctgtcaatatttatacaccctgtaaacgcttttgcagaggaattgattcttgcaggaggttgtttttggtgtttagaacatgatttagagtcattaaaggggataaattttgtacaaagtggatattcaggtggagatttacaaaatcctacctacgaaaatcatgaaggacatcaagaagtagttttggtggactatgattcccaattggtaactttacctaagatacttaggctctatttcagaaatattgatcctttggacggcaagggccaattttgtgatcgtggagattcttataggccagtgatctttttcaaagatgaaactgaggaaagtgatgcaaaaaatgctatttttgctgcctctaatgagttgctagtgccattagaaaaaatatctgtagaactaaaatcaaaaggtcaattttggttggctgaagaatatcatcaggatttcgctgagagaaatgaactgaaatataagttttatagattctcttgtgggagagatcagaggttggataaattatggggcgataacgctagatcaacaaatctttggaaagaatga

SEQ ID NO: 224066 - DNA, 532 bp, Unknown
  Bacterial polypeptide expressing nucleotide sequence isolated from the Sargasso Sea
atgcaatcattagccacatttggaactgggtgtttttggtgttcagaagcctgttttaaaaccctaaaaggagtacaagatgttttcccagggtatgctggcggtcaaacacaaaatccaagttatgaagacatatgtaccggtaaaactgggcatgctgaagtaattagaattatttatgatgaaacaattatttcctttgaggaattgttgcgtgttttttggtttgttcatgaccctacacaacttaatagacagggtaatgacataggtactcaatatcgttcggttgttttttttcatgacgattttcaaaaagagaaaactattttttacaaaaataaattgattgaaaatgcggtttgggattcaaaaattgttacggaaattagtcctataaataatttttttcctgctgagtcataccatcaggactattttttaaataatcctcaaaatggatattgccaagcgatagttaggcccaagtttgaaaagtttaaaaaagttttttcggatcaattaaaatagt

SEQ ID NO: 224067 - DNA, 595 bp, Unknown
  Bacterial polypeptide expressing nucleotide sequence isolated from the Sargasso Sea
aatgaaaaagaaaaaaactcttagtcttctattaattatattctttgttcaattaaactcacaaaacaataaagaggcatattttgcatcaggttgtttttggtgtgttgaatcaatttacgaaagtttaataggtgtaagtaaagtagaatcgggctattcaggtggttacactaagaatcctacatactattccgttttaaccggaaaaaccggacatgcagaaagtataaaggtttattatgatgctgaaaaaatatctttcaaacaactagttaaggttttttttggatcacatgatccaacaaccttgaacagacaaggacctgatagaggaacacactacagatcgattgtgttttacagcaatgacaatgaaaagaaaattatagacgaagaaattaatcgtctactaaaaaataaaacctacccaaaaattgttactgaggtaaaaaaattcgaaaaattttacatcgctgaagattatcatcaagattataagcaaaaaaaccccaataacgcatacatatggaatgtttctgttcccagaattaataaattcaaatcaaagtttactgatcttttaaaggattaa

SEQ ID NO: 224068 - DNA, 1023 bp, Unknown
  Bacterial polypeptide expressing nucleotide sequence isolated from the Sargasso Sea
cctgattgaacggggtgcaagaatcaatgattccgattctgaaggccgtactgctctttttcatgcctcagagaatggacactccaaaattatttcccttctggttaaaaatggtgccaatcccaatgcggtcagtgttcacaatcgcaccccattgatgcaggcaacagtgaaccaacatctcgaagggatggaaattctgctcaagaatggggccaatgtggatcatcagaatcattttggcttaacgtctctgatgttaggcgcacagaatggggatctggattcagtcaagaaactgctgcttcatggtgctgaaatcaatacagcctcaaaaaatggcttcaccgcgcttttcatggcagttcagaacgggcatggaaagttggtgagtctatttgcccgcttcgggggggaagtcaatcagaaagaaaaagaaacattaagaacgcccctgattgtggctgccatggaaggtcataccacggttgtcgaattactgttatccctcaaggcagacccttcagaatacgacggaagcggcatgataccgcttcagggtgctctgagaagcaaacaatttgaaacggccgaactgctgatcaagggaggaagtccgattaatcaccaggatcatcggggccagaatgtccttcacgatgcaactgtggcaggcaatcttggactggtgaaaatgatccttgaaaaaaatgctgatagcagctcaaaaaatcagcgcggggaaactccattgatgcttgccgcctcggaaggccatcttgaaattgcacagttgcttttgagatccggagcttcccggctgattaaggatcgttttggccgaaccgcgtggatgcatgcgatcgatggcggaaatgtagaattggtcaagttgctcgcaaagggcggctatccggcttccgaaaagttgatttttgctgccagcaggggacacaccgaagccgtcgaaatcatgttaaaccttaatgcggacccggattcccgtgatgaaaggcaatggaa

SEQ ID NO: 224069 - DNA, 580 bp, Unknown
  Bacterial polypeptide expressing nucleotide sequence isolated from the Sargasso Sea
atgaaagttactttttttattattttaattttttttaatttatcaacaattttaaatgcgcaaaatttatctaaggcttattttgcaggtggatgtttttggtgtatggaagaatcgtttgaaagactagaaggagttaaggaagttatttcaggctattctggaggaataaccgaaaatccaacctatagagaggttacttatggagatacagggcattttgaagttgttgaaataatttatgatgaagaaaaaatctcttacgaaaatttattaaaaaatttttggattaatattgatccatttgatgcttatggtcaattttgcgataagggatatagctatagatctgttgcattttatgagaatgaattacagaaagaattaattgaaggagatgtaaagaaatttgaaaagaaattcgaaaaaaaagttgttacttacataaaaaaatttgaaattttttacaaagctgaagataaacatcaagattattatgaagtatattttgaaaattaccttagatataaaaaggcatgtagaagagagaaaatattagataatatatggggttcttaaa

SEQ ID NO: 224070 - DNA, 574 bp, Unknown
  Bacterial polypeptide expressing nucleotide sequence isolated from the Sargasso Sea
atgataaaaatttttattattttaattattatatttaatacacaggtatattctcaggaaataaacaaagcatattttgctggagggtgtttttggtgtatggaagaatcatttgaaaaaacagagggtgttatagaggtaatatcaggatattcaggaggaaagacatctaacccaacttatgaagatgtaacatatggaaatactggccattttgaaacagttgaagtgttatatgataaatcaaaaactaactataaaactttactaaatgttttttggataaatattgatccatttgattcagcaggacaattttgtgacaaaggttatagttatagatccgtagttttttataaaaatgataatcaaaaaaaactaattgaacaaagtattaaaaaaattgaaaatgatatgaataaaaaagttgtaacttacattagaaattttgagaaattttataaagctgaagacaaacatcaagattattataatgaatactttataaattatttaatatataaaaaggcttgtggaagggaggataggttaaataaaatttggaataaatgac

SEQ ID NO: 224071 - DNA, 580 bp, Unknown
  Bacterial polypeptide expressing nucleotide sequence isolated from the Sargasso Sea
aatgaaaaaatttttatcaataattttctttcttatttctgcaaacagctttgcaaattcgccaaattttgaaagagcttattttgctggagggtgtttttggtgcatggaagagtcttttgaaaatattcttggtgtttcaaaagttatctctggttattcaggtggcactacagaaaatccaacttataaagaagttacatatggaaacacaggtcattttgaagttattgaagtcatatatattccagaagtagttagctatgaaaaactcttagaagaattctgggtaaatattgatccatttgatgctgtaggacaattttgtgacaagggatatagttatagatcagtggcattttatcaaaatgataagcaaaaaaacttaatagaaaatagtattaaggaaatagagaaaaaatttaaaaaaaaagtagtaacttatgtaagaaaatttgataaattttacatggcagaggctgttcatcaagattattaccaaataaattttcttaattacttaagatataaaaaaggatgtagacgcgaagcaatattaaatagtatttggggatcttaa

SEQ ID NO: 224072 - DNA, 580 bp, Unknown
  Bacterial polypeptide expressing nucleotide sequence isolated from the Sargasso Sea
aatgaaagttattatttttattattttaattttttttaatttatcaacaattttaaatgcgaaaaatttatctaaggcttattttgctggtggatgtttttggtgtatggaagaatcatttgaaaaactagaaggagttaaggaagttatttcgggctattctggaggaattaccgcaaatccaacctatagagaagtcacttatggagatacaggacattttgaagttgttgaaataatttatgatgaagaaaaaatttcttacgaaaaactattaaaaaatttttggattaatattgatccatttgatgcttacggtcaattttgcgataagggatatagttatagatctgttgcattttatgagaatgaaatacagaaagaattaattgaaagagatgttaagaaatttgaaaagaaatttgaaaaaaaagttgttacttacataaaaaaatttgaaattttttacaaagctgaagataaacatcaggattactatgaagtatattttgaaaattatcttagatataaaaaggcttgtagaagagaaaaaatattagacaatatatggggttcttaa

SEQ ID NO: 224073 - DNA, 658 bp, Unknown
  Bacterial polypeptide expressing nucleotide sequence isolated from the Sargasso Sea
atgtataaaatattaaaaaccgtctttattttatttttaacattaacaacacaaataagtccttttttaggcaaccttactctacgcgcgcaatcaaaagactctataatcttggcaggtgggtgcttttggtgtgtggaagctgattttgaaaaagtgaacggggtcagtgaggtcatttctggttacactggtgggtttgtagaaaacccgacctacaagcaggtcgtaaaaggtggcacaggacactatgaagccgtcattattcactttgatcccgaaataattacaacaaaaaatattttatataaattttttcgttctatcgaccctactgatgctggtgggcagttctgtgatcggggtcatagctataagtcagctatttttgccaaaccaaatcaaattttaattgcaaaaaatgcccttctagaggcggaagcaattctgggtgaaaagattgttacccctattttagaagtgggcaaattttttactgccgagaaatatcatcaagactattacaagggcgagaatctggtattgactagatttggcccaatcaaacaaaaaaatgcttacaaaagataccgttccgcctgcgggagagatgagcgcctcaaagaggtctggggcaaagatgcattcttgaattgac

SEQ ID NO: 224074 - DNA, 604 bp, Unknown
  Bacterial polypeptide expressing nucleotide sequence isolated from the Sargasso Sea
atgaaatacctcttatctctaatagtcgctttctcaatatttgttaaccctgtaaacgcttttgcagaggaattgattcttgcaggaggttgtttttggtgcttagaacatgatttagagtcattaaagggggtaaattttgtacaaagtggctattcaggtggagatttgcaaaatcctacttacgaaaatcatgaaggacatcaggaagtggttttggtaaactatgattccaaattggtaactttacccgagatacttaggctgtatttcagaaatattgatcctctggacggcaagggtcaattttgcgatcgtggagattcttataggccagtgatctttttcaaagatgcaactgaggaaagtgatgcaataaatgcagttgtttccgcctctaatgaattgcgtgtgccattagaaaaaatatatgtagaacttaaatcaaaaggtcaattttggttagctgaagaatatcatcaggattttgctgagagaaatgaattaaaatataagttctatagattctcatgtgggagagatcagaggctggataaattatggggagataatgctagatcaacaaatctttggaatgaatgat

SEQ ID NO: 224075 - DNA, 397 bp, Unknown
  Bacterial polypeptide expressing nucleotide sequence isolated from the Sargasso Sea
aatggataaagttgaaaagacagataaagaatggcaggcttgcttgacgccacaggaataccagatactacgagaaaaagggacagaaatggcattcactggaaaatattataaacataaggaggcgggtacctatacttgcgctggttgtgataataaattatttagctcagaaacaaaatatgattctggatctggttggcccgctttttttgacgcattagataaaacaaaggttaatactaaacgtgatttaagctttgggatgattcgaactgagataacatgtgctaagtgtgattctcatttaggacatgtttttgaggatggtccaaaacctactgggttgcgttactgtgtaaattctgttgcattagattttgtagcaaacaaatag

SEQ ID NO: 224076 - DNA, 577 bp, Unknown
  Bacterial polypeptide expressing nucleotide sequence isolated from the Sargasso Sea
atgagatttttattatttatatttctaaacttaataattaataattcagtattagcatctgaaaaaagtaaagcatattttgccggtggttgtttctggtgtatggaagaatcttttgaaaaattaacaggtgttgagaaagtaatttcaggatactctggtgggaaaactgaaaatccaacctatgaagaagttacttatggaaatactggtcaccttgaagttgtagaagtaatttatgatgcaagtttaatatctttcgaggaattacttaaaaatttttggctcaatatagatccatttgatccctatggtcagttttgtgacaaaggttatagctacagatctgcagttttttatacaaatcaaaaggaaaaaaacttaattgaaaaagatttcaaaagactagaaaaaaaatttaataaaaaagttgtaacttatataagagaatttgaaaaattttatatagctgaagatcgtcatcaagattattatcaagtatattttcttaattatttaaaatataaaaaggcttgtagaagagaagaaattttaaatagaatttggaaaatgtagc

SEQ ID NO: 224077 - DNA, 502 bp, Unknown
  Bacterial polypeptide expressing nucleotide sequence isolated from the Sargasso Sea
atgaaattttttactatcatattttttattatctcatttattactgcagctgaagctaatcaaaagggtaaggcatattttgctggtggatgtttttggtgtatggaagaagtttatgaaaaattaagtggagtagaagaagtgatatcaggttactctgggggcactacagaaaacccaacctacagagaggtgacttatggtaaaactggtcattttgaggtcgttgaaattgtctatgacaaagaaatcatttcttttaaagaattacttaatattttttggaaaaatatagatccctttgatccttatgggcaattttgcgataaagggtatagctacagatcagtcgcgttttatcaaaatgatgaagaaaaaaaactgatagaaaatagtgtaaaagaattagaaaaaaagtttaacaaagagattgttacttacgtaagaagttttgataaattttacgaaactgaagtttaccacccaagatttttatgttaaa

SEQ ID NO: 224078 - DNA, 526 bp, Unknown
  Bacterial polypeptide expressing nucleotide sequence isolated from the Sargasso Sea
tttgccgaatcagaagaagctatttttgcaggtggttgtttttggtgcctagaacatgatctagaaaaacttgatggagtcgtctctgcagaaagtggatactctggaggagatttgattaatcccacatatcaagatcataatgggcatcaagaagttgtgaaagttatttttgattctgatattattagctataaagatttacttaagcagtattgggttaatattgatccttttgataataatggacaattttgtgatagaggtgattcgtataagccagttatttttacatctaatcaagcacaaaagcgtgatgcaaaagagagtaaagaaactatctctgttggattgaatatacccttggagcaattaaaagttgatattgttgagtcaaaagtcttttggttagcagaaaactatcatcaagattttgcaattaaaaatccactcaaatacaatttttatagaaccagttgcggtagagataatagattaaaaaaagtctggggcgaatataagtaat

SEQ ID NO: 224079 - DNA, 604 bp, Unknown
  Bacterial polypeptide expressing nucleotide sequence isolated from the Sargasso Sea
aatgaaatatttcttacctctaataattgttctttcaatatttattaaccctctaaacgcttttgcagaggaattgattcttgcaggaggttgtttttggtgtttagaacatgatttagagtcattaaaggggataaattttgtacaaagtggttattcaggtggagatttgcaaaatcctacatacgaaaatcatgaaggacatcaggaagtagttttggtagattatgattccacattggtaactttacctaaaatacttaggctctatttcagaaatattgatcctcttgacggtaagggtcaattttgtgatcgtggagattcttataggccagtgatctttttcaaagatgaaactgaggaaagtgatgcaacaaatgcaattgtttcagcctctaatgaattgcgagttccattagaaaaaatatatgtagaactaaaatcaaaaggtcaattttggttggctgaagaatatcatcaggattttgctgagagaaatgaattaaaatataagttctacagattctcatgtgggagagatcagaggttggataaattatggggggataacgctaggtcaacaaatctttggactgaatga

SEQ ID NO: 224080 - DNA, 460 bp, Unknown
  Bacterial polypeptide expressing nucleotide sequence isolated from the Sargasso Sea
atggagaaagcaacctttgccgctggatgtttttggcacgttgaagaggtattttctaaaaccgatggtgtaaaatcaactgcagtaggttatactggtggtcatacggataatcctacatacgaagatgtttgtactgataggacaggtcatgccgaagccatacaagttgaatatgatccaaacgaaatctcatattctgatctagtaaaggtgttctttgcaaatcataatccaactactgctaatagacagggtcctgacgttggcattcaatatcgttcagcaatattctgtcataatgaggaacaagaaaaaaccgcaaaagaagttaaagaggaattaaacccatctgcccataaaacatttggaaatgacattgttactgaaataaaacccgcttcaaaattttaccgtgcagaagagtaccatcaaaaatattttgaaaaaaatttctaag

SEQ ID NO: 224081 - DNA, 454 bp, Unknown
  Bacterial polypeptide expressing nucleotide sequence isolated from the Sargasso Sea
aatgaaaactgcatattttagtcttgggtgtttttggagtcctcaattagagtttgaaaaaattaaaggagtgaaaaaagccgaggtagggtattgtggagggaatgatccaaatacaacctatgaaaaagtatgttcaggatctacaaatcacgcagaaactataaaagtagaatttgatgaaaatgtagtttcgtatgaagaacttgtaagggttttttttaaaattcatgatccaacacaactaaatcgacaagggccagatattggaactcaatatagatcagaaattttttataatgacgaagatcagaagaaaattgctgaaaaaattaaaaatgaatttaacaataaattgaaaggaaaagtagttactaatatttcaaaagaaaaactttatcagcctgctgaagaatatcatcagtattacttaaaaagaaaaggtatattatga

SEQ ID NO: 224082 - DNA, 442 bp, Unknown
  Bacterial polypeptide expressing nucleotide sequence isolated from the Sargasso Sea
ctgcccggaaaaaaaattcaaccaaaacaaaagaaactcagtgacatggcagaagaatttgattttagccatttaagcccggaagaattccatgtgctccgtgaagcagggaccgaacgtgcctggagcggtgagtacaacaaacattattccaaaggaaattacaactgccggggatgcggcaatcagctatttgaaagtgacacgaagtttgactccggttcaggatggcccagctttgaccaggcaattgacggaagcgtcattgaactggaagaccgttcctatggaatgctcagggtggaagtgcaatgctcacgctgtaaaagccatctgggacatgtatttcccgatggacctcgagaaaccaccagtcagcgctattgcatgaacagtctcagcctcacgtttgagggaaagccggaaaactcctcagaataag

SEQ ID NO: 224083 - DNA, 448 bp, Unknown
  Bacterial polypeptide expressing nucleotide sequence isolated from the Sargasso Sea
aatggaaatagcaatcttagctcttggatgtttttggaagccagaaatggaatttgataaatttaatggcatagttaaaactgaggtaggttactgcggaggcaatgtaaacaagacaaattatgaagaagtttgtgcaggtaaaactaatcatgcagaagtcgtaaaaattgagtttgatacttcaaaagtatcttacgaagatatattgaattatttttttaaaatacatgatccaactacacttaataagcaaggtccagatatcggaacacagtacagaagtgaaatattttattgtaacaattctcaaaaagaaattgcggaaaaaatcttaaataaaattaatcaaaaactaaatggtaaagttgttacaaaaatatctaaagaaaaaaattattgtaaagctgaagaatatcaccaaaagtattttgaaaaaaatcactaa

SEQ ID NO: 224084 - DNA, 445 bp, Unknown
  Bacterial polypeptide expressing nucleotide sequence isolated from the Sargasso Sea
tatggaaatagcagttttagccttgggttgtttttggggtccagaaaaaaaatatggacaactagaaggcgtttacagaactgaggttggatactgtggaggtaatagcccaaatacaaattacagagaggtttgcaccggatcaacaaatcacgctgaagctgtaaaacttgaatttgatcccaaagtaatttcatatgaggaaattgtaaaaaaattctttgaatttcatgatccaacaacattgaattcgcaaggacctgattttggtacacaatacagaagtgaaatattctatcttaacgatgaacaaaagaaaattgctcaaaaagttataaatgaagaaaatgtgaggctatctggaagggtagttaccaaactttctgagttaaaaaattactgtgctgcagaggaatatcatcagaagtatctagaaaaaagatag

SEQ ID NO: 224085 - DNA, 328 bp, Unknown
  Bacterial polypeptide expressing nucleotide sequence isolated from the Sargasso Sea
acttacagagaagtatgtacaggcaatactaatcatgcagaagttgttaattttgaatttgatgaaaaaattataacttacgaaaaaatcctaaataccttctttcaaatccacgatcctactactttaaattctcaaggaccagattttggaacacagtacagaagtgaaatattttaccttaatgataaacaaaaattagtagctgaaaaagtattaaaagaaatagacaaaaaattatcaggtaaagtagtaaccaaaatttctttattgaaaaattattgtcctgccgaagaatatcatcaaaaatatttagaaaaaaaataat

SEQ ID NO: 224086 - DNA, 445 bp, Unknown
  Bacterial polypeptide expressing nucleotide sequence isolated from the Sargasso Sea
atggaaatagcagtcttaggcttgggatgtttctggggaccagaaattaaatttagtaaaatagatggaataatcagaacagaagttggatactgtggaggaaacactacacaaactagctacagagaagtttgtactggtaacactaaccatgcagaagtagtaaaattagaatttgatccaaaaataatttcttataataaagttttagaatttttttttgaatttcacgatccaacaacgttgaattctcaaggaccagattttggtacacaatatagaagtgaaattttttatttaaatgaaaaacaaaaaaatattgctgaggaaattattgaaaaagaaaataaaaaactttctgggaaagttgtaacaaaattatcattattaaagaattattgtcccgcagaggaatatcatcaaagatatctagaaaaaagataaa

SEQ ID NO: 224087 - DNA, 448 bp, Unknown
  Bacterial polypeptide expressing nucleotide sequence isolated from the Sargasso Sea
aatggaaatagcaattttagcacttggatgtttttggggtcctgaacaaaaatttagtaagattgatggaataattagaacagaggttggttattgtggaggtaatactgaaaacacaacttataaggatgtttgtaccggaacaactaaccatgctgaagttgttaaacttgaatacgatgaaaaaactatcacttacgcggatatattaaaatatttttttgaatttcatgatcctactacgcttaactctcaaggttatgattttggcacacaatatagaagtgaaattttttatttaaatgaaaaacaaaaaatgtctgctgaaaaaatgattgaagctgaaaataaaaagttaaatggaaaagtggtgacacaactatcactcttaaaaaattactgtacagcagaagaatatcatcagaaatatttagataaaaaattctaa

SEQ ID NO: 224088 - DNA, 559 bp, Unknown
  Bacterial polypeptide expressing nucleotide sequence isolated from the Sargasso Sea
attgataagttttattttttttttagcaacgaatgttgttaaatctgaaatatcaaaagcttattttgcaggaggatgtttttggtgtatggaagaggtttttgaaaagacggaaggagttattgaagtagcttcaggatactcaggtggaacctcaaaaaatcctacttataaagaagttacatatggtgacacaggacatttcgaggttgttgaagttgtttataataaatcaaaaataaattttgaaaatctagcaaatattttttggaaaaatatcgatcctttcgataaggcaggtcagttttgtgataaaggatacagttataggtctgttgcgttttatacaaataatgatgaaaaaaaacttatagaggatgatattcaagaaattgagaaaaaatttaatcaaaaagtagttacatatgttaggaaatttgaaatattttataaagcagaggaacatcatcaagattattataaagagaaatttttaaattatttgttatataaagagggatgtggaagacaaagaaaattagataatatttggcaatga

SEQ ID NO: 224089 - DNA, 529 bp, Unknown
  Bacterial polypeptide expressing nucleotide sequence isolated from the Sargasso Sea
ttgtttgcacaagatctagaaaaagcatatttcgctggtggttgtttttggtgtatggaagaatcctttgaaaagtttgaaggagtttctaaggttatttcaggatattccggaggttcgactgaaaatcctacttatgaagaagtcacttactctaatactgggcatttcgaaactatagaaataatttatgataaaaacattacaagctataataaaattttagatcatttttggataaatattgatccttttgatgcagtaggccagttttgtgataagggatatagttatagatctgttgctttttttaaagatgatgaacaaagaaaactaataaacaaaagtaagagaaaaattgaaaaaaagtttaataaaaaagtagtaacttatgtgataaaatttgataaattctatgaggctgaaaattatcatcaggattactatagaaaaaaatttttgaattatcttagatacaagaaagcttgcggaagagagaaaaaattgaatagtatatggaataaatgac

SEQ ID NO: 224090 - DNA, 166 bp, Unknown
  Bacterial polypeptide expressing nucleotide sequence isolated from the Sargasso Sea
catgaaaaaatatttatttataattttaatttttttaataagtacgtctgctcaatcaaaaaattttaaaaaagtgtattttgctggaggatgcttttggtgtatggaggaatcttttgatggagttgaaggtgttttatcgacagtttccggttattcaggcggg

SEQ ID NO: 224091 - DNA, 397 bp, Unknown
  Bacterial polypeptide expressing nucleotide sequence isolated from the Sargasso Sea
gatgtccgagcggatcgagcgctcccctgaggagtggaagcagacgctctcgccggagcagtttcaggtggcccgctgcggtggcaccgaacgggccttcacgggggcgtactggaacaagaaggacagcgggacgtatcactgcatctgttgcgatgcaccgctgttcagctcgaccaccaagtttgagtcgggcaccggctggcccagcttctgggatgggatctcgtcagaggccatcaccaccaagcaggacctgagccacggcgtagtgcgcgtggagatcaactgtgcccgctgcgatgcgcatcttggccatgtgtttcccgatggccccgcccccaccggtcagcgctactgcgtcaacagtgcctcgctggacttcaaggccggttga

SEQ ID NO: 224092 - DNA, 345 bp, Unknown
  Bacterial polypeptide expressing nucleotide sequence isolated from the Sargasso Sea
gaaacagttcaaaaacttcatacgaagaggtttgtacaggtacgacaaatcatgcagaggtagtaaaattagaatttgatccaaataaaatttcatacgaaaaaatattagaatttttttttcagatacatgatccaacaacactaaattctcaaggaccagattttggaacccaatatcgaagtgaaatattttatttaaatgacaatcaaaaaaatattgctgaaaaaatcacaaaaaaaattaatgagaagctttcgggaaaagtagtaactaaaatatcattattgaaaaattattgcatagctgaggaatatcatcaaaaatatttagataaaaattaaa

SEQ ID NO: 224093 - DNA, 295 bp, Unknown
  Bacterial polypeptide expressing nucleotide sequence isolated from the Sargasso Sea
atgaaagttattatttttattagtttaattttttttaatttatctacaattttaaatgcgcaaaatttatctaaggcttattttgctggtggatgtttttggtgtatggaagaatcatttgaaaaactagaaggagttaaggaagttatttcaggctattctggaggaataaccaaaaatccaacctatagagaagttacttatggagatacagggcattttgaagttgttgaaataatttatgatgaagaaaaaaatctcttacgaaaatttattaaaaaatttttggattaat

SEQ ID NO: 224094 - DNA, 604 bp, Unknown
  Bacterial polypeptide expressing nucleotide sequence isolated from the Sargasso Sea
atgaaatattttttacccctaataattgccctttcaatattaattaaccctttaaacactctggcagaggaattgattcttgcaggaggttgtttttggtgtttagaacatgatttagagtcattaaaggggataaattttgtacaaagcggctattcaggaggggatttacaaaatccaacctacgaaaatcatgaagggcatcaggaagtagttttgattaattatgatccccaaatagtgagtttaccagagatactcaggctctatttgagaaatattgatcctcttgatggtaaaggacaattttgtgatcgtggagattcttataggccagtgatctttttcaatgattcaactgagaaaagtgatgcaaaaaatgcacttatttcggcttctaatgaattaaaagagccattagaaaaaataactgtagaactaaaatcaaaaggtaaattttggttggctgaagaatatcatcaggattttgctgagagaaatgaacttaaatacaagttttacagatactcatgtgggagagatcagaggttggataaattatgggggaataacgctagatcaacaaatctttggattgaatgat

SEQ ID NO: 224095 - DNA, 580 bp, Unknown
  Bacterial polypeptide expressing nucleotide sequence isolated from the Sargasso Sea
aatgaaggtattatttataagtattataattctaattaattcttctgtagttttaaaagctcagaatttttctaaagcttattttgctggtgggtgcttttggtgtatggaagagtcttttgaaaatatccttggtgtttcaaaagttatttcaggttattcaggtggtactacagaaaatccaacctataaagaagtaacatatggaaacacaggtcattttgaagttattgaagtaatatatatcccagaagttatcagttatgaaaagctcttaaaagaattctggttaaatatcgatccatttgatgctgcaggacaattttgtgataaaggttatagttacagatcagtagcattttatcaaaatgaaaaacaaaaaaatttaataaaaaatagtattaaggaaatagaaaaaaaatttaaaaagaaagtggtaacctacgtaagaaaatttgataaattttataaagcagaggcatttcatcaagattattatcaaataaattttgttaattatttaagatataaaaaagcatgtagacgtgaggcgacgttaagtaatatctggggatcataa

SEQ ID NO: 224096 - DNA, 448 bp, Unknown
  Bacterial polypeptide expressing nucleotide sequence isolated from the Sargasso Sea
aatgaaaattgcttttttttctcttggatgtttttggggacctcagttaaaatttgaaaaaattaaaggcgtcaagaataccgaggttggatattgtggtggagacgatccaaatacaacctatgaaaaagtttgctctggttcaacaaaccatgcggaaactgtaaaagtagagttcgatgataatatagtttcttacgaggaacttgtaaaatttttttttcaaattcatgatcctacccagctgaatatgcaaggcccagatattggaagtcaatatagatctgaaattttctacaaagatgaaaatcaaaagaaggttgctgaaagaattaaagatgagtttaataaaaaatttaacggaaatatagtcacaaatatatcaaaagaaaaactatatcaaccagcagaagagtatcatcaatattatttaaaaaaaaaatattaa

SEQ ID NO: 224097 - DNA, 526 bp, Unknown
  Bacterial polypeptide expressing nucleotide sequence isolated from the Sargasso Sea
attggcaacagaaaagaataaagcatattttgcaggtggatgtttttggtgcatggaggagtcttttgaaaaactgagtggtgttgaagaagtgatttcaggatactcaggtggaaaaactaaaaatccaacatataaggaagttacttatggtaacacgggtcatttcgaagttatagaagtgatttatgataaaaatttaatatcttttcagaagttactagaaaatttttggaaaaatattgatccatttgactctttcggacaattctgtgacaagggttatagctatagatctgtagcatttttcacaaacgagaaagaaaaagacttaattgaaaaagacattaaaaaattagaaaaacaatttaataaaaaaattgttacctatgtaagaaaatttgaaaaattttatattgcagaggatcgtcatcaaaactactataaagaatatttgttaaattatttaaaatataaaaaagcttgtcgaagggaagaaattttaaacagaatttggaaaatgtag

SEQ ID NO: 224098 - DNA, 580 bp, Unknown
  Bacterial polypeptide expressing nucleotide sequence isolated from the Sargasso Sea
aatgaaaaaacttttatcaataattttctttctaatttcttcaatcagctttgctaattcaccaaattttgaaaaagcctattttgctggaggatgcttttggtgtatggaggaatcttttgaaaatattcttggtgtttcaaaagttatctctggctactcaggtggcactacagaaaatccaacttataaagaagttacatatggaaacacaggccattttgaggttattgaagtcatatatattccagaagtagttagctatgaaaaactcttagaagaattctgggtaaatattgatccatttgatgctgtaggacaattttgtgacaagggatatagttatagatcagtggcattttatcaaaatgatgagcaaaaaaacttaatagaaaatagtattaaggaaatagagaaaaaattcaaaaaaaaagtagtaacttatgtaagaaaatttgataaattttatattgcagaggctgttcatcaagattattaccaaataaattttcttaattacctaagatataaaaaaggatgtagacgcgaagcaatattaaatagtatttgggggaattaa

SEQ ID NO: 224099 - DNA, 499 bp, Unknown
  Bacterial polypeptide expressing nucleotide sequence isolated from the Sargasso Sea
ttttgctggtggttgcttttggtgtatggaagaatcttttgaaaagttcgatggagtttctaaagttatttctggatattctggaggttcgactgaaaatcctacttatgaagaagttacttattctaacacagggcatttcgaaactatagaaataatttatgacaaaaacattacaagctttaataaaatattagatcatttttggataaatattgatcccttcgatgcagtaggccaattttgtgataagggatacagttatagatctgttgctttttttaaagatgatgaacaaagaaaactaataaacaaaagtaagcgaaaaattgagcaaaaatttaagaaaaaagtagtaacttatgtaataaaatttgataaattctatgaagctgaaaattatcatcaagattattacagaaaaaaatttttaaattatcttagatataagaaagcttgtggaagagagaaaaaattaaatagcatatggaataaatga

SEQ ID NO: 224100 - DNA, 454 bp, Unknown
  Bacterial polypeptide expressing nucleotide sequence isolated from the Sargasso Sea
atgaaaactgcttattttagtctaggttgcttttggtcccctcaattggaatttgaaaaagttgatggggtaaaaaaagctgaggttggatattgtggaggagatgacccgaacacgacttatgaaaaagtttgttctggatcaacaaatcatgctgaaacggtcaaagtagattatgatgaaaaattagtctcttatgacgatttagtaagatttttttttaaaattcatgaccctacacaactaaataaacagggaccagatattggaacccaatatagatcagaaattttttatacagatgaaaaccagaagaaaattgcagaaaaaattaaaaatgagttcaatgataagtttaaaggtaaagttgttaccaaagtatcaaaagagaaactctaccaacctgcagaagaatatcatcaatactatttgaaaagaaagagttttatatgaa

SEQ ID NO: 224101 - DNA, 340 bp, Unknown
  Bacterial polypeptide expressing nucleotide sequence isolated from the Sargasso Sea
atgatttttagatatttatttattctagttttgctcccctcatttacttttgcaaaacttaatactatttaccttgcaggcggttgtttttggtgtgttgaggaagtgtatgaggaaataaaaggggttgttagtgttcaatcaggctactctggaggctatgttgaaaatcctacttaccgtgaggttgtagaaggtaatacaggccatatagaggctgcagaaatcgtctatgactcagacattgtgagcttggatacattagtcaaaagtttttttttaaatatagacccttttgataacaatggtcagttttgtgacagaggctattcatacaaaa

SEQ ID NO: 224102 - DNA, 520 bp, Unknown
  Bacterial polypeptide expressing nucleotide sequence isolated from the Sargasso Sea
aatgaaatacatcttatctctaatagtagctctttcaatatttgtataccctgtaaacgcttttgcagaggaattgattcttgcaggaggttgtttttggtgtttagaacatgatttagagtcattaaaggggataaatttagtagaaagtggctattcaggtggagatttgcaaaatcctacttacgaaaatcatgaaggacatcaggaagtggttttggtaaactatgattccaaattggtaactttaagcgagatacttaggctttatttcagaaatattgatcctctagacggcaagggtcaattttgtgatcgtggagattcttataagccagtgatatttttcaaagatgaaattgaggaaagtgaagcaaaaaatgcaattctttcggcctctaatgaattgcgagtgccattagaaaaaatatttgtagaactaaaatcaaaaggtaaattttggttggctgaagaatatcatcaggattttgctgagagaaatgaattaaaatataagttc

SEQ ID NO: 224103 - DNA, 586 bp, Unknown
  Bacterial polypeptide expressing nucleotide sequence isolated from the Sargasso Sea
atgaaaaaaactcttagtcttttattaattatattctttgttcaattaaactcacaaaacaataaagaggcatattttgcatcaggttgtttttggtgtgttgaatcaatttacgaaagtttaataggtgtaagtaaagtagaatcgggctattcaggtggttatactaagaatcctacatactattccgttttaaccggaaaaaccggacatgcagaaagcataaaggtttattatgatgctaaaaaaatatctttcaaagaactagttaaggttttttttggatcacatgatccaacaaccttgaacagacaaggacctgatagaggaacacactacagatcgattgcattttacagcaatgacaatgaaaagaaaattataaacgaagaaattaatcgtctactaaaaaataaaacctacccaaaaattgttactgaggtaaaaaaatttgaaaagttttatatcgctgaagattatcatcaggattataagcagaaaaaccccaataacgcatacatatggaatgtttctgtccctagaattaacaaatttaaatctaagtattcagaacttttgaaataaa

SEQ ID NO: 224104 - DNA, 169 bp, Unknown
  Bacterial polypeptide expressing nucleotide sequence isolated from the Sargasso Sea
ttgaaaaaaacttattttggtggcgggtgtttttggtgtatggaggagtctttcgataaggtagagggtgtcaccaatgttgtatctggttattcggggggaacaacacctaatccgacttacaaagaggtaacgtatggtgatactggtcatattgaagtggttgaaa

SEQ ID NO: 224105 - DNA, 331 bp, Unknown
  Bacterial polypeptide expressing nucleotide sequence isolated from the Sargasso Sea
aactaattataaagaagtatgtacaggtacaacaaatcatgcagaagtagttaaattagattttgatcctgaagttatatcttatgaaaaaattattaaatacttttttgaaattcatgatccaacaactttaaattctcagggaccagattttggaactcaatacagaagtgaaatattttattttaatgatgagcagaaaagtattgctgaaaaaatgattgaaaaagaaaacgtcaaattatcaggaaaagttgtaacaaaaatatctttagttaaaaattattgtccggctgaagaatatcatcaaagatatttgcaaaaaagataa

SEQ ID NO: 224106 - DNA, 574 bp, Unknown
  Bacterial polypeptide expressing nucleotide sequence isolated from the Sargasso Sea
taattttattgtcatttttatctttattttttttgttaataaccaatcatattctcaagaattgaaaaaagcttattttggtggcgggtgtttttggtgcatggaggagtctttcgataaggtagaaggtgtcaccaatgttgtctctggttattcggggggaacaaaacctaatccgacttataaagaggtaacttatggtgatactggtcatattgaagtaattgaaataacatacgatacaaacaagatcggttttgaggaattgttaaatgttttttggataaatattgatccttttgatgcggcaggtcaattttgtgacaaaggttatagttataaatctgctgcattctacatgaacgacaatcaaaagaagctaatagaaaaaagtattaaagctatagaaaacgattttaataataaagttgtaacttttgttaaaaaatttgaaaaattttatccagcagaggattatcaccaaaattattatcaaacaaattttataaattacttactttataaaaaagggtgtggtagagagagtaggttagaaaatatctggcaacaatga

SEQ ID NO: 224107 - DNA, 580 bp, Unknown
  Bacterial polypeptide expressing nucleotide sequence isolated from the Sargasso Sea
atgaaaaaacttttatcaataattttcattcttatttcttcaataagctttgccaattctccaaattttgaaagagcttattttgctggaggatgtttttggtgcatggaggaatcttttgaaaatattcttggtgtatcaaaagtaatttctggatactcaggtggtactaccgaaaatcctacatataaagaagtcacatatggaaacacaggtcattttgaagttatagaggtcatatatatcccagaagtagttagctacgaaaaacttttagaagaattctggattaatattgatcctttcgatgctgcaggacaattctgtgataaaggttatagttatagatcagtagcgttttatcaaaatgataagcaaaaaaacttaatagaaaatagtattaaggaaatagagaaaaaatttaaaaaaaaagtagtaacttatgtacgaaaatttgataaattttatattgcagaggctgttcatcaagattattaccaaataaattttcttaattacttaagatataaaaaaggatgtagacgcgaagcaatattaaatagtatttgggggtattaaa

SEQ ID NO: 224108 - DNA, 655 bp, Unknown
  Bacterial polypeptide expressing nucleotide sequence isolated from the Sargasso Sea
tatgaacaaactgactgattttgaacgctatgtcatagaagaaaagggcacagaacgtccctttagcggtgagtactataaacatgacgccaaaggcgtgtatttgtgcaaaaaatgccatgcgcctttgtatcgctcagaagataagtttaatgcccactgtggttggccagccttcgatgatgaaattccaggcgcggtgagtcgccatgttgacgccgatggccgccgtaccgaaatcgtctgtagccagtgtggcggtcatttaggccatgtgtttgaaggggaatatttaacaccgaagaatattcgccactgtgttaactctgtctccatgctgtttcaagcggccgatgaggaggcaacatcgacgcataaaacagcctttgccacctttggtgcgggctgtttttggtgtgttgaagcgatttttaagggccttaagggcgtgctgaacgtcagctcaggttactcgggtggcgaggcgagcgatgccgattataagtcggtgtgttcaggattaaccgggcatgccgaagtggtgcacatcgaatttgaccctgcgcaaatcagctttacaacactgctgcaggtgttatttgagagtcacgatcccaccacgcttaatcgacaaggcaatgataaagggccgcag

SEQ ID NO: 224109 - DNA, 163 bp, Unknown
  Bacterial polypeptide expressing nucleotide sequence isolated from the Sargasso Sea
aatgagtgaaggttacgataaggcttattttgccggaggctgtttttggtgcatggagccaccttttgaagacttggatggtgtaattgaggctacatcggggtatatgggtggaagtgtagaaaatccaacatatgaagaagtgactactggaacaacaggt

SEQ ID NO: 224110 - DNA, 169 bp, Unknown
  Bacterial polypeptide expressing nucleotide sequence isolated from the Sargasso Sea
aaaagatgaaaaaataactttaaaatcacgaatattaggcaatattacaacagaaataaaactattagagaaattctattatgctgaggaataccaccaacaatacctagctaaaaatccaaatggttactgctcaatgaaaggaacaggagtgttctgcgccgtatga

SEQ ID NO: 224111 - DNA, 445 bp, Unknown
  Bacterial polypeptide expressing nucleotide sequence isolated from the Sargasso Sea
aatggaaatagcagttttagctttaggatgtttttggggacccgaaattaagtttagtaaaattgatgggataattagaactgaagtgggttactgtggtggtaatagccctcaaactacttataaagaagtttgtactggcactactaaccatgctgaagtagtaaaattggaatttgataataaaataatttcctattccaaaattttagaacatttttttgaatttcacgatccaacaacattaaatatgcaaggaccggacagagggacacagtatagaagtgaaattttttatttaaacgatgctcaaaaacaaatcgctgaaaaagttatagatgatgaaaataaaaaactttctgggaaagtagttacaaaactatcattattaaaaaactattgtcctgcagaagaatatcaccagaagtatcttgaaaagagataa

SEQ ID NO: 224112 - DNA, 1279 bp, Unknown
  Bacterial polypeptide expressing nucleotide sequence isolated from the Sargasso Sea
cttggttataacgctcttctgagtcatacgacatgtcattgtaatatagctattggtcgagaatctttatactccaacacaacagcttgttttaacacagcagttggtggttgttctttatatgctaatacaactggtactaataatacagcagttggttatcaagcattaaagactaatgaatgtagtaatgataatacagctcttggtacatatgctttatgtttaacaactggacattctaatacagcggtaggtaagtctgctgtacaagctaattctacaggtgccttgaatacaggtattggtaagttcgctttaagttcaaacacaacagcttgttttaacacagcagttggtggttgcgccttgtatgataatactacaggtgctgaaaatacagcaactggttatctagctttaggagataatacaacaggtgctgaaaatactgcgattggttaccttgctttaagacttaacacaacaggcggttgtaatgttggtattgggcctcattctttatatactaacacaacaggagctaaaaacatagcaataggtagagttgctatgtataagaatacatcaggttgtcacaatactgcaagtggttatggagcctcgtatgagaatacaacaggttgtctgaatactgcaagtggtttttatgctctaagaaataatactacagctagttacaacaccgccatgggttcatattctttatatgataacacaacaggtgcaggtaacttagcgcttggttacgcggctttaacaaataacacaacagctagttataacactgcagtaggttatgctgctttatatgataacacaacaggtggtttgaatactgcagtaggtagacaagccttagaaaataatacaaccggtggtaataacaccgctagtggttacttcgctttaggttctaatacaactggttcttgtaatgatgcttttggttggaacgctttagtaactaatacaacaggcggttataatacagcaatgggtctttggtccttaaagctcaacactactggttgtaaaaatgcctctgtaggttcacattctttacaatctaacacagagggttgtgttaatacagcaataggttatcaatctttacaagctaacacaaccgcatcttataatacagcagtcggtagttgtgccttgtttgataatacaactggtcattcaaatactgcaagtggattctattcattagctaacaatactactggtgtaaaaacgttgctgcgggtgc

SEQ ID NO: 224113 - DNA, 568 bp, Unknown
  Bacterial polypeptide expressing nucleotide sequence isolated from the Sargasso Sea
cttgttactaataatttatttaatattacctatcaattttgctttatctgaaaatttaaacaaaacatattttgctggaggatgtttttggtgcatggaagagtcatttgaaaaactgaatggagtcaaagaggtaatttctggttactctggcggcacaacgacgaatcctacatataaagaagtaactttcggtaacactggtcatttcgaagttgtagaggttatttacaataaagatataatttctttcaaagaattacttaaaaatttttggattaatattgatccttttgatgcctttggtcaattttgtgacaagggttatagctacaggtcagttgcattttaccagaatgaatacgaaaaaaaaaccattgaagaaagtattattaatattgaagataaatttaataagagagttgttacatacgtcagagaatttaaagttttttataaagctgaggataaacatcaggattattaccaggaatatttacttaattacctaatgtacaaaaaaggctgtggaagggaggaagtgcttaaaagaatttggaaactttaa

SEQ ID NO: 224114 - DNA, 364 bp, Unknown
  Bacterial polypeptide expressing nucleotide sequence isolated from the Sargasso Sea
atgaagaaaacaaataaatttctaatatgttttttaattgcatctgtaattaatatttctgctaaccaaacaaatcatatacaaacaatatatttaggttctggatgtttttggggagcagagaaaggttatgaatccataaaaggagtaattaatgctgaatctggatatgcaaatggttatggaataaaaccaaattacagatcaattattcaatttaaaaataaacataatgaaaataattatgctgaagttgtcaaagttacctttaataataatgaaataactcttgaagaaatattaaaacatttttttgaaacacatgatccaactcaattaaatagacaaggtaacgatattggaa

SEQ ID NO: 224115 - DNA, 180 bp, Unknown
  Bacterial polypeptide expressing nucleotide sequence isolated from the Sargasso Sea
cctgaaacttagattagctacattttttttacttatcctatttgcaaactcttttgtatatgcaaataaaactaatcatattcaggtcatccatctcggttcaggttgtttttggggcgctgaaaagggatatgaatcccttgatggagttattgatgcagtttcaggttatgcgaatgg

SEQ ID NO: 224116 - DNA, 291 bp, Unknown
  Bacterial polypeptide expressing nucleotide sequence isolated from the Sargasso Sea
aatggaaatagcaattttaggtttaggatgtttttggggaccagaaataaagttcagcaaactcgatggtattgcaaaaacagaagtaggatattgtgggggtaactctgacaaaacaaattataaagaagtatgctctggtataaccaatcatgctgaagtagttaagttagaatttgatccaaatataatttcttacgaaaatattcttgaacatttttttaaatttcatgaccccactacgttaaattctcaagggcctgactttggtactcagtatagaagtgaaat

SEQ ID NO: 224117 - DNA, 574 bp, Unknown
  Bacterial polypeptide expressing nucleotide sequence isolated from the Sargasso Sea
atgaggttattttactactttttattattatttcttatctcgacatcattctctcattcaaaagataaagcatattttgcaggaggttgtttctggtgcatggaggaatcctttgaaatgctagaaggtgtagaagaagttatatcaggttactcaggggggatcactgctaatccaacatatagggaagtcacttacggagatacgggtcattttgaggttgttgaaataatttatgacaaagagaaaatatcctataaagaactcttgaaaaacttctggcttaatattgatccatttgatgcttacggccagttttgtgataaaggatacagctacagatctgtggcattttacgaaaatgattatcaaaaagatttaatcgagaaagatataaaaagattagaaaagaaatttaaaaaaaaagtcgtcacatatgtcaaagaatttgagattttttacatagcagaagataagcatcaagattactatcaagtatatttagaaaattatttaaaatataagaaagcatgcaaaagagagagaatacttgatattatttggggatcgtaat

SEQ ID NO: 224118 - DNA, 366 bp, Unknown
  Bacterial polypeptide expressing nucleotide sequence isolated from the Sargasso Sea
aagtaggttattgtggtggcaaaactgaaaacacaacttacaaagaagtttgctctggtgaaacaaatcatgctgaagtcgtaaaaataaattttgatccaaaaattattacttatgaagaaattttaaattttttttttaaaattcatgatccaactactttaaattctcaaggtccagattttggaactcagtacagaagtgaaattttttatttaaacacaaaacaaaaagaaattgctgaaaaggtcttaaaattaaaaaatgatgatttttcaggaaaaattgtaactaaattatctttgctaaaaaattattgtatagctgaggaataccatcaaaaatatttggacaagaaattttaga

SEQ ID NO: 224119 - DNA, 166 bp, Unknown
  Bacterial polypeptide expressing nucleotide sequence isolated from the Sargasso Sea
gcaattaaaacagaagtagacaaatcacatggcatggttcgaatagaaattatgtgtgcaaagtgtgatgcacatttaggacatgtatttgatgatggccctgaaccaactggcaaaagatactgtgtaaattctttatcgataaattacgaagaagttgaataat

SEQ ID NO: 224120 - DNA, 454 bp, Unknown
  Bacterial polypeptide expressing nucleotide sequence isolated from the Sargasso Sea
atgaaaactgcttattttagtctgggttgcttttggtcccctcaattggaatttgaaaaagttgaaggggtaaaaaaagctgaggttggatattgtggaggagatgatccgaacacgacttatgaaaaagtttgttctggatcaacaaatcatgctgaaacggtcaaagtagattatgatgaaaaattagtctcttatgacgatttagtaagatttttttttaaaattcatgaccctacacaactaaataaacagggaccagatattggaacccaatatagatcagaaattttttatacagatgaaaaccagaagaaaattgcagaaaaaattaaaaatgagttcaatgataagttaaaaggtaaagttgttactaaagtatcaaaagaaaaactctaccaacctgcagaagaatatcatcaatactatttaaaaagaaagagttttatatgaa

SEQ ID NO: 224121 - DNA, 445 bp, Unknown
  Bacterial polypeptide expressing nucleotide sequence isolated from the Sargasso Sea
atggaaatagcagtcttagctttgggatgtttctggggtccagaaaaaaaatatggacaattacatggcatctacagaacagaagttggatattgtggaggaaacactcaaaatacaaactacagagaagtttgttcaggaacaactaatcatgcggaggctgtaaaattagaatttgatccaaaagttattacatacgagcaaataattaagaaattttttgaatttcatgatccaactacattaaactcccaaggtcctgattttggaacacaatacagaagtgagatattctatcttaatgatgagcaaaaaaatattgcgcaaaaaataataaatgaggaaaatttaaggttatctggaaaagttgtaactaagctatctgagttgaaaaattactgcactgctgaagagtatcatcagaagtatctagaaaaaagataga

SEQ ID NO: 224122 - DNA, 535 bp, Unknown
  Bacterial polypeptide expressing nucleotide sequence isolated from the Sargasso Sea
tatgtctgagggtactgaaaaagcttattttggtggaggctgtttctggtgtatggaaccgccttttgaagttctcgatggtgtagtagaggcaacctctggctatatgggaggagaaacagaaaatccaacttatgaagaagtaagtatggggaatactggccatgtagaagtcgtagaaatagaatttgacccaaatataattacgtattcagaattactagaagtcttttggagaaatattgatcctactgctttaaattatcagttcgctgatgttggatcacagtatagaacagaaatttttacagttggatcccaacagatggaagaagcacttcaatcaaaaactgaccttgaaaactctggaaaatttgataaaccaatagtcacagcaattacggaagcaccaacattttatattgcggaagaatatcatcaggatttttataaaaaacaaagtgctcgataccaaatttatgctgaagcaagtggtagaaaaggctttctaaaggaaacttggggagacgagtaa

SEQ ID NO: 224123 - DNA, 343 bp, Unknown
  Bacterial polypeptide expressing nucleotide sequence isolated from the Sargasso Sea
tagagttactcaacagcaaggaacagaaccggcattttccggatcttactgggacaaaaaagatataggaaattatagttgcatttgttgtgataccaatcttttttcgagtgaagctaaatatgagtcaggttctggttggcctgctttttttgaacctatttctagtgaaattattgggacttctgtagacaactctttttttatggaaagaaccgaagttcattgttcaaattgtaatgcacatttaggacatgtattttcagatggacctaagccaactggtttgagatattgtataaattcagcatcattaaattttaaaaataaagaaaaaaagtaa

SEQ ID NO: 224124 - DNA, 574 bp, Unknown
  Bacterial polypeptide expressing nucleotide sequence isolated from the Sargasso Sea
atgaggttattttattacttttttttattatttcttatctcgacatcattctctcattcaaaagataaagcgtattttgcaggaggttgcttctggtgcatggaagagtcttttgaaatgttggaaggtgtagaagaagttatatctggttactcaggagggatcactgcaaatccaacatatagggaagtcacttatggagatactggtcattttgaggttgttgaaataatttatgacaaagagaaaatatcctataaagaactcttaaaaaatttctggcttaatattgatccatttgatgcttatggccagttttgcgataaaggatacagctacagatctgtagcattttatgaaaacgattatcaaaaagatttaattgataaagatataaaaagattagaaaagaaatttaaaaaaaaggtagtcacatatgttaaagaatttgagattttttacaaagcagaggataaacatcaagattactatcaagtatatttagaaaattatttaaaatataagaaagcatgcaaaagagagagaatacttgatattatttggggatcataat

SEQ ID NO: 224125 - DNA, 577 bp, Unknown
  Bacterial polypeptide expressing nucleotide sequence isolated from the Sargasso Sea
aatgaaattttttactatcatatttttaattacctcatttattactgcagctgaagctaaccaaaagggtaaggcatattttgctggtggatgtttttggtgtatggaagaagtttatgaaaaattaagtggagtagaggaagtaatatcaggttactctgggggcactacagaaaacccaacctacagagaggtgacttatggtaaaactggtcattttgaggtcgttgaaattgtctatgacaaagaaattatttcttttaaagaattactcaatattttttggaaaaatatagatccctttgatccttatgggcaattttgcgataaaggatatagctacagatcagtcgcgttttatcaaaatgatgaagaaaaaaaactgatagaaaatagtgtaaaagaattggaaaacgagtttaacaaagagattgttacttacgtaagaagttttgataaattttacgaagctgaagtttaccaccaagatttttatgttaaaaagtttcaaagatatttggaatataaaacagcttgtagaagagaagagattttaaataatatttggaacctataa

SEQ ID NO: 224126 - DNA, 127 bp, Unknown
  Bacterial polypeptide expressing nucleotide sequence isolated from the Sargasso Sea
gaaagttcattgttctcagtgttctgctcatttgggtcatgtgtttgacgatggaccacaaccaacaggtttaaggtattgcataaattcagtagctctagattttgttcctgaagaaaaagaataa

SEQ ID NO: 224127 - DNA, 454 bp, Unknown
  Bacterial polypeptide expressing nucleotide sequence isolated from the Sargasso Sea
atgaaaactgcttatttttctcttggatgtttctggagcccgcaattagaatttgaaaaaattaaaggtgtaaaaaaggctgaggttggttattgcggtggtaacgacccaaatacaacctatgaaaaagtttgttcaggttcaacaaaccacgcagaaactataaaagttgagtttgatgaaaacgaaatttcatatgaggaattagtaagatttttttttaaaattcatgacccgacacaattaaataggcagggaccagatatagggacacaatatagatcggaaatattttacaaagatgaaaatcaaaaaagaattgcagaaaaaataaaagaggaattcaacaaaaaattcaatggaaaagtagtaactaatatttcagaagaaaaactttatcagcctgctgaagaatatcatcagtattacttaaaaagaaaaggtatattatgaa

SEQ ID NO: 224128 - DNA, 310 bp, Unknown
  Bacterial polypeptide expressing nucleotide sequence isolated from the Sargasso Sea
atgaagtatttttttataattttcttttttttaattaatataaatttttcatattctgctcaaaaaggtaaagcatattttgcaggaggatgtttttggtgtgtagaggaatcttttgaaaaattaaaaggcgtggaagaggtaatttctggttattctggaggtattactgaaaaccctacttacaaagaggttacgtatggaaatactggtcactttgaagttgtagaaataatctatgataaaaaagttatttcatttgagcagttactagaaaatttttgggttaatattgatccatttgatgctt

SEQ ID NO: 224129 - DNA, 408 bp, Unknown
  Bacterial polypeptide expressing nucleotide sequence isolated from the Sargasso Sea
ctttttctcaaaacaagtacgaggttacaaaaactgacaaagaatggagaagccagcttaatgaattatcatacctagtccttagaaaagcttacaccgaacgtccctacactggcaaatatgatgatttttatgaaaaaggaacttatcattgtgctggttgtgatgaaccattgtataaatctgatcacaagtataattcatattgtggatggccaagttttgatagagaaattagtgataaactagagtatgacgttgattataaattaggatatccaagaactgaaataaaatgtaagaaatgtggtggtcatttaggacatgtttttaatgatggtcctaaagaaactaccgggattagacattgtgttaattctgttgctttagtttttaaaaaaacatgac

SEQ ID NO: 224130 - DNA, 922 bp, Unknown
  Bacterial polypeptide expressing nucleotide sequence isolated from the Sargasso Sea
atgctcaaaggtctttccatcacgccgcccgttgtcggccgcatttcgatcggccgcattgtcgagaagaacggcaaacgtctgcccgagaaagacgacgctttcacgttaactacccaagtccagcagcgcggtgaatggctgctgcatccactcaacgaaacgttgcgcaaagcgacgcctggcaagctgcgcgccattccggttcgcatgctcttcaacgatccggatctgaaccttcgtgccgaatatacgctgttcgaccgcgaaaccggacgccccgtctgtgtcggtaacggcgacacctgccggcgcgtgacggatgccggcatcgaaactctgccctgctcgtcgcccgacggctgcacctacgcgcagacgggcggctgcaagccctatggccgcttgaacgtgatcgtcggcgacgacgatgaactcgggtcgttcatcctgcgcacgacctcctacaactcaattcgtacgctcgccgcgcgtctgcactacttccgagcggtgtccggcaatttgctcgcctgcctgccactcgaactaaagctgcgcggcaagtcgaccacgcagagctatcgatcggccatctactacgtcgacctcggggtacgttcagggagcaagctcgaacaagcgttgatcgaggcaaaggaactggacacacgccgccgggcagccggtttcgatcaggctgcactcgatgcagcggctcgactcgggttcgccaacggtgcattcgaagacagcccggatgaacaagcggccgtcgtggaagagttttatcccgatcccgcaccgagccctcacgatgctggcgatggtgacgcggccgagacgatcgaaacacaaccttcgacactgcgggacaaactcgaacgcaaggccgtcctgctcggcggtaaggcagcatgag

SEQ ID NO: 224131 - DNA, 128 bp, Unknown
  Bacterial polypeptide expressing nucleotide sequence isolated from the Sargasso Sea
aatgaaaaaaactttattaatcattttttttttattattttcagttaattcaaatgcaggaaatatatcaaaagtttattttgccggaggttgtttttggtgtatggaagagtcatttgataaggttg

SEQ ID NO: 224132 - DNA, 481 bp, Unknown
  Bacterial polypeptide expressing nucleotide sequence isolated from the Sargasso Sea
atggcgttagcaactttcggtgccggctgtttttggggcgtggagtatttctttaggcaagtcaacggcgtgaccaacgcgacctgtggctatatgggtggtaataacgaagcgaccacctatgaggaagtcaaaaaaggcaagacaggccatgctgaagtcgtgcaagtggaatttgaccctgcgattgtcagctacgacgagttactggatgtgttttggaagaaccacaaccccaccacgctcaatatgcaaggtggcgatatcggcactcagtaccgcagtaccattttcttccatgaccgtgagcaaaaggccacggctgaagcctccaaactggcctttgctcgctctggccgttgggggttacgccacattgtgactgaaattgtgcctttgcagcaattccatgtggccgaggaatatcatcaaaactatatcgataagaacaacttaccaagttgccatctcgagtactgat

SEQ ID NO: 224133 - DNA, 448 bp, Unknown
  Bacterial polypeptide expressing nucleotide sequence isolated from the Sargasso Sea
aatggaaatagcaatattagctttaggatgtttttggggaccggaggaaaaattttccaaagttcaaggtattataaatacagaagttggatattgtggtggcaatactaatccaactacatatgaagaggtatgcactggatcaacaaatcatgctgaagtggtaaaaatagaatttgatgaaaaaattattaaatatgaaaatctacttgaaaaattttttgagatgcatgacccaacaacgttaaataggcaaggtcccgatataggaactcaatatagaagtgaaattttttttacaaataattatcaaaaagaaattgctgaaaaaataaaatctagattcaatttaaaatataatggaaaaattataacaaagatttcaggagaaaaaaattactgtaaagcagaggaatatcatcaaaaatatatacaaaaaagaaattag

SEQ ID NO: 224134 - DNA, 496 bp, Unknown
  Bacterial polypeptide expressing nucleotide sequence isolated from the Sargasso Sea
atgatttcaaagttaatactaggcgcaggttgtttttggggagtagaagttctttttgaagaaatgtctggcgttaaaaaagtaatttcagggtatgccggcgggcatacagaaaaccctacatacgaagaagtctgtacaggtaagtcaggacacattgaagttgttgagattgagtatgataatagtgaagtaaagtttgaggaattgttagacaagtttttctttattcatgatccaactcagatgaatcgtcaaggtccagacattggtgaacaatacaaatcagttattttttgtaattctgatgaagaaagaagaatatcggaaagcaaaattgatgagattaataactcaggcgaacatcaaaacgaagtagttacagaattaagagagaatgctaaattttggcctgctgaagaataccaccaagacttcatagaaaaaaatggtaaagtttgctatcaccaactttacgtacaacacaaatcctaaa

SEQ ID NO: 224135 - DNA, 445 bp, Unknown
  Bacterial polypeptide expressing nucleotide sequence isolated from the Sargasso Sea
atggaaatagcagttttagcacttggatgtttttgggggcctgaaatcaaattcagcaaaattaatggtgttatcaaaactgaagttggctattgtggtggtaatagttcacaaactacctacaaagaagtttgttcaggaaatacaaatcatgctgaggtggttaaaattgattttgatgaaaaagtaatcacttacgaggaaattttgaaaattttttttgaaattcatgacccaactactctaaatgcccaaggaccagattttggtacacaatatagaagtgaaattttctatttaaatgacaatcaaaaaaaaattgcagaagttgtccttaaagaagtaaataaaaaattatcaggtaaagttgtaacaaaaatttcaatacttaaaaattattgtactgcagaagagtatcatcaaaaatatttagaaaagagataag

SEQ ID NO: 224136 - DNA, 403 bp, Unknown
  Bacterial polypeptide expressing nucleotide sequence isolated from the Sargasso Sea
aatgacagaaaacgataatgaaaagttacaggaagaacttagcccagaagaatattacgtaacccaaaaaaaaggaactgaacctgctttttcagggaaatatgatggagagaaaacacctggagtttacaattgtgttgtttgtggagcgccattatttagttctaaagctaaatatgattctggatcaggctggcccagcttttgggagccaattaagaaagaaaatataggttcagaggtagatcattctgctggaatgacacgtaccgaagttcattgttataattgcaaagctcatttagggcatgtatttcctgacggacctcagcctacagggttaagatattgtattaattcagtctcgcttaatttaaaaccagatgatgaggttgaagactga

SEQ ID NO: 224137 - DNA, 370 bp, Unknown
  Bacterial polypeptide expressing nucleotide sequence isolated from the Sargasso Sea
atgtctgaacaaaatgaaaaagcttactttgcaggtggatgtttttggtgcatggaacctccttttgaagctttagatggtgttgttggggcgacctcaggttatatgggtggcacaacagaaaatccaacctacgaagaagttaccactggaaaaacaggacacgcagaagtagttgaaatactatttgatccaagtattgtctcctatgaagagctattagaagtgttctggagaaatattgaccctactgcattgaactaccagtttgctgatgttggttctcaatacagaactgagatatttactgttggtgacaaacaaaagaaacttgctgaagagtccaaaattaaatggaagaatcaggaaa

SEQ ID NO: 224138 - DNA, 472 bp, Unknown
  Bacterial polypeptide expressing nucleotide sequence isolated from the Sargasso Sea
aatgactaaaatagccgtatttgcagcaggttgcttctggggaatcgaagaaaagtttagctctatctctggtgttataaatactgaagtaggctatataggtgggagtgttaaaaatccaacctacgaaatggtttgtacaggtaatactaatcatgcagaagcagtgagacttttttatgatgaagagtctattagctataatgaactcttgaatattttttttgacatacataatccaacaacgatgaatagacaaggccctgactttgggtctcaatatagatcagcaatattttatcaagataattttcaaaaactatcagcacaaaataaaataaaagaattgaataaaacaaaatttaacaataagattgtaactgctcttgaacaaggcggtaatttttggatagctgaagagtaccatcaaaaatatattaaaaaaagacgttttaaattatttggagaataa

SEQ ID NO: 224139 - DNA, 406 bp, Unknown
  Bacterial polypeptide expressing nucleotide sequence isolated from the Sargasso Sea
tatgcagaaatgtacactcgcacttggctgtttttggaaacctgaggaaaacttcaaaaataaaccgggtatattagaaactgaagtaggttatgccggtggaagtagtgagaaaacaacttatgaagacgtatgtactggcagcaccggacatgctgaagttgtgagacttacttttgatgaaaatgtaatttcatttaaaaagatattagatttatttttcaaaatgcacgatccaacgcaaaaagatatgcaatatccagatatcggaaatcaatatagaagtgagattttttatgaaaatgaaaaacaaaaaaaagaagcgtctgagatattaaatgagtttaataaaaaattaggtgggaaaattcaaactaatatctcagcaatcaagaactattgttaa

SEQ ID NO: 224140 - DNA, 421 bp, Unknown
  Bacterial polypeptide expressing nucleotide sequence isolated from the Sargasso Sea
atgaataaacataaatattttatagctttatttttcttttttactggttttacattttcgaatcagactaatcatatccaaaccatttatcttggttcaggttgtttttggggtgctgagaagggttatgaagccttagatggagtaataaatgctaagtcaggatatgcaaatggatatggtgttagcccaaattacagatcaattatccaactcaaaaataagtttaacaagaataactttgctgaggttgtggaagttaccttcaacaacaactttattactttagaagaaatcttaatgcatttttttgaatctcatgatccaactcaatataacagacaaggtaatgacatagggactcagtacaggtcaacaattttatattcagatgatgatcagaaagaaattgctgaaatgc

SEQ ID NO: 224141 - DNA, 118 bp, Unknown
  Bacterial polypeptide expressing nucleotide sequence isolated from the Sargasso Sea
tattgcgcaaggaaatgattttttctatgctgaggattaccatcagcaatacctttctaaaaacccaaatggttattgtggtttaggtggtactggagtttcataccctcttgattaa

SEQ ID NO: 224142 - DNA, 585 bp, Unknown
  Bacterial polypeptide expressing nucleotide sequence isolated from the Sargasso Sea
tttggggtgcagaaaaatgtttctggaaacttccgggagtcattacaacttccgtgggttatgctggaggagagaagaaaaaccctacttactacgaggtctgctctggtattaccggtcatgctgaagttgtaagggttgtttggaatgtaaatgaaatagatattagcgatttattaaaaatgttctgggaatgtcataacccaacccaaaaaaatagacaaggtaatgatatgggaactcaatatagatcaacaatttactataagaatgagaggaataaagacaaaatttactcgagcaaagaagcttaccaaaaagaactttataaaaataatttaggacacatagaaacagagattaaaaaaattgacacttattattatgctgaagactatcatcagcagtatttagcagtagaaggtagtaggcaatattgttcggcatctcctactaaagtaaagttaggaagtttcaataactgtgattacaaactcccaaaaaaagtctgggataatttcaattgggacatcgataaatgtgtattgagatctaataataaacctatagacattaacaattaaa

SEQ ID NO: 224143 - DNA, 847 bp, Unknown
  Bacterial polypeptide expressing nucleotide sequence isolated from the Sargasso Sea
agtaataaatgctaagtcaggatatgcaaatggatatggtgttagcccaaattacagatcaattatccaactcaaaaataagttcaacaagaataactttgctgaggttgtggaagttaccttcaacaacaactttattactgtagaagaaatcttaatgcatttttttgaatctcatgatccaactcaatataacagacaaggtaatgacatagggactcagtacaggtcaacaattttatattcagatgatgatcagaaagaaattgctgaaatgctaaaggaaaaatatcaaaaccttttaagtgattatggctatgggtcaattaaaactattattgaaccgctagacaatttttatttagctgaagagtatcatcaagattaccttaagaaaaatccaaatggatattgtccagacctatcgactgggattgtctttaataaggaagaaataaagccccttgataataccgaattaacaaaaggtaaacatattcttgtaatagattctcgaaactattgtccatattgtgaaaaacttaagagtgatgtaacaaatgattataaaggaagcatcccgatgacttatagaacttccgatcaattacatggattaagacttgagtctccaagttgggcaacgccatctattttattcttggaagatggaaaagaagtttttggatatcaaggatatatagaacctaaggatttttacaaacttttagggaaatttaaacttggtaatactgaggcatatgacgttgcttttaatgatggtacagatgcaagattttgcaaagagtatcaaatatttaaaaatacgcctgaaggagttttgtag

SEQ ID NO: 224144 - DNA, 496 bp, Unknown
  Bacterial polypeptide expressing nucleotide sequence isolated from the Sargasso Sea
tatgatttcaaagttaatactgggcgcaggatgtttttggggagtagaagttctttttgaagaaatgtctggcgttaaaaaagtaatttcagggtatgccggtggacatatagaaaaccctacatatgaagaggtctgtacaggtaagtcaggacacattgaagttgttgaaattgagtatgaaaataatgaagtaaagtttgaggaattgttagacaagtttttcttcattcatgacccaacccagatgaatcgtcaaggtccagacattggtgaacagtacaagtctgttattttttataattctgatgaagaaaaaagaatatcagaaagtaaaattgatgagattaataactcaggtgagcatcgaaataaagtagttacagagttaagagagaatgctaaattttggccagctgaagaataccaccaagacttcatagaaaaaaatggtaaagtttgctatcaccaactttacgtacaacacaaatcctaa

SEQ ID NO: 224145 - DNA, 607 bp, Unknown
  Bacterial polypeptide expressing nucleotide sequence isolated from the Sargasso Sea
tttgttaataactccatatctagatgcaagtaaaacctcacatgttgaaacaatttatctgggctcgggttgcttttggggggctgaaaagggttatgaattaatggatggagttatcaatgcagaatctggctatgcaaatggatatggcataaaaccaaactacagatcgataattcagtttaaaaataagtataacgaaaagaattttgcggaagtagtgaaagtaacttttaatagtaatgccatttcccttgaaaatatattaaaacacttttttgagactcatgatcctactcaacataataggcagggcaatgatattggtactcaatacagatcaacaattctttttcaaaatgaatctcagaaagaacttgcagaaaggattatagctgaataccaagctcttctaattgagggaggttatggaaaaattagaaccaagctggagcctttagataacttttatcttgcagaagaatatcatcaggattatttaaaaaagaatccttatggctattgcccagacctatcaacaggtattgtttttaacgatgaagaaaaaatttttgaggataatgaataccttcttacaggaaagcaa

SEQ ID NO: 224146 - DNA, 367 bp, Unknown
  Bacterial polypeptide expressing nucleotide sequence isolated from the Sargasso Sea
tatgcaaaaatttatagggggtattggttgcttttgggatgaaactgaatatcaaggtgtgcctggtattatttctacagaatgtgggtattgtggtggaaaaaatcaaaaagtaacttacgagcaagtttgtggtggagatactgagcatatagaagttgtaaaagttacatttgattctaaaataatttcttatgaagatgtaactagattattctttaaaatccatgatcctacaactcttaaccgccaaggtcccaatgttggttatcaatatcgatctgaaattttttatacaactgaagaagaaagaatatctgcacaaaaagtaaaggatgaagttaataagaagcttaatggtaaagta

SEQ ID NO: 224147 - DNA, 559 bp, Unknown
  Bacterial polypeptide expressing nucleotide sequence isolated from the Sargasso Sea
ttgataatttttattaccttcttcttttcaaatttatattctgcgcctattcttaaggtttattttgccggaggatgcttttggtgcatggaggagtcctttgataaagtagatggtgtaattaagactatttcaggttattcagggggccatgtaaaaaatccaaaatataaagatgtagtaaaaaataccactggtcactatgaaacactagaaattacttatgattcatccgttgtaaattttgacaagctattagatatatattggataaacatagatccatttgatgtaaatggtcagttctgtgataaaggagaaagttataagtctgttattttttttgaaaacaatcatcaaaaaaaaactattgataattcaattaaaaaaattgaaagaaaatttaataaaaaaattgttacttatgttaaacaattcaaagagttttatatggcagaaacttaccaccaagactattatgaaaagaattttttaagatatttaatgtataaaaaaggttgtcaaagagaggaaatattaagcaaaatttggggatgaa

SEQ ID NO: 224148 - DNA, 370 bp, Unknown
  Bacterial polypeptide expressing nucleotide sequence isolated from the Sargasso Sea
tatgaatactgctatattagctgcaggatgcttttggggtatagaagaagtgtttagaacaactaaaggcgtgattgacacaaaagttgggtacaccggaggtacaaaaattgatcctacatacgaagaagtttgtacagatttaactggacatgcagaagtagtaaaagtagatttcgatgaagcaataatttcatatgaagacattttaaacatattttttgcaaatcataatcccactcaattaaatcgacaaggcccggatattggaacacaatacagatcgtctgtattttatttaaatagtaatcaaaaagaaatcgccatatcaaagataaaatcttttgcaccacaatacgataattcaatc

SEQ ID NO: 224149 - DNA, 448 bp, Unknown
  Bacterial polypeptide expressing nucleotide sequence isolated from the Sargasso Sea
atgcagaaatgtacacttgctcttggctgtttttggaaacctgaggaaaactttaaaggtaaaccaggaatattagaaactgaagttggttatgctggaggatctaatcaaaatgtaacttatgaggaagtttgtactggaaacactggtcatgctgaagttgtaagactaacttttgatgaagccaagatctcatataagaagattttagatttattttttaaaatgcacgacccaactcaaaaagatatgcaatatcctgatgttggaacgcaatatagaagtgaaattttttatgaaactgatcaacaaaaaatagaagcttctgaaatcttaaatcaatttaatgaaaagttaagtggaaagatacagaccaacatctcaaaaattaaaaattattgcaaagcagaagaatatcaccaaaaatatatcgaaaaaaatagataat

SEQ ID NO: 224150 - DNA, 331 bp, Unknown
  Bacterial polypeptide expressing nucleotide sequence isolated from the Sargasso Sea
tatgttatcatctttaatagtaggtgcaggatgcttttggggcgttgaagttttatatgaacaaatgcccggtgttattaatgtaacctcaggttattctggtggtcatttagataatcctagatatgaggatgttttaactggcgagacaggtcacgttgaagtggttaaaattgattatgatagcagtgaagttacttttaatgaattgattgatacattttttatcattcatgatcccacaaccttaaatcgtcaaggacctgatattggggagcaatataaatctatacttttttacaatagcaaagatgaaaaaagaagttattga

SEQ ID NO: 224151 - DNA, 169 bp, Unknown
  Bacterial polypeptide expressing nucleotide sequence isolated from the Sargasso Sea
tatggaattatcattagtgctaggagcaggttgtttttggggagtggaagttctttttgaagaaatgaatggggttaataaagttatctcaggttattcaggaggtcatactaataaccctacttatgaacaagtatgtactggtgaaactggccacattgaagttgta

SEQ ID NO: 224152 - DNA, 298 bp, Unknown
  Bacterial polypeptide expressing nucleotide sequence isolated from the Sargasso Sea
atgtcccggcaagacaaagatgaagccgcgtggcgggagcaactgaccgccgaggagttttatgtgctccgtgagaagggcaccgagcgcgcgttcaccggcgaatactggaatgtttgggaggagggcgcctaccactgccgaggctgtggtgagctgctgtttcaatctaacaccaagttcgatgccggttgtggctggccgagctttgataggccggccactgaaggtgtggtggaggaagagcgggatactagtcacggcatgatccgcaccgaggtgctctgccaggggtgcg

SEQ ID NO: 224153 - DNA, 325 bp, Unknown
  Bacterial polypeptide expressing nucleotide sequence isolated from the Sargasso Sea
tggaaccgaaccacctttttcaggtgaatatttacataataaagaaaagggtatttataaatgtgtttgttgtgattccaatctattctcaagcgatacaaagtatgagtctcattctgggtggccttcattttttgacacatttgatttaaatgctgtaagctcctctaaagatgatacatatggaatggttagaactgaagtacattgcagtaaatgtaaagctcatttgggtcatgtttttccagatggaccaaaaccaactggtttaagatattgtataaattctttagctttaaatttcagtaaagaaaaattaaaatga

SEQ ID NO: 224154 - DNA, 438 bp, Unknown
  Bacterial polypeptide expressing nucleotide sequence isolated from the Sargasso Sea
tatggaaaaagctttatttggcgctggatgcttttggggtgtggaagaaacctttagaaagctacatggtgtttcaaaaactgaggttggatattcaggaggcataacaagtaacccttcttatgaaagtatttgtaaaggtgatacaaatcatgctgaagttgtcctaattgaatatgataaaaatcacattagttatgagacgttgttagatcatttttggcaatctcatgatccaactacattaaatagacaaggtccagatatcgggactcaatacagatcagtaatattttactataatgatctacaaaaaaaaatagcagaaaattcaaaaaattcttacgcaaacaaatttaatttaaaaattgtaactgaaataaaacaagctcaagaatattttaaagcagaagagtatcatcaaaaatatgctttaaa

SEQ ID NO: 224155 - DNA, 520 bp, Unknown
  Bacterial polypeptide expressing nucleotide sequence isolated from the Sargasso Sea
tatgttatcatctttaatagtaggtgcagggtgcttttggggcgttgaagttttatatgaacaaatgcctggtgttgtcaatgcaacctcaggctattctggtggtcatttagataatcctagatatgaggatgttttaactggcgagacaggtcacgttgaagtggtcaagattgattatgatagcagtgaagttacttttaatgaattgattgatacattttttatcattcatgatcccacaaccctaaatcgtcaaggtcctgatattggggagcaatataaatcgatactcttttacaacagcgaagatgaaaaagaaattattgacagtaaaattaaaaaaatagatttatcaggcaaatttgaaaacccaatagttacagaaattagagaaacagcagagttttatcctgcagaggagtaccatcaagattatgcagcgaaaacaggcaagctatgttaccagcaactttatgttatgtataattactcgccaataccagctgcaacaccataa

SEQ ID NO: 224156 - DNA, 242 bp, Unknown
  Bacterial polypeptide expressing nucleotide sequence isolated from the Sargasso Sea
tatgatctttagactttttcttttcttattattgttacctattacagcttacgcaaaaattaatacaatttacctagctggtgggtgtttctggtgtgttgaggaggtttatgaaaaattaaaaggtgtaattgacgttcgatctggctattcaggaggtcatgttgaaaatccaacttatcaagaagttgtcaagggtgatacaggtcatatagaagtggctgaaatttttttgactcaga

SEQ ID NO: 224157 - DNA, 322 bp, Unknown
  Bacterial polypeptide expressing nucleotide sequence isolated from the Sargasso Sea
catgtccgtgtcagatgaaaaggtggtcatcgatgccaatcatctctatgccggcgaggacctcacgttgaccgtaactttactggagccgccgaacggccgtccattgcaagaggcgaccttcgcgggaggctgcttctggggcgtcgagctggcctaccagcgcgagcccggcgtcgtacggacggaggtcggctacgcgcaaggggcggatccgtcgccttcttacgaagctgtgtgctcgggcgtgacgggacatactgaagcagttagagtgcgctacgacccggctcgcgtctcctacgagcggctctgcgacctg

SEQ ID NO: 224158 - DNA, 466 bp, Unknown
  Bacterial polypeptide expressing nucleotide sequence isolated from the Sargasso Sea
ttgtacgaacaagtttgtacgaacaagtttgtacgaacaagtttgtacgaacaagtttgtacgaacaagtttgtacgaacaagtttgtacgaaaaagtttgtacgaacaagtttgtacgaacaagtttgtacgaacaagtttgtacgaacaagtttgtacgaacaagtttttacgaaccagtttttacgaaccagtttgtacgaacaagtttgtacgaaccagtttgtacgaaccagtttgtacgaaccagtttgtacgaaccagtttgtacgaaccagtttgtacgaaccagtttgtacgaaccagtttgtacgaaccagtttgtacgaaccagtttgtacgaaccagtttgtacaaaccagtttgtaccaaccagtttgtacaaactagtttgtacgaaccagctggcagggcctcggacctggctggatggcccagagggggggatggacggacgtacgtagg

SEQ ID NO: 224159 - DNA, 433 bp, Unknown
  Bacterial polypeptide expressing nucleotide sequence isolated from the Sargasso Sea
cttgctcttggctgtttttggaaacctgaggaaattttcaaaaataagccaggtataattgaaacagaagtcggctatgccggtggattatccgataaagttacatatgaagaagtatgtagaggtgacactggtcatgctgaagttgtaagacttacctttgatgaaaaattaatttcctttaaaaaaattttagacttattttttaaaatgcatgaccctactcaaaaagatatgcaataccctgatgttggaactcaatatcgaagtgaaatattttatgaagacgacactcaaaaagctgaggctaaagaaattttggaaatttttaataaggaactaaacggaaaaattcaaactaatatttctcggctcaaaaattattgtaaggcagaagaatatcaccaaaagtacatagaaaaaaatagataat

SEQ ID NO: 224160 - DNA, 445 bp, Unknown
  Bacterial polypeptide expressing nucleotide sequence isolated from the Sargasso Sea
aatggaaatagctgttttagctcttggatgtttttggggaccagaaataaaatttagtaaaattgatggtgtcattaaaactgaggtaggttattgtggtggccatagtgcaaaaacaacctataaagaggtctgtactggtgacacaaatcatgccgaagttgtaaagctcgattttgatgaaaaaattatttcctatgaaaaaattttaaaaattttcttccaaattcatgatcctactacattaaattctcaaggacccgattttgggactcagtacagaagtgaaatattttatttaaatgacaatcaaaaaaaaatagctgaagaagtacttcaagatattaatgaaagattatcaggtaaagctgttactaaaatttccttattaaaaaattattgccctgcagaggaatatcaccaaaaatatttggaaaaaagataa

SEQ ID NO: 224161 - DNA, 376 bp, Unknown
  Bacterial polypeptide expressing nucleotide sequence isolated from the Sargasso Sea
atgaacaaaaaaaatctagatcatttatctgaagagcagcgttatgtgacccaagaaaagggaactgaggcaccttttacaggtgaattattgcataacaaagagagtggcacttatcagtgtgtatgttgcggcgctgatctgtttagctctgatacaaaatttgattcaggaactggatggccaagcttttatgatgtgatgagttctactgcggttaaagttgaggtcgatcacagtcatggtatggtgagacaagaagtcttatgtggaagctgtaatgcacatttaggccatgtttttaatgatggaccagatccaactggacttcgttactgcattaattctctgtctctggaatttgagaaagattaac

SEQ ID NO: 224162 - DNA, 448 bp, Unknown
  Bacterial polypeptide expressing nucleotide sequence isolated from the Sargasso Sea
atgactaaagcattaattggagcaggatgtttctggggaattgaagaatatttcagaaaattaaatggggttatggataccaaagtaggctactctggaggacacactaaaaacccatcttatgaagaagtatgtgcaggtaatactaatcatgcagaagtagttcaaattatatttgatgaagagcttataacttatgaaaatattcttgatcatttttggaagtgtcatgatccaacacagttgaatcgtcaaggttttgatataggtagtcaatatcgatctgttatttattattttactgatgaccaacaaaaattggcagaaaagtctaaaaacaaaaaacaaactttactaaataataaaattgttaccgaaattgataaagcaaaaaatttttttttagctgaagaatatcatcagctttatattaaaaaaagagcttaaa

SEQ ID NO: 224163 - DNA, 407 bp, Unknown
  Bacterial polypeptide expressing nucleotide sequence isolated from the Sargasso Sea
agaaaaatttaaaattcaaaaaggcatattagatactgaggtaggttatgcgggaggatataagtcgaaagtaagctatgaagaggtctgtcaaggaaacactggtcatgcagaaactgtaaaactatcattcgatgaaaatgtaatatcatttgagaaaattttagagctcttttttaaatttcatgatccaacacagaaagatatgcaatttccagatgttggcacacaatatagaagtgaaatattctatgaaaatgaacaacaaagagaaatagcaaataaagttaaagaaaaatttaataaagtatttaataacaaaattgaaacaaagatttctccaattaaaaattattgtagagcagaggaatatcatcaaaaatatattgaaaaaacccgaaaatgaa

SEQ ID NO: 224164 - DNA, 532 bp, Unknown
  Bacterial polypeptide expressing nucleotide sequence isolated from the Sargasso Sea
atggctagtaccgagaccataactcttggtggtggatgcttctggtgtgtagaagcagttttccagcgtgtagagggagtattagatgtaaaacctggatatgcaggaggtcatgtgaaaaacccaacgtataaggaaatttgtactggtaagacaggacatgctgaagtagctcaaattcgctttgataatacaaaaatatctcttgaacaaatcttcaatattttttggcaagctcatgatccaaccactattaataggcaaggtaatgatatcggcacacagtatcgctccgtcatcttttatcataataatgaacaaaaatcaaaggcaatagaatcaaaaatttcagcggagaaatcgggatattggagagatacaatagttaccgaaataacaaaattaaataactattcagatgctgaagattaccaccatgattattacaaccagaattcaaatcaaccatattgtatatttgtaattaaaccgaaacttgacaaactagaaaaaaatggattgattaattaaa

SEQ ID NO: 224165 - DNA, 275 bp, Unknown
  Bacterial polypeptide expressing nucleotide sequence isolated from the Sargasso Sea
tggagagggcaaatttctctgtgtttgctgttcaagtgaattattttcttcatccgagaagtttgaaagtggttcaggatggcccagctttagtagtcccttatcacaggacactgtggcatcaaaaatagacctttcacatggaatgagaagaatagaagtgaattgcagtagctgtaaagcacacttagggcatgtttttgaagatggtcctgcccctactggtctgaggtattgtattaatggtgttgccttaaaattcaagccagcttaat

SEQ ID NO: 224166 - DNA, 406 bp, Unknown
  Bacterial polypeptide expressing nucleotide sequence isolated from the Sargasso Sea
atgtcagggaagcaacatccattatcagacgaagactacaaaagtattcttactccaattcaatatgaagttacaagaaataaggcaactgagcgtgcttttaccggagaatattggaatgtaactgattctggtgtttataaatgtatatgttgtggaattgagttgttttcttctgatactaaattcgattctatgtgtggatggcctagtttttttgacgcacttgatttaaaaaatatagttgaagaaaccgatacttcgtatggcatgattagaactgaggtgacttgcaagaactgtggtgcgcatttgggacatgtttttccagatgggcctcctccaacaggtttgaggtattgcattaattctgcttctttgaatcttaagagagaaaatttgtaag

SEQ ID NO: 224167 - DNA, 556 bp, Unknown
  Bacterial polypeptide expressing nucleotide sequence isolated from the Sargasso Sea
tatgattttaatttttttaataagcacttctgctcaatcaaaaaattttaaaaaagtgtattttgctggaggatgcttttggtgtatggaggagtcgtttgatgcagttgacggtgttttatctacagtttcaggttattcaggcggacatttaaagaatcctacctaccacgatgttatttataaagatacaggccacgtagaagctttagaaataacttatgatccaaataaagtgaactatgaaaaattacttaatattttttggagaaatatagatcctttcgactcagagggtcaattttgtgacaaaggtaagagctatagatcggtgattttctttcaaaatcaactagaaaaagaatttattgataaatcttttgaaaatttagaaaagaaatttggtaaaaaaattgtcactttagtatggaaatttgaggaattttatcaagcagaagattatcaccaagattattatgaaaaaaattttattcgttatctaatgtataaaaaggcgtgtaaaagagaagataccttgagagaaatatggaattga

SEQ ID NO: 224168 - DNA, 271 bp, Unknown
  Bacterial polypeptide expressing nucleotide sequence isolated from the Sargasso Sea
atggaaaaactagattcggcaatacttgggggaggatgcttctggtgtttggaagcagtatacataaaactagagggtgtaaaatcagttatttcaggatactcaggaggtaacgttgaaaatcctacttacgaacaggtttgtactggtgaaacctatcatgctgaagtagtaaaaataaactatgatttaaacaaaacaagtttcgagaccttactggaatggttttggagatgtcatgaccctactacccttaatcgccaaggaggag

SEQ ID NO: 224169 - DNA, 396 bp, Unknown
  Bacterial polypeptide expressing nucleotide sequence isolated from the Sargasso Sea
tatgcgaatgattacattaatggggttgctgataatcagcgcaccatccctagccgccgaagcctattttgccggtggctgtttctggtgtaccgagtccgattttgagcaactgaacggggttagcgacgttatcagcgggtatgcgggtggcgacgtcgccaatcccagctatcaacaagtagccgctggcagcaccgggcacaccgaagccgtaaaggtcatctatgaccccaaagtggttagctacgacaacctactgacctggttgtggcgccatatcgaccccaccgacgccaacggacaattcgtggaccggggcacccagtatcgcagcgaaattttttatcaaaccgatgaagaaaaagaggctgctaaagcatcaaggatggaact

SEQ ID NO: 224170 - DNA, 550 bp, Unknown
  Bacterial polypeptide expressing nucleotide sequence isolated from the Sargasso Sea
tttgatttttaaaatcagttcttttgcaaatgctcaagactttaaaaaagcatactttgctggcggatgtttctggtgcatggaggagtcttttgatcaaatagagggagtgctttcgtcaatttctggatattcaggaggtcacttaaaaaatcctacctatcaagatgtaatatataaagataccggccatgtggaggctatagaaataacatatgactcaaaaattgtaagttatgagagtcttttaaatattttttggagaaacatcgatcctttcgattcggagggtcagttttgcgataaaggaaaaagctatagatcagtaattttttttcaaaatcaactagagaaagaatttattgataaatcttttaaaaatttagaaaataaatttaatagggaaatagtcactttagtttggaaatttgagaaattttatccagcagaggattatcaccaagattattatgagaaaaattttattcgttatttaatgtacaaaaatgggtgtaaaagagaagataccttgagaagaatatggaattga

SEQ ID NO: 224171 - DNA, 409 bp, Unknown
  Bacterial polypeptide expressing nucleotide sequence isolated from the Sargasso Sea
catggcaaaagtcacaaggtcggatgcggaatggcgcgcacaactatcgtcggaagcgtacaaggtttgccggcaaaaagggactgaacgcgctttcaccggtgagtacgacaagtgctacaaaccagggacctatgtctgtgtgtgttgtggaaacccgctgttttcatcggatgccaaatttgactctggtacaggttggccaagttttcattcaaccatcgacgaagatgcggttcgcgaagaagaagatattagcctgttcatgcgacggacggagacgttatgcgcgatttgcgacgcccatctcggtcatgtgttccccgatggacccgctccaacagggttgaggtattgtatgaactccgtggcattaaaactggtgccgccggacgataaaaccgactag

SEQ ID NO: 224172 - DNA, 445 bp, Unknown
  Bacterial polypeptide expressing nucleotide sequence isolated from the Sargasso Sea
atggaaatagcgatactagcatgtggatgtttttggggacctgaaataaaattcagtaagcttaaaggagttataaaaactgaagttggttattgtggtggaaatactgaaaaaacaacatatgaggaagtttgtactggcaatacaaatcacgccgaagtagtcaaaatagactttgactctaaaataatttcttatgaagaaattttaaattttttttttgaaattcatgatccaactacattaaattcacaaggtccagatattgggacacagtatagaagtgaaatattttatttaaatgaaaatcaaaaaagtattgcggaagaagtcataaagaaaaataatcaaaagtattatggaaaaatcgttacaaaagtttcattagttaaaaattattgtgtggcagaagaataccatcaacgatatttagaaaaaagataaa

SEQ ID NO: 224173 - DNA, 496 bp, Unknown
  Bacterial polypeptide expressing nucleotide sequence isolated from the Sargasso Sea
atgatttcaaagttaatactaggcgctggatgtttttggggagttgaagttctttttgaagaaatgtctggcgttaaaaaagtaatttcagggtatgctggcggacatacagaaaatcctacatatgaagaggtctgtaaaggtaagtcaggacatattgaagttgttgaaattgagtatgaaaataatgaagtaaagtttggagaattattagacaagtttttcttcattcatgatccaacccagatgaatcgtcaaggtccagacattggcgagcaatacaagtcagttattttttatagttccgatgaagaaagaagaatatcagagagtaagattgatgagattaataactcaggtgaacatcaaaataaagtagttacagaattaagagagaaagctaaattttggcctgctgaagaataccaccaagacttcatagaaaaaaatggtaaagtttgctatcaccaactttacgtacaacacaaatcctaaa

SEQ ID NO: 224174 - DNA, 538 bp, Unknown
  Bacterial polypeptide expressing nucleotide sequence isolated from the Sargasso Sea
attgccagcaaatttaaatgcagaaaatatatcaaaagtttattttgccggaggttgtttttggtgcatggaagagtcatttgacaaggttgatggtgtgataaaaactatttctggatattctggtggacacgtaaaaaaccctaaatacaaagatgttgttaaaaatactactggccactatgaaactttagaaattacttacgactcatcaattacaaactttaaaaagcttttagaaatttattggattaacattgacccctttgatgcaaaaggccaattttgtgataaaggtgaaagctataagtctgtagttttttttaatgacagtgatcaaaaaaaaattatagaagcttcaattaaaaatattgaaaataagtttaataaaaaagttgttacttatattaaaaaattcaaggaattttatatagctgagacttaccatcaagattattatgagaaaaattttataagatacttgatgtacaaaaaaggttgccaaagagaagaaacattaaataaaatctggggatga

SEQ ID NO: 224175 - DNA, 895 bp, Unknown
  Bacterial polypeptide expressing nucleotide sequence isolated from the Sargasso Sea
tacttactattagttttattttcaatcccatatctagatgcaagtaaaacttctcatgttgaaacaatttatctaggttcaggatgcttttggggagctgaaaagggttatgaattaatggatggagttatcaatgcagaatctggctatgcaaatggatatggcataaaaccagactacagatcaataattcaatttaaaaataagtataatgaaatgaattttgcggaagtcgtaaaaattacttttaacagtaatgccatttcacttgaaaatatattaaaacacttttttgagactcatgatcctactcaacataataggcagggcaatgatataggtactcaatacagatcaacaattctttttcaaaatgaatcacaaaaagaaattgcagaaaggattatgactgaataccaagctcttataattgagggaggttatggaaaaattagaaccaaactagagcctttagataacttttatcttgctgaagaatatcatcaggattatttaagaaagaatcctaatggttattgcccagatctatcaacaggaattgttttcaacgatgaagaaaaattttttgaagataatgaataccttcttactggaaagcaaatattagttttagactctcaaaattattgtccttactgtgaaaaattaaaggatgatgtaacaagtagttacaaaggaagcatccccttaagctatagaacttctgatcaattacatggccttgaaattaaatctcctacctgggctactccatctttaatttttctagaaaatggaaaagaaattttttcgtatcaggggtacataaatcataaagatttttatcaattattgggtaaatttaaattaggaaattcagaggcatataacgtcg

SEQ ID NO: 224176 - DNA, 376 bp, Unknown
  Bacterial polypeptide expressing nucleotide sequence isolated from the Sargasso Sea
atgaacaaaaaaaatctagatcatttatctgaagagcagcgttatgtgacccaagaaaagggaactgaggcaccttttacaggtgaattattgcataacaaagagagtggcacttatcagtgtgtatgttgcggtgctgatctgtttagctcagatacaaaatttgattcaggaactggatggccaagcttttatgatgtgatgagttctactgcggttaaagctgaggtcgatcacagtcatggtatggtgagacaagaagtcttatgtggaagctgtaatgcacatttaggccatgtttttaatgatggaccagatccaactggacttcgttactgcattaattctctgtctctggaatttgagaaagattaac

SEQ ID NO: 224177 - DNA, 369 bp, Unknown
  Bacterial polypeptide expressing nucleotide sequence isolated from the Sargasso Sea
aatgagtaaaataacaaaaacagatgcagaatggaaatcacttttaacagaagatgaatattatgtaacaaggcaaaaggggacagaacctcctttctctggtaaaaattttgaaattattaacggtggtatttttaaatgtaaatgctgtggtaatgaattatttaatagttctacaaaatatgattcttattgtggatggccaagtttttttgaacaaatatcacctgaagcaattaaaacagagactgataaatctcatggaatggtacgtattgaaattatgtgtgccaaatgtgatgctcatttaggtcacgtctttgatgatggacctgagcctaccggcaaaagatactgtgtaaattctct

SEQ ID NO: 224178 - DNA, 376 bp, Unknown
  Bacterial polypeptide expressing nucleotide sequence isolated from the Sargasso Sea
tatgaacaaaaaaaatctagatcatttatctgaagagcagcgttatgtgacccaagaaaaaggaactgaggcaccttttacaggtgaattattgcataacaaagagagtggcacttatcagtgtgtatgttgcggtgctgatctgtttagctcagataaaaaatttgattcaggaactggatggccaagtttttatgatgtgatgagttctaccgcggttaaagttgaggtcgatcacagtcatggtatggtgagacaagaagtcttatgtggaagctgtaatgcacatttaggccatgtttttaatgatggaccagatccaactggacttcgttactgcattaattctctgtctctggaatttgagaaagattaa

SEQ ID NO: 224179 - DNA, 472 bp, Unknown
  Bacterial polypeptide expressing nucleotide sequence isolated from the Sargasso Sea
tatctcagagtcaaaggaattaataaagtaatatcaggttatgcgggtggacaaactgtcaatccaacttatgaagaagtgtgtagcggcaatacaggacatgccgaggttgtacaaatagaatatgatcccaatgaaatcagttactcgactatactaaatatattttttgatattcatgaccctaccacgttaaacaaacaaggtcctgatacaggtactcaatatagatccgaaatcttttatcataatgatattcaaaaaaatattgcaagcgataaaattaaaatgctttctgaaaataagacttttgatgatcccatagtaactcaaatatcggagcttgatgtattttatctaggagaagattatcatcaagattactttgcaaataatcctatgaatccttattgcacttatataataaatcctaaattacagaaattcctcttacaaaaccaaccgaaataac

SEQ ID NO: 224180 - DNA, 451 bp, Unknown
  Bacterial polypeptide expressing nucleotide sequence isolated from the Sargasso Sea
atgcaaaaatttatagggggcattggttgcttttgggatgaaacagaatatcaaggtattcctggtattatttctacagaatgtggatattgtggtggaaagaatccaaaagttacctatgaacaagtttgtggcggagatactgaacatatagaggttgttaaagttatatttgatccaaaaataatttcttatgaagacgtcactaaattattctttaaaattcatgacccaacaactcttaatcgtcaaggtcctaatgtaggctatcaataccgatcagaaattttttatactactgaagaagaaaaaataattgcacaaaaagtattagatgaggttaataagaacctaaatggtaaagtagtcacagttataagaaaagaaaaaaactactgtaaagctgaagagtaccatcaaaaatattttgaaaaacgtaataaaagatgac

SEQ ID NO: 224181 - DNA, 388 bp, Unknown
  Bacterial polypeptide expressing nucleotide sequence isolated from the Sargasso Sea
aatgaaaaaaattattctaatcttatttatttattttataaacctaagcgtatttgcaacagaaactaaaaaagcatattttgcaggaggttgcttttggtgtatggaagaatcttacgatcaagtagatggagttttatcatcaatttctggatactcgggagggcatcttaaaaatccaaaatatgaggatgttatttacaaagatactggtcacgtagaggtaatagaggttacatataacccttcggtggtgagctataaagatttattaaatgtttactggaaaaatattgaccccttcgatgcttcaggtcaattttgtgataaaggcaaaagttatagatctgtgattttttttgaaaataatagtcaaaaagagcttatt

SEQ ID NO: 224182 - DNA, 442 bp, Unknown
  Bacterial polypeptide expressing nucleotide sequence isolated from the Sargasso Sea
atggaaatagcagtattagcattaggatgtttttggggaccagaaattaaatttgataaactggaaggagttataaaaacagaggtaggttactgtggaggaaataatgacaaaacaacttatgaggaagtttgtttaggaaacaccaatcatgctgaggttgttaagctagaatttgatcctataaaaatttcatatgaagaaattttgcattatttttttgaaattcataatcctacgactttaaatgcgcagggtcctgatattggtactcaatatagaagtgaaatattttatataaatgaagaacaaaaaaaaattgctgaaaaaataattgaagaaaatgataaagaattatctggcaaagttgttacaaaattatcaaaaataaaaaattattgtaaagccgaagattatcatcaaaaatatttagaaaaataat

SEQ ID NO: 224183 - DNA, 331 bp, Unknown
  Bacterial polypeptide expressing nucleotide sequence isolated from the Sargasso Sea
tatgatttcaaagttaatactaggcgcaggatgtttttggggagtagaagttctttttgaagaaatgtctggcgttaaaaaagtaatttcaggatatgccggaggacatacagaaaaccctacatatgaagaggtttgtacaggaaagtcaggacacattgaagttgttgagattgagtatgataatagtgaagtaaagtttgaggaattgttagacaagtttttctttattcatgatccaactcagatgaatcgtcaaggtccagacattggtgaaaaatataagtcagttattttttgtaattctgatgaagaaagaaaaatatcggaa

SEQ ID NO: 224184 - DNA, 445 bp, Unknown
  Bacterial polypeptide expressing nucleotide sequence isolated from the Sargasso Sea
atggaaatagcagttttagcacttggatgtttttgggggcctgaaatcaaattcagcaaaattaatggtgttatcaaaactgaagttggctattgcggtggttatagtccacaaactacctataaagaagtttgcacaggaagtacaaatcatgctgaagttgttaaaattgattttgatgagagggtaattacttatgaagaaattttaaaaatttattttgaaattcatgacccaactacgctaaattctcaaggaccagattttggtacacaatatagaagtgaaatcttttatttgaatgacgatcaaaaaaaaattgcagaagatgttctggaccaggtcaataaaaagctatcagggaaagttgtaacaaaaatttcccttctaaaaaactattgtattgctgaggaatatcatcaaaaatatttagaaaagagataat

SEQ ID NO: 224185 - DNA, 445 bp, Unknown
  Bacterial polypeptide expressing nucleotide sequence isolated from the Sargasso Sea
aatggaaatagcagttttagcacttggatgtttttgggggcctgaaattaaatttagtaaaattgagggtattattaaaacagaggttggttattgtggaggcgacagttcaacaacaacttataaagaagtatgtactggtaaaacaaatcatgcagaagttgtaaaacttgactttgatgagaaaattatcacttatgaaaaaatcctaaaaaccttctttcaaattcatgatccaactactttaaattctcaaggaccagattttggaacgcaatatagaagtgaaatattttacctaaatgacaagcaaaaaaaaatagcagagaaagtattgaatgacataaatgaaagattatcaggtaaagtggttactaaaatttcgttactaaaaaattattgtccagctgaggaatatcatcaaaaatatttggagaaaagataa

SEQ ID NO: 224186 - DNA, 274 bp, Unknown
  Bacterial polypeptide expressing nucleotide sequence isolated from the Sargasso Sea
aaaaacccaaattatcaggatgtttgtactggtaacacagaacacgcagaagcagttcgagtaaagtttgatagtccggctatttcctatgaaagcttattaaaacttttttttgagatacatgatccaacaactttaattcgtcaaggccctgatatcgggacgcaatatagatctgagattttttgtctagatgaagatcaatatttattcgcagacacgtttaaaagaaatttaaataacgacaagtttaatggtaatattgtcacctcaa

SEQ ID NO: 224187 - DNA, 445 bp, Unknown
  Bacterial polypeptide expressing nucleotide sequence isolated from the Sargasso Sea
atggaaatagcagttttagcacttggatgtttttgggggcctgaaatcaaatttagtaaaattgatgggattattaaaacagaggttggttattgtgggggtaatagttctacaacgacctataaagaggtatgcactggtaaaactaatcatgccgaagttgtaaaacttgattatgatgaaaagattataacatatgaaaaaatattaaaaactttttttcaaatacacgaccctactactttaaattctcaaggaccagattttggtacacaatacagaagtgaaatattttatttaaatgatagccaaaagaatatagctgaaaaagtattaaaagaagtagatcaaagactttcgggtaaagtagttacgaaaatttctctattaaaaaattattgtccagcagaagaataccatcaaaaatatttggaaaaaagatagg

SEQ ID NO: 224188 - DNA, 448 bp, Unknown
  Bacterial polypeptide expressing nucleotide sequence isolated from the Sargasso Sea
aatggaaattgcaataatagcttgtggatgtttctggggaccagaaataaaatttagcaaactcgaaggagtgcttaaaacagaggttggttattgtggtgggaataatgaaaaaacatcatacgaggaagtttgttcaggtacaacaaatcatgcagaagttgtcagaattgaatttgatccaaagatgataacatatgaaaatatattaaacttcttttttgatattcatgatccaacaactttaaatgcacaaggtccagatattggaactcaatataggagtgagattttttatattaatgaaaaacaaaagattattgctgataaagttttaagtgaaaaaaatgtaaaattctctggaaaaattgtaacaaaaatatcaccagttaaaaattattgtactgcagaaaattatcatcaaaaatatctagaaaaaagattttaa

SEQ ID NO: 224189 - DNA, 373 bp, Unknown
  Bacterial polypeptide expressing nucleotide sequence isolated from the Sargasso Sea
tatggttaaaaataaagaccatttgactgaagaacaaattcaagtaacgcaattttgtggtactgaaccgcccttttctggtgaacttttaaaagaaaaaagatctggtacatatctttgtgtagtttgtaatgaatctttatttaattctgataccaaatatgaatctggatctggatggcctagtttttttgattctatagagaataaaattaatcgtaaggaagatctttctcatggtatgaaaagagtagagattacatgtaaagcttgtgacgcacatttaggtcatgtattcccagatggccctgaaccaactggtgaacggtactgtgtaaattcattgagtatggattttcaaagtaatgagtag

SEQ ID NO: 224190 - DNA, 445 bp, Unknown
  Bacterial polypeptide expressing nucleotide sequence isolated from the Sargasso Sea
aatggaaattgcaattttaggattaggatgtttttggggaccagaaattaagtttagtaaacttgatggaattataaaaactgaagttggatattgtggaggcaacaatgcagagaccaattacaaagaagtatgtactggaacaacaaaccatgcggaagttgttaaattagatttcgatccaaaaattatatcttatgaaaaaattcttaaatacttttttaaaattcatgatccaacaactctaaattctcaagggccagactttggaacacaatatagaagtgaaattttttatttaaatgataatcaaaaaacaactgcagaaaatgttattagtaaagaaaacgagagactttctggaaaagttgtaactaaactatcacaagtaaaaaactattgtccagcagaagaataccaccagagatatttagaaaaaagataa

SEQ ID NO: 224191 - DNA, 445 bp, Unknown
  Bacterial polypeptide expressing nucleotide sequence isolated from the Sargasso Sea
atggaaatagcaatactagcgtgtggatgtttttggggacctgaaatcaagttcagtaaattgaatggggtttataaaacggaagttggttattgtggaggcaacacaagtaaaactagttatcaagaagtttgtgaaggagatacaaatcatgcggaggttgttaaactagattttgatccaaatataatttcttacgaaaaaattcttgattatttttttgaaatacatgatccaaccacactaaactcacaagggttagattttggtacacagtatagaagtgaaatattttatcttaatgataaccaaaaaaatattgcaaaaaaaataatagaaaaatataatgaaaatctctctggtaaagtagtaactaaactttcacaaataaaaaattattgtactgctgaggaataccatcaaaaataccttgaaaaaagataaa

SEQ ID NO: 224192 - DNA, 199 bp, Unknown
  Bacterial polypeptide expressing nucleotide sequence isolated from the Sargasso Sea
tatgagtgaaggttatgaaaaagcttattttgccggaggctgtttttggtgcatggagccaccttttgaagacttagatggtgtaattgaagccacgtcggggtatatgggtggaagtgtagaaaatccaacatatgaagaagtcactactggcacaacaggtcatgcagaagttgtagaaatactttatgaccctgaa

SEQ ID NO: 224193 - DNA, 496 bp, Unknown
  Bacterial polypeptide expressing nucleotide sequence isolated from the Sargasso Sea
atgatttcaaagttaatactgggcgcaggatgtttttggggagtagaagttctttttgaagaaatgtctggtgttaaaaaagtaatttcagggtatgccggtgggcatacagaaaaccctacatatgaagaggtctgtacaggtaagtcaggacacattgaagttgttgaaattgagtatgaaagtaatgaagtaaagtttgaggaattgttagacaagttcttcttcattcatgacccaacccagatgaatcgtcaaggtccagacattggtgaacagtacatgtcagttattttttataattctgatgaagaaaaaagaatatcagaaagtaaaattgatgagattaataactcaggtgagcatcaaaataaagtagttacagaattaagagagaatgctaaattttggccagctgaagaataccaccaagacttcatagaaaaaaatggtaaagtttgctatcaccaactttacgtacaacacaaatcctaaa

SEQ ID NO: 224194 - DNA, 360 bp, Unknown
  Bacterial polypeptide expressing nucleotide sequence isolated from the Sargasso Sea
tatggattttgcaattttaggagcaggatgtttttggtgtattgaggctattttccttaatgtgcccggtgtggtggccgttgaggctggatatactggtggagatactaaaaaccctacatatgaatcggtatgcagtggaaagacagggcatgcagaggtatgtcgtatagattacgatcctaaaatcattacatttgaacaggttcttgatgtattttgggaagtgcatgaccctactacattgaatcgtcaaggagctgatattggtacccaatatcgttctgcaatttactataacagcttggatcaaaaaaatattgctgaagaatctaaaaaaaaatatgctgatagctttga

SEQ ID NO: 224195 - DNA, 496 bp, Unknown
  Bacterial polypeptide expressing nucleotide sequence isolated from the Sargasso Sea
aatggaaatagcaattttagctggaggttgtttttggggtatggaagatttgatgagaaagcttcccggtgtacagaaaacgcgtgttggttacacgggtggccacttaaaaaacccaacttacaaagatgtttgcacaaaaacaactggccatgcagaagcaattgaaatcctttttgacccatcgatcgtctcatatcgccgtctgttggaatgtttttttcaaatccatgatcccacaaccattgataggcaaggaaacgatattggggatagttataggtcacatatttttactacttcgtcagagcaacgtgaagaagcttttaaaatgatttccgatatcgaaagttcaaaaaaatggccaggtagaattgttacgaaagtaactcctgcggaagagttttgggaagctgagtcttatcaccaagattacttagttaaaaatccaaatggctatacttgtcatttcccaagagttgattggactatttga

SEQ ID NO: 224196 - DNA, 410 bp, Unknown
  Bacterial polypeptide expressing nucleotide sequence isolated from the Sargasso Sea
aactgaatatcaaggtatcccgggtattatttctacagaatgcgggtattgtggtggaaaaagttcaaaggtaacttatgaacaagtatgtggtggtcatacagaacatatagaagttgttaaagttacatttgatcctaaaataatttcttacgaagatgtaattagattattttttaaaatacatgatccaactactcttaaccgtcaaggtcctaacgttggttatcagtatcgatcagaaattttttatgctactgaagaagaaaaaatatccgccgaaaaaatattggatgaagttaataagaaacttaatggtaaagtagttacgagtattagaaaagaaaagaattattgtaaagcagaagagtatcatcaaaattattttgaaaagcgaagtaaaaaatgac

SEQ ID NO: 224197 - DNA, 397 bp, Unknown
  Bacterial polypeptide expressing nucleotide sequence isolated from the Sargasso Sea
atgaacaaaatagtcaaaactgataaggaatggaaatctcttctcacagaagatgaatattacgtaacaagacaaaaggggacagaacctcctttctctggcaaaaattttgaaattattaatggaggtatttttaaatgtaaatgctgtggtaatgaattatttaatagttcaacaaaatatgattcttattgtgggtggccaagtttttttgaacaaatatcacctgaagcaattaaaacagagactgatagatctcatggaatggtacgtattgaaattatgtgtgccaaatgtgatgctcatctaggtcatgtttttgatgacggtccagagcctactggcaaaagatattgtgtaaattctctttctattaattacgaagaatttgaataat

SEQ ID NO: 224198 - DNA, 340 bp, Unknown
  Bacterial polypeptide expressing nucleotide sequence isolated from the Sargasso Sea
cgaatatgatccgggacagacagactttaggactctgctggactggttctggcgttgccatgatcccacgaccctcaaccggcagggagccgatgtcggaacccaataccgttcggtgatcttctgccatgatgaagaacaattggaacatgcccggacggccaagcaagatttggaaagttccggaatgttcagggaccccgtggtgactgaaatcagcatgatccccgaattctatcctgcggaggattatcaccagaattactaccaggaaaattccggggcaggctattgccaatttgtcatccgcccgaagatgcagaaacttggttttgagtag

SEQ ID NO: 224199 - DNA, 353 bp, Unknown
  Bacterial polypeptide expressing nucleotide sequence isolated from the Sargasso Sea
aatggaaatagcagttttagcattaggatgtttttgggggcgagaaattaaatttagtaaaattgatggaattattaaaattgaagttggatattgtgggggtaataaatttaaaataatttataaagaagtttgtagcggaaatacaaatcatgctgaggttgttaaacttgattttgatgaaaaaattataacctacgaaaaaattcttaaaatcttttttcaaattcacgacccaactactctaaattctcaaggtgcagattttggaactcagtataggagtgaaatattttatctaaataacaaacaaaaaaaaacagccgaaaaagtattaaaagatataaatgaaa

SEQ ID NO: 224200 - DNA, 574 bp, Unknown
  Bacterial polypeptide expressing nucleotide sequence isolated from the Sargasso Sea
atgaaaaaaatattcttaattttattttttattattctttcacaaaatttatatgcttcaaataataaaaaggtttatttcgccggaggatgcttttggtgtatggaagagtcattcgataaagtcgatggagtgattgaaactatttctgggtattctggtggacatataaaaaatcctaaatatagagatgttgtgaagaatactactggacactatgaaactttagaaattacgtacgattcgtcaattacaaactttcaaaaacttttagaaatttattggataaatattgatccttttgatgcaaacggtcaattttgtgataaaggtgaaagctataagtcggtagttttttttgaaaatagtgatcaaaaaaaaattatagaaacttcaattaaaaatattgaaatgaagtttaataaaaaagttgttacttacgtaaaagaattcaaagaattttatatggcagagacttaccatcaggattattatgaaaaaaattttataagatacttaatgtataaaaaaggttgccaaagagaggaaacattgagcaaaatttggggatgaa

SEQ ID NO: 224201 - DNA, 478 bp, Unknown
  Bacterial polypeptide expressing nucleotide sequence isolated from the Sargasso Sea
tatgacaaaagtagatgtaattgatactccattttggtgttccgcaacaccagaggaaagggccgaagcgataagcaagctaactgatgaacaaaaggctgttgccctcaatgatggcacagagagaccttttgcaaatgagtattgggacagcaaagagaaaggtatttacgtagatattatctctggagagccactattctcatctttagataagtttgactcaggcacagggtggccaagctttgatcgcccaatcaatggaacagagatagtcgaaattgttgataaatcacttggcatgacgagaactgaagttagaagtgaatacggcgatgctcatttaggccatttatttaatgatgggccaacagaaactggccttagatattgcattaattctgcttcattaaaatttatacctgtagatgaactagatgaaaatggttacggtgtttttgtcaaactttttaattag

SEQ ID NO: 224202 - DNA, 397 bp, Unknown
  Bacterial polypeptide expressing nucleotide sequence isolated from the Sargasso Sea
atggaaattgcaataatagcttgtggatgtttctggggaccagaaataaaattcagtaaactcgaaggagtacttaaaacagaggttggttattgtggtggaaataatgaaaaaacatcatatgaggaagtttgttcaggtacaacaaatcatgcggaagttgtcaaaattgaatttgatccagagattataacatatgaaaatatattgaacttcttttttgatattcatgatccaacgactttaaatgcacaaggtccagatattggaactcaatataggagtgagattttttatattaatgaaaaacaaaagagtattgctgataaagttttaagtgaaaaaaatataaaattctctggaaaaagtgtaactaaaatatctccaattaaaaatt

SEQ ID NO: 224203 - DNA, 376 bp, Unknown
  Bacterial polypeptide expressing nucleotide sequence isolated from the Sargasso Sea
tatgagcaaaaaaaatctagatcatttatctgaagagcagcgttatgtaactcaagaaaagggaactgaggcaccttttacaggtgaattattgcataacaaagagagtggcacttatcagtgtgtatgttgcggtgctgatctgtttagctcagataaaaaatttgattcaggaactggatggccaagtttttatgatgtgatgagttctaccgcggttaaagttgaggtcgatcacagtcatggtatggtgagacaagaagtcttatgtggaagctgtaatgcacatttaggccatgtttttaatgatggaccagatccaactggacttcgttactgcattaattctctgtctctggaatttgagaaagattaa

SEQ ID NO: 224204 - DNA, 964 bp, Unknown
  Bacterial polypeptide expressing nucleotide sequence isolated from the Sargasso Sea
agcagaaaaaggctatgaatctctactaggggtagaggaagcaatctctggatattcagatggaagaggggttaggcctgtttatagagagattattaaattcaaaaataaatttaacccaaataatcatgcagaagtagtaaaggttatttttaacaaaaacttaattagtacggagcagataatcaaaaagtattttgaaagccatgatcctacccaacttaatagacaaggaaatgacatagggactcagtataggtctattattctagttagaaatgatgaacaaaaacagatagcagaaaacttattgtctaaatttcaaagtcttttatctctagaaggttatggagaaataaagacagagattaagacattagaaaaattttatgaagctgaagaatatcaccaagactatttagttaaaaaccccaatggatactgtcctgatttatctactggggtggtttttgaagataaaaataaccaattagaaataaataataatgatctttatgcaggtaagcacattctagtaatagagtcagagttttgtccttattgtaaaaaactaagagaagatgttttagattcttataagggatcaattcctctctcatatagaaaagctaatcaattagaaggtctaaaaatttcaactcctctttgggctactccaaccattatctttttggagaatggaaaagaaattttaagcaatcaaggttatcttacaaaaattgaattttatagagccctaggtttctttaaattaggaaacagtgaagcatttaatgtagcttttaatgaaggaacagattcaaggtattgtaaggaatatgagttatttaaaaatactcctgaaggccaatttatagataaattaagtggtgaacccctctttgatactaaggatcgatttaattcaaaaaccggatggctctcttttactagacccataaaa

SEQ ID NO: 224205 - DNA, 376 bp, Unknown
  Bacterial polypeptide expressing nucleotide sequence isolated from the Sargasso Sea
aatgactacaataaaaagaaataaactaacagatgaccaatatgctgtagcaagagaaggggcaacagagccaccatttagtggagcctataattatgaaaaaagaaaaggttcttatctttgtgtgacatgtgatcaaaaattatttgactcagaaactaaatatgagagtgggtcaggttggcctgccttttatgctccatttgatgaagcaaacattgttaatgttcaagatacatcacatggaatgattagaactgaggtaaagtgtagtaaatgtgactcgcatttaggtcatgtttttcctgatggccctgaacctactggattaaggtattgtattaattctattgttttgaattttgtagaagaataa

SEQ ID NO: 224206 - DNA, 445 bp, Unknown
  Bacterial polypeptide expressing nucleotide sequence isolated from the Sargasso Sea
atggaaatagcagttttagcacttggatgtttttggggacctgaaatcaaattcagcaaaattaatggtgttatcaaaactgaagttggctattgtggtggtaatagttcacaaaccacctataaagaagtttgtacaggaagtacaaatcatgctgaagttgttaaaattgattttgatgagaaggtaattacttatgaagaaattttaaaaattttttttgaaattcatgacccaactacacttaattctcaaggaccagattttggtacacaatatagaagtgaaatcttttatttgaatgacaatcaaaaaaaaattgcagaagatgttttagaccatgttaataaaaagttatcagggaaagttgtaacaaaaatttccctactaaaaaactattgtattgctgaggaatatcatcaaaaatatttagaaaagagataat

SEQ ID NO: 224207 - DNA, 256 bp, Unknown
  Bacterial polypeptide expressing nucleotide sequence isolated from the Sargasso Sea
atgaaaaatattttactttttgtcactatactcttaattaaccaaaattcttacgccttagaaaaaaaagcttattttgctggcggttgtttttggtgtatggaagagtcatttgatcaagtagagggagtactttcatcaatttctggatactcaggaggtcacttaaaaaacccttcttatcaagatgtaatatataaagatactggtcatgtggaggctatagaaaacgcatatgatccaaaatattgttagc

SEQ ID NO: 224208 - DNA, 406 bp, Unknown
  Bacterial polypeptide expressing nucleotide sequence isolated from the Sargasso Sea
atgaataaatctaaaaattatccaatagttaaatccgaatctgaatggtataatgaactcagtgatgaagaatttagagttttaagaaaaaaaggtaccgaaattccatttacaggaaaatataacaatcactttgataaaggtatatatagatgtagagcttgtgatgctccactgtacgattcagaatcaaaattcgagagtggctgtggttggcctagttatgataaagctcttccaggagcattagaatttattaaagacaattctcacggtatgattcgaacagaaattgtttgtgccaaatgtggcggacatcaaggacatgtttttaatgacggtccttcttctactggcgaacgctattgtgtaaattctgtaagtattcgctttgatagtgagtaaa

SEQ ID NO: 224209 - DNA, 415 bp, Unknown
  Bacterial polypeptide expressing nucleotide sequence isolated from the Sargasso Sea
atgttttttatagatagatctaaaaaaatcctaatggtgaatgagcaagattctctccccgggagaattgatgaaatgcagtttaatgaaagtcattttgtaaataactcatcaatgaaaggaccctttcctgaaggtatgtctgaaatatttcttgggatgggctgcttctggggagctgagagacttttttggaatatagaaggagtttatgttacttcggttggttatgcaggaggctttacgcctaaccctctttatgaggaagtttgtagtggcctaaccggacacactgaggttgtgcatgtggtgtttgatcccaaaactatctccttgcaagaaatacttaagattttttgggagggtcatgaccctactcaagggatgagacaaggcaatgacatgggaacgcaat

SEQ ID NO: 224210 - DNA, 553 bp, Unknown
  Bacterial polypeptide expressing nucleotide sequence isolated from the Sargasso Sea
atgaaaacagtaaaagttttattattactattatttgtttcatgtacagcaatagaaagcgtagaaatagtggaaagtaaatatcaaaaagcttattttgcaggcggttgtttttggtgtatggaacctccgtttgaagctcttgaaggagtagttgaagcaacctcgggatatatgggtggtagtgtagaaaatcctacttatgaagaagtaacaactggggagacaggccatgcggaagttgtagaaatcttgtttaatccagaagtagtcacatatgaagaattgctagaagtattttggagaaacatagatcctactgcattaaattatcaatttgcagatgttggttcacaatacagaactgaaatttttactgttggtgaagaacaaaaaagcttagctgagaaatcaaaagttgaactagatgaatcaggaaaatttaacaaaccaatcgtaactgcaatctcagttgctccagagttctacatcgctgaagactaccatcaaaatttttacaaaaaacaaagcatgcgttataaaatgtacgctc

SEQ ID NO: 224211 - DNA, 530 bp, Unknown
  Bacterial polypeptide expressing nucleotide sequence isolated from the Sargasso Sea
ttaccgcttcaggtgcggacgtgacaaacggcttgaagaactttggggtgataagaaggataaattaaataatataaagcaaacttccagctatgacttaccttcagtggaagaactaacgacaaaactcacacctctacagtttgacgtgacacagaaggatgctacagaaccgcctttcaggaacaaatattggaacaataaaagtgaaggcatatatgtggatgttgtttcaggtgaaccactattcagttcaacggacaaatataaatctggaactggttggccaagtttcacaaaaccacttgaagcagaaaacgtagttatgaaagaagacagaagcttatttatggtaagaactgagattagaagcaagcatgctgattcccaccttggacacctcttcaatgacggtccaggaccgcttggattaaggtactgtattaattccgccgcacttaagtttattcccaaaaatgatttggaacgagaaggataccagatttaccaggggttatttcctaaatgat

SEQ ID NO: 224212 - DNA, 541 bp, Unknown
  Bacterial polypeptide expressing nucleotide sequence isolated from the Sargasso Sea
atgaaaaagtttcttactgtttttactgtctttataagtattcttttattttcttctgaaaatgactctacaaaccatatagagaaaatcgtactaggttctggttgcttttggggggcggagaaaggctatgaggcgctagatggagtcatagatgctgtatctggttacgctgatggagaaggcgtaagaccaacttatagagacattacaaaattctccaataaattcaacccaaataatcatgctgaggttgtagaggttacctacaacaaaaatttgataaaacttgaagaattgataattcattatttggaatctcatgatcccactcagctaaataggcagggtaatgacataggaactcaatatagatcaatagttttgtattcagataaggcacagcacagcaaaatcttggaattaattgcggaatatcaaatattgctaaaagatggtggatacggtgatattcaaactatcgtaaagcctttatcgcagttctttgttgcagaaaaattatcatcaaggattacataaa

SEQ ID NO: 224213 - DNA, 376 bp, Unknown
  Bacterial polypeptide expressing nucleotide sequence isolated from the Sargasso Sea
tatgaagataaaaaaattaacacccgaacaatataatatttgtagagaaaaaggaaccgaagcagctttcagcggcaaatattggaatttaaaagataagggggtttatagttgtatttgctgtgatacaaatcttttttcatctgacacaaaatttgattctggaacagggtggcctagttttttttctcctattaaaaaaattaatattaaagaagtaactgatttatcacatggtatggataggacagaagtcatatgttcaaagtgtgatgcacatttaggacacgttttttctgatggtcctaaaccaacaggacttcgttattgtattaattcggcttcattaaattttaaaaaaactgatgaaaaataa

SEQ ID NO: 224214 - DNA, 88 bp, Unknown
  Bacterial polypeptide expressing nucleotide sequence isolated from the Sargasso Sea
tttggcagaagaataccaccagcaatacctagccaaaaatcctaatggatattgtgggctaggcggaactggttgtaccctagattaa

SEQ ID NO: 224215 - DNA, 454 bp, Unknown
  Bacterial polypeptide expressing nucleotide sequence isolated from the Sargasso Sea
aatggaaatagcagttttatcatgtgggtgtttttggggtccggaaataaaatttaacaaactaaaaggcgtgataaagacagaagttggatattgcggaggaatttctaaaaatacaagctatgaagaagtatgcaaaggaaacacgaatcatgccgaagttgttaaaattgaatttgataataatttaataaattatgagagtatcctagattatttttttgaaattcataacccaaccactttgaatcgacaaggaccagatatagggacgcaatatagaagtgaaatattttttttgaatgataaacaaaaaaaaattgctaaaaaaattctagaaaaaaataatgaaaaatttaaagggaaaattgtaactaaaatatcagaaattaaaaattatataactgcagaagagtaccatcaaaaatatttggaaaaaaaattcgataaatga

SEQ ID NO: 224216 - DNA, 403 bp, Unknown
  Bacterial polypeptide expressing nucleotide sequence isolated from the Sargasso Sea
atgacagaaaaaaataatgaaaagccacaggaagaacttagcccagaagaatattacgtaacccaaaaaaaaggaactgaacctgctttttcagggaaatatgatggagagaaaacacctggagtttacaattgtgttgtttgtggagcgccattatttagctctaaagctaaatatgattctggatcaggctggcccagcttttgggagccaattaagcaagaaaatataggttcagaggtagatcattctgctggaatgacacgtaccgaagttcattgttataattgcaaagctcatttagggcatgtatttcctgacggacctcagcctacagggttaagatattgtattaattcagtctcgcttaatttaaaaccagatgatgaggttgaagactgaa

SEQ ID NO: 224217 - DNA, 574 bp, Unknown
  Bacterial polypeptide expressing nucleotide sequence isolated from the Sargasso Sea
aatgaaaaaatattttattattattttagtattaataaatggttctttcgctgatgctcaagactttaaaaaagtatactttgctggcggatgtttttggtgcatggaggagtcatttgatcaaattaatggagttatttctacaatttcaggctattctggtggaaaattaaaaaacccaacttaccaagatgttatttataaagacaccggccatgtagaagctattgaagtaatatacgacccaaaaatagttaattttgaaaaacttttagatatttattggaaaaatattgacccttttgattctgcaggacaattttgcgacaaaggaaaaagttacagatcagtaattttttttcaaacacaaccagaaaaagaattaattgataaatcctttaaaaaattggaaaaactatttaacaataaaattgtaactttagtttggaaattcgataaattttatcctgccgaagattatcaccaagattattatgaaaaaaactttattagatacctcatgtataaaaaggggtgtaaaagagaagagaccttgaaaaaaatatggaattga

SEQ ID NO: 224218 - DNA, 496 bp, Unknown
  Bacterial polypeptide expressing nucleotide sequence isolated from the Sargasso Sea
atgatttcaaagttaatactaggcgcaggttgtttttggggagtagaagttctttttgaagaaatgtctggcgttaaaaaagtaatttcagggtatgccggcgggcatacagaaaaccctacatacgaagaggtctgtacaggtaagtcaggacacattgaagttgttgagattgagtatgataatagtgaagtaaagtttgaggaattgttagacaagtttttctttattcatgatccaactcagatgaatcgtcaaggtccagacattggtgaacaatacaaatcagttattttttgtaattctgatgaagaaagaagaatatcggaaagcaaaattgatgagattaataactcaggcgaacatcaaaacgaagtagttacagaattaagagagaatgctaaattttggcctgctgaagaataccaccaagacttcatagaaaaaaatggtaaagtttgctatcaccaactttacgtacaacacaaatcctaaa

SEQ ID NO: 224219 - DNA, 268 bp, Unknown
  Bacterial polypeptide expressing nucleotide sequence isolated from the Sargasso Sea
tactcaaggcatgaggcagggaaatgatataggtactcaatatcgctcagtatgctactgcgataatgatgactctattaagataattaaagaaagccgagaacaatatcaaattgcgcttgaagaaatgggcattggtgctatcacaacagaaattaaaactaagcagccatatttttttgctgaagagtaccatcaacaatatttggacaaaaatccaaatggttattgcggtataggcgggacaggctgcgaattcaaaatataa

SEQ ID NO: 224220 - DNA, 451 bp, Unknown
  Bacterial polypeptide expressing nucleotide sequence isolated from the Sargasso Sea
atgttacattatatttttaacagaaatattaactttgattcttacgatggatctgaagtagcgatgtttggtatgggctgtttttggggtgctgaaaaaaaattttgggagcttcctggagttcaacttactgccgtagggtatgctggaggtaatacaaaaaacccctcctatcaggaggtttgttccggaactacgggtcataatgaagttgtgaaaatagtttttaatcaaaatgttatcagttacgatgatgtaatcagggtgttttgggaaaatcacaatcctactcagggaaataggcaagggaatgatattggtactcaatatagaagtggggcatattttttctgtgataaacaaaaacattcaatccttaactcaatgaagagttatgaaggggaacttttgaaatatggctttggaaagataactacagaggtctcaaaag

SEQ ID NO: 224221 - DNA, 427 bp, Unknown
  Bacterial polypeptide expressing nucleotide sequence isolated from the Sargasso Sea
atggctaaagcaatttttgctgggggatgtttctggggaatggaagaattaattcgaatgcgccctggcgttctaagcacccgcgttggatacacagggggacatgccagtaacccgacgtaccaaatggtttgtacaaaaacaacagggcatgcagaagcgatagaagtagagtacgacaataaagttacttcataccgagatctgctagagttctttttccagatacatgatcctactactttagatcgtcaggggaatgatattggcgattcttataggtcagaaatatttgttctcagcaatgaacaagaagttgatgcccttgaaataatttcggagattaacgaaagtgggcgttggccagaaagagtggttaccaaggtttcaaaagctactgattttgggaagcagagcccgagcatca

SEQ ID NO: 224222 - DNA, 247 bp, Unknown
  Bacterial polypeptide expressing nucleotide sequence isolated from the Sargasso Sea
tatgagtgaaggttatgaaaaagcctattttgcgggaggctgtttttggtgcatggagccaccttttgaagacttggatggtgtaattgaagccacttcgggatatatgggcggaactgtggaaaatccaacatatgaagaagtaactactggaacaacaggtcacgcagaagttgttgaagtactttatgatcctgaaatagtaagttatgaggagttattagaagtttttttggagaaatattga

SEQ ID NO: 224223 - DNA, 463 bp, Unknown
  Bacterial polypeptide expressing nucleotide sequence isolated from the Sargasso Sea
tatggaaaaagctttatttggcgctggttgtttttggggtgtggaagaaacatttagtaagttagaaggtgtaaaaaatacagaagtcggctatgcgggaggtagtatttctaaccctacgtacgaagctgtttgtgcaggtgatacaaatcatgccgaagttgttttagttgaatatgatgaaaatgtaatatcatacaataatttaattgaacatttttggaaatgtcacgatccgacaacacttaatagacagggtcctgatataggtactcagtacagatcagtaatattttattttaatcagtctcaaaaagaaatttcaaatgaatctaaaactcaatatggcaaaagatatcaattaaacatcgtaactgagataagtgaggctaagatgtattataaagctgaagaatatcatcaaaaatatattcaaaaaaccggcttgtattgcgcaagctaa

SEQ ID NO: 224224 - DNA, 403 bp, Unknown
  Bacterial polypeptide expressing nucleotide sequence isolated from the Sargasso Sea
aatgtcggatttaaataatgatgagcaatacagggataagttaacgcctttacagtttgaagtgactcgtaacaaggctacggaacatgcatttaccggagagtattggaatacatctgatgaaggaacataccattgtatatgttgcggcgctgaattatttacttctgaatccaaattcgactctatgtgtggttggcctagttttgataaacctctaaatgatgaccagattgtagaagaactagatacatcgttaggtatggaaagaacagaagtgacatgcgactcttgtggggctcacctcgggcacgtttttccagatggtccacccgaaactactggtttaagatattgtattaattctgcttcgatagatcttaaaaagacaaaggataattag

SEQ ID NO: 224225 - DNA, 316 bp, Unknown
  Bacterial polypeptide expressing nucleotide sequence isolated from the Sargasso Sea
cctaaatgtattctggcaggcacacgacccgacaacacttaataggcagggtggtgacgtcggcacacagtacagatctgtgatcttctaccacaatgaaaaacaaaaatcacttgcaatagaatcaataaaaaaggcagatgcttctgggtactggtcaaataaaattgtaacagaggttaccgagcttcttaactattcagatgccgaggactaccacaataattattatgataataatccaaatcaaccttattgtctatttgtaattaaaccaaaacttgataaactagaaaagaaaggtataattaaatga

SEQ ID NO: 224226 - DNA, 357 bp, Unknown
  Bacterial polypeptide expressing nucleotide sequence isolated from the Sargasso Sea
gtgactttgatgataaaataatttcattagaattaattttggaaattttttttgtagctcatgaccctactcaaaaaaacaggcagggaaatgatataggaacacaatacaggtcagctattttttatactaatgtagaacaaaaaaaaaaagcggatgaagctataaaaagagcagaaaaaacttaccaaaatacaattcaaacagaactatctgataaacttaacttttttgtagcagaggagtatcatcataactattttttaaaaaatcccaatagtatttattgtaatgctttaatacctcctaagcttaaaacactgcaaacaaaatatccatatatttttaaaaactgag

SEQ ID NO: 224227 - DNA, 463 bp, Unknown
  Bacterial polypeptide expressing nucleotide sequence isolated from the Sargasso Sea
atggaaaaagctttatttggagcagggtgcttttggggtgtggaagaaacatttagaaaaatagcaggtgttattaaaactcaagttggttactctgggggaaacacccttgatccaacatatgaatcagtatgtaaaggagatacaaatcatgctgaggttataaaaattgaattcgataataaaaaaatatcttttgaagagttacttaatattttttggaaatgtcatgatccaacaactttaaatcgacaaggtcctgatattggaactcaatacaggtcagttattttttattatgatagtagacaaaaggaaattgcttcaaaatcaaaaaatgaatattctaaaattaataatttaaaaatcgtaactgaaattcaaaaagctaatgatttttttatagctgaagaatatcatcaaaaatatattcaaaaaactggtttgcactgtaatatttagt

SEQ ID NO: 224228 - DNA, 391 bp, Unknown
  Bacterial polypeptide expressing nucleotide sequence isolated from the Sargasso Sea
atgactaatgaaaaaaatttaaaagataaacttactcctgaagagtattacgttactcagaaccatggtactgaacctgcctttagcggaaagtatgatggcgttaagacgcctggaaaatatcactgtatcgtctgtggagtagagttatttagctcagaatcaaaatatgattctggttcaggatggccaagtttttgggagccttctcaggaagaaaatattgaaacagaacaggatcattcagcaggaatggtcagaacggaagttcactgcagtaaatgtgaagatcatcttggtcatgttttcccagatggacctcagccaacaggactaaggtattgtattaattctgtttccttagatttaaaacctactgaagaggaatagg

SEQ ID NO: 224229 - DNA, 448 bp, Unknown
  Bacterial polypeptide expressing nucleotide sequence isolated from the Sargasso Sea
atggaaattgcaataatagcttgtggatgtttctggggaccagaaataaaattcagtaaactcgaaggagtacttaaaacagaggttggttattgtggtggaaataatgaaaaaacatcatatgaggaagtttgttcaggtacaacaaatcatgcggaagttgtcaaaattgaatttgatccagagattataacatatgaaaatatattgaacttcttttttgatattcatgatccaacgactttaaatgcacaaggtccagatattggaactcaatataggagtgagattttttatattaatgaaaaacaaaagagtattgctgataaagttttaagtgaaaaaaatataaaattctctggaaaaattgtaactaaaatatctccaattaaaaattattgtactgcagaaaattatcatcaaaaatatctggaaaaaagattttaat

SEQ ID NO: 224230 - DNA, 448 bp, Unknown
  Bacterial polypeptide expressing nucleotide sequence isolated from the Sargasso Sea
atggaaatagcgatattagctttgggatgtttttggggaccagaagaaaaattttctagagtagaaggcgtattaaatacagaagttgggtattgtggtggagatagcaatccgaccacttatgaagaagtatgtactggatctactaatcatgctgaagtagtcaaaatagagtttgatgaaaaaattattacttacggtaatctattaaaaaaattttttgaaatgcacgatccaactacattaaatagacaaggtcctgatataggaacgcaatatagaagtgaaattttttttactaatgataatcaaaaaataattgctgaggatattaaatctagattaaatgaaaaatttaatggaaaaataacaactaatatttctaaacagaaaaattactgcaaggcagaagattatcatcaaaaatatattcaaaaaagaaattaat

SEQ ID NO: 224231 - DNA, 871 bp, Unknown
  Bacterial polypeptide expressing nucleotide sequence isolated from the Sargasso Sea
gatgaaaaagtttcttactacttttactatcttcgtaagtatacttgtattttcttctcaaaatgaatctacaagccatatagagaaaatcgtactaggttctggttgcttttggggggcagagaaaggttatgaagcactagaaggtgttttggatgctgtgtctggttatgctgatggtgaaggggtaagaccaacttatagagagattacaaagttctctaataaatttaatccaaataatcatgctgaggttgtagaggttacctacaacaaaaacttgatcacacttgaagaattaataattcattatttggaatctcatgatcccactcagctaaacaggcagggtaatgacataggaactcaatatagatcaatagttttgtattcagatgaggcgcagcagagcaaaatcttggaattaatggcggaatatcaaacattgcttagagaaggtggatacggagacattcaaacaatcgtaaaacctctatcacagttctttgttgcagaaaattttcatcaagactatataaagaagaatccgaatggttattgtccagatcattcaactggtattaagtttgccaggaatgattatgaatccaaaaaagacaacaatcttttaaagattgggaagagtatagtcgtcattgaacctgaaggtttttgcccatattgccaaaaatttcgtgaagatgtttctaatgaatatgcagggacgatacccttagtttacagagatgcatctaacttagagggtttggctataaagactccaacatgggctacgcccaccatactatttttagagagaggttctgaagttttcggacatcagggttacttatctcccaaagaattttat

SEQ ID NO: 224232 - DNA, 401 bp, Unknown
  Bacterial polypeptide expressing nucleotide sequence isolated from the Sargasso Sea
aatggaaatagcagttttagcattaggttgtttttggggaccagaaaaaaaatttggtgaaatagaaggtattgttgaaacagaagtggggtattgtggaggaaaaatgtctaacacaagttacaaagaagtatgtacaggagaaacagagcatgctgaagttgttaaattaaccttcgatcccaaaaaaatatcttatgagcaaataattgaatatttttttaagtttcatgatccaacaactttaaatagacaaggtccagatataggaactcaatatagaagtgaaatattttataaagatgatgaacaaaaaaatatttcgttatcaaagataaaaacattgaataataaatttgactcaaaaattactacaaaggtttccgaaattaaaaattata

SEQ ID NO: 224233 - DNA, 520 bp, Unknown
  Bacterial polypeptide expressing nucleotide sequence isolated from the Sargasso Sea
tatgttatcatctttaatagtaggtgcagggtgcttttggggcgttgaagttttatttgagcaaatgcctggtgttatcaatgcaacctcaggctattctggtggtcatttagataatcctagatatgaggatgttttaactagtgagacaggtcacgttgaagtggtcaagattgattatgatagcagtgaagttacttttaatgaattgattgatacattttttatcattcatgatcccacaacgttaaatcgtcaaggacctgatattggcgaacaatataaatctatacttttttacaacagcgaagatgaaaaaaaaattattgagagtaaaattgaaaaaattgatttatcaggcaagtttgaaaacccaatagttacagaaattagagaaactgcagagttttatcctgcagaagagtaccatcaagattatgcagtgaaaacaggcaagttatgctaccagcaactttatgttatgtataattattcgccaataccggctgcaacaccataa

SEQ ID NO: 224234 - DNA, 520 bp, Unknown
  Bacterial polypeptide expressing nucleotide sequence isolated from the Sargasso Sea
atgttatcatctttaatagtaggtgcagggtgcttttggggcgttgaagttttatatgaacaaatgcctggtgttatcaatgcaacttcaggttattctggtggtcatttagataatccaagatatgaagatgtgttaactggtgagacaggtcacattgaagtagttaagattgattatgatagcagtgaagttacttttaatgagttgattgatacattttttataattcatgatccaacaaccttaaatcgtcaaggtcctgatattggagagcaatataaatctatacttttttacaatagcgaagatgaaaaagaaattattgagagtagaattgaaaaaattgatttatcaggcaagtttgaaaacccaatagttacagaaattagagaaactacagaattttatcctgctgaagagtaccatcaagattatgcagcgaaaacaggcaagctatgctaccagcaactttatgttatgtataattattcgccaataccagctgcaacaccataac

SEQ ID NO: 224235 - DNA, 376 bp, Unknown
  Bacterial polypeptide expressing nucleotide sequence isolated from the Sargasso Sea
atgaacaaaaaaaatctagatcatttatctgaagagcagcgttatgtgacccaagaaaagggaactgaggcaccttttacaggtgaattattgcataacaaagagagtggaacttatcagtgtatatgttgcggcgctgatctgtttagctcagatacaaaatttgattcaggaactggatggccaagcttttatgatgtgatgagttctactgcggttaaagttgaggtcgatcacagtcatggtatggtgagacaagaagtcttatgtggaagctgtaatgcacatttaggccatgtttttaatgatggaccagatccaacgggacttcgttactgcattaattctctgtctctggaatttgagaaagattaac

SEQ ID NO: 224236 - DNA, 295 bp, Unknown
  Bacterial polypeptide expressing nucleotide sequence isolated from the Sargasso Sea
ttcgttctatgaagatggaacttataaatgtaaaaactgtggccaagaactatttaaatctgaaacaaaatataatgcaggttgtgggtggccaagcttttttgaagccgtaaatgaaaaggctataatttaccgagaagatcactctatttttggtcgtcccagaactgagatattatgttcgaattgtgagggccatcttgggcatgtatttgatgatggcccagtagataaaactggtttaaggtattgtgttaattcgatatctttagactttgattcagagaataagtaa

SEQ ID NO: 224237 - DNA, 501 bp, Unknown
  Bacterial polypeptide expressing nucleotide sequence isolated from the Sargasso Sea
tatgaagaagacaaataaatttttaatatatttcttaattacatttgtaataaatgtttcatccaatcaaacaaatcatatacaaacaatatatttaggctctggatgtttttggggagcagagaagggttacgaagctctagatggggtaattgatgcagaatctggatatgcaaatggttatggaataaaacccaactatcgatcaattattcaatttaagaataaatataaagaaaataatttcgctgaagttgtgaaagttacttttaatagcaatgcgattaagcttcatgaaattttaaaacatttctttgaaacacatgatccaactcaactcaatagacaaggtaatgatataggaactcaatataggtccacgattctatttttagatgaaaatcaaaaaaaggttgcgcttgagataacaaagcaatatcaaaagcttctttatgctggtggttatggcaaagttaaaactaaaatagagccattagataa

SEQ ID NO: 224238 - DNA, 370 bp, Unknown
  Bacterial polypeptide expressing nucleotide sequence isolated from the Sargasso Sea
aatggaaatagcagtattagctcttggatgtttttggggacctgaaataaaatttagtaaaattgaaggcatcattaaaactgaagtcggatattgtgggggtaatagtccaagaacaacctataaagaagtctgcactggcaatactaatcatgctgaagttgtaaaacttgattttgacgaaaaagttatttcttatgaaagaattttaaaaattttctttcaaattcatgatcctactacacttaactctcaaggacctgattttggaacccagtatcgaagtgaaatattttatctaaatgataatcaaaagaaaatagctgaaaaagttttaacagaggtaaatgaaagactttcgaaaaagtag

SEQ ID NO: 224239 - DNA, 812 bp, Unknown
  Bacterial polypeptide expressing nucleotide sequence isolated from the Sargasso Sea
tggagttatcaatgcagaatctggctatgcaaatggatatggcataaaaccaaattacagatctataattcagtttaaaaataagtataacgaaaagaattttgcggaagtagtgaaagtaacttttaatagtaatgccatatcccttgaaaatatattaaaacacttttttgagactcatgatcctactcaacataataggcagggcaatgatataggtactcaatatagatcaacaattctttttcaaaatgaatctcagaaagaactcgcagaaaagattatagctgaataccaagctcttctaattgagggaggttatggaaaaattagaaccaagctggagcctttagataacttttatcttgcagaagaatatcatcaggattatttaaaaaagaatcctaacggctattgcccagacctatcaacaggaattgtttttaacgatgaagaaaaaattttcgaagataatgaataccttcttacgggaaagcaaatattagttctagactctcaaaattattgtccttactgtgaaaaatttaaggatgatgtaactaatagctataaaggaagcatccccttgagctatagaacttctgatcagttacatggccttgaaattaaatctcctacctgggctactccatctttaatttttctagaaaatggaaaagagattttttcgtatcagggatacataaatcaaaaagatttttatcaattattgggtaaatttaaattaggaaattcagaggcatataacgtcgcatttaacaaaggaactgatgcacgcttttgcaaaagaa

SEQ ID NO: 224240 - DNA, 336 bp, Unknown
  Bacterial polypeptide expressing nucleotide sequence isolated from the Sargasso Sea
aatggaaatagcagttttagcacttggatgtttttggggacccgaaataaaatttagtaaaattgagggtattattaaaactgaggttggatattgtggtggcaacagtaatactacaacttataaagaagtttgtactggtagtactaatcatgctgaagttgtaaaacttgattttgatgaaaaaataataacttatgaaaaaattctaaaaattttttttcaaattcatgatcccactacattaaattcacaagggccagattttggaactcaatatagaagtgaaatattttatcttaacgatattcaaaaggtaacagctgaaaaagtatt

SEQ ID NO: 224241 - DNA, 395 bp, Unknown
  Bacterial polypeptide expressing nucleotide sequence isolated from the Sargasso Sea
aatggataccaaaaaaaagaaagagattagtttatctgatgaagagtggcaaaaaaagttaacccctgaagaataccacattcttagagaaaaaggaactgagagaccgttcacaggtaaatatgataaattctacgaagatggaatatataaatgtgctggttgtgatactgagctttttacatcgggaacaaaatataattcaggttgcggctggcctgcattttatgaatctttaccaggaaagatagaggagtccgccgataacagttttggtatgaccagaattgaaataacatgtgaaaaatgtggtggccacttagggcacgtttttaatgatggtcctcaacctacaggtctgcgttattgtgtaaactctgcttcgcttgattttg

SEQ ID NO: 224242 - DNA, 372 bp, Unknown
  Bacterial polypeptide expressing nucleotide sequence isolated from the Sargasso Sea
cagaagttggatactgtggaggaaaaatgccaaacgttacttataaagaagtatgctcaggtgaaactggtcatgctgaagttgttaaattaacttttgactcaaaaaaaatatcctatgaaaaaatattagaatattttttcgaatttcatgatcctacaactttaaatagacaaggtcctgatattggaactcaataccgaagtgaaatattttataataatgatgagcaaaaaaaaatatcatactctattttagataagttaaataaaaaatttaattcaaaaattgtaacaaaagtttctgaaaatagaaactatacaagagcagaagaatatcatcaggagtatttggaaaaaaatcaattctaat

SEQ ID NO: 224243 - DNA, 487 bp, Unknown
  Bacterial polypeptide expressing nucleotide sequence isolated from the Sargasso Sea
ctgttaagttatggactattttctgaagatgaagagaagattcaagcgaccagccaactagaaagtatcgtccttgggtcaggttgcttctggggggaagaaaaacgttacgaatctattcctggagtggttagcgctatatcaggctatgctgatggtaagggtgttaaaccaacctatagagaaataacaaaacctaaaaatagatttaatccaaataaccacgcagaagtagtgcttgtggtattcgatagaaatattgtgtcagtagaagaaatcttaaaggattactttgaagggcatgaccctacacaattcaatcgtcaaggtaatgatattggcactcaatatcgttcagtaattctgacaattaatgacgaacaaagaaagacagcaaaaaggttattagatgaatttcaagttcttatgaatgctaatggttacggcaggattcaaactaaaattaaaccgttaacagaattccatt

SEQ ID NO: 224244 - DNA, 406 bp, Unknown
  Bacterial polypeptide expressing nucleotide sequence isolated from the Sargasso Sea
gaaattaaatttgataagttaaatggtgtaataaattctgaagttggatattgtggtggtaattcagcttccacaagttatgaagaggtgtgtgctggcaatactaatcatgctgaagttgtaaaaatagaatataataataataaaatatcttataaagatattttaaactatttttttgaaatacatgatccaactactctaaatagacaagggccggacatcggaacacagtatagaagtgaaatattttttttaaatactgaacaagaagatgctgctaaaataactctaaaaaaatataatgaaaaatttaaaggtaaaataactacaaaaatttctcctgtgaagaattattgtagggctgaagaatatcatcaaaaatatttggaaaaaaaattttaat

SEQ ID NO: 224245 - DNA, 839 bp, Unknown
  Bacterial polypeptide expressing nucleotide sequence isolated from the Sargasso Sea
cttttggggggctgaaaagggctatgaattaatggatggagttatcaatgcagaatctggctatgcaaatggatatggcataaaaccaaattacagatctataattcagtataaaaataagtataacgaaaagaattttgcggaagtagtgaaagtaacttttaatagtaatgccatatcccttgaaaatatattaaaacacttttttgagactcatgatcctactcaacataataggcagggcaatgatataggtactcaatatagatcaacaattctttttcaaaatgaatctcagaaagaactcgcagaaaggattattgctgaataccaagctcttctaattgagggaggttatggaaaaattagaaccaagctggagcctttagataacttttatcttgcagaagaatatcatcaggattatttaaaaaagaatcctaatggctattgcccagacctatcaacaggaattgtttttaacgatgaagaaaaaattttcgaagataatgaataccttcttacgggaaagcaaatattagttctagactctcaaaattattgtccttactgtgaaaaatttaaggatgatgtaactaatagctataaaggaagcatccccttgagctatagaacttctgatcagttacatggccttgaaattaaatctcctacctgggctactccatctttaatttttctagaaaatggaaaagagattttttcgtatcagggatacataaatcaaaaagatttttatcaattattgggtaaatttaaattaggaaattcagaggcatataacgtcgcatttaacaaaggaactgatgcacgctttt

SEQ ID NO: 224246 - DNA, 286 bp, Unknown
  Bacterial polypeptide expressing nucleotide sequence isolated from the Sargasso Sea
tatgcaaaaatttatagggggcattggctgcttttgggatgaaactgaatatcaaggtgttcctggtattatttctacggaatgtgggtattgtggtggaaaaaatccaaaagtaacttatgaacaagtttgtggtggagatactgaacatatagaagttgttaaagttacatttgatcctaaaataatttcttatgaggaaataactagattattcttcgaaatccatgatccgacaactcttaatcgccagggtcctaatgttggttatcagtatcgatcagaa

SEQ ID NO: 224247 - DNA, 478 bp, Unknown
  Bacterial polypeptide expressing nucleotide sequence isolated from the Sargasso Sea
atgacaaaagtagatgtaattgatactccattttggtgttccgcaacaccagaggaaagggccgaagcgataagcaagctaactgatgaacaaaaggctgttgccctcaatgatggcacagagagaccttttgcaaatgagtattgggatagcaaagagaaaggaatatatgtagatattatctctggagagcccctcttttcatctttagataaatttgactcaggcacaggatggccaagctttgatcgcccaatcaatggaacagaaatcgttgaaatcgttgataaaacacttggtatgacaagaactgaagttagaagtgaatacggcgatgctcatttgggtcatttgtttaatgatgggccaacagaaactggccttagatattgcattaattctgcttcattaaaatttatacccgtagatgaactagatgaaaatggttacggtgtttttgtcaaacttttcaattagc

SEQ ID NO: 224248 - DNA, 508 bp, Unknown
  Bacterial polypeptide expressing nucleotide sequence isolated from the Sargasso Sea
aatgcaaaaagctacgtttggcgcgggatgtttttggtgcgtagaagcagtattcgagcgcttagatggtgtcgtagatgtattacctggttattctggcggacataaaaaaaaccctacgtaccgagaaatatgcacaggaatgactgggcatgctgaagttgctcagataacatttgacccaacaatagttacatttaatgatcttttaaagatgttttggagatcccatgatccaaccacaagaaatcgacaaggaaatgatattggaactcagtatagatcggctattttctaccataataatgaacaaaaaacaatagccgaagaatctaaaaataaagcagacaattctaatgtatttttaaatccaatcgttactgaaataactaaactggataaattctggcctgcagaagattatcataataattattatgttaacaatatggatcagccatattgcagagtgattattaaaccaaagctcgataaactatttaaataa

SEQ ID NO: 224249 - DNA, 445 bp, Unknown
  Bacterial polypeptide expressing nucleotide sequence isolated from the Sargasso Sea
atgagcaaaattaacaaagcgattgtatgtggtggttgtttttggggtattgaggaaaatttcagaactaaaccaggtgtcatctcaactgaagtggcctatgcaggcggacttaagaatcatacaacttatgaagaggtttgttcaggtaataccgggcacgctgaagctgtccaaattacttttgatgagaacatagtttcttatgaaaagattttagaacttttttttaaaatgcatgacccaactcaaaaagatatgcaataccccgatatcggcactcaatatagaagtgaaattttttattataatcaagaacaaaaaaaaacagcaaatagtgtgaaaaaaagatttaacgatttgttaaacggaaaagtcgttactaatattaaccctttgacaacctacgtaaaggcagaagagtatcatcaaaaatatatttgaa

SEQ ID NO: 224250 - DNA, 448 bp, Unknown
  Bacterial polypeptide expressing nucleotide sequence isolated from the Sargasso Sea
tatgaagaaatgtacacttgctcttggctgtttttggaaacctgaggaaaacttcaaaaataagccaggtataattgaaacagaagtcggctatgctggtggattatctgataaagttacatatgaagaagtatgtagaggtgacactggtcatgctgaagttgtaagacttacctttgatgaaaaattaatttcttttaaaaaaattttagatttattttttaaaatgcacgaccctactcaaaaagatatgcaataccctgatgttggaactcaatatcgaagtgaaatattttatgaagatgacattcaaaaagctgaggctaacgaaattttggaaatttttaataaggaacttaacggaaaaattcaaactaatatttcccggctcaaaaattattgtaaggcagaagaatatcatcaaaagtacatagaaaaaaatagataa

SEQ ID NO: 224251 - DNA, 376 bp, Unknown
  Bacterial polypeptide expressing nucleotide sequence isolated from the Sargasso Sea
tatgaacaaaaaaaatctagatcatttatctgaagagcagcgttatgtgacccaagaaaagggaactgaggcaccttttacaggtgaattattgcataacaaagagagtggcgcttatcagtgtgtatgttgcggcgctgatctgtttagctcagatacaaaatttgattcaggaactggatggccaagcttttatgatgtgatgagttctactgcggttaaagttgaggtcgatcacagtcatggtatggtgagacaagaagtcttatgtggaagctgtaatgcacatttaggccatgtttttaatgatggtccagatccaactggacttcgttactgcattaattctctgtctttggaatttgagaaagattaa

SEQ ID NO: 224252 - DNA, 397 bp, Unknown
  Bacterial polypeptide expressing nucleotide sequence isolated from the Sargasso Sea
atgtctgagcgaatcgaacgctcccctgaggagtggaagcagacgctttctccggagcagtttcaggtggcccgctgcggtggcaccgaacgggcattcacaggggcttactggaacaagaaagacagcggcacctaccactgcatctgctgcgacgcaccgctgttcagctcgcagaccaagtttgagtcgggcaccggctggcccagcttctgggatggggtttcctcggaggccatcaccaccaagcaggacctgagccacggcatggtgcgcgtggagatcaactgcgcccgatgcgatgcccacctcgggcatgtctttcctgatggccccgctcccaccggtcagcgttattgcgtcaacagtgcctcgctggacttcaaggccagttgac

SEQ ID NO: 224253 - DNA, 373 bp, Unknown
  Bacterial polypeptide expressing nucleotide sequence isolated from the Sargasso Sea
atggaattaaataaaaatcatttaagccaagaacaatttgaagttacccaaaactgcggtactgaaccacctttctcaggcgaacttctttatgaaaaaagagaaggtatctatagttgtgtagtttgtgacttttcactttttgaatcagatacaaaatttgaatcaggaactgggtggcctagtttttatgatgcacttgatgatacgattacaactaaagaagatctttcttatggcatgaaaagagttgaaataagttgtcgtaattgtaatgctcaccttggtcatgtttttccagatggacctcggcctaccggactcagatattgtgtaaactctttaagcttaagctttaatgaaaatgaataaa

SEQ ID NO: 224254 - DNA, 391 bp, Unknown
  Bacterial polypeptide expressing nucleotide sequence isolated from the Sargasso Sea
atgaagaaaacagattcagagtggcgacgtatcctgtcatctgcagaatactatattctacgtgaaaaaggtacagaaagggcatttactggagagtatgatgggcattttgaagatggtatatatgtatgtgcaggttgcgggcataaactttttgattcagagactaaatacaggtctggttgtggatggcctgcattttctaaggcaatgcccgagtctgtagaggaaagtgaagataatagttatgggatgaggcgcattgagattacttgttccaaatgcgatgggcatttgggccatgtatttaatgatgggccacaaccctccggtctaaggtactgcataaattcaatttccatggattttaaacctaaagaagataaatgaa

SEQ ID NO: 224255 - DNA, 442 bp, Unknown
  Bacterial polypeptide expressing nucleotide sequence isolated from the Sargasso Sea
atggaaatagcagttttagctcttggatgtttttggggaccagaaatcaaatttagtgaaattgatggaatcatcaaaactgaggtaggatactgtggtggtaatactaaaacaacaacttataaagaggtttgtactggtaatacaaatcatgcggaagttgttaaactggattacgacgaaaaaattatatcttatgaaaaaattttaaatatttttttcgaaatacatgacccaacaactttaaattctcaaggaccagattttggaacacaatatcgaagtgaaattttttatttaaacaatattcaaaaagaaaaagctgaaaagcttcttggagaagtaaacagaaaattgtctggaaaagttgttactaaaatttctttacttaaaaattattgtcctgctgaggagtatcatcaatatgtatttaaagaagaaa

SEQ ID NO: 224256 - DNA, 312 bp, Unknown
  Bacterial polypeptide expressing nucleotide sequence isolated from the Sargasso Sea
aagcttttactggaaagtatgtagattggaaaaaggctggcactttcatttgcaaagcgtgcgctcatccattgtttccctcgattaccaaatacaaatcaggtactggctggccaagcttctatcaacccatcaatgagaatgccatacgtgagcaatcggacaataagtttggatggaatcgggttgaggtagaatgtaatcgctgcggatctcatttgggacatgtttttgaagatggtcctgagccaacaggtttacgctattgcattaattctgtgagtttagattttaaatcagatacagaataag

SEQ ID NO: 224257 - DNA, 481 bp, Unknown; identical to SEQ ID NO: 224132
  Bacterial polypeptide expressing nucleotide sequence isolated from the Sargasso Sea

SEQ ID NO: 224258 - DNA, 466 bp, Unknown
  Bacterial polypeptide expressing nucleotide sequence isolated from the Sargasso Sea
tatggaagaagcattaattggagcaggttgtttttggggaattgaagaatattatagaaatatagatggcatccaagataccaaagttggttattcaggtggtattgttaatgatccaacttatgagcttgtttgtagtggaaacacagaacatgctgaggttgtaaaaataaaatttgatgaaaatatcatatcataccaaaaaattcttgatcatttttggaattgtcatgatcccactcagtttaatcgtcagggccctgatataggaagtcaatatagatcagctatcttttattattcagaaaatcaaaaaactttagccttggaatcaaaaaaacaaaaacaattgtccttaaataaaaaaattgttactgagattaaaaaggcaaataaattttatttagccgaagagtatcatcagctttatattcataaaaataattcaatctgcatatcaagataa

SEQ ID NO: 224259 - DNA, 382 bp, Unknown
  Bacterial polypeptide expressing nucleotide sequence isolated from the Sargasso Sea
atggttaatataaataaaagtttaagtgaagaacaatatagagtgactcaacaacacggaaccgaaccagctttctccggtgcttattgggacacgaaagacaatggatactacaaatgtatttgttgtgatactgttcttttttcaagtaaaacaaaatatgcatctggtacaggttggccagctttctataaacctgtatcagaagaggtgattggcaaatcagtagataattctttttttatgcaaagaactgaagtgcattgttcaaaatgtaacgcacatttaggtcacgtctttcctgatggcccagaaccaactggattaagatattgtatcaactcagcatctttaaattttaataaaacagataaagaatgat

SEQ ID NO: 224260 - DNA, 529 bp, Unknown
  Bacterial polypeptide expressing nucleotide sequence isolated from the Sargasso Sea
tctgtttgctcaagatttagaaaaagcatattttgcaggtggatgcttttggtgcatggaagaatctttcgaaaagtttcagggagtttctaaagttatttctggatattctggaggttcaactgaaaaccctacttatgaagaagtaacttactctaacactggtcatttcgaaactatagaaatcatttatgataaaaatattacaagctataataaaatattagatcatttttggataaatattgatccttttgatgcagtgggccagttttgtgataagggatatagttatagatctgtagcttttttcaaagacgatgaacaaagaaaactaataaataaaagtaagagaaaaattgagcaagaatttaaaaaaaaagtagtaacttatgtgataaaatttgataaattctataaagctgaagattatcatcaagattattatagaaaaaaatttttgaattatcttagatataaaaaagcatgtgggagagagaaaaaattgaatagtatatggaataaatga

SEQ ID NO: 224261 - DNA, 220 bp, Unknown
  Bacterial polypeptide expressing nucleotide sequence isolated from the Sargasso Sea
aaatatgattcttattgtgggtggccaagtttttttgaacaaatatcacctaaagcaattaaaacagagactgatagatcgcatggaatggtgcgtattgaaattatgtgtgccaaatgtgatgctcatttaggccatgtctttgatgatggcccagagcctacgggcaaaagatactgtgtaaattctctttctattaattacgaagagtttgaataat

SEQ ID NO: 224262 - DNA, 385 bp, Unknown
  Bacterial polypeptide expressing nucleotide sequence isolated from the Sargasso Sea
atgaaagaaataaatgactcgctcacacaagaggagctttacgttttaaaagacaagggcactgagagaccattctcaggaaaatttgatacattttttgaggatggagtgtataaatgcaaaaattgtaaagctaaattattcaaatctgaatcaaaatatgacgcgggctgtggttggccaagtttttttgaagcagttaatgaagaagcaataatatacaaggaagataattcaatttttggacgtcctagaactgaaatattatgtgcaaattgtgaagggcatttaggtcatgtttttgaagatggcccaaaagataaaacaggcctaagatattgtgtaaattcaatatctttagattttgactcagagaataagtaat

SEQ ID NO: 224263 - DNA, 451 bp, Unknown
  Bacterial polypeptide expressing nucleotide sequence isolated from the Sargasso Sea
atgcaaatatttataggtggaattggttgcttttgggatgagactgaatatcaaggtgttgccggtattatttcaactgaatgtgggtattgtggtggaaaaaatccaaaagtaacttatgaacaggtctgtggtggtaatactgaacacatagaagttgttaaagttacatttgatcctaagataatttcttatgaagatataactagattattcttcaaaatccatgatccaacaacccttaatcgacaaggacccaacgttggttatcagtatcgatcagaaattttttacaacacagaagaagaaaaaaaatctgcgcaaaaagtgttggatgaagttaataaaaaatttaatggtaaagtagttaccacaatcagaaaagaaaaaaattattgtaaagcagaagagtatcatcaaaagtattttgaaaagcaaaagaaaagatgac

SEQ ID NO: 224264 - DNA, 574 bp, Unknown
  Bacterial polypeptide expressing nucleotide sequence isolated from the Sargasso Sea
aatgaaaaaaattattctaatcttatttatttattttataaacctaagcgtatttgcaacagaaactaaaaaagcatattttgcaggaggttgcttttggtgtatggaagaatcttacgaccaagtagatggagttttatcatcaatttctggatactcgggagggcatcttaaggatccaaaatatgaggatgttatttacaaagatactggtcacgtagaagcaatagaggttacatataacccttcagtggtgagctataaagatttattaaatgtttactggaaaaatattgaccccttcgacgcttcaggtcaattctgtgataaaggtaaaagttatagatctgtgattttttttgaaaataatagtcaaaaacaacttattgataaatcatttaaagaattagagaaaaaatttaataaaaaaatcgttactttagtttggaaatttgacattttttaccctgctgaaaattatcaccaagattattacgaaaaaaattttattcgttatctaatgtacaaaaacgcttgtaaaagagaagaaacattaaaaaagatatggaattga

SEQ ID NO: 224265 - DNA, 295 bp, Unknown
  Bacterial polypeptide expressing nucleotide sequence isolated from the Sargasso Sea
aatggaaatagctattttaggattgggatgtttttggggaccagaaattaagttcagtaaacttgatggtgttataaaaacagaagttggttattgtggaggccacaactctgaaacaaattataaagaagtatgcactggtacaacaaatcatgctgaagtggttaaattagattttgatcctaaaattatatcttatgagaaaattattgaattcttttttgaaatacatgaccctacaaccttaaattctcagggaccagattttggaactcaatatagaagcgaaatattc

SEQ ID NO: 224266 - DNA, 445 bp, Unknown
  Bacterial polypeptide expressing nucleotide sequence isolated from the Sargasso Sea
aatggaaatagcaattttaggattaggatgtttttggggaccagaaattaaattcagtagacttgatggagttattaaaactgaagttggatattgtggtggtcataatgcggaaacaaattataaagaagtgtgtactggttcaacaaatcatgcggaagtggttaaattagatttcgatccaaaaataatatcttatgaaaaaatccttgaatttttttttgaaattcatgacccaacaactcttaattctcaaggaccagattttggaacacaatatagaagtgaaattttttatttaaacgataatcaaaaaacaactgcagtaaatattataaacaaagaaaacgaaagactatctggaaaagttgtaactaaattatcacaagttaaaaactattgtccagctgaagaataccaccaaagatatttagaaaaaagatag

SEQ ID NO: 224267 - DNA, 409 bp, Unknown
  Bacterial polypeptide expressing nucleotide sequence isolated from the Sargasso Sea
cctggaggaaaacttcaaaaataagccaggtataattgaaacagaagtcggctatgccggtggattatccgataaagttacatatgaagaagtatgtagaggtgacactggtcatgctgaagttgtaagacttacctttgatgaaaaattaatttcctttaaaaaaattttagacttattttttaaaatgcatgaccctactcaaaaagatatgcaataccctgatgttggaactcaatatcgaagtgaaatattttatgaagacgacactcaaaaagctgaggctaaagaaattttggaaatttttaataaggaactaaacggaaaaattcaaactaatatttctcggctcaaaaattattgtaaggcagaagaatatcaccaaaagtacatagaaaaaaatagataa

SEQ ID NO: 224268 - DNA, 520 bp, Unknown
  Bacterial polypeptide expressing nucleotide sequence isolated from the Sargasso Sea
atgttatcatctttaatagtaggcgcagggtgcttttggggcgttgaaattttatatgaacaaatgcctggtgttatcaatgcaacctcaggttattctggtggtcatttagataatccaagatatgaagatgtgttaactggtgagacaggtcacgttgaagtggttaagattgattatgataacagtgaagttacttttaatgaattgattgatacattttttatcattcatgatccaacaaccttaaatcgtcaaggtcctgatattggcgaacaatataaatctatacttttttacaacagcgaagatgaaaaagaaattattgagagtaagattgaaaaaattaatttatcaggcaaatttgaaaacccaatagtcacagaaattagagaaactgcagagttctatcctgcagaagagtatcatcaagattatgcagtgaaaacaggcaaattatgttatcagcagctttatgttatgtataattattcaccgatacccaaagcaacaccctaaa

SEQ ID NO: 224269 - DNA, 394 bp, Unknown
  Bacterial polypeptide expressing nucleotide sequence isolated from the Sargasso Sea
atgagtcaaaataaagataatcttaaagataagctaacgcctgaagagtattatgtaactcaaaatcacgggactgaacctgcttttagtggaaaatatgattctaataaaatgcctggcacatatcactgcgtggtatgcggatcagaaatattcagttccaaagaaaaatatgattctggatctggttggccaagtttttttcagccttcggtagagagtaatattgaaactcaagaagatcgctcagctggtatggttagaacagaagtacattgtaataactgtaaagcacatcttggccatgtttttcccgatgggcctcagcctacagggcttagatattgcatcaattcggtctcaatggattttacaccttccgaagaggactagg

SEQ ID NO: 224270 - DNA, 445 bp, Unknown
  Bacterial polypeptide expressing nucleotide sequence isolated from the Sargasso Sea
aatggaaattgcaattttagcattaggatgtttttggggcccagaaattaagtttagtaagattaatggggtaattaaaactgaagttggatattgtggaggtgatgagccaaaaatttcatataaggaagtttgcacaggaaatacaaatcatgcagaagtagtcaaattagattttgatccaaaaataatttcttatgaagatattttaaaatatttttttaaaattcacgatccaactactttaaattctcagggtccagattttgggacacaatataggagtgaaatattctatttaaatgataatcaaaaagttatcgcagaaaaggtgagaaaagaaacagataataaattatcgggtagagttgttacaaaaatttctttatctaaaaattattgcccagcagaagagtatcatcaaagatatttagaaaagagataa

SEQ ID NO: 224271 - DNA, 274 bp, Unknown
  Bacterial polypeptide expressing nucleotide sequence isolated from the Sargasso Sea
actgacacaatataaatctggaactggttggcccagttttacaaaaccacttgaagtacaaaacgtggttatgaaagaagacagaagcttgtttacggtaagaacagaggttagaagcaagcatgctgattctcacctaggacacctcttcaatgacggtccagggccgcttggattaaggtactgcattaattccgccgcacttaagtttattgctaaaaaagatttggaacaagaaggataccagatctaccagagtttatttaaaaactga

SEQ ID NO: 224272 - DNA, 839 bp, Unknown
  Bacterial polypeptide expressing nucleotide sequence isolated from the Sargasso Sea
atcagttttaaccccggccgtaatcagccttgatacgctgctgaaacgctactttgaaatgcacgacccgacgcagcttaaccgccagggcaatgatatcggcacccagtaccgctcaactatcctgacgaatagtcaggcgcagtatgacaccgcacagcaggtactggcagcttatcagccgctactgactaaggcgggttttggtaaaattaccactgtgataaaacctttgcgccagttcttcccggctgagaactaccatcaggactatatcgcgaaaaaccccaacggctattgccccgaccattccaccggtgtgcgctttgccagtgacagcgccacgaaaaccgccgctaccgacaacagtgccctgcttaaaggccagcacattctagtgattgattcggaaaactattgcccttactgcgaaaaattcaaagccgatgttgccagtaaatacagcggcgatataccgctgcattttcgttatgccagtaatcttgatggcctgacagttaaaaccccaacctgggccacaccaactattattctgctgcaggacggcaaagaagtgtttggccgtcagggctatttaagtccggatgaattttatctgctgctgggtaagtttaagctgggcaacagcgaagcctttaatgtcgcctttgatgaaggcaccgacggccgcttttgcaagcagtacgaaatattcaaaaacacacctgatggcacctttgtcgataaactcagtggcgccgcactgtttgacacgcgcgaccgttttgactcgggcacgggctggctgtcgtttaccaagccggttgacggtgcggtca

SEQ ID NO: 224273 - DNA, 424 bp, Unknown
  Bacterial polypeptide expressing nucleotide sequence isolated from the Sargasso Sea
aatgaaaaaagttttaataataattgtatttttaattcatagtaatttaaatgcgggtgaaaataaaaaagcttattttgctgggggttgtttctggtgcatggaagagtcgtttgatcaagtaaaaggggtgatttcaacagtttcaggatactccggagggcatttaaaaaatccaacttatcaagacgttatttacaaggacactggtcatgtggaggctattgaagttatttatgatccaaaaattgttaattatgaaaaacttttagatatttattggaaaaatattgatccttttgactctgcagggcaattttgtgataaaggaaaaagttacagatcagtaattttttttcaaacacaactagaaaaagaatctataaaaaaatcatttaaaaaattagagaaaatatttaaataa

SEQ ID NO: 224274 - DNA, 804 bp, Unknown
  Bacterial polypeptide expressing nucleotide sequence isolated from the Sargasso Sea
tagacctaactatagatcaatcatccaacttaaaaacaaatataatgaaaataactttgctgaagttgtaaaagtaacattcaataacaacgcgatcaatcttgaagaaatattaaaacattttcttgagaatcatgaccctacgcaactcaacagacaaggaaatgatattggcacccaatatagatcaacaatattatttactgatgattcacaaaaagatcttgctaaaaaattaatcaatcaatatcaagatcttctaactgcaaaaggatttggcaagataaaaacaaagctagaagctttagataatttttatttagctgaagaatatcatcaggattatttaaagaagaatccaaatggatattgtcctgatctttctactggtatcgttttttctcaagaacaaaaagaatatttagataattcaaagttggttttgggcaaacaaatattaattttagattcacaaagcttttgtccatattgtgaaaaattaaaagaagatgttacaaatagttataaaggaagcattcctttaagttataggacctcagatcaactgcatggcttgcaaatacaatcaccaacctgggcaacaccttcagtaattttcttagaaaatggtaaagagatttttgcgtatcaaggatatatagaaccaaagcaattttatcaaatgctgggaaaattcaagctaggcaattcagaagcctatgatgttgcatttaataaaggaactgatgcaagattctgtaaggaatatcagatatttaaaaatacacctgatggtatatttat

SEQ ID NO: 224275 - DNA, 481 bp, Unknown
  Bacterial polypeptide expressing nucleotide sequence isolated from the Sargasso Sea
atgaaaaaaatattcttaacattattctttataattttatcaacaaatttatatgcttcaaatactcaaaaggtttattttgctggaggatgtttttggtgcatggaagagtcatttgataaagttgagggcgtgattgaaactatctcaggatattctggtggacacgtaaaaaaccctaaatacaaagatgttgttaagaatacaactggacattatgaaactttagagattacttatgacccatcaataacaaactttgaaaagcttttagaaattttttgggttaatattgatccatttgatgctaacggtcaattttgtgataaaggcgaaagttataagtcagtagttttttatgaaaatagtgatcaaaagaaaattatagagacttcaattaagaaaattgaaaataagtttaataaaaaagttgttacttacgttaaaaatttcaatgaattttatatggcagagacatacc

SEQ ID NO: 224276 - DNA, 93 bp, Unknown
  Bacterial polypeptide expressing nucleotide sequence isolated from the Sargasso Sea
ttttagctgaagaatatcaccaacaatatcttgcaaaaaatccaaatggatattgtggtctcggcggaactggttgcacactcgagatataat

SEQ ID NO: 224277 - DNA, 448 bp, Unknown
  Bacterial polypeptide expressing nucleotide sequence isolated from the Sargasso Sea
atgaagaaatgtacacttgctcttggttgtttttggaaacctgaggaaaacttcaaaaataagccaggtataattgaaacagaggtcggctatgctggtggattatccgataaagttacatatgaggaagtatgtaaaggtaacactggtcatgcagaagtagttagactgacctttgatgaaaaagtaatttcatttaaaaaaattttagatttattttttaaaatgcacgatcccactcaaaaagatatgcaattccctgatgttggaactcaatatcgaagtgaaatattttatgaagatgatattcaaaaagttgaagctaaagaaattttagaaatatttaacaaagagctaaacgggaaaattcaaactaatatttctcaactcaaaaattattgtaaggcagaagagtatcatcaaaaatacttagaaaaaaatagataat

SEQ ID NO: 224278 - DNA, 396 bp, Unknown
  Bacterial polypeptide expressing nucleotide sequence isolated from the Sargasso Sea
aatggaaatagcaattttagctttaggatgtttttggggtccagaaattaaatttagtaaaatagagggaataaaaaaaacagaggttggatattgtggtggaaataactcaaatacttcttataaagaagtctgtactggaactactaatcatgcagaagttgtaaagttagaatttgacccaaaaattatatcttacgaaaatattattaaaaaattttttgaatttcacgatccaacaactctaaattcccaaggtccagattatggaacacaatacagaagtgaaattttttatgaaaatgaaaatcaaaaagaaattgcaaaaaagatcttaaataatataaatgaaaaactttcaggtaaagttgttactagaatttcctctattcacaa

SEQ ID NO: 224279 - DNA, 784 bp, Unknown
  Bacterial polypeptide expressing nucleotide sequence isolated from the Sargasso Sea
gcagtttcaggttatgcgaatgggtatggagtaagtccaagttatagatctatcatccagcttaagaacaaatataatgaaaataattttgcagaggttgtaaaagtaacttttaacagcaatgaaatctcacttgatgaaatcctaaaacatttctttgagacccatgatccaacacagcttaatagacaaggaaatgatattggaactcagtatagatcagtgatcctattttcgaatgaaactcaaagaaaacttgctgaagatattttgaatgagtatcaatctcttctttttgaagcgggttatgggaaagtagttacccttatagagtcattagacaacttttatttagctgaaaaatatcatcaggattatcttaagaaaaatcctaatggctattgcccagacttatcaactggtgttgtattcgataaaaaagagaaagatcttctagataatcaagatctgcttatcggaaagcaaatactggtcttagattcgcagaattattgtccctattgtgagaaattaaagcttgatgtaacagatgaatataaaggcagcattcagatgtcttatagaacttccgatcaattgcatgacttagaaattaacgctcccacttgggcaactccatctgtaatcttcttagaggacggtaaagaggttttttcacatcaaggctatattaatcaaaaagatttctatttgatgcttggaaaatttaaattaggagactcagaagcatatgatgttgcatttaataatgggactgatgcaa

SEQ ID NO: 224280 - DNA, 192 bp, Unknown
  Bacterial polypeptide expressing nucleotide sequence isolated from the Sargasso Sea
cacaatatcggtctgcaatttattataacgatcctagtcaggaagcgaaggcaaaacagtctaaagaaaaaaatgctacacgattttcaagtcctattgttacggaaattaccgctgtgtctaaatattatcttgctgaagattatcatcagaaatatttagaaaaacggggtatgggtagttgccattaga

SEQ ID NO: 224281 - DNA, 934 bp, Unknown
  Bacterial polypeptide expressing nucleotide sequence isolated from the Sargasso Sea
tggggtgcagaaaagggctatgaagcattacctggagttgtggacgctatttcaggatacgcagatggttatggagtgcgtccttcgtatagagaaatcacgaagttcatcaataaatttaatccaaataaccatgcagaggttgttgaagtaacttataacaaaaatattatttctactaaagaattgttacagcattattttgaatctcatgaccctacacaaattaatcaacaaggaaatgatataggcacgcagtataggtctacagttctatttactaataatgaacaattacaaattactaaagaactaatcttcgaatatcaacaattacttaatgaatcaggatatggacaaataagtacaatagttaaatccttagatgaattctttgctgcagaaacgtatcaccaagattatattgctaaaaaccctaatggatattgccctgatcattcaactggaattaggttctcaaaagataaactgcttgcagcagataacagtcaactattaactgaaaaaactattctagttatagagccaaaaggatattgtccttattgtgagaaatttaaatctctagtagttgaagaatatcaaggaagcattcctatagcttttagatttgcatttcagctagaaggtttagaggtaaagactcctacttgggctactccaactattatatttttagatgagggcaaggaagtatttgggcatcaaggatatatgtcgcctgatgaattttataaggcccttggattttttaagttaggtaattctgaagcttacagagtagcttttgatgatgggaccgatgcaaggttctgtaaggagtacgagatctttaaaaatactcctgatggagtgtttgtagataaacttagtggcgcacacctttttgatacaagagacagatttaactctg

SEQ ID NO: 224282 - DNA, 373 bp, Unknown
  Bacterial polypeptide expressing nucleotide sequence isolated from the Sargasso Sea
aatgactaaaattataaaaacggacgcagaatggaaatcttttttaacagaagatgaatattatgtaacaaggcaaaagggtacagaacctcctttctctggtaaaaattttgaaattattaatggtggtatttttaaatgtaaatgctgtggtaatgaattatttaatagttcaacaaaatatgactcttattgtggatggccaagttttttcgaacaaatatcacctgaagcaattaaaacagagactgatagatcccatggaatggtccgtattgaaattatgtgtgccaaatgtgatgcacatttaggccatgtctttgatgatggcccagagccaactggcaaaagatattgtgtaaattctcttttc

SEQ ID NO: 224283 - DNA, 445 bp, Unknown
  Bacterial polypeptide expressing nucleotide sequence isolated from the Sargasso Sea
atggaaatagcagttttagcacttggatgtttttgggggccagaaattaaatttagcaaaattgatggcatcatcaaaactgaggttggatattgcgggggtaatagcccgactacaacttacaaagaagtatgctcgggtaaaacaaaccatgcggaagttgtaaaacttgattttgatgaaaaaataataacttatgaaaaaattctaaaaattttctttcaaattcatgatccaacaactttaaattctcaaggaccagattttggaactcaatatagaagtgaaattttttatcttaatgacaaccaaaaaaaaattgctgaagaaattttaaaaaaagaaaatgaaagattatcaggtaaagttgttacgaaaattagcttactaaataattattgtcctgctgaggaatatcatcaaaaatatttagaaaaaagataat

SEQ ID NO: 224284 - DNA, 520 bp, Unknown
  Bacterial polypeptide expressing nucleotide sequence isolated from the Sargasso Sea
tatgttatcatctttaataataggcgctggttgcttttggggggtagaagttctgtatgaacaaataccaggtgttattaatgcaacctcaggttattctggtggtcatttagataatccaagatatgaagatgtgttaactggtgagaccggtcacgttgaagtggtcaagattgattatgatagcagtgaagttacttttaatgaattgattgatacattttttattattcatgatcccacaaccttaaatcgtcaaggtcctgatattggggagcaatataaatctataattttttacaatagcgaggatgaaaaagaaataatagaaagtaaaattgaaaaaatagatttatcaggcaagtttgaaaattctatagttacagatgtcagagaaactgtaaaattttatcctgcagaagagtaccatcaagattatgcagtgaagacagggaagttatgttatcagcaactttatgttatgtataattattccccgatacctttagcaacaccctaa

SEQ ID NO: 224285 - DNA, 295 bp, Unknown
  Bacterial polypeptide expressing nucleotide sequence isolated from the Sargasso Sea
catggtcttgcgctcggaaattctggtgaacaaaaacgtgctgcctactcaagaacaagcgttgcctggtcgtgaaaccccgatgaagttaccggaaacgcacttcgtcaacggcaacccactgctgggcccgttcctggatgacgtcggctttgcgatcttcggcctgggctgcttctggggcgcagaacgcaagttctggcagcgcgacggcgtggtcagcaccgtggtcggctacgctggcggctttacgcctaaccccacttatgaagaagtctgctcgggcctgaccggc

SEQ ID NO: 224286 - DNA, 454 bp, Unknown
  Bacterial polypeptide expressing nucleotide sequence isolated from the Sargasso Sea
atgaaaactgcttatttttctcttggatgtttttggggccctcaattagaatttgaaaaaattaagggtgtgaataaagctgaggttggttattgcggcggagatgatccaaatacaacttatgaaaaagtttgctctggctcaactaatcacgcagaaactgtaaaagtagaatttgatgataaagtagtttcttatgaggaactagttaggtttttttttaaaattcatgatccaacacaactaaatagacaaggacctgatattggaacacaatatagatcagaaattttttaccagaatgaggaacaaaaaaaaattgcagaaaaaattaagtctgagtttgataaaaaatttgatggaaagatagttacaaatatttcaaaacagaagctttatcaacctgcagaaaaataccaccagtattatttgaaaaataagaatattttatgaa

SEQ ID NO: 224287 - DNA, 241 bp, Unknown
  Bacterial polypeptide expressing nucleotide sequence isolated from the Sargasso Sea
aatgatatttggggagcaatatagatcagtaattttttgtaaagatagccaacaattagatgcagctaatatctcaaaagaagtgtttcaaactaaattagatgaaaaaggatttggtccaattactactgaaattaagattgaaactaaaacatttccagcagaagattatcaccaacaatatttagcaaaaaatccaaatgggtattgcaacttaaagggtactggttgctttctgtaa

SEQ ID NO: 224288 - DNA, 374 bp, Unknown
  Bacterial polypeptide expressing nucleotide sequence isolated from the Sargasso Sea
aatggaaatagcagttttagcacttggatgtttttgggggcctgaaattaaattcagtaaaatagatggtataatcaaaacagaagtcggttactgtggaggtaatagctctgtcacgacgtacaaggaagtttgcacaggaaatacaaatcatgccgaagtggtaaagctagaatatgatgaaaagactataacatacgaaaagattttaaaagtttttttccaaattcatgaccctacaactttaaattctcagggaccagactttggaacccaatatagaagtgaaatattttatctaaatgacaatcaaaaaataattgcggaaaaagtattgaacgaagtgaatgagagattatcaggaaaagttgtta

SEQ ID NO: 224289 - DNA, 331 bp, Unknown
  Bacterial polypeptide expressing nucleotide sequence isolated from the Sargasso Sea
tatgcaaaaatttattggtggcattggttgtttttgggatgaaactgaatatcagggtgtcccgggtattatttcaacagaatgtggttattgcggtggaaaagattcaaaagtaacttatgagcaagtttgtggtggagatactgaacatatagaagttgttaaagttacttttgatcctaaaataattacttatgaggatgttgctagattattttttgaaatacatgatccaacaacacttaatcgccagggccctaacgttggctatcagtaccggtcagaaattttttataatacagaagaagaaagaatgtctgcacagaaaata

SEQ ID NO: 224290 - DNA, 445 bp, Unknown
  Bacterial polypeptide expressing nucleotide sequence isolated from the Sargasso Sea
atggaaatagcagtattagcttgtggatgtttttggggacctgaaataaagttcagcaggttagatgggatttataaaactgaagtagggtattgcggtggtaatacgagcaaaacaagctatcaagaagtttgtgaaggaaatacaaatcatgctgaagttgttaagttagaatttgatccaaaaataataacatatgaaaaaattttagactattttttcgaaatacacgatcctactaccttaaactctcaagggctagactttggtacacaatatagaagtgaaattttttatattaatgatgaacaaaaaaatattgcaaaaagaataattgaaaaatataacaaaaaactttctggaaaagtggttactgaactctctcaaataaaaaattattgtactgctgaagaatatcatcaaaaatatttggaaaaaagataaa

SEQ ID NO: 224291 - DNA, 262 bp, Unknown
  Bacterial polypeptide expressing nucleotide sequence isolated from the Sargasso Sea
atgtcagacgataaatggaaagaaaagctgagcgagcaagaatatcgaatttgccgtcaggccgagacagagagaccattcactggcgcattgcttgatgaaacccgtggtggtgtgtatgtatgtaaatgctgcgatgcgccattgttcccctcagacacaaaatttgatgcagggtgcggttggccttcattttataaacaactagacgatggtaatgttgattatcgcgaagatatatcgcacggcatgcgtcgagtag

SEQ ID NO: 224292 - DNA, 429 bp, Unknown
  Bacterial polypeptide expressing nucleotide sequence isolated from the Sargasso Sea
ttggttgtttttggaagcctgaggaaaactttaagaataaacctgggattatagaaacagaagttggatatgctggaggaaaaaatcctgaagttacttatgaagaagtttgtagtggaaaaactggtcatgcagaagtagtaaaattaacatttgatgaaaaagtgatttcttttagaaaaatactggatctattcttcaaaatgcatgatccaactcaaaaagatatgcaatttcctgacattggaacacaatacagaagtgaaatattttatgaaaatgatgaacaaaaaaatgacgctttagaagttttaaatgaagtaaataaattttttagtggaaaagttcaaactaatatctcaaaaattaaaaattattgtaaggcagaagaataccatcaaagatatatagaaaaaaatagaaaatgaa

SEQ ID NO: 224293 - DNA, 361 bp, Unknown
  Bacterial polypeptide expressing nucleotide sequence isolated from the Sargasso Sea
aacgggactttctggccacgctgagtctgttgaagtaacatttgatcgcagcaaaacctcttttgaagaaatattaagattctttttccaaattcacgaccctactacattaaacagacaaggtaacgaccgcggatctcaatatcgctcagcgatattctatcaaaataaagagcaaaaaagtaccgccgagaaattaatctctcaagctaataattccggcgtttttccaggggagatagttactcagatatcaaaagcagatggtttttacgaagcagaagattatcaccaagactatctgcaaaaaaacccaggaggatacacctgtcactcagtgagaaaagaatggtccttttaa

SEQ ID NO: 224294 - DNA, 445 bp, Unknown
  Bacterial polypeptide expressing nucleotide sequence isolated from the Sargasso Sea
aatggaaatagcaattttaggattaggatgtttttggggaccagaaattaagttcagtaaacttgatggagttgttaaaactgaagttggatattgtggtggttataatgcagaaacaaattataaggaagtgtgtactggttcaacaaatcatgcggaggtggttaaattagatttcgatccaaaaataatatcttatgaaaaaatccttaaatttttttttgaaattcatgacccaacaactcttaattctcaaggaccagattttggaacacaatatagaagtgaaattttttatttaaacgataatcaaaaaataaccgcagaaagtattataaataaagaaaacgaaagactatctggaaaagttgtaactaaattatcacaagttaaaaactattgtgcagctgaggaataccaccaaaagtatttagaaaaaagatag

SEQ ID NO: 224295 - DNA, 432 bp, Unknown
  Bacterial polypeptide expressing nucleotide sequence isolated from the Sargasso Sea
tatggaaaaagcattatttgctgctggttgtttttggggtgtggaagaaacttttagaaaaatcatcggagttagtaaaaccgaagttgggtattcaggtggaaatacaattgatccaacatatgaaagtgtttgtgaaggaactacaaatcatgcagaagtaatcttaattgaatttgacaataaaataatttcttatgatgaattgcttgaacatttttggaattgtcataatccaacaactttaaatagacaaggtcctgatattggaactcagtatagatcggcaatattttatttcaatgataatcaaaaaaataaatctttaatttctaaaaaggcatattcttcttctaccaaattaaatattgtaactgaaattactgaagccagtgaattctatagggctgaagagtatcatcaaaagtatat

SEQ ID NO: 224296 - DNA, 460 bp, Unknown
  Bacterial polypeptide expressing nucleotide sequence isolated from the Sargasso Sea
atgagcaatttagacaaagcgattatttgtggtgggtgtttttggggaatagaagagaactttagaacaaaacccggaattatatccactgaagtaggttatgctggtggtcaaaacagtaatataagttatgaagaggtttgtacgggtaaaactggtcatgctgaatgtgttaagttaacttttgataaaaaaataatctcttatgaaaaaatattggatctcttttttaaaatgcatgatccgacacagaaagatatgcaatatccagatataggcacacaatacagaagtgaaattttttttacaaatctggatcaaaaagaaatagctttaaaagtgagagcaaaatttaacgatttacttaacaataaagttgtcacaaacatcaatcctttaacaacttactcagtcgcagaaacttaccatcaaaaatacatatttaaaaaaaaccaatgaa

SEQ ID NO: 224297 - DNA, 550 bp, Unknown
  Bacterial polypeptide expressing nucleotide sequence isolated from the Sargasso Sea
attgatttttttaataagcacgtctgctcaatcaaaaaactttaaaaaagtgtattttgctgggggatgcttttggtgcatggaggagtcctttgatggagttgagggtgttttatcaacggtttcaggttattcaggtggacatttaaaaaatcctacctaccatgatgttatttataaagatacaggccacgtagaagctttagagataacttatgacccaaataaagtaaactacgaaaaattacttaatattttttggagaaatatagatcccttcgactcagaaggtcaattttgtgacaaaggtaagagctatagatcggtaattttctttcaaaatcaactagaaaaagaatttattgataaatcttttaaaaatttagaaaagaaatttggtaaaaaaattgttactttagtatggaaatttgaggaattttaccaagcagaagattatcaccaagattattatgaaaaaaattttattcgttatctaatgtataaaaaggcatgtaaaagagaagataccttaagagaaatatggaattga

SEQ ID NO: 224298 - DNA, 409 bp, Unknown
  Bacterial polypeptide expressing nucleotide sequence isolated from the Sargasso Sea
cttgttaaaagtcacaaagtcggacgccgaatggcgcactcagctctcgccggaagcctataacgtttgccgcaaaaaaggaacggaacgtgcgttcacaggagagtacgataagtgctacgacccgggggtctatgtctgcgtttgctgtggaaacccactgttttcatcggacgcgaaatttgactctggcacgggatggccaagtttttattcggccatcgcagacgatgctattcgagaagaagaagatattagcctgttcatgcggcggacggaaacgttgtgcgcgatttgcgacgcccatcttggtcatgtgttccctgatggaccagccccaacgggattgaggtattgtatgaattctgtggctttgaaacttgtgccaccagacgatcaggccgactag

SEQ ID NO: 224299 - DNA, 397 bp, Unknown
  Bacterial polypeptide expressing nucleotide sequence isolated from the Sargasso Sea
tatgactcgaaaaaacaacttaagagacccgcattggaaggaaaaactaacgcctgaacaatatgaaatatgtagaaataaggggacagaagcccctttcagtggagaatatcttaatactaaaaccactggaacataccattgtttttgctgcggaaatgctttatttcactccgaaaaaaaatttgattctggtaccggctggccaagtttctgggatccgattgatgttgagagtgtcaacactcaagaagatttgagcttatctgtagtgagaacagaagtactctgcaaacaatgtgactcgcacttaggccacgtttttgaggacggtcctcaaccaaccggtttaaggtactgcattaactctgtttcactaaagcttgaagaagattag

SEQ ID NO: 224300 - DNA, 550 bp, Unknown
  Bacterial polypeptide expressing nucleotide sequence isolated from the Sargasso Sea
attgaaagtgacgactaataatttaaatgaaatttctaattataaaaaagtctattttgctggaggttgtttttggtgcatggaagagtcttttgataaagaaaaaggtattattaaatctatttcaggatattctggcgggcatttgataaatcccacttataaagaggtaatttataaagacactggtcacgttgaaactatcgaaattacctatgaccctaaaatgatatcctataaaaaacttttagatattttttggaaaaatattgatccttttgataaatatggtcaattttgtgataaaggaaaaagctatagatcagttattttctataagaataataagcagaaaaaagttattaaaaaatcaattgttgaaatagagcaaagatttaattctaaggttgtaaccttattgtggaaatttgataaattttaccaagcagaggactatcatcaagattattatcaaaaaaattttttaagatatctagcttataaaaaagcttgtcaaagagaagaggttttgaataaaatatggaattaa

SEQ ID NO: 224301 - DNA, 1222 bp, Unknown
  Bacterial polypeptide expressing nucleotide sequence isolated from the Sargasso Sea
ttgatagctatttttgcatccactactttttcttcaaaaaatataaccatccacgaagacacaattgtttttggagccggctgtttctggagtgttgagaaaaaatttgcagaattatcaggagtgataaacgttgaatctggttacgccgatggtatcggtcttgagccaaaatactccgagattacaaaatttaaaaataaattcaatcctaataattttgctgaggttgttcagattacatacgataggaattcaatttccttaaccgatttaattaagttcttctttgaactgcatgatccaacgcaaaaaaatagacaaggtaacgatataggaactcaataccgatctctaatattatttaatgatcaatccgaagaaatgttatccatcgagctaaaagatgaatatcaaatactgctaagaaaagaaggttacggagatatagttacagatataaagaagttgaaaaatttttatcctgcagaagaatatcatcaagattacttagttaagaatcctaatggctactgtccagatcattcaaccggtattgtttttaaagaggttgaaaaacctaagattgataacagttatttacttgctggaaagtacattttagttttggattcagaattttgtccttactgcactaagcttaaaaatgaagttttgtctgattatgagggttcaatccctttaaattatagatattcctcagaattgcatgatcttcaattatcatctcctacttgggccacaccaactatcttttttattgaagatggagttgagaaattttctcttcaaggatttgtgcaaagagaaaacttctataaggctcttggtatttttaaattaggagaaagtgaagcctatagtgttgcttttaatcaaggaacggatccagtcttttgcaaagaatatgagttatttaaagatactccggagggagttttcgttgataagcttagcggagttcctctttttgatacaaaagacagatttaattccagaacgggatggttatcttttacaaaaccagtagatggatcggttacagagcacatggactatagttatggaatgactagggttgaaattaaatctaaatcttcaggaattcatcttgggcacgtttttcaggatgggcctaatggacttcccagatattgcatcaatgcaactgtgctagaattcgttcccagaaatatataga

SEQ ID NO: 224302 - DNA, 571 bp, Unknown
  Bacterial polypeptide expressing nucleotide sequence isolated from the Sargasso Sea
tatgaaaaattttttacttttagtcacattaataattcttaattcaaatttaaaagccgaagaaaaaaaagcttattttgctggtggatgcttttggtgcatggaagagtcattcgatcaagttgaaggagttaaatctgttgtttcaggatattctggaggacatttaaaaaatcctacttatgccgatgtaatttatactgactcaggtcacgttgaggcagtggaaataacttacgactcttctattgtcaattatgaagaactgttagaaatatattggcaaaacatagatccatttgatgccgaaggtcaattttgtgacaaaggaaaaagctaccgttcagtcattttttttgaagacgataagcaaaaaaaaattatagataaatcttttcagaatttacaaaaaaaattagataagaaaatagttacattagtatgggattttgaaaaattctatcaagcagaaaactatcatcaggattattatgaaaaaaattttattagatatttaatgtacaaaaaaggatgtcaaagagaggaaacattaaagaagatatggaattaa

SEQ ID NO: 224303 - DNA, 526 bp, Unknown
  Bacterial polypeptide expressing nucleotide sequence isolated from the Sargasso Sea
tatggaaagggctatatttgctggagggtgtttctggtgtactgaagcatactttctagagttagaaggggtagaggatataaacccaggatatataggaggccatcaagatcatcctacatacgaaatgatatgtactggaaatactggtcacgtagaagcaatagaaataatttatgatcctaaaaagatttcatatctaaatttattagaagtattttttgatactcatgatcctacccaagtagatggtcaaggtaacgatataggctctcaatatatgtcagctatttattatactaacgatatacaaaagcaggaagctgcaaattatattgaaagaatatttattaactacccggaccccataataacaaaactttattcagaaaaaatattttatatagctgaagactatcataaaaattactttaatgataataggcagcaaccttactgccaaattgtaattgagcctaaatatgcaaaatttaaagctaaatatagttcattattaaaaaaatag

SEQ ID NO: 224304 - DNA, 846 bp, Unknown
  Bacterial polypeptide expressing nucleotide sequence isolated from the Sargasso Sea
ataataattttgttgaagttgtaaaaatcacttataacagtaatgctgtttcccttgaaaatattttaaaacacttttttgaaactcatgacccaactcaactgaataggcaaggcaatgatataggcacacaatacagatcaacaattctttttcaaaatgaatatcaaaaggaactcgcagagaaagttatggcagaataccaagaacttttgattgagggagattatggaaaaattagaactaagctggaacctttagataatttctatcttgccgaagaatatcatcaggactatttaaaaaagaatcccaatggttattgtcctgatctatccacaggaattgtatttaataataaagaaaaaaacttcttagataatgaatatctccttactgcaaagcaaattttagttttagactcacaaaattattgtccttattgtgagaaatttaagcatgatgtgactagtggttataaaggaagcatcccacttagttacagaacctcagatcaattgcatggccttgaaatttcatctccaacttgggctacaccatcattaatttttctagaaaatggaaaagaagttttttcacatcaaggctatataaatcaaaaggatttttatcaactattaggtaaatttaaattaggagattctgaagcatataacgtggcatttaacaaaggaactgatgcgcgcttttgcaaagaatatcaaatttttaaaaatacaccggacggtttatttatagacaaactaagcggagaacctctatttgatacaaaaaatagatttgtctcaaggtcaggatggttatcttttcacaaaacctgttgag

SEQ ID NO: 224305 - DNA, 907 bp, Unknown
  Bacterial polypeptide expressing nucleotide sequence isolated from the Sargasso Sea
tatgaacaaactgactgattttgaacgctatgtcatagaagaaaagggcacagaacgtccctttagcggggagtattatcagcatgacgctaaaggcgtgtatttgtgcaaaaaatgccatgcgcctttgtatcgctcagaagataagtttaatgcccactgtgggtggccagccttcgatgatgaaattccaggcgcagtgagtcgccatgtcgacgccgatggtcgccgtaccgaaattgtctgtagtcagtgtggcggtcatttaggccatgtgtttgaaggggaatatttaacgccgaagaatattcgtcattgcgttaattctgtctccatggtgtttcaagcggccgatgaggtgacaacatcgactcataaaacggcctttgccacctttggtgcgggctgtttttggtgtgttgaagcgatttttaagagcctgaagggcgtgctgaatgtcagctctggttactcaggtggggatgctagcgatgccgattataagtcggtgtgttcgggattaactgggcatgccgaagtggtgcacatcgagtttgaccccgcgcaaatcagctttacgacgctgctgcaggtgttatttgagagtcacgatcccaccacgcttaatcgccaaggcaatgataaagggccgcagtatcgctccgtcgtctttgcccacgatgcggcgcagattgaagagaccaatgccatgattgccaaattaaccgaggcaagggtatttgatgcgccgatagtgacccaagtggtggcttttgagtcattttatcccgctgaggattaccacaatgactatttcgccctgcatggcgagcagccctattgccaaattgtggtgcggccaaaggttgaaaagatcagagccatttttgcagagctacaagcatag

SEQ ID NO: 224306 - DNA, 400 bp, Unknown
  Bacterial polypeptide expressing nucleotide sequence isolated from the Sargasso Sea
atgaataaaaaagttttaaaaacagatgttgaatgggcaacttgtttaactcctcaagagtataagatattacgcgaaaaaggtactgaaatggcttttactggcaagtattataatcataaagaggatggaacatatacttgcgcaggttgcgattatgaattattcagttcaaaaaccaaatttgattctggaacaggatggcctagtttttttcaagctatcgaaaaagatagaattattgaaaaagaagataaatcattaggaatgcgccggatagaaattctttgtgcaaggtgtgaatctcacttaggacatgtatttaatgatggccccaatccaactggattacgctattgcgttaattcagtatctttagattttaaagatttagaataat

SEQ ID NO: 224307 - DNA, 544 bp, Unknown
  Bacterial polypeptide expressing nucleotide sequence isolated from the Sargasso Sea
atgaataaggcatactttgcttcaggatgtttttggtgtgtagaaacaatctatgaaagtcttgatggtgtaaaagaagtttactctggttatgcaggaggattaacagttaacccaaattattaccaggttatttctggtaaaacaggtcatgcggaagctattgagattatctacgatagtgacattatttcatttgaaactcttcttaaggttttttttgattctcatgatccaacaactccaaatagacaagggcctgactacgggacccaatatagatcgatagcattttattctaatattgatgaaagaaataaaattacaaactatattaatatgttatctgcaaattcaatttttggaaaaaaaattattacagaggtaaaagagataagtaaattttactatgcagaggactatcatcaagactatgaaaaaaagaatccatacagtccttatgttcaaagtgtttcaatacctagatttaaaagatttaagaaaaaggcatccaattacgttaaaataaaagatgaccattagg

SEQ ID NO: 224308 - DNA, 397 bp, Unknown
  Bacterial polypeptide expressing nucleotide sequence isolated from the Sargasso Sea
atggataaagttgaaagaaccgataaagaatggcaggcatgcctgacccctgcggaataccaaattctaagggaaaaaggtacagaaagggcgtttacaggaaaatattataatcataaagaggtgggtacttacgtgtgcgctggatgcgataatgaactcttcagttctaataccaaatacgactctggttcaggttggcctgctttttatgacgctttagataagagcaaggttaacacaaaaatggattacagttttggaatgaaacgaattgaggttacgtgcgcaaaatgtgattctcatcttgggcatgtatttgaagatggaccaaagcctacaggactcagatactgtataaattccttagcgttagattttgtatcaaaaaaataat

SEQ ID NO: 224309 - DNA, 508 bp, Unknown
  Bacterial polypeptide expressing nucleotide sequence isolated from the Sargasso Sea
atgcaaaaagcaacatttggagctggatgtttttggtgtgttgaagcagtttttgaaagattagaaggcgttgttgatgttattcctggttattctggtgggcacaaaaataaccccacatataaagaaatatgcactggaatgaccggccatgctgaagttgctcaaataacttttgacccaaaagtaatcacgtttgatgatcttttgaatatgttttggaaatcacatgatccaactacacgtaatcgtcaaggaaatgatattggcactcaatacagatcagcaattttttaccataataatgaacaaaaaacaattgctgaagaatcgaagaataaggtggataattctaatattttttcaaatcctattgtaacagagattactaagctagaaaaattttgggttgcagaagattatcataataattattacaacaacaatatgaatcaaccatattgcaaatttatcattaaaccaaagctcgataaattatttaaataat

SEQ ID NO: 224310 - DNA, 550 bp, Unknown
  Bacterial polypeptide expressing nucleotide sequence isolated from the Sargasso Sea
gttgaaagtaacgaataacaatttaaaggaaaattccaattataaaaaagtctattttgctggaggatgtttttggtgtatggaagaatcctttgataaagaaaaaggtattattcaatctatttcaggatattccggtggacacttaaaaaatcctacttataaagaggtaatttataaagacactggtcacgtagaaactattgaaattacttatgaccctaaaatgacatcctataaaaaccttttggaagttttttggaaaaacattgatccttttgataaatatggtcaattttgcgataaaggaaaaagttatagatcagttattttttataagaataatagtcagaaaaaagttattcaaaaatccattgctgaaatagagcaaagatttaattctaaagtagttaccttattgtggaaatttgatagattttatcaagcagaggattatcatcaagattattatcaaaaaaattttttaagatatctagcttacaaaaaagcttgtcagagagaagaggtattaaataaaatatggaattaa

SEQ ID NO: 224311 - DNA, 571 bp, Unknown
  Bacterial polypeptide expressing nucleotide sequence isolated from the Sargasso Sea
tatgagaatttttttactattagtcacattaataatcataaatccagctttacaagctgaggaaaaaaaagcttattttgcaggtggctgtttttggtgtatggaggagtcattcgatcaagtggagggagtaacttcaacaatttccggttattctggtggacacttaaagaacccaaaatatgccgatgtaatttatacagactcgggacatgtagaggcaattgaagtctcttatgacccagctaagattgattaccaaaaacttttagacatatattggaaaaatatagacccattcgatgccaacggtcagttttgtgacaaggggaaaagttatagatctgtaattttttttgaaaatgagaaacaaaaagaacttattgataattcatttaggaaattagaaaatatatttaataaaaaaattgtcacattagtttggaaatttaaaaaattttacaaagctgaaacttatcatcaagattattatgaaaaaaattttataagatatttaatgtataaaaaaggctgtcaaagagaggaaactctaaaaaaaatatggaattaa

SEQ ID NO: 224312 - DNA, 508 bp, Unknown
  Bacterial polypeptide expressing nucleotide sequence isolated from the Sargasso Sea
aatgcaaaaggccacatttggcgctgggtgtttttggtgtgttgaggctgtttttgagcgcttagttggcgtaaaagacgtaatgccaggctacactggtggacataaaaataatccaacctacaaagaaatttgtactggaatgactgggcatgctgaagtagctcaagtcacatacgattcaaaaataatcacattcaacgagttattagatatgttttggaaatcacatgatcctaccacacgcaatagacaaggaaatgatataggaacccaatacagatcagctattttttatcataatgataaacaaaagttattagctgaagaatccaaattaaaggttgataactctcacatattcacaaaccctattgtcacagaaattacaaagctggataaattttggcctgcagaagattatcataacaattactacgcaaacaatatggatcaaccatattgcaggatagtaattaaaccaaaactagataaactatttaaataa

SEQ ID NO: 224313 - DNA, 448 bp, Unknown
  Bacterial polypeptide expressing nucleotide sequence isolated from the Sargasso Sea
aatggaaatagcagttttagcttgcggatgtttttggggacctgaaaaaaaatttggtagtctcaatggagtttataaaactgaggtaggttattgtggaggtaaaactgaaaacacaacttataaagaagtttgttctggtgaaacaaatcatgctgaagtagtaaaaataaattttgatccaaaaattattacttatgaggaaattttaaattttttttttaaaattcatgatccaactactttaaattctcaaggtccagattttggaactcagtacagaagtgaaattttttatttaaacacaaaacaaaaagaaattgctgaaaaggtcttaaaatcaaaaaacaatgatttttcaggaaaaattgttactaaattatctttgctaaagaattattgcatagctgaggaataccatcaaaaatatttagacaagaaattttag

SEQ ID NO: 224314 - DNA, 445 bp, Unknown
  Bacterial polypeptide expressing nucleotide sequence isolated from the Sargasso Sea
aatggaaatagcaattttagctggtggttgtttttggggtatggaggatttgatgaggaagattcctggtgtacagaaaacgcgtgttggttacacgggtggacacttaaaaaatccaacttacaaagatgtctgtacagaaactactggccatgccgaggcaattgaaattctttttgacccatcgagagtatcatatcgccgcttgttagaatgtttttttcaaatccatgaccccacaaccattgataggcaaggaaacgatattggggatagttatcgatcacatatttttactacttcgtcagagcaacgtgaagaagcttttaaaatgatttccgatatcgaaagttcaaaaaaatggccaggtagaattgttacgaaagtaactcctgcggaagagttttgggaagctgagtcgtatcacccaagattacttagttaa

SEQ ID NO: 224315 - DNA, 562 bp, Unknown
  Bacterial polypeptide expressing nucleotide sequence isolated from the Sargasso Sea
aatggcaggaaaattaaaggtatctactggaaaagcaaatgagaatttaagttttaaaaaagcctattttgctggaggctgtttttggtgtatggaggagtctttcgataaagttgatggagttattaaatcaatttcaggatattctggtggaaagatgaaaaatcccacttaccaagacgtaatttataaggacacaggtcatgtggaggctattgaaatcacatatgatccaaaaaaaatatcttatgaaaaacttttagctattttttggaaaaatattgatccatttgataaatatggtcaattttgtgataagggcaaaagttatagatcagttattttttttaagagtgataaacaaaagagtattattcaaaactcagttgctgaagtagaaaaaagatttaattctaaagttgtcacaatggtgtggaaatttgataaattttatcaagctgaagattatcatcaagactattatcaaaaaaattttttacgatatcttgcttataaaaaagcttgtcagagagaagaggtattagataaaatatggaattaa

SEQ ID NO: 224316 - DNA, 451 bp, Unknown
  Bacterial polypeptide expressing nucleotide sequence isolated from the Sargasso Sea
aatggaaatagctgtactcgccctaggttgtttttggggtccagaaaaaaaatttggtaaaattgaaggaatagttgagactgaagtaggatactgtggaggaaaaataccaaatgtaacttataaagaagtttgtcaaggtaatacagagcatgcggaggttgtaaagttaacttatgataataataaaatttcatttgaaaaaatactagaatatttttttgaatttcatgatccaacaactttaaatagacaaggtccagatatcggaacacaatatagaagtgaaattttttgtattaatgataagcaagaaaaaatatctttttctgtgatagagaagataaaaagtaattttaatttaaaaatcgtaacaaaaatctctaaaatcaaaaactatactaaggctgaggagtatcatcaaaagtacttagagaaaaatcagttttaa

SEQ ID NO: 224317 - DNA, 397 bp, Unknown
  Bacterial polypeptide expressing nucleotide sequence isolated from the Sargasso Sea
aatggaagaaaaagataaaagaaaagaagatctaacgcctgagcaatattatgtaactcaacaagaaggtacagagccagcttttagtggtaaatatacatacactgaaaccaaaggttcttataattgcgttgtttgtggcgaacctctatttgattcggatacaaaatttgattcaggaacaggatggcccagtttttgggagcctatccaagctgagagtgtagaaacacaagaagatcattcattgggtatgactagaacagaagttcattgcaagaagtgcaaagcacatttagggcatgtttttcctgatggcccaaaccctacgggcttgaggtattgtattaactcggtatctttagaccttgaagcagaagaggatcaagctgactga

SEQ ID NO: 224318 - DNA, 574 bp, Unknown
  Bacterial polypeptide expressing nucleotide sequence isolated from the Sargasso Sea
gatgaaaaaaattttactttttgtcactatatttttaataaacctaaatcttagtgccagtgaaaataaaaaagcttattttgctggagggtgtttttggtgcatggaagagtcgttcgactcagttgatggagttttatcctctatatctggatattcaggaggccatttaaaaaatccaacctatcaagatgttatttataaagacactggccatgtagaagctatagaaataacatatgaccctgaaattgtaagttatgagaaacttttaaatgtttactggagaaatattgatccatttgatgctcaaggacaattttgcgacaagggaaaaagctatagatcagttattttttttcagaatcaactagagaaagaatttattaataaatcttttaaagatctggaaaataaatttagtaataaaatagtcactttagtttggaaatttgataaattttaccctgctgaagattatcaccaggattattatgaaaaaaattttattcgttatttaatgtataaaaaagggtgtaaaagagaagaaaccttgaagagaatatggaattaa

SEQ ID NO: 224319 - DNA, 364 bp, Unknown
  Bacterial polypeptide expressing nucleotide sequence isolated from the Sargasso Sea
tatggaaaaaaaattatctgaagaacaaaaggaaattttatattcttgtggaacagaagtgcctggaacaagtgaactacttcatgaaaaaagagaaggtgtttatgtaacagcagataaagaattgccagtttttaaatcagagcataaatttgagtcaggaactggttggccaagtttttatgaagctaatcatgaaaacattattcttaaagaagacagatcacatgggatgattagaactgaagttatttctaaagaaggcgaacatttaggtcatgtatttaatgatggtccacaacccactggattgagatattgtattaatggacttgctttaaaatttattcctgaaaacgaataa

SEQ ID NO: 224320 - DNA, 409 bp, Unknown
  Bacterial polypeptide expressing nucleotide sequence isolated from the Sargasso Sea
atgaataaagaaaaagattctttgaagaagaagctttctccagaagaatatcgagttactcaggagaaaggaacagaaatgccattcactggaaacctattgaatgagcatcgtttcggagttttcaaatgcatctgttgtgaacatatgttgttttcatcagaacataaattcgattcaggaactggatggcctagtttttttgatgtgatttcagaaaaaaatatcaaaacaaaagttgacccaaaacacataagaccagatgggacgagctctggtttagaagttttatgtaatatgtgtgatgcacatctggggcatgtttttgaggacggtccagcaccaacaggattgaggtactgcattaattctgtttcattggatttcgaaactagtcagtctggttgat

SEQ ID NO: 224321 - DNA, 388 bp, Unknown
  Bacterial polypeptide expressing nucleotide sequence isolated from the Sargasso Sea
atgaaaaaagttaataaaaatctaacatctgaagaaatttttattcttcgtgacaaaggaacagagagaccattctctggaaaatttgacactttttttgaggaaggcgtctacaaatgcaaaaactgtaatgcagaactgtttaaatcggatagtaaatatgatgctggttgtggttggccaagtttttttgaggcaattgacgaaaaatcaatattatataaagaggataattctatttttggaaggccacgcacagagattctttgtgctaagtgcgaggggcatttagggcacgtatttgaggatggtcctgttgaaaaaactggtctaaggtattgtgtgaattcaatttctttagacttcgaatcgaagaaaaataattgaa

SEQ ID NO: 224322 - DNA, 442 bp, Unknown
  Bacterial polypeptide expressing nucleotide sequence isolated from the Sargasso Sea
aatggaaatagctatattagcactaggatgtttttggggaccagaaattaaatttgataaacttgaaggagtcacaaaaactgaagttggctattgtggtggaaatagcgaaacaacgacttacgagaaagtttgttcaggaaacactaatcatgcagaagttgtaaaaatagaatttgatccaaaaaaaatttcttacgaaaaaattttacaatatttttttgaaattcatgatcctacaactttaaattctcagggtcctgatattggtactcaatatagaagtgaaatattctacttaaatgaaaatcaaatgaaaattgctgaaaatattattgaagaaaataataaaaaattatctggcaaggttgtaacaaaattatcaaaaataaaaaattattgtaaagctgaagattatcatcaaaaatatttagaaaaataa

SEQ ID NO: 224323 - DNA, 655 bp, Unknown
  Bacterial polypeptide expressing nucleotide sequence isolated from the Sargasso Sea
atgattaatttgtttacacttatttcaataatgtcatgtaatataagtgctccacaacccatagataaccaacaaccagtttattctatagataatcaagattattcacaatattcaaaagcatattttgcatcaggctgtttttggtgtgttgaaacaatatatgaaagcctagagggtgtgaaagaagtttattctggatatgcaggggggtctactgttaatccaaactattatcaagtaatgactggaagaactggtcatgcagaatctatagaaatcatatatgatgaatctgtaataaagtttgaaatgcttttaaaagtattttttgattcacatgacccaacaacaatgaatagacaaggaccggattatggaactcaatatagatcaattgctttctactcagatgaaagggaaaaggaaaagattaataactatattaatttattatcatctaattctatttttggaaagaatattgttacagaagttatgaaaattgatgagttctattatgcagaagattatcatcaagattttgagagaaagaaccctaacaatccatatgttcgaaatgtttctattcctaggtttaaagagtttaagaaaaagacatcaaactatgttaaaattaaagaggatcattaat

SEQ ID NO: 224324 - DNA, 397 bp, Unknown
  Bacterial polypeptide expressing nucleotide sequence isolated from the Sargasso Sea
atgtccgagagaatcgaacgctcccctgaggagtggaagcagaagctttctccggagcagtttcaggtggcccgctgcggtggcaccgaacgggccttcacaggggcttactggaacaagaaagacagcggcacataccactgcatctgctgcgacgcaccgctgttcagctcgcagaccaagtttgagtcgggcaccggctggcccagcttctgggatggggtttcctcggaggccatcaccaccaagcaggacctgagccacggcatggtgcgcgtggagatcaactgcgcccgctgcgatgcccacctcgggcacgtcttccccgatggccccgctcccaccggtcagcgttactgcgtcaacagtgcctcgctggatttcaaggccagttgac

SEQ ID NO: 224325 - DNA, 445 bp, Unknown
  Bacterial polypeptide expressing nucleotide sequence isolated from the Sargasso Sea
atggaaatagcagtattagcttgtggatgtttttggggacctgaaataaagttcagtagattagatggaatttttaaaactgaagtaggttattgtggaggtaacacgaataaaacaagttatcaagaagtttgtgaaggagacacgaatcatgctgaagttgttaaattagactttgatccaaaaataatttcgtatgaaaaaattttagattacttttttgaaatacatgatcctacaaccttaaattctcaaggaccagactttggtacacagtatagaagtgaaattttttatcttaatgatgaacaaaaaaatattgcaaaaaaaataatagaaaaatataacaaaaaatattttggcaaagtggttactaaaatttcacaaataaaaaattattgtacagctgaagaatatcatcaaaaatatctggaaaaaagataaa

SEQ ID NO: 224326 - DNA, 451 bp, Unknown
  Bacterial polypeptide expressing nucleotide sequence isolated from the Sargasso Sea
tatgaagaaatgtacacttgcacttggatgtttttggaaacctgaggaaaactttaaagataaagatggaattattgaaacagaagtaggatacgctgggggaaaaaatcctattattacttataaagaagtatgtgaaggtgacacaggccatgcagaagtagttaggattacattcgatgaaaaaataatttcttttagaaaaatattggatttattttttaaaatgcacgacccaactcagaaagatatgcaatttccagacgtaggaactcaatacagaagtgaaatattttatgaatcagatgaacaaaaaaaggaagctgaggaagttttaaatgaaaaaaataaagaatttaatgggaaaattcaaacaaatatatctaaagttaaaaattactgtaaggcagaagaatatcatcaaaaatatatagaaaaaaataaattatga

SEQ ID NO: 224327 - DNA, 448 bp, Unknown
  Bacterial polypeptide expressing nucleotide sequence isolated from the Sargasso Sea
atggaaatagcaattttagcacttggatgtttttggggacctgaaattaattttagcaaattagaaggtgttgaaagtacagaagtaggttactgtggaggcaatcataaccagactaattatgaagaagtttgctctggcaatactaatcatgctgaggttgtaaaaataaaatttgataactctaaaatatcttatgaaaatattttaaattatttttttgaatctcataatccaacaacattaaataggcaaggtcctgatataggaacacaatacagaagtgaaatattttattcaaatgataagcaaaaaaaaattgctgaagatattttgtctaaatataatataaaatataatggcaagatagttacaaaaatttctaaaattaaaaactattgtaaagctgaagaatatcatcaaaagtaccttgaaaaaaaattttaat

SEQ ID NO: 224328 - DNA, 500 bp, Unknown
  Bacterial polypeptide expressing nucleotide sequence isolated from the Sargasso Sea
gatgagacggctactgctggctgtgctgatcgggttgctggcgctcccctccgccgtgatggccgacacggagaccgccgtcttcgccggaggttgcttctggtgtctggagcacgatctggaggatcttcccggtgtgctggaggccaccagcggctacagcggcggccatgtggacaaccccacctaccgccaggtgagcggcgaaaccacgggtcatcaggaggtggtggaggtgcggtttgacccggaccatatcagttacggcacgctgctgcgcagttactggcgcaatgtggaccctttggatgggggcggccagttctgcgaccgtggggactcctaccggcccgtgatcttcacagcggatgcagctcatgcccgtgaagctgaagcgagtgcccaggctgctgccgtggagctgggacaaccccgctcggcgctgaaggtggagctgcgggatgccgcgcgcttctggcgagccgaggataatcaccaga

SEQ ID NO: 224329 - DNA, 463 bp, Unknown
  Bacterial polypeptide expressing nucleotide sequence isolated from the Sargasso Sea
atggataaaaataatgcgaatattgttctactcggttcaggatgtttctggcatcctgagatgatattccacagaacagacggtgtcattagcacaaaagttggttatgcaggcggtaccacagaaaaccctacctacgcagaggtttgttcgggtcaaacgggccatgctgaagttgtaaaagttgagtttgatacaaatataattgattttaataagctactagatatcttttgggatattcatgatccaactcaaatcaatagacaaggtgttgacattggaacgcaatacagatcttgtatatttacggattatgagccatacatcgagattgccaaaaatgccattgatgctctcaacacatcaaagcgctacaataatccgatttcaactattctttacgaaaatgtgaccttctttgaagccgaaaattaccatcaaaaatacctattccgctagg

SEQ ID NO: 224330 - DNA, 316 bp, Unknown
  Bacterial polypeptide expressing nucleotide sequence isolated from the Sargasso Sea
gaacgcgcctttactggaaaatataataatcataaagaagagggtgtttacgtttgtgcaggttgcgataatcaattgtttagttcaaaaacgaagtatgattcaggctcaggctggcctgctttttatgatgctcttgataaaacaaaagtaaatacaaaaatggattatagctttggaatgaagcgtatcgaagttacctgtgctaaatgcgactctcacttaggtcatgtatttgaagatggacccagacctacaggactaagatattgtataaattccttagcattagattttgtatcaaaaaataactaac

SEQ ID NO: 224331 - DNA, 451 bp, Unknown
  Bacterial polypeptide expressing nucleotide sequence isolated from the Sargasso Sea
tatgaaaaaagctatttttgcattgggatgtttttggaaacctgaagaaaacttttctaaattaaatggaattataaatacggaagttggttattgtggtggtaatgcggataaaactacctatgaagatgtatgtagtggagaaacaaaccatgcagaagttgtaaaaatagagtttgatgaaaaaaaaatatcctatgaaaaattagtagaaaaattttttgaaatgcacgacccaaccacacttaataagcaaggcccagatgtaggcactcaatatagaagtgaaattttttttcttgatgatgaacaaaaaataattgcagaaaaagttaaaacaaatctggacggtaaatataaaagaaaaatagttacaaatatttctaaagaaaaaaattattgcaaagcagaagattatcatcaaaaatatattcaaaaaaatagtttgtaa

SEQ ID NO: 224332 - DNA, 559 bp, Unknown
  Bacterial polypeptide expressing nucleotide sequence isolated from the Sargasso Sea
atgaataaacataaatatttcatagctttatttttcttttttactggctttacactttcaaaccagactaatcatatccaaaccatttatcttggttcaggatgtttttggggtgctgagaagggttatgaagccctagatggagtaataaatgctaagtcaggatatgcaaatggatatggtgttagcccaaattacagatcaattatccaactcaaaaataagttcaacaagaataactttgctgaggttgtggaagttaccttcaacaacaactttattactgtagaagaaatcttaatgcatttttttgaatctcatgatccaactcaatataacagacaaggtaatgacatagggactcagtacaggtcaacaattttatattcagatgatgatcagaaagaaattgctgaaatgctaaagaaaaaatatcaaaaccttttaagtgattatggctatgggctaattaaaactattattgaaccgctagacaatttttatttagctgaagagtatcatcaagattaccttaagaaaatccaaatggatattgtcc

SEQ ID NO: 224333 - DNA, 451 bp, Unknown
  Bacterial polypeptide expressing nucleotide sequence isolated from the Sargasso Sea
tatgcaaaaatttatagggggcattggctgcttttgggatgaaaccgaatatcaaggtgttcctggtattatttctactgagtgtggttattgcggcggaaaagatccaaaagtaacttatgaacaagtttgtggtggagatactgaacatatagaagtagttaaggttacatttgatcctaaagtaattacttatgaagacgtaaccagattattctttaaaatccatgatccaacaactcttaatcgccaaggacctaatgttggttatcagtatagatcagaaattttttatactacagacgaagaaaaaacatctgctcaaaaagtattagatgaggttaataaaaaacttaatggtgcagtagttaccactattagaaaagaaaaaaattattgtaaagcagaggagtatcatcaaaagtattttgaaaaacgaagtaaaaaatga

SEQ ID NO: 224334 - DNA, 445 bp, Unknown
  Bacterial polypeptide expressing nucleotide sequence isolated from the Sargasso Sea
atggaaatagcaattttaggtttgggatgtttttggggaccagaaattaagtttagtaaacttgatggagttattaaaactgaagttggatattgtggtggtcataatgcagaaacaaattacaaagaagtgtgtactggttcaacaaatcatgcagaggtggttaaattagattttgatccaaaaataatatcttatgaaaaaattcttgaatttttttttgaaattcatgacccaacgacacttaattctcaaggaccagattttgggacacaatatagaagtgaaattttttatttaaatgataatcaaaaaattactgcagaaaatattataaataaagaaaacgaaagactgtctggaaaagttgtaactaaattatctcaagttaaaaactattgtccagctgaagaataccatcaaagatatttagaaaaaagataga

SEQ ID NO: 224335 - DNA, 1199 bp, Unknown
  Bacterial polypeptide expressing nucleotide sequence isolated from the Sargasso Sea
aatgagaaaaataaccctatcattatttttatttacagcttctttttttagcctattttccctttcaagtgttaacgaagcgactatacattctgaaaaaattgttcttggttcaggctgtttttggggagcagaaaaaggttatgaggctttaccaggagtcatcgatgcagtttctggatatgctgatggtagaggtatccgaccaacctatagggagattacaaagttaagaaataaatttaatgcaaataaccacgctgaagtagtcgaggtcacgttcaacaagaatattatttcaacagaaaaacttttaatgcattattttgaatctcatgatccgactcaaataaacagacagggtaacgacattggtacccaatacagatctattattttgtattccaatgaagaacagaagaagattattgagagggttacccaaacttttcaagaacttttattaaatgcaggatatggacttattgctacttcagttaagccaatcgaaaaattttataaagctgaaaactatcatcaagattacattgcaaaaaatccaaatggttactgtccagatcactccacgggagtcaagtttgctaaaaccaatgaagtacctttaatagacaattctgtgcttttgactggaaaaaaaatactagttattcaagcagaagggttttgcccctattgtgaaaaatttaatgcgaatgttgttaataattatgatggtgatattccagttatctatagatttgcacaccagttagatggtcttgagatttattctccaacatgggccaccccaactatttttttcttaaataatggtaaagaggtttttgctcatcaaggctacttaaatccaaaggaattttatcaggcacttggtttcttcaagttaggagactccgaagcttatagagttgcatttgaaaaagggacagacgcaagattttgtaaagaatatgagatttttaaaaatacacccgatggcatattcgttgataagctcagcggagccccactatttgataccagagatagattcaactcagctacaggttggctgtcttttactaaacctattgatggatcggtttattcaaagccagacaatagctatggaatgcgcaggactgaaattagatcagtgacttcagatattcaccttggccatgttttttctgatgggg

SEQ ID NO: 224336 - DNA, 448 bp, Unknown
  Bacterial polypeptide expressing nucleotide sequence isolated from the Sargasso Sea
tatgaagaaatgtacacttgctcttggttgtttttggaaacctgaggaaaacttcaaaaacaagcaaggtataattgaaacagaggtcggctatgctggtggattatccgataaagttacatatgaggaagtatgtaaaggagacactggtcatgcagaagttgtaagactgacttttgatgaaaaagtaatttcatttaaaaaaattttaggtttattttttaaaatgcacgacccaactcaaaaagatatgcaatatccagatgttggcactcagtatcgaagtgaaatattttatgaagatgatagtcaaaaagctgaagctaaagaaattttagaaacatttaacaaagagctaaatgggaaaattcaaactaatatttctcaactcaaaaattattgtaaggctgaggagtatcatcaaaaatacttagaaaaaaatagataa

SEQ ID NO: 224337 - DNA, 448 bp, Unknown
  Bacterial polypeptide expressing nucleotide sequence isolated from the Sargasso Sea
aatggaaattgccataatagctttgggatgcttctggggaccagaaattaagtttagtaaacttgaaggggttttaaaaactgaagttggttattgtggaggaaacagcaacaaaacaacctatgaagaagtttgtactggtactacaaatcatgcagaagttgttaaaattgaatttgatcctaaaataatatcatatgagcagcttctaaattatttctttgatattcatgatcctacaacattaaatgctcaaggacctgatattggaacacaatatagaagtgagattttttatttaaatgaaaatcaaaaaaatattgctcataaagttttaaaggaaaggaatattaaactttctggcaaaatagttactaaaatctcaccagataaaaactactctactgcagaaaactatcatcaaaaatatttagaaaaaagattttag

SEQ ID NO: 224338 - DNA, 388 bp, Unknown
  Bacterial polypeptide expressing nucleotide sequence isolated from the Sargasso Sea
aatggaaatagcaatcttaggtttaggatgtttttggggaccagaaagaaaatttggtgaaatagagggtgtaactaatactgaagtaggatactgcggcggaaaaaataaagatacaaattatcaagaagtttgcactggtaacactggacatgctgaagtagtaaaaattgagtttgatgaaaatatcatttcatacgaaaaaataataaatctattttttgattttcatgatccaacaactcttaaccaacaaggtccagatataggaactcagtatagaagtgaaattttctatttaaatgaaatccaaaaaaaaatagctggaaaaattttagataagagaaatttagattttaaaggcaggattggttacaaaaataactga

SEQ ID NO: 224339 - DNA, 397 bp, Unknown
  Bacterial polypeptide expressing nucleotide sequence isolated from the Sargasso Sea
tttagtaaaatcaatggtgtaaataataccgcagttggatattcaggaggaaatactgaaaatccgacttatgaagaagtgtgtcaaggcgacacagagcacgttgaagtagttgaaataaattttgatgaaaatattattagttatgaaaatttgcttgagcatttttggaattgtcacgatcctactcaattaaatagacaaggtcctgatgtaggtaggcaatatcggtcagctattttttattattctgatgatcaaaaaattacagcagaagtttcaaaaaaagaaatacaaaatagttttaataataagattgtaactgaaatagttgaagcaaaaactttctatttagctgaagaatatcatcaacaatatttaaaaaaaagagcttaaa

SEQ ID NO: 224340 - DNA, 448 bp, Unknown
  Bacterial polypeptide expressing nucleotide sequence isolated from the Sargasso Sea
atgaagaaatgtacacttgctcttggttgtttttggaaacctgaggaaaacttcaaaaacaagccaggtataatcgaaacagaggtcggctatgctggtggattatccgataaagttacatatgaagaagtatgtagaggagacactggtcatgcagaagttgttagactgacttttgatgaaaaagtaatttcgtttaaaaaaattttagatttattttttaaaatgcacgacccgactcaaaaagatatgcaatatccagatgttggtactcaatatcgaagtgaaatattttatgaggatgatagtcaaaaagctgaagctaaagaaattttagaaacgtttaacaaagagctaaatgggaaaattcaaactaatatttctcaactcaaaaattattgtaaggctgaggagtatcatcaaaaatacttagaaaaaaatagataat

SEQ ID NO: 224341 - DNA, 397 bp, Unknown
  Bacterial polypeptide expressing nucleotide sequence isolated from the Sargasso Sea
atgtcaaagataattaaaacagatcaagaatggaaatctcttctcacagaagaggagtattatgtaacaaggcaaaagggaacagaacctccattttccggtaaaaattttgaaattattaatggtggtatttttaaatgtaaatgctgtggtaatgaattatttaatagttcaacaaaatatgattcttattgtgggtggccaagtttttttgagcaaatatcacctgaagcaattaaaacagagactgatagatctcatggaatggtgcgtattgaaattatgtgtgccaaatgtgatgctcatttaggtcatgtctttgatgacggcccagagcctactggcaaaagatactgtgtaaattctctttctattaattacgaagagtttgaataat

SEQ ID NO: 224342 - DNA, 412 bp, Unknown
  Bacterial polypeptide expressing nucleotide sequence isolated from the Sargasso Sea
aatgactaagactgccatatttgctgctggatgtttttggggtatcgaagaaaaattcttatctactgatggagtaatagaaactgaagttggctatataggaggcaaaactcctagtccttcatatcaagatgtatgcgagggagacactaatcatgctgaagccgtaagagttcattataatgaagaagaaataacatatgacaaccttttagatatattttttgacatacatgatcctacacaacttaatagacaaggcctagattttggtactcaatatagatcttcaatttttgttttggatgaatttcagaaaatgtccgcacagaataaaataaatatacttaatcaagataagtttaatggttgcattgttacaacaattgaagaagctaatgaattttggcta

SEQ ID NO: 224343 - DNA, 445 bp, Unknown
  Bacterial polypeptide expressing nucleotide sequence isolated from the Sargasso Sea
aatggaaatagcagttttagctcttgggtgtttttggggaccagaaataaaatatagtaaaattgagggagttataaaaacagaagttggttattgtggaggtgataatccaactacaacttataaagaggtatgtacaggaaaaacaaatcatgctgaagttgttaaacttgagtttgatgaaaagattatatcttacgaaaaaatcttaaaaatattttttcaaattcatgacccaactactttaaactctcaagggccagattttggtactcaatatagaagtgaaatattttatctaaacgataatcaaaaaaatatagctgagaaagttttaaaagatactaatttgagaatgtctggtgaagtagttacaaaaatttcattactaaaaaattattgtccagctgaagagtatcatcaaaaatatttagaaaaaagatag

SEQ ID NO: 224344 - DNA, 538 bp, Unknown
  Bacterial polypeptide expressing nucleotide sequence isolated from the Sargasso Sea
atgagttcaacaacgcaagtagcaacctttggtggtggctgtttttggtgtattgacgcagcatttaggcgtgtaaatggcgtgtctgatgtaagctcgggttataccggtggcaatactgacaatccaacatacaaatctgtatgcagtggtacaacgggccatgccgaagtagtaaaagttgaatttgatagcactattgtaagctttgaaacattgctcgctatgttttttactttgcacgatgctacgcaattaaatcgccaaggtaacgatattggcacacaataccgaagtgttgtttattaccataatgacgaacaacttgcgcttactaacactatgattgaacagctacaaacccatgttagtgagcctattgttaccgaagtcagcccggtgacaacatactaccctgctgagcactatcatcaagattactacaacgaaaaccctcaacagggttattgcagtatgttaatcgcaccaaaattacataagtttgaaaccgtatttaaagagtttttagctgagtaaa

SEQ ID NO: 224345 - DNA, 292 bp, Unknown
  Bacterial polypeptide expressing nucleotide sequence isolated from the Sargasso Sea
aatgagaatttttttactattcgtcacattaataatcataaatccagttttacatgctgaggaaaaaaaagcttattttgcaggtggttgtttttggtgtatggaggagtcattcgatcaagtggagggagtaatttcaacaatttctggttattctggcggacacttaaagaacccaaaatatgctgatgttatttatacggactcggggcatgtagaggcaattgaagtcacttatgactcagctaagattgattaccaaaaacttttagacatatatggaaaaatatag

SEQ ID NO: 224346 - DNA, 553 bp, Unknown
  Bacterial polypeptide expressing nucleotide sequence isolated from the Sargasso Sea
attgttcttcataattttatcaacaaatttatatgcctcaggtattaaaaaggtttattttgctggtgggtgtttttggtgcatggaagagtcatttgataaagttgaaggagttatcgaaaccatctccggatactctggcgggcatgtaaaaaaccctaaatacaaagatgttgttaagaataccactggtcactatgaaactttagagattacttatgacccatcaatcacaaactttgagaagcttttagaaattttttgggttaatattgatccatttgatgccgatggtcaattttgtgacaaaggtgaaagttataagtcagtagtcttttatgaaaatagtgatcagaagaaaattatagagacttcaattaagaatattgaaaataaatttaataaaaaagttgttacttacgttaaaaatttcaaggaattttatatggcagagacataccatcaggattattatgaaaagaatttcataaggtatctgatgtacaaaaaaggatgtcaaagagaagaagtgttaaacaaaatttggggatga

SEQ ID NO: 224347 - DNA, 409 bp, Unknown
  Bacterial polypeptide expressing nucleotide sequence isolated from the Sargasso Sea
tctgaagggggtgattgtggacgacatagaagtcgttaaagaaattaatagaaccgactctgagtggaggcaattgcttgatgagtcaaggtactccgttttaagggaaaagggaaccgagagagcctttactggcaactacttaaaccacaaaggtgttggtatctacgcgtgtggcgcatgcggacaagatcttttttcgtccaaggcaaaatatgattcaggttcagggtggccaagcttttataagccaattagtccggagacaattacagaagtcgaggaccattcactcggtatgattcgggtagaagttacttgtagtgcatgcaaatcgcacttggggcacgtatttaacgatgggccgcgtgaaacgacaggacttcgatattgtatcaattctgtctct

SEQ ID NO: 224348 - DNA, 515 bp, Unknown
  Bacterial polypeptide expressing nucleotide sequence isolated from the Sargasso Sea
agagactaaaaaagcatattttgcaggaggttgcttttggtgtatggaagagtcttacgaccaagtagatggagttttatcatcaatttccggatactcgggagggcatcttaagaatccaaaatatgaggatgttatttacaaagatactggtcacgtagaagtaatagaggttacatataaccctttagtggtgaactataaagatttattaaatgtttattggaaaaatattgatcccttcgatgcttcaggtcaattttgtgataaaggcaaaagttatagatctgtgattttttttgaaaataatagtcaaaaagaacttattgatcaatcatttaaagaaatagaaaaaaaatttgataaaaaaatcgttactttagtttggaaatttgaagttttttaccctgctgaaaattatcaccaagattattatgaaaaaaattttattcgttatctaatgtacaaaaacgcttgtaaaagagaagaaatattaaaaaagatatggaattgaa

SEQ ID NO: 224349 - DNA, 913 bp, Unknown
  Bacterial polypeptide expressing nucleotide sequence isolated from the Sargasso Sea
atgaggttttcttctttattagttctttctctactaagctttagcttagttgcacaatcaaatcaatctacttctcatctagagaagattgtcttaggttctggatgtttttggggtgcagaaaagggttatgaagctttacctggagtcgtagatgctgtttcgggttacgcagatggatatggagtccgaccttcctatagagaaataactaaatatatcaataagttcaatcctaataaccatgctgaagtagtagaagtaacttataacaaaaatattatttctaccaaggacctgctggaacactattttgaatctcacgatccaacccaattaaatcaacaaggaaatgatataggtacgcaatacagatctataattttatacaccaataaagagcaacaaagaactgccgagaaacttatttttgaataccaacaattacttactaattctggatatggacaaattgcaactgtagttaaatctttagatgagttttttagagcagaaacctatcatcaagattatattgccaaaaaccctaatggctattgtccagatcattctactggcatcagattcgctaaggataatcctattgaacgaaaggataatagtgaacttttaaaaggaaaaaacatagtagttattgaaccgcaagggtattgcccttattgtgaaaaatttaaagctttggtcgcagagaattatcagggaagcattctaatacattttagattggcactgcaattagatagtctacaaatagatactcctacctgggcaacccctacaattatatttttggaagaaggtaaggaaattttttcacatcaagggtatatgtctcccaaagaattctacaaagctctggggttttttaagcttggtgattcagaagcctacg

SEQ ID NO: 224350 - DNA, 481 bp, Unknown
  Bacterial polypeptide expressing nucleotide sequence isolated from the Sargasso Sea
atggcgttagcaactttcggtgccggctgtttttggggcgtggagtatttctttagacaagtcaacggcgtgaccaacgcgacctgtggctatatgggtggcaataacgaagcgaccacctatgaggaagtcaaaaaaggtaagacaggccatgctgaagtcgtgcaagtagaatttgaccctgcgattgtcagctacgacgagttactggatgtgttttggaagaaccacaaccccaccacgctcaatatgcagggtggcgatattggcactcagtaccgcagtaccattttcttccatgaccgtgagcaaaaagcgacggccgaagcttctaaactggcctttgcccgctcgggccgctggggattacgccacattgtcactgaaattgtacctttgcagcaattccatgtggctgaggaatatcatcaaaactatatcgataagaacaacttaccaagttgccatctcgagtattgat

SEQ ID NO: 224351 - DNA, 574 bp, Unknown
  Bacterial polypeptide expressing nucleotide sequence isolated from the Sargasso Sea
tatgaaaaaatatttatttataatttttatttttttaataagcacgtctgctcaatcaaaaaattttaaaaaagtgtattttgctggaggatgcttttggtgtatggaggagtcttttgatggagttgagggtgttttgtcaacagtttcaggttattcaggtgggcacttaaaaaatcctacttaccatgatgttatttataaagatacaggccacgtagaagccttagaaataacttatgatccaaacaaagtaaattttgaaaaattactcaatattttttggagaaatatagatcctttcgactcagaaggtcaattttgcgacaaaggtaagagctatagatcagttattttttatcaaactcaactagaaaaagaatttattgaaaaatcctttaaaaattacgaaaaaaaatttagtaaaaaaattgtcactttagtatggaaatttgaggaattttatcaagctgaagattatcaccaagattattatgaaaaaaattttattcgttatctaatgtacaaaaaggcgtgtaaaagagaagataccttgaaaaaaatatggaattaa

SEQ ID NO: 224352 - DNA, 442 bp, Unknown
  Bacterial polypeptide expressing nucleotide sequence isolated from the Sargasso Sea
atggaaatagcagtattagcattaggatgtttttgggggccagaaattaaatttggaaaacttgaaggaattataaaaacagaagtaggttactgcggaggaaataatgacaaaacaacttatgaggaagtttgttcaggaaacaccaatcatgctgaggttgttaagctagaatttgatcctataaaaatttcatatgaagaaattttgcattatttttttgaaattcataatcctacgactttaaatgcgcagggtcctgatattggcactcaatacagaagtgaaatattttatataaacgaagaacaaaaaaaaattgctgaaaaaataattgaagaaaatgataaagaattatctggcaaagttgttacaaaattatcaaaactaaaaaattattgtaaagctgaagattatcatcaaaaatatttagaaaaataat

SEQ ID NO: 224353 - DNA, 445 bp, Unknown
  Bacterial polypeptide expressing nucleotide sequence isolated from the Sargasso Sea
atggaaatagcaattttaggcttaggatgtttttggggaccagaaattaagtttggtaaacttgatggagttatacaaacagaagtaggttattgtggaggtaacaatgccgaaacaaattacaaagaagtatgcacaggcacaacaaatcatgcagaagtggttaagttaaattttgatcctaaagtaatatcttatgagaaaattcttgaatatttttttgaaattcatgacccaacaaccttaaattatcaaggaccagattttggaactcaatatagaagtgaaatattttatttaaatgatcagcaaaaaattattgctgaaaaaatgatagaaaaagaaaacctcaaattatcaggaaaagttgtaactaaaacttctttagttaaaaattattgcccagctgaagagtatcatcaaagatatttggaaaaaagataaa

SEQ ID NO: 224354 - DNA, 445 bp, Unknown
  Bacterial polypeptide expressing nucleotide sequence isolated from the Sargasso Sea
aatggaaatagctgttttagcacttggatgtttttgggggcctgaaataaagtttagtaaaattgaaggtattatcaaaacagaggtgggttactgtggtggtaatagtcctactacaacttataaagaggtttgcacaggtaaaacaaatcatgctgaagtagtaaaaattgattttgatgaaaaagtcataacctatgaaaaaatattaaaaattttttttcaaattcatgatccaacaactttaaactctcaagggccagattttggcacccaatacagaagtgaaatattttatttaaatgataatcaaagaataatagctgaaaaagtacttaaaaatgaaaatcaaagaatgtcaggtaaagttgttacaaaaatttctttattaaagaattattgcccggctgaggaatatcatcaaaaatatttggaaaaaagataa

SEQ ID NO: 224355 - DNA, 907 bp, Unknown
  Bacterial polypeptide expressing nucleotide sequence isolated from the Sargasso Sea
atgaacaaactgactgattttgaacgctatgtcatagaagaaaagggcactgaacgtccctttagcggcgagtattataaacatgacgccaaaggcgtgtatctgtgcaaaaaatgccatgcgcctttgtatagctcagaagataagtttaatgcccactgtggttggccagccttcgatgatgaaattccgggcgcagtgagtcgtcatgtcgacgccgatggtcgccgtaccgaaatcgtctgtagccagtgtggcggtcatttaggccatgtgtttgaaggggaatatttaacgccgaagaatattcgtcactgcgttaactctgtctccatggtgtttcaagcggccgatgaagtggcaacatcgacgcataaaacggcctttgcgacctttggtgcgggctgtttttggtgtgttgaagcgatttttaagagccttaagggcgtgctgaatgtcagttcaggttactcgggtggcgaggcgagcgatgccgattataagtcggtgtgttcgggattaaccgggcatgctgaagtggtgcacatcgaatttgaccccgcgcaaatcagctttacaacgctgctgcaggtgttatttgagagtcacgatcccaccacgcttaatcgacaaggcaacgataaagggccgcagtatcgctcggtcgtctttgcccatgatgcggcgcagattgaagagactaacgccatgattgccaaattaaccgaggcaaaggtatttgatgtgccgatagtgacccaagtggtggcctttgagtcattttatcccgctgaggattaccacaatgattatttcgccctgcatggcgagcagccctattgccaaattgtggtaaggccaaaggttgagaagatcagagccctttttgccgagctacaagcataag

SEQ ID NO: 224356 - DNA, 968 bp, Unknown
  Bacterial polypeptide expressing nucleotide sequence isolated from the Sargasso Sea
cttttggggggcagagaaaggttatgaagaactagaaggtgttctggatgctgtgtctggttatgctgatggtgaaggggtaagaccaacttatagagagattacaaagttctctaataaatttaatccaaataatcatgctgaggttgtagaggttacctacaacaaaaacttgatcacacttgaagaattaataattcattatttggaatctcatgatcccactcagctaaataggcagggtaatgacattgggacccagtatagatcaataattctgtattcagatgtagcacagcagagcaaaatcttgaaattaatggcggaatatcaaacattgcttagagaaggtggatacggagacattcaaacaatcgtaaaaccactatcacagttctttgttgcagaaaattttcatcaagactatataaagaaaaatccgaatggttattgtccagatcattcaactggtattaagtttgccaggaatgattatgaacccaaaaaagacaataatcttttaaagattgggaagagtatagtggtcattgaacctgaaggtttttgcccatactgccaaaaatttcgtgaagatgtttctaatgaatatgcagggacgatacccttagtttacagagatgcatctaacttagagggtttggctataaagactccaacatgggctacgcccaccatactgtttttagagagaggttctgaagtttttggacatcagggttacttatctcccaaagaattttatcaagctctggggctatttaaattaggaaatactgaggcgtatcgagtagcattcaacgaaggtaccgatgcaagatattgcaaggaatacgaaatctttaaaaatacacccgacggagttttcattgataaattaagtggagcccctttattgacacaaaatatagatttaattctagaaccaggctgggttatcttttacgaga

SEQ ID NO: 224357 - DNA, 424 bp, Unknown
  Bacterial polypeptide expressing nucleotide sequence isolated from the Sargasso Sea
ttggctttaggtttcaagagaaataaaatttataataaacctatgaaagacttaaaagaaaaactttcaaaagaagcttttgaagtgacacaaaaccaggggaccgaaagaccttttagtggagatttgcttaatatcaaggaagaagggacttataaatgtatttgttgtggccaaaatttgttctcatctcaagcgaaatttgaatcagggaccgggtggccaagtttttttatgccaatcgatgagactgcagttaaaaatattgaagatcgtagtcacggaatggtaagggttgaagtaaggtgtaatgggtgcgatgctcatttaggccatgtttttcctgatggtcccgaaccaactgggttgaggtactgcatgaattctgttgcaatgtcttttgagccttacaacagtgaataat

SEQ ID NO: 224358 - DNA, 217 bp, Unknown
  Bacterial polypeptide expressing nucleotide sequence isolated from the Sargasso Sea
tctggatcaggttggccgagttttttttcagccttcggttgagagtaatattgaaactcaagaagaccgctcagctgggatgattagaacagaagttcattgcaataattgcaaggctcatcttggacatgtttttcccgatgggcctcagcctacaggactaagatattgtatcaattcggtctcaatggattttacaccttccgaagaggattag

SEQ ID NO: 224359 - DNA, 448 bp, Unknown
  Bacterial polypeptide expressing nucleotide sequence isolated from the Sargasso Sea
aatggaaatagcaattttagcattagggtgtttttggggaccagaaataaagtttagcaagttagatggtgtgtttaaaactgaagttggttactgtggtggcgactatcaaaaaacatcttatgaagaagtatgtacaggtaaaactaatcatgcagaagttgtaaaaatagaatttaatagagataaattatcctacgaagaaatattaaattttttttttgaaatacatgatccaactactttaaataaacaaggccctgacattggatcacaatatagaagtgaaatattttattcaaatttaaaacaaaaagaaatagctgaaaaagtatttttaaaatttaatggaaaatttaatggaaagattgtaacaaaaatctctgagattaaaaattattgtaaagctgaagattatcatcaaaaatacttagaaaaaaattattaa

SEQ ID NO: 224360 - DNA, 454 bp, Unknown
  Bacterial polypeptide expressing nucleotide sequence isolated from the Sargasso Sea
atgaaaactgcttatttttccctaggatgtttttggggcccacaattagagtttgaaaaaattgatggagtaaagaaagccgaggttggttattgtgggggtgacgacccaaatacaacatatgaaaaagtttgttctggttccacgaaccatgcagaaaccataaaggtagaatttgatgaaaatatagtttcatatgaagaacttgtgagaattttttttaaaatacatgaccctacacagttaaatagacagggaccagatattggaactcaatatagatcagaaattttttacaaggatgaagatcagaaaaaagtagcagaaaaaatcaagtctgaattcaatgaaaaatttaaaggtaaaatagtgaccaatatttcaaaagaaaaactgtatcaaactgcagaagattaccatcaatattatttaaaaaagaaaagcatcatatgaa

SEQ ID NO: 224361 - DNA, 532 bp, Unknown
  Bacterial polypeptide expressing nucleotide sequence isolated from the Sargasso Sea
tatgattaagaaactatttaagagcatttttaaaatatggattataacaatttttattttcgatgttaatttttctcaacagaagattaatttttctggggtttctagtccaagcaataaggaacaaaagaaaatgaaaaaaactgaatcagaatggaaacgcacacttactcctgaggaatattatatattgcgtcaaaaaggtacggaaagggcatttacaggagaatatgataagcactttgaagagggtgtctatgcgtgcgcagggtgcggtgcagaactttttgaatcgggtactaagtataattcaggctgcggatggcccgctttctatgaggctatgccaggcactgtcgaagaaactcaggataatagttatgggatgcgtcgtattgaaattacatgtagtaagtgtgatgggcatctggggcatgttttcaatgatggtccaaaaccaaccgggataagatattgtatcaattctatttcaatggattttaagccagaaaaaaataaagaccagaaatga

SEQ ID NO: 224362 - DNA, 538 bp, Unknown
  Bacterial polypeptide expressing nucleotide sequence isolated from the Sargasso Sea
aatgaatgacaatggatacgaaaaagcttattttgccggtggttgcttttggtgtatggagccaccattcgaagcaatggaaggtgtgattgaagccacatcgggatatatgggaggcactacagaaaatcctacatatgaggaggtcactacaggcgaaactggacatgcagaagtagtagaaatcttatttgatccaaaaactgttacatatgaagagttattagaagtattctggagaaatattgatccaacagctttgaattatcaatttgcagatgttgggtcacaatatagaactgagatttttacagttggcagtgaacagaaagatttagccgaacaatccaaaatcgaattggaaaattcaggtaaatttgataagccaattgttactgcaatttcagaagcacctgcattttatatcgctgaagaatatcatcaggacttttataaaaagcaaagtatgcgttatcaaatgtatgcaaaagccagtggaagaaaagggtttctcgaagacacttggggagaagactaa

SEQ ID NO: 224363 - DNA, 445 bp, Unknown
  Bacterial polypeptide expressing nucleotide sequence isolated from the Sargasso Sea
aatggaaattgcagttttagcacttggatgtttttggggacctgaaattaagtttagtaaaattgaaggtgttatcaaaactgaggtaggttactgtggtggtaatagtcctactacaacttataaagaggtctgcacaggtaaaacaaatcatgctgaagtagtaaaaattgattttgatgaaaaaattataacctatgaaaaaattttaaaaattttttttcaaattcatgatccaacaactttgaattctcaagggccagattttggtactcaatacagaagtgaaatattctatttaaacgataatcaaagagtagtggctgaaagagtactaagagatgttgatgatagaatgtccggcaaagttgtcacaaaaatttctttacttaaaaattattgtccagctgaagaatatcatcaaaaatatttggaaaaaagataa

SEQ ID NO: 224364 - DNA, 346 bp, Unknown
  Bacterial polypeptide expressing nucleotide sequence isolated from the Sargasso Sea
atgaaacattttctatcaaacctagatcttcatagtgaaactcctcaagattatgaatcaattatttttggagctggttgcttttggggagttgaaaaaaagttttggcaactagatggagtttggctaacttcggttggatattctggcggcgaactagaagatccctcatacgaaattgtgtgttcaggaacaactaatcatgtagaggttgtaaaagttgtatttaatcccgaagttatatcattggcagatctcctcaaagttttttgggaatgtcatgatccaactcaaggaatgagacaaggcaatgatattggatcacaatatcggtcggtgatttttc

SEQ ID NO: 224365 - DNA, 453 bp, Unknown
  Bacterial polypeptide expressing nucleotide sequence isolated from the Sargasso Sea
tatgagcctgctggataagttaaaaaagcctagtttagggcagtcgctgccgggaagagaggaacagatgcccgtaccgcctggtcattttgttcatggtaggccgctgcaggctccctttcctgaaggtatgaaggtcattcagtttggaatggggtgcttttggggggcagagcggaaattttgggagatgagtggtgttttttctactgccgttggctactcgggtggtgttaccccaaacccttcttacgaagaggtatgcagtggatataccggacataccgagactgtgttagtgatttatgatgaaagcgcggtgtctacattgtccttgctcaaaggtttttgggaagggcatgatcctactcagggaatgcggcaagggaatgacattggcacacaatatcgatcatcaatttatgcttatgatgacgaacaactccaactcgc

SEQ ID NO: 224366 - DNA, 442 bp, Unknown
  Bacterial polypeptide expressing nucleotide sequence isolated from the Sargasso Sea
atggaaatagcagtattagcattaggatgtttttggggaccagaaattaaatttgggaaacttgaaggaattacaaaaactgaggtcggatattgtggaggaaatagtaattcaacaacttatgaagaagtttgttccggagacactaatcatgccgaagttgtaaaattagaatttgatcctaaaaaaatttcgtatgaaaaaattttacaatatttttttgaaattcataatcctacaactcttaattctcaaggtcctgatattggaactcaatatagaagtgaaatattctatgtaaatgaacatcaaatgaaaattgctgaaaaaattattgaagaaaataatataaaatattctggtaaagttgttacaaatttatcaaaactaaaaaattattgtagagctgaagattatcaccaaaaatatttagaaaaataat

SEQ ID NO: 224367 - DNA, 445 bp, Unknown
  Bacterial polypeptide expressing nucleotide sequence isolated from the Sargasso Sea
aatggaaatagcaattttaggattaggatgtttttggggaccagaaattaagtttagtaaacttgatggagttataaaaacagaagtaggttattgtggaggtcataatgctgaaaccaattacaaagaagtttgcacaggcacaacaaatcatgcagaagtagtaaaattagattttgatcctaaagtaatatcttacgagaaaattcttgaatatttttttgaaattcatgatccaacaaccttaaattctcaaggaccagattttggaacccaatatagaagtgaaatattttatttaaatgatcagcaaaaaattactgctgaaaaaatgatagaaaaagaaaacgtcaaattatcaggaaaagtagtaacaaaaacttctttagttaaaaattattgcccagctgaagagtatcatcaacgatatttggaaaaaagataa

SEQ ID NO: 224368 - DNA, 277 bp, Unknown
  Bacterial polypeptide expressing nucleotide sequence isolated from the Sargasso Sea
atggatacatataaatgtgcgggttgtgatactgagctttttacatcgaaaactaaatacaattcaggttgcggctggcctgcattttatgaatctttaccaggaaagatagaggagtcagcagataatagttttggtatgaccagaattgaaataacatgtgaaaaatgtggtggtcatttagggcacgtttttaacgatggtcctcaacctactggcctacgttattgtgttaactctgcctcacttgattttgacccaaaggatgaagaatgaa

SEQ ID NO: 224369 - DNA, 586 bp, Unknown
  Bacterial polypeptide expressing nucleotide sequence isolated from the Sargasso Sea
atgaaaagaattttactttccttcatcgcttgtctcggtatttttgtatatgccgataatgatcaatctacaaatcatatagaaaaaattgtattaggctcgggttgtttttggggtgcagagaaagggtacgaagctttggaaggggttatagatgcagtgtcaggctacgctgatggcgagggcgtcaggccaaactatagagagataactaagtttacaaataaatttaaccccaataatcatgccgaagtagttgaagtgaccttcaatagaaatctaatatctatagaggacttaatgattcattatcttgagtcgcatgatcctacacaatttaataggcaaggaaatgatataggaacacaatatagatcaattgtcctattttctaataactctcaaaaacaaaaaatacttgaattaattgcagaatatcaaattctattaaatgaagagggatatggtcagattagaaccgcagtaaagcctttaaaaaaattttttaaggcagaaaattatcatcaagattatataaaaaagaatcccaacgggatattgccccgatcactctacggaagttaga

SEQ ID NO: 224370 - DNA, 373 bp, Unknown
  Bacterial polypeptide expressing nucleotide sequence isolated from the Sargasso Sea
atgcccattaataaaaatcatttatcagaagaggagatagaagttactcaaaattgtggaactgaacctccattttctggaaaactattatatgaaaaaagagaaggcatttataagtgcattgtttgtaataataaattatttgaatcagagtcaaagtttgaatctggaacaggttggccaagtttttatgatgcaataggggatacagtcactagcaaagaagataattctttcggcatgagaagaattgaaataaattgtaagaattgtgattctcatctagggcatgtttttaatgatgggccaacgcctacgggccttcgatattgcgtaaattcactaagtttaggttttgatccagttgaataaa

SEQ ID NO: 224371 - DNA, 523 bp, Unknown
  Bacterial polypeptide expressing nucleotide sequence isolated from the Sargasso Sea
atttagccaagatttaggaaaagtatattttgctggtggatgtttttggtgtatggaagaatcttttgaaaaaaaagaaggtgtattagaagtaatttctggttattcaggaggaacaacagtaaacccaacttatgaagaagtaacttatgaaaatactggtcattttgaagtagttgagattatttttgataaaaataaaactgattttaatgaattgttaaaccatttctggaggaatattgatccttttgatgaatatggtcaattttgtgatagagggtacagttatagatcggtagcattttatcaaactcaaaaagaaaaggatttaatagaaaaatccattataaaattagaagaaaaatttggtaaaaaaatagtaacttatgtcagaaaatttgataaattctataaagcggaagaaaaacatcaaaatttttatatagagaagttcgcaaattatttgagatataaaaaagcatgtggaagggaaagaattttaaataaaatttggaattag

SEQ ID NO: 224372 - DNA, 574 bp, Unknown
  Bacterial polypeptide expressing nucleotide sequence isolated from the Sargasso Sea
aatgaaaaaaatattcttaacattattcttcatagttttttcaacaaatttatatgcttcaaatattaaaaaggtttattttgctggagggtgcttttggtgcatggaagaatcctttgataaagttaaaggagttatcgaaactatctcaggatactctggtggacacgtaaaaaatcctaaatacaaagatgttgttaagaataacactggtcactatgaaacgttagagattacatacgattcaactattacgaactttgaaaaacttttagaagttttttggattaatattgatccatttgatgctaacggtcaattttgtgataaaggtgaaagttataagtcagtagttttttatgaaaataatgatcaaaagaaaattatagagacttcaattaaaaacattgaaaataggtttaataaaaaagttgttacttacattaaaaatttcaaggaattttatatggcagagacatatcatcaggattattatgaaaagaattttataaggtatctgatgtacaaaaaaggatgtcaaagagaagaagtgttaaacaaaatttggggatga

SEQ ID NO: 224373 - DNA, 217 bp, Unknown
  Bacterial polypeptide expressing nucleotide sequence isolated from the Sargasso Sea
ttgctcccctcatttacctttgcaaaactaaacactatttaccttgcaggtggttgtttttggtgtgtagaggaagtgtatgagaaattagaaggggttgacagcgttatatcaggctactctggaggtcatgttgaaaatcctacttaccgtgaggttgtaaaaggtaatacaggccatatagaggctgtagaaatcgtctatgactcagaaattg

SEQ ID NO: 224374 - DNA, 448 bp, Unknown
  Bacterial polypeptide expressing nucleotide sequence isolated from the Sargasso Sea
atgaagaaatgtacacttgctcttggctgtttttggaaacctgaggaaaacttcaaaaataagccaggtataattgaaacagaagtcggctatgccggtggattatccgataaagttacatatgaagaagtatgtaaaggtgacactggtcatgctgaagttgtaagacttacctttgatgaaaaattaatttcctttaaaaaaattttagatttattttttaaaatgcacgatcctactcaaaaagatatgcaatatcctgatgttggaactcaatatagaagtgaaatattttatgaggacgacattcaaaaagctgaggctaaagaaattttagaaatttttaataaggagcttaatggaaaaattcaaactaatatttctcggctcaaaaattattgtaaagcagaagaatatcatcaaaaatacttagaaaaaaatagataat

SEQ ID NO: 224375 - DNA, 463 bp, Unknown
  Bacterial polypeptide expressing nucleotide sequence isolated from the Sargasso Sea
tatggaaaaagcattatttggtgcaggttgtttctggggtgtggaagaaacctttagaaagatacccggtgtggtgaaaactgaagtaggatataccggaggtcatactttaaaccctacatatcagagtatctgtgaaggtgatactaatcatgctgaagtagtactagttgagtatgataacaaaaaaatttcatatgataaactattgaatcatttttggaaatgtcatgatcccacaacgcttaatagacaaggacctgatattggtactcagtacagatcagcaattttttattttgatgataatcaaaaaaaattagctactgagtctaaaatcaattttgcaaaagaaaataacttaattattgtgacagaaataagtcaattaagtgattactataaagcagaagaatatcatcaaaaatatattcaaaaaactggcttgcattgcgcagtatag

SEQ ID NO: 224376 - DNA, 157 bp, Unknown
  Bacterial polypeptide expressing nucleotide sequence isolated from the Sargasso Sea
aactgaacaagatacttctcatgggatggtcagaactgaaataatgtgcgctacttgcgatgcacatttaggtcatgtattcgatgatggtccagaaccaaccggtctacgttattgcgtaaactcactatctattcaatataaagaatttgaataa

SEQ ID NO: 224377 - DNA, 643 bp, Unknown
  Bacterial polypeptide expressing nucleotide sequence isolated from the Sargasso Sea
atgagacgactgcttctggccttgctgatcgggttgctggcattcccgtcagccgtgatggccgacacagagacggccatgtttgccggtggttgtttctggtgtcttgagcatgatctcgaggatcttccaggggtgcttgaggccaccagcggttacagcggtggccatgtggataaccccacctaccgtcaggtgagcgctgaaaccaccggccatcaggaggtggtggaggtgcggttcgatccggctgaaatcagctacggcacgttgctgcgcagctactggcgcaatgtggaccccctcgatgggggcggccagttctgcgaccgcggtgactcctaccggccggtgatcttcacagccgatgcggcccaggcccgtgaagctgaagcgagtgcccaggccgctgcccgtgagctgggtctaccccgctcgtcactgaaggtggagctgcgggatgcagcgcgcttctggcgggcggaggactaccaccagaactacgccgatctgaatgagctcaaatacaacttctaccgcttcagttgtggtcgtgaccgtcgcctggatgcggtgtggggtgcatcagcgcgcagcggtgatgcctggtcggacgcatcacaaagcagtcgaaacccttaag

SEQ ID NO: 224378 - DNA, 397 bp, Unknown
  Bacterial polypeptide expressing nucleotide sequence isolated from the Sargasso Sea
ctgggatcaggttgcttttggggggctgaaaagggctatgaattaatggatggagttatcaatgcagaatctggctatgcaaatggatatggcataaaaccaaattacagatctataattcagtttaaaaataagtataacgaaaagaattttgcggaagtagtgaaagtaacttttaatagtaatgccatatcccttgaaaatatattaaaacacttttttgagactcatgatcctactcaacataataggcagggcaatgatataggtactcaatatagatcaacaattctttttcaaaatgaatctcagaaagaactcgcagaaaagattatagctgaataccaagctcttctaattgaggggaggtatgggaaaaatagaaccaagctggagc

SEQ ID NO: 224379 - DNA, 574 bp, Unknown
  Bacterial polypeptide expressing nucleotide sequence isolated from the Sargasso Sea
aatgaaaaaaactttattaattgttttttttttattattaccagcaaatttaaatgcagaaaatatatcgaaagtttattttgctgggggttgcttttggtgcatggaagagtcatttgataaggttaatggtgtgatagaaactatttctggatattctggtggacatgttaaaaaccctaaatacaaagatgttgttaaaaacaccactggccactatgaaactttagaaatcacttacaattcatcaattacaaattttgaaaagcttttagaaatttattggatcaatattgacccgtttgatgcagatggccaattttgtgacaaaggtgaaagctataagtctgtagttttttttgagaacagtgatcaaaaaaaaattgtagatgcttcaattaaaaatattgaaaataagtttaataaaaaagttgttacttatgtaaaaaaattcaaggaattttataaagctgagacttaccatcaagattattatgagaaaaattttataagatacttgatgtacaaaaaaggttgccaaagggaagaaacattaaacaaaatctggggatga

SEQ ID NO: 224380 - DNA, 496 bp, Unknown
  Bacterial polypeptide expressing nucleotide sequence isolated from the Sargasso Sea
atgatttcaaagttaatactaggcgcaggatgtttttggggagtagaagttctttttgaagaaatgtctggcgttaaaaaagtaatttcaggatatgccggcggacatacagaaaaccctacatatgaagaggtctgtacaggcaagtcagggcacattgaagttgttgaaattgagtatgaaaataatgaagtaaagtttgaggaattgttagacaagttcttctttattcatgatccaactcagatgaatcgtcaaggtccagacattggtgaacaatacaagtcagttattttttataattctgatgaagaaagaagaatatcagaaagcaaaattgatgagattaataactcaggcgaacatcaaaacgaagtagctactgaattaagagagaatgctaaattttggccagctgaagaataccaccaagacttcatagaaaaaaatggtaaagtttgttatcaccaactttacgtacaacacaaatcctaaa

SEQ ID NO: 224381 - DNA, 520 bp, Unknown
  Bacterial polypeptide expressing nucleotide sequence isolated from the Sargasso Sea
tatgttatcatctttaattgtgggagctggatgcttttggggtgttgaagtcttatatgaacaaatgcctggtgttatcaatgcaacctcaggttattctggtggtcatttagataaccctagatatgaggatgttttaactggcgagacaggtcacgttgaagtagtcaagattgattatgatagcagtgaagttacttttaatgaattgattgatacattttttatcattcatgatccaacaaccttaaatcgtcaaggacctgatattggggagcaatataaatcgatactcttcttcaacagcgaagatgaaaaagaaattattgagagtaaaattgaaaaaatagatttatcaggcaagtttgaaaacccaatagttacagaaattagagaaacagtagagttttatcctgcagaagagtaccatcaagattatgcagcgaaaacaggcaagctatgctaccagcaactttatgttatgtataattattcgccaataccagctgcaacaccataa

SEQ ID NO: 224382 - DNA, 373 bp, Unknown
  Bacterial polypeptide expressing nucleotide sequence isolated from the Sargasso Sea
atggaattaaataaaaatcatttaagtcaggaacaatttgaagttacccaaaactgcggtactgagccacctttctcgggcgagcttctttatgaaaagagagaaggtatttatagttgtgtagtttgtgacttctcactttttgaatcagatacaaaatttgaatctggaactggatggcctagtttttatgacgcacttcatgatacgattacaactaaagaagatctttcttatggcatgaaaagagttgaaataagttgtcgtaattgtaatgctcaccttggtcatgtttttccagatggacctcggcctaccggactcagatattgtgtaaactccttaagcttaagctttaatgaaaatgaataaa

SEQ ID NO: 224383 - DNA, 391 bp, Unknown
  Bacterial polypeptide expressing nucleotide sequence isolated from the Sargasso Sea
atgactaatgaaaaagatttaaaagaaacacttactcctgaagagtattacgtcactcagaatcatggtacagaacctgcctttagcggaaagtatgatggtgttaagacgcctggaacttatcattgtatcgtctgtggggtagagttatttagctcagaatcaaaatatgattctggttcaggatggccgagtttttgggagccttcgcaggaagaaaatattgaaacagaacaggatcattcagcaggaatggtcagaacggaagttcactgcagtaaatgtgaagctcatcttggtcatgttttcccagatggacctcagccaacaggactaaggtattgtattaactctgtttccttagatttaaaacctacagaagaggaatagg

SEQ ID NO: 224384 - DNA, 226 bp, Unknown
  Bacterial polypeptide expressing nucleotide sequence isolated from the Sargasso Sea
atgaaaaaaatattcttaacattattcttcataattttatcaacaaatttatatgcctcaaatattaaaaaggtttattttgctggtgggtgtttttggtgcatggaagagtcatttgataaagttgaaggagttatcgaaaccatctccggatactctggcgggcatgtaaaaaatccaaaatacatagatgttgttaagaataccactggtcactatgaaactt

SEQ ID NO: 224385 - DNA, 391 bp, Unknown
  Bacterial polypeptide expressing nucleotide sequence isolated from the Sargasso Sea
atgaagaaaacagattcagagtggcgacgtatcctgtcatctgcagaatactatattttacgtgaaaaaggtacagagagggcatttactggagagtatgatgggcattttgaagatggtatatatgtatgtgcaggttgcgggcataaactttttgattcagaaactaaatacaggtctggttgtggatggcctgcattttctaaggcaatgcccgagtctgtagaagaaagtgaagataatagttatgggatgaggcgcattgaaattacttgttccaaatgcgatgggcatttgggccatgtatttaatgatgggccacaaccctccggtctaaggtactgcataaattcagtttctatggattttaaacctaaagaagataaatgaa

SEQ ID NO: 224386 - DNA, 283 bp, Unknown
  Bacterial polypeptide expressing nucleotide sequence isolated from the Sargasso Sea
tatgaaaaaaattgcatttttatctattatatttaactttttattcctaattcaaaatccatcaacagcaggagaattaaaagtatctattggtaattcagaatcactctctaattataaaaaagcttattttgcaggaggttgcttttggtgcatggaagaaacatttgataaatttgatggaattataaaatcaatatctggatattcaggtggacatctcaaaaaccctacatacaaagatgtaatttataaggacactggtcatgttgaaacaattgaa

SEQ ID NO: 224387 - DNA, 370 bp, Unknown
  Bacterial polypeptide expressing nucleotide sequence isolated from the Sargasso Sea
ttctggaggcgatactattaacccttcttatgaaagtgtttgccaaggaaatacaaatcatactgaggttgttttagttgaatttgataattctaaaatatcttatgaagatcttttgaaggttttctggaagtgtcatgatcctacaactttaaatagacaaggtcctgatattggaacacaatatagatcagcgatatattattataacgaagatcaaaaaaataaatctattcattcaaaaaatgaatatgctaaaagtgcaggaataaatattgtcactgaaatatcagaagctaaggaattctataaagctgaagaatatcatcaaaaatatatccaaaaaacaggtttacactgcgctatatag

SEQ ID NO: 224388 - DNA, 445 bp, Unknown
  Bacterial polypeptide expressing nucleotide sequence isolated from the Sargasso Sea
atggaaattgcaattttaggattaggatgtttttggggaccagaaattaagtttagtaaacttgatggaattataaaaactgaagttggttattgtggagggaacaatgcagaaaccaattacaaagaagtatgtactggaacaacaaaccatgctgaagttgtaaaattagatttcgatccaaaaataatatcttatgaaaaaattcttgaatacttttttgaaatacatgatccaacaactcttaattctcaagggccagattttggaacacaatatagaagtgaaattttttatttaagtgataatcaaaaagcaactgcagaaaatctaattagtaaagaaaatgaaagactttctggaaaagttgtaactaagctatctcaagtaaaaaactattgtccagcggaagaataccatcagagatatttagaaaaaagataaa

SEQ ID NO: 224389 - DNA, 448 bp, Unknown
  Bacterial polypeptide expressing nucleotide sequence isolated from the Sargasso Sea
aatggaaattgccataatagctttgggatgcttctggggaccagaaattaagtttagtaaacttgagggggttttaaaaactgaagtaggttattgtgggggaaacagcaacaaaacaacctatgaagaagtttgtactggtactacaaatcatgcagaagttgttaaaattgaatttgatccaaaaataatatcatacgagcagctactgaattatttctttgatattcatgatcctactacattaaatgctcaaggacctgacattggaacacaatatagaagtgagattttttatttaaatgaaaatcaaaaaaatattgctcataaagttttaaaggaaaggaatattaaactttctggcaaaatagttactaaaatctcaccagataaaaactactctactgcagaaaactatcatcaaaaatatttagaaaaaagattttag

SEQ ID NO: 224390 - DNA, 481 bp, Unknown
  Bacterial polypeptide expressing nucleotide sequence isolated from the Sargasso Sea
catggcgttagcaactttcggtgccggctgtttttggggcgtggagtatttctttagacaagtcaacggcgtgaccaacgcgacctgcggctatatgggtggcaataacgaagcgaccacctatgaggaagtcaaaaaaggtaagacaggccatgctgaagtcgtgcaagtagaatttgaccctgcgattgtcagctacgacgagttactggatgtgttttggaaaaaccacaacccgaccacgctcaatatgcagggcggcgatattggtactcaataccgcagtaccattttcttccatgatcgtgagcaaaaagcggcggcagaagcctcaaaactggcctttgcccgttcaggtcgttggggattgcgtcatatcgtcactgagattgtgccgttacagcaattccatgtggcagaggaatatcatcaaaactatatcgataagaataacttaccgagttgccatatcgagtactag

SEQ ID NO: 224391 - DNA, 368 bp, Unknown
  Bacterial polypeptide expressing nucleotide sequence isolated from the Sargasso Sea
actggcgctccaactgactcccgaacagttccgcgtcacacgcgaaggcggttctgaacgcgcttttactggggcctactggaatcacaaaggtgatggcatgtaccgctgcatttgctgcggcgctgagctcttccgctccgactccaagtttgattccggcacgggctggcccagcttttgggaggggatcaaccctgacgccatcagcactcaccaagatgccagccacggcatggtgcgcactgaaatccgctgcgcaaactgcggttcccacctgggccatgtctttaaagatggcccgaccccgacggggctccgctactgcgtgaattcagcctccctggagttcgaagacaagggctgac

SEQ ID NO: 224392 - DNA, 445 bp, Unknown
  Bacterial polypeptide expressing nucleotide sequence isolated from the Sargasso Sea
aatggaaatagcaattttaggattaggatgtttttggggaccagaaattaagtttagtaaacttgatggagttataaaaactgaagttggatattgtggagggaacaatgcagaaaccaattacaaagaagtgtgtactggaacaacaaaccatgcggaagttgttaaattagatttcgatccaaaaattatatcttatgaaaaaattcttgaatatttttttgaaattcatgatccaacaactctaaattctcaagggccagattttggaacacaatacagaagtgaaattttttatttaaatgagaatcaaaaaacaattgcaggaaatgttattaataaagaaaacgaaagactttctggaaaagttgtaactaaactatcacaagtaaaaaactattgtccagcagaagaataccaccagagatatttagaaaaaagataa

SEQ ID NO: 224393 - DNA, 403 bp, Unknown; identical to SEQ ID NO: 224216
  Bacterial polypeptide expressing nucleotide sequence isolated from the Sargasso Sea

SEQ ID NO: 224394 - DNA, 445 bp, Unknown
  Bacterial polypeptide expressing nucleotide sequence isolated from the Sargasso Sea
aatggaaatagcaattttgggattaggatgtttttggggtccggaaattaagtttagtaaacttaatggcataataaaaaccgaggtaggttactgcggaggtaataacagccaaacttcttatcaagaggtttgtactggatcaacaaatcatgctgaagtagtaaaattagacttcgatcctaaaattatatcatatgaaaaaattcttaaatttttttttgaaatacacgatccaacaacattaaattctcaaggactagattttggaactcagtacagaagtgaaatattttatttaaatgaccaacaagaattaattgctaaaaaattaatagaagaagaaaatattaaattaaatggaaaagttgtaacaaaaatctcaatggtaaaaaactattgttcagctgaagaatatcatcagaaatatctagaaaagagataa

SEQ ID NO: 224395 - DNA, 386 bp, Unknown
  Bacterial polypeptide expressing nucleotide sequence isolated from the Sargasso Sea
aatgcttcattatgtaaagaacatagacatcgaaaaaaactgtccagagggatttaaagaaattatttttggcgctggttgtttttggggtgttgaaaaaaaattttgggatcaagctggagttttaatgacttctgtaggttattcaggtggagatattgaaaatccatcatacaggcaagtatgttatgagaatacaaatcatgttgaggtagtaagaattttttatgaccctcaagagattggcttagataacttacttaaaattttttgggaatgccatgatccgactcaaggtatgagacaaggcaatgatattggtactcaatatagatcagttattttctgtagtgatgaaaacgatattaaggtttcaaataatagca

SEQ ID NO: 224396 - DNA, 514 bp, Unknown
  Bacterial polypeptide expressing nucleotide sequence isolated from the Sargasso Sea
atgttagcttctttaattgttggtgcaggctgtttttggggtgttgaagcgctttatgaagatatgccaggggtattaaatgctacatccggctatgcaggtggatcacttgagaatccacgctacgaagatgttttaactggtgaaactggtcacgtagaagttgtaaagatagattatgatacaagtgaagtaaccttcgatactctaattgatgccttctttatcatgcacgatccaacaacactaaatcgtcaaggcccagatattggcgagcaatacaaatcagtaattttttataataatgatgaacagaagaatattataacaaataaaattaaacttattgacgcaatggatatccatgaaaatcctgtagttaccgaaataagagaggctgctaaattctatcctgctgaagactatcaccaagattatgccatgaagacagggaagttatgttatcaacaaatgtacgttaggtacaactacacacctttaccaactaactaga

SEQ ID NO: 224397 - DNA, 298 bp, Unknown
  Bacterial polypeptide expressing nucleotide sequence isolated from the Sargasso Sea
aaaattttctcgggaatgtcatgatcctactcaaggcatgagacaaggcaatgatataggtgaacaatatagatcagtaatatattgcactaatgatgagcagcttgaattagcaaataaatcaaaggaactttttgaaaagattctaataaatcaagaatataaaggtataactacagaaatcgatatcaatcaatcatcttacgctgctgaagaatatcatcaacagtacttagctaaaaatcctgatggttattgtggaattaaaggaactggatgtgccttacctccattgtaa

SEQ ID NO: 224398 - DNA, 511 bp, Unknown
  Bacterial polypeptide expressing nucleotide sequence isolated from the Sargasso Sea
tttggtgtaccgaagcggtgtatgccgaatacgtggagtaaagagtgttacgagcggttacacgggaggtcggattccaaatccaaattacaaacaggtctgcagtggtcttaccggtcacgctgaagccgttgagattgagtacgacccggcagtcgtgccatatgaaaaacttctcgaaatattttttgcaacacatgacccaacaacgctcaaccggcagggcgcagatgttggcactcagtatcgttcagcaattttctaccacgatgacacacagaaagagatcgccaagaacgttattgaaaagctcaacgaatcaaaggttttcccgtcaccgatcgtgaccacacttgagaaagcaaaggttttttatcctgctgagagctatcaccaagattattttgcgaataatggctatcagccctattgccaagccgttgttgcgcccaaagtggcaaaggttcgtaaggtcttcaaggagcttttgaaatcagacgaacttcaatga

SEQ ID NO: 224399 - DNA, 364 bp, Unknown
  Bacterial polypeptide expressing nucleotide sequence isolated from the Sargasso Sea
atggataaaaagttatcagatgaacaaatagaaattttgtattcttgtggaacagaaattccaggtacaagcgagcttcttaatgaaaaaagaaaaggtgtttatgtaacagctgataaagaattacctgtttttaaatcagaacataaatttgagtcaggaactggttggcctagcttttatgaagctaatcatgaaaacataattctaaaagaagatcgatctcatgggatgataagaactgaagtagtttcaaaagaaggtgagcacttagggcatgtttttaatgatggtccacagccaacaggattaaggtattgtattaatgggcttgctttaaaatttattcctgatgatgaataaa

SEQ ID NO: 224400 - DNA, 445 bp, Unknown
  Bacterial polypeptide expressing nucleotide sequence isolated from the Sargasso Sea
aatggaaatagctgttttagcacttggatgtttttggggacctgaaattaaattcagtaaaatagatggcataatcaaaacagaagttggctactgtggaggtaatagctctatcaccacttataaagaagtttgcactggcaatacaaatcatgctgaagtggtaaagttagattttgatgaaaaaattatcacatacgaaaaaattttaaaaatattttttcaaattcatgatccaactactttaaattctcaaggaccagattttggaactcagtatagaagtgaaatattttatctgaatgacaatcaaaaaatgatagctgagaaggtattaaatgaagtcaatgaacgtttatctggaaaagttgtaacgaaaatatctttactaaaaaattactgtccagctgaggaatatcatcaaaaatacttagaaaagagataa

SEQ ID NO: 224401 - DNA, 400 bp, Unknown
  Bacterial polypeptide expressing nucleotide sequence isolated from the Sargasso Sea
aatgtctaaaataatatttactgaaaaagaatggaaagaaaaactgacgacagaagagtttgaagttttaaggaatagtggaaccgagaggccatttactggaaaatatgtagattataaagtttctggtatctacatgtgtgcagcatgtgatagtgatttattttcatctgaatcaaaatttaattctggcaccggctggcctagtttttttaaaccaatcggtaacgataaagtggtatctaaaactgattcttcccatggtatgattagaacagaagttatttgtgcaaattgccactcgcatcttgggcatgtttttgatgatggtcctaagccaacaggtttaagatactgtatcaattctatttcattgaaacataaacctctgaaaaaataa

SEQ ID NO: 224402 - DNA, 385 bp, Unknown
  Bacterial polypeptide expressing nucleotide sequence isolated from the Sargasso Sea
atgaaagaaataaatgacaaactgactcaagaagagctgtatgttttgaaggataaaggtactgagagaccattctcaggagaatttgatacattttttgaggatggcgtatacaaatgcaaaaattgtaaagctgagttattcaaatctgattcaaaatatgatgcgggctgtggttggccaagtttttttgaagcagttaatgaagaagcaataatatataaagaagataattcaatttttggacgtccaagaactgaaatactatgcgcaaattgtgaaggacatttaggtcatgtttttgaagatggcccaaaagataaaacaggacttagatattgtgtaaactcaatatcgttagattttgactcagagaataagtaat

SEQ ID NO: 224403 - DNA, 310 bp, Unknown
  Bacterial polypeptide expressing nucleotide sequence isolated from the Sargasso Sea
aatggaaatagcaattttagggttgggatgtttttggggacctgaaataaagttcagtaaacttgatggcgttataaaaactgaagtaggttattgtgggggtcataactctgaaactaattataaagaagtatgtacgggtactacaaatcatgccgaagtagtcaaattagattttgatcctaaaattatctcatatgaaaaaattcttgaatacttttttgaaattcatgacccaacaactttaaattctcaaggcccagattttggtactcagtacagaagtgaaatattttatttaaataaccaa

SEQ ID NO: 224404 - DNA, 577 bp, Unknown
  Bacterial polypeptide expressing nucleotide sequence isolated from the Sargasso Sea
aatgaaactactaattattttctcaatattttttttttcaagctttaacgttttttcaaaagactttaataaagcctattttgcaggaggttgtttttggtgcatggaggaatcttttgaaaaagttgatggagttactagtgtaatatctggatactcaggaggtaataaaaaaaatcccacctataaggaagtaacatttggtaatacaggtcaccttgaaactatagaggttatctatgataccaataaagtaaattttaattctttgttaaaagttttctgggaaaatatcgacccttttgataaatatggacagttttgtgacaaaggatatagctatagatcagctgtgttttatacaaacgctaaagaaaagaaattaatcgagaaaagtattaaaaaaatagaggaaacctttgataaaaaggttgtaacatatataagagatttcaaggtattttataaagctgaagaaaatcaccaagattattatcaaaaaaaatttattaattaccttatatacaaacagggatgcggcagagagaagaaattgaataagatttggaaaaaatga

SEQ ID NO: 224405 - DNA, 373 bp, Unknown
  Bacterial polypeptide expressing nucleotide sequence isolated from the Sargasso Sea
atggcaatagaaaaacatcatcttactgatgaacagatagaaataactcaaaactgtggtacagaaccacctttttcaggcgagcttttaaatgaaaagagaaaaggtacatatatatgtgttgtatgtaaagatgtattatttaactcagatacaaaatatgactctaattctggatggccaagtttttttgactctatagctgataaggtaacaagaaaaaaagacttttctcacgggatgatacgtacagagattaattgtaaatcttgcaattctcaccttggtcatgtgtttaacgatggtccattgcctaccggggaaagatattgtgttaattcattaagtatggaatttaattctgatgaatgaa

SEQ ID NO: 224406 - DNA, 445 bp, Unknown
  Bacterial polypeptide expressing nucleotide sequence isolated from the Sargasso Sea
aatggaaatagcagttttagcacttggatgtttttggggacccgaaataaaatttagtaaaattgaaggtattattaaaactgaggttggttattgtggtggcaacagtactactacaacttataaagaagtatgtactggtagtacaaatcatgctgaagttgtaaaacttgattttgatgaaaaaataataacttatgaaaagattttaaaaattttttttcaaattcatgatcccactacattaaattcacagggaccagattttggaactcaatatagaagtgaaatattttatcttaataatattcaaaagataacagctgaaaaagttttaaaagatgttaatgaaagattatctaataaagtagtaaccaagatcactttattaaataattattgcccagctgaagaataccatcaaaaatatttggaaaaaagataa

SEQ ID NO: 224407 - DNA, 445 bp, Unknown
  Bacterial polypeptide expressing nucleotide sequence isolated from the Sargasso Sea
atggaaatagcagttttagcttgtggatgtttttgggggcctgaaataaagttcagcaggttggaaggggtttataaaactgaagtgggttattgtggaggtaatacgagtaaaacaagctatcaagaagtttgtgaaggggatacgaaccatgctgaggttgttaaattagactttgatccaaaaataatttcatatgaagaaattttaaattacttttttgaaatacatgatcctacaactttaaattctcaaggaccagacattggcacacagtatagaagtgaaattttttatcttaatgacgagcaaaaggatattgcaaaaaaaattatagaaaaatataacaaaaaactttctggtaaagtagtcactaaagtttcacaaattaaaaattattgtattgcagaggaatatcatcaaaaatatctggaaaaaagataaa

SEQ ID NO: 224408 - DNA, 1166 bp, Unknown
  Bacterial polypeptide expressing nucleotide sequence isolated from the Sargasso Sea
aatggagttgtgggctagaaaatatttttctggcataaaaaataacaaaaaagaacggaacagctatgactcagattattttgaaaagaaagaaacatttaggttggtacggattgacccaatcaaagatgttagaaacttagtaatgatgtttgctcttcctagtactcgtgaactttatcatagtaagccaggaaggcagtttggttttgttttgggccatgaaggtaaaggtagccttttatcgtatttaaaggagaatggttgggcaacttcattgtctgctggtgctggatcgcaaactggagattatggatctgcaactgtttcaattgggcttacgtcaaaagggcaagagaattatcgtgaggtgattaaagcaacaatggactatgttgatttaatgaaaaaatcaggacacgtcaagcatgtttttgaagaattaaaaaccatgtcttctcttgatgaaaccttcactagtaggggagagggtatgtggcgagcaacgcaattggcaaatgaagtgatgatgtacccaattgaggacgctggaagaattaattacatatactctgatggtagctcaaaaaactatgaatctttactcacctacattacccctaataatatgcttacaatgttgattgccaaaggggtagaaaccaacaaggtagagcatttttatcaagctccttattcatacgatgaagatgacgctttttataatgagctagtttacacaagggttcgcccagaattatcaatacctgaaaaaaatccatttataccccaaaaagcatctattccaaaaagaaaatctgataaaacaaagcttccaaaagaaactgcttctggaaatggcgcaagtttgttctttggacaagaccatgaatttcttcgtccaaaaggggtaattagtctaaaaattctatttccaaaagaaaaaatgagcgtgcggcacagggtccattcaaggttttactctgcttgtgtgaatgaatcgttgaatgagttaagctatcccgcaaagcaagcaggtttgaattattcgattagggaggggtatgagggtatatatgttgatgtaaatggatatactgaatcatcactaaaactatatgagcttatgcttgaacatatggttgcatttaccataacagacgttc

SEQ ID NO: 224409 - DNA, 1264 bp, Unknown
  Bacterial polypeptide expressing nucleotide sequence isolated from the Sargasso Sea
aatgaaaaaaataaccttatttgtaataacaacctctttattgagcttttccctttctgcgactgtcaatgaagcaaccattcattctgaaaaaattgttcttggatcaggttgtttttggggggctgaaaaaggttatgaagcattaccaggagtaatagacgcagtttctggatatgctgatggcaatggtatccgtccgacatatagagaaattacaaagttaaaaaataagtttaatgttaataaccatgctgaagtagttgaggttacatacaacaagaatattatttcaacagaaaaacttttaatgcatttttttgaatctcatgatccaactcaaataaatcgacaaggtaatgacataggaacccaatatagatctattattttgttcagcaatgaagaacaaaagaggattattgaaagcgtagttcaaacttttcaaacactcttatcaaatgcaggatatggggttattgcaacctcagttaagccaattaaaaaattttatatggccgaaaactatcatcaggattacattgcaaaaaatccaaatggatattgccccgatcactctacaggagttaagtttgccaaaaccaatgagtcatctttaatagataatgctgaacttttaaaaggaaaaaaaataatagttattgaagcagaaggattttgtccctattgtgaaaaatttaacgcaaatgtcgtaaataattatgatggcgatattccagttatctctagatttgcaaaccaattagagggccttgaaattgattcgcctacatgggccactccaactattttattcttagaaaatggcaaagaggtttttgctcatcaaggatatttaaatccaaaggaattttatcaggcccttggttactttaaattgggagattcagaggcttaccgagttgcatttgaaaaagggacagatgcaagattttgcaaagaatatgagattttcaaggatacgcctgatggaattttcgtagataagctcagtggagcgccattatttgatacaaaagatagatttaattcttccacgggttggctttcttttactagacctattgaaggatctgtttattctaagcctgataatagttatggaatgagaaggactgaaataagatcagtgacttctgatatacaccttggccatgttttttctgacggaccaaatggtatgccaagatattgcatcaacgctactgttcttgaattcaaacaaagatcatcagaaacttaa

SEQ ID NO: 224410 - DNA, 385 bp, Unknown
  Bacterial polypeptide expressing nucleotide sequence isolated from the Sargasso Sea
atgaaagaaataaatgactcgctcacgcaagaggagctttacgttttaaaagataaaggcactgagagaccattctcaggagaattcgatacattttttgaggatggagtatacaaatgcaaaaattgcaaagctgaattatttaaatccgaatcaaaatatgacgcgggctgtggttggccaagtttttttgaagcagttaatgaagaagcaataatatataaggaagataattcaatttttggacgtcctagaactgaaatattatgtgcaaattgtgaagggcatttaggccatgtttttgaagatggcccaaaagataaaacaggcctaagatattgtgtaaattcaatatctttagattttgactcagagaataagtaat

SEQ ID NO: 224411 - DNA, 448 bp, Unknown
  Bacterial polypeptide expressing nucleotide sequence isolated from the Sargasso Sea
tatgcagaaatgtacacttgcacttggatgtttttggaaacctgaggaaaactttaaaagcaaaccaggtatattaaagaccgaagtaggttacgcaggaggaagtagcgcgaaaacaacctatgaagaagtatgcacaggaaacactggacatgctgaagttgtaaggctcacatttgatgaaaataaaatttcgtttaaaaaaatattggatttatttttcaaaatgcatgatccaacacaaaaagatatgcaatttccagatgttggaactcaatatagaagtgagattttttatgaagatgaaaagcagaaacaagacgctttggaagttttaaaagaatttaacgagaaattagatggtaaaattcagacaaatatctcaaaaattaaaaactatagtaaagctgaagaatatcatcaaaaatatattgaaaaaaacaggtaa

SEQ ID NO: 224412 - DNA, 352 bp, Unknown
  Bacterial polypeptide expressing nucleotide sequence isolated from the Sargasso Sea
atggaaatagcagttttagcacttggatgtttttgggggcctgaaatcaaattcagcaaaattaatggcgttatcaaaactgaagttggctattgtggtggtaatagttcacaaaccacctataaagaagtttgcacaggaagtacaaatcatgctgaagttgttaaaattgattttgatgagaaggtaattaattatgaggaaattttaaaaattttttttgaaattcatgacccaactacgctaaattctcaaggaccagattttggtacacaatatagaagtgaaattttttatttgaatgacaatcaaaaaaaaattgcagaagatgttcttggaccaggtcaataaa

SEQ ID NO: 224413 - DNA, 403 bp, Unknown
  Bacterial polypeptide expressing nucleotide sequence isolated from the Sargasso Sea
atgatagaaaaggatagtgaaaagctacaacaagatctcagcccagaagaatattacgtcactcaagagaaaggaactgagccagctttttcagggaaatacgatggagaaaaaactccaggagtttacaattgtatagtctgtggagaagcgctatttagttccaaaaccaagtatgattcaggatcaggttggcctagtttttgggaaccaatcaaccaagaaaatgtaggatctgaggctgaccattcggctggaatgatccgcactgaagtgcattgcaataaatgtaaggctcatttagggcatgtttttccggatggacctcaacccaccggactaagatattgcataaattctgtctctcttgatttaaaaccagatgaagaggttgaagactgaa

SEQ ID NO: 224414 - DNA, 445 bp, Unknown
  Bacterial polypeptide expressing nucleotide sequence isolated from the Sargasso Sea
atggaaatagcagttttagcattaggatgtttttggggaccagaaattaaatttagtaaaatcgatggaattatcaaaactgaggttggttattgtggtggcaatagccctacaactacttataaagaagtatgcacaggtaacacaaaccatgctgaagttgtcaaacttgattttgatgaaaaaataataagctatgaaaagattttgaaaattttttttcaaatccatgatccaactactttaaactctcaagggccagattttggtacacaatacagaagtgagattttttacttaaatgacaagcaaaaaattatagctgaagaagtgttgaaagatacaaatgaaagattatcagggaaagttgttacaaaaatttctttacttaagaattactgtacagctgaggaataccatcaaaaatatttagaaaaaagataaa

SEQ ID NO: 224415 - DNA, 392 bp, Unknown
  Bacterial polypeptide expressing nucleotide sequence isolated from the Sargasso Sea
aaataaacccggaatattagaaaccgaagtaggttatgctggtggtaatagcgagcagacaacatatgaagaagtatgtactggtagcactggacatgctgaagttgtaaggcttacctttgatgaaaataaaatttcgtttaaaaaaatattagatttatttttcaaaatgcatgatccaacacaaaaagatatgcaatttccagatgttggaactcaatatagaagtgagattttttatgaagatgaaaagcaaaaacaagacgctttggaagttttaaaagaatttaacgaaaaattagatggtaaaattcagacaaatatttcaaaaattaaaaactacaataaagctgaagaatatcatcaaaaatatattgaaaagaacaggtaat

SEQ ID NO: 224416 - DNA, 547 bp, Unknown
  Bacterial polypeptide expressing nucleotide sequence isolated from the Sargasso Sea
attgttacctattacagcttacgcaaaaattaatacaatttacttagctggtgggtgtttctggtgtgttgaggaggtttatgaaaaattaaaaggtgtaattgatgttcgatctggttattcaggaggtcatgttgaaaatccaacttatcaagaagttgtcaagggtgatacaggccatatagaagtggctgaaattatttttgactcagatattgttagtttagataagatcattagggttttttttgtcaatattgatccttttgatagtgctggtcaattttgtgataaaggttattcatataaaagtgctcttttcagtaatgaccaaattgttatagatagatttaacttttacatagataaaattcaggaaaatcacaaacagaaggtggaaacaatgatcttaccttttaaaaatttttatgttgcagaggagtatcatcaggattattacaaaaaaaatccaataagatatacatattacaagtacaattgcggaagagagcagaggattaaacaattaaaaattaatttaggatga

SEQ ID NO: 224417 - DNA, 466 bp, Unknown
  Bacterial polypeptide expressing nucleotide sequence isolated from the Sargasso Sea
atgtctaaagcattatttggagcaggatgtttttgggggcctgaaaaaaaattttctgagatcaaaggtgtgattgaaacccaagtaggctactctcaaggcttaactgataaaacttcttacgaagaagtttgcaaaggtaatacaaaccatgctgaagtcgttttcttaaaatttgatgaaaatctcgtttcatataccagccttgtggagtttttttatcaaattcatgatccgacaactttaaatcaacaaggcccagatcgaggatctcaataccgatcattgataggctattatgacgaaactcaatgtgaaatagcaaagcagatcacagacaaattgaacgaaagccaatttaatcaaaaaattactacgattatagaacccgttaagaattactgtcccgcagaggattatcatcaaaagtatatggaaaaaaaatactcttttttaaatttttaat

SEQ ID NO: 224418 - DNA, 448 bp, Unknown
  Bacterial polypeptide expressing nucleotide sequence isolated from the Sargasso Sea
aatggaaatagcaattttagctttggggtgtttctggggaccagaaattaaatttgataaattaaatggagttacgagaacggaagtaggatactgcggtggaaattctagtaatacaaattatagagaggtttgttcgggaaatacaaatcatgctgaagttgtaaagattgaatatgacaaaagtaaaatatcttatgaaaacattttaaactatttttttgaaattcatgatccaactactttaaatagacaaggaccagatattggaactcagtatagaagtgaaatattcttcttaaaccccgaacaaaaagaaatagctcaaaaaatgctagtaaaatataacgaaaaatataatggaaaaatatccacaaaaatttcgccggtaaagaattattgtatagccgaggaatatcatcaaaaatatttagaaaaaaattattaa

SEQ ID NO: 224419 - DNA, 535 bp, Unknown
  Bacterial polypeptide expressing nucleotide sequence isolated from the Sargasso Sea
aatgtctgaacaaaatgaaaaagcttactttgccggtggctgtttttggtgcatggaacctccttttgaagctttagatggtgttgttggggcgacctcaggttatatgggtggcacaacagaaaatccaacttacgaagaagttaccactggaaaaacaggacatgcagaagtagttgaaatactttttgatccaagtgttgtctcttatgaagaactattagaagtgttctggagaaatattgaccctactgcattgaactaccagtttgctgatgttggttctcaatacagaactgagatatttactgttggtgacaaacaaaagaaactagcagaagagtccaaaattaaattggaagaatcaggaaagttcgataagccaattgttactgctattactgaagctcctactttctatattgctgaggagtatcatcaagatttttataaaaaacaaagtgttcgctatcaactttatgcaaaagcaagtggtagaaaaggattcctagaagaaacttggggcgacagctaa

SEQ ID NO: 224420 - DNA, 296 bp, Unknown
  Bacterial polypeptide expressing nucleotide sequence isolated from the Sargasso Sea
tatgtcagatcatattaaaagtgataaagaatggaaaaagctcttagatcatgaaagttatagagttactagacaatcaggaactgagagaccatttagtggtaaatattggaatttcaataaagatggaatttataaatgcgtttgctgtggtcaaactctttttgaatctgatactaaatttgacgctggttgtggctggcctagtttcttcgtgccttttaattctaattctataaatgaatttgaagataactcatttggaatgaatagaattgaggttaaatgctcaaact

SEQ ID NO: 224421 - DNA, 379 bp, Unknown
  Bacterial polypeptide expressing nucleotide sequence isolated from the Sargasso Sea
aatggaaatagctgttttaggattgggttgtttttggggaccagaaaaaaaatttggtaaaatagaaggtatagttgaaacagaagtaggatattgtggaggcaaaatgtctaacacaagttataaagaagtatgtacgggagaaacagaacatgctgaggttgttaaattaaccttcgatcctaaaaagatatcttatgagaaaataattgaatacttttttgaattccatgatccaacgaccttaaatagacaagggcctgatattggaacacaatatagaagtgaaatattttataataatgacgaacaaaagaatatttctttatctaagatagaaaaattagataataaatttaattcaaaaattacaacaaaa

SEQ ID NO: 224422 - DNA, 394 bp, Unknown
  Bacterial polypeptide expressing nucleotide sequence isolated from the Sargasso Sea
tatgagtgaagaaaaagataatttaaaagatcaacttactccggaggagtattacgtaacgcaaaatcatggtactgaaccagcttttagtgggaagtatgattctaataaacaggctggaatatacagctgtgttgtatgtggagcagagatatttagttctaaagagaaatatgactctggatcgggttggccgagtttttatcaaccttctgttgaaagcaatgtgggaacccaagaagatttttctgctggcatgcaaagaacagaagtgcattgtaataactgcaaggctcatttagggcatgtatttcctgacggaccccaacctactggtctgagatattgtataaattctgtatccatgaggttcactccttctgaagaggaatag

SEQ ID NO: 224423 - DNA, 466 bp, Unknown
  Bacterial polypeptide expressing nucleotide sequence isolated from the Sargasso Sea
atgtctaaagctttatttggagcaggatgtttttggggaccagaaaaaaaattctctgagatcaaaggagtcattgaaacccaagttggctattctcaaggtttaactgataaaaccacatatgaagaagtttgtacaggtaatacaaaccatgctgaagttgtttttttaacttttgatgaagaaaaaatctcatatgaaaacttagtggagtttttctaccaaatccatgatcccacaactttaaatcaacaaggcccagatcgaggctctcaataccgctcagttatagcttactatgacgatacccaattagaggtagctaaacagatcacagacaaattaaatgaaaataaatttaatcaaaaaatcacaacagttatagagcctgttaaaaactattgtccagcggaagactaccatcaaaagtacatggaaagaaaatactcttttttaaaattctaat

SEQ ID NO: 224424 - DNA, 472 bp, Unknown
  Bacterial polypeptide expressing nucleotide sequence isolated from the Sargasso Sea
atgactaagactgccatatttgctgctggatgtttttggggtatcgaagaaaagttcttatctactgatggagtaatagaaactgaagttggctatataggaggcaaaacacccagtccttcatatcaagatgtatgcgagggaaacactaatcatgctgaagccgtaagagttcattataatgaagaagaaataacatatgacaaccttttagatatattttttgacatacatgatcctacacaacttaatagacaagacctagattttggtactcaatatagatcttcaatttttgttttggatgaatttcagaaaatgtcagcacagaataaaataaatatacttaatcaagataagtttaatggttgcatcgttacagcaattgaagaagctaaagaattttggctagcagaagaatatcatcaaaaatatgtcagaaagaaaaaacaatctggtatttttggttgat

SEQ ID NO: 224425 - DNA, 841 bp, Unknown
  Bacterial polypeptide expressing nucleotide sequence isolated from the Sargasso Sea
aatgtatcaaatattaaaaataatattcttattatcattatcaagtggcctcatgagtaaagaaataactaatagagaattaatcttcatttataatgcaaaaagtggtttcatcaatgaattagttgattttgcacataagatcattagtcctaatacctatgattgtaatttatgtgcgatcacatatggtacttttacgatggaaaagagttgggctaattatgttcagtcgttaccagttaaatctgttttcacttacaaagataagcttgtcgataagaagctaaaaaaaacaaaattacctgcagttttcatacgggatggggaagaattaaatgagttgatttctgcaaatgagataaataatattaatgatctagaacatttaataagggttctagataccaggctaaaggagcgagggatggatactaaaaaaaagaaagagattagtttaactgttgaagagtggcaaaaaaaattaactcctgaagaataccatattctcagagaaaaaggaactgagaggccattcacaggtaaatatgataaattctatgaagatggaacatataagtgtgcgggttgtgatactgaactttttacatcggaaactaaatataattctggttgcggctggcctgcattttatgagtctttgccagggaagatagaggagtcttcagataatagttttggtatgactagaactgaaataacatgtgaaaagtgtggtggccacttaggacacgtttttaatgatggtcctcaacctacaggtctgcgttattgtgttaactctgcttcgcttgattttgacccaaaggaaaaagaatga

SEQ ID NO: 224426 - DNA, 610 bp, Unknown
  Bacterial polypeptide expressing nucleotide sequence isolated from the Sargasso Sea
tatgtctcttatgaaaaatttaaaattaatttttctagtattattgttttcatgtataaatgtagaaacgtcaaacatgtctaataatactgaaaaagcttattttggtggagggtgtttttggtgtatggagcccccctttgaagttctcgatggtgtgttagaagcaacatcaggctatatgggtggagaaacagaaaatccaacttatgaacaagtaagtatgggaaatacaggccatgttgaagttgtagaaatagaatttgatccaaatataatcacctactcagaattactagaagttttttggagaaatattgatccgactgctttaaattatcagtttgcagatgttgggtcacagtatagaacagaaatttttacagttggatcccagcagatggaggaagcacttaaatcaaaaactgatcttgaaaattctggaaaatttgataaaccaatagttacagcaattacggaagcaccaacattttatattgcggaagaatatcatcaggatttttataaaaaacaaagtgctcgctaccaaatttatgctgaagcaagtggtagaaaaggctttctagaggaaacttggggagacgagtaa

SEQ ID NO: 224427 - DNA, 841 bp, Unknown
  Bacterial polypeptide expressing nucleotide sequence isolated from the Sargasso Sea
atgtatcaaactattaaaattttatttttattatctttatcaagtagtcttatgagtaaggaaataactagtaaagaattaatcttcatttacaatgcaaaaagcggtcttgtcaatgaactagttgattttgcacataaaataatcagtccgcaaacctatgaatgtaatttatgtgcgattacatatggcacttttaccatggaaaagcgttgggctaattatatcaagtcactacccattgaatctgtttttacttacaaagataagcttatcagtgaaaagttgaaaataacgaaattaccttcgatttttattcgggatggagaaaaattaaatgagctgatttctgcaaatgaaattaataatattaatgatctagaagatttaataagagttctagatattaggttaaaggaacgaggaatggatactaaaaaaaagaaagagattagtttaactgatgaagagtggcaaaaaaaattaactccggaagaataccatattcttagagaaaaaggaactgagaggccattcacaggtaaatatgataaattctatcaggatggaacatataaatgtgcgggttgtgatactgagctttttacatcggaaactaaatataattctggctgcggttggcctgcattctacgagtccttaccagggaagattgaggagtcttcagataatagttttggtatgaccagaattgaaataacatgtgaaaaatgtggtggccacttaggacatgtttttaacgatggtcccaaacctactggtttacgttattgtgttaactctgcctcacttgattttgacccaaaggataaaaaatgaa

SEQ ID NO: 224428 - DNA, 610 bp, Unknown
  Bacterial polypeptide expressing nucleotide sequence isolated from the Sargasso Sea
tatgtctcttatgaaaaatttaaaattaatttttctagtattattgttttcatgtataaatgtagaaacgtcaaacatgtctgataatactgaaaaagcttattttggtggaggctgtttttggtgtatggagcccccctttgaagttctcgatggtgtgttagaagcaacatcaggctatatgggtggagaaacagaaaatccaacttatgaacaagtaagtatgggaaatacaggccatgttgaagttgtagaaatagaatttgatccaaatataatcacctactcagaattactagaagttttttggagaaatattgatccgactgctttaaattatcagtttgcagatgttgggtcacagtatagaacagaaatttttacagttggatcccagcagatggaggaagcacttaaatcaaaaactgatcttgaaaattctggaaaatttgataaaccaatagttacagcaattacggaagcaccaacattttatattgcggaagaatatcatcaggatttttataaaaaacaaagtgctcgctatcaaatttatgctgaagctagtggaagaaaaggttacttgaaagacacctggggtgacagctaa

SEQ ID NO: 224429 - DNA, 535 bp, Unknown
  Bacterial polypeptide expressing nucleotide sequence isolated from the Sargasso Sea
atgtcacaaaatactgaaaaagcttattttgccggtggatgtttttggtgcatggaaccaccatttgaagtacttgatggtgtacttgaagcaacctctggatatatgggtggagagatagagaatccaacttatgaacaggttagtatgggtaatactggtcatgcagaagttgttgagatagagtatgacccaaatattattacatatagtgagctcctagaagttttttggagaaacatagaccctacagcattaaattatcaatttgcagatgttggatcacaatacagaaccgaaatatttacggtaggtccagaacaaatggaagaagcacttagatctaaagatgagttagaaaagtcaaacaaatttaataaacccattgttactgctattacagaagctcctgttttttatattgcggaggaatatcatcaagacttttacaagaaacaaagtgctcgatacaaaatatatgcagaagcaagtggaagaaaaggattcttagaagatacatggggagacgagtaac

SEQ ID NO: 224430 - DNA, 298 bp, Unknown
  Bacterial polypeptide expressing nucleotide sequence isolated from the Sargasso Sea
atggaaaaagcattatttggtgcaggttgtttctggggtgtggaagaaactttttgtaaaactccaggtgtaataaataccttagttggttattctggaggcgatactattaacccttcttatgaaagtgtttgccaaggaaatacaaatcatactgaggttgttttagttgaatttgataactctaaaatatcttatgaagatcttttgatggttttctggaagtgtcatgatcctactactttaaatagacagggtcctgatatcggaacacaatataggtcagcgatatactatt

SEQ ID NO: 224431 - DNA, 598 bp, Unknown
  Bacterial polypeptide expressing nucleotide sequence isolated from the Sargasso Sea
caagattctctccccgggagaattgatgaaatgcagtttaacgaaagtcactttgtaaataactcttcaatgatagggccctttcctgaaggtatgtctgaaatatttcttgggatgggctgcttctggggagctgagagactcttttggaatatagaaggagtttatgttacttcggttggttatgcaggaggctttacgcctaaccctctttatgaggaagtttgtagtggcctaaccggacatgccgaggttgtgcatgtggtgtttgatcccaaaattatctccttgcaagaaatacttaagattttttgggagggtcatgaccctactcaggggatgagacaaggcaatgatatgggtacacaatatcgatcagcaatttattactctgatgaaactttattggatcaaatcaaaaaaagtgaagtgaattacagcaaagcactaaaaaaagaaggatacactgaaatcacgactgaaattcttccattagaagattacttttatgctgaggattatcatcaacaataccttgcgaaaaacccaaacggttattgtggtattgggggctgcggagtaagacttccagattaaa

SEQ ID NO: 224432 - DNA, 1052 bp, Unknown
  Bacterial polypeptide expressing nucleotide sequence isolated from the Sargasso Sea
tctaagtgcaagtaaaacctcgcatgatgaaacaatttatctgggatcaggttgcttttggggggctgaaaagggctatgaattaatggatggagttatcaatgcagaatctggctatgcaaatggatatggtataaaaccaaattacagatctataattcagtttaaaaataagtataacgaaaagaattttgcagaagtagtgaaagtaacttttaatagtaatgccatttcacttgaaaacatattaaaacacttttttgagactcatgatcctactcaacataataggcagggaaatgatataggtactcaatatagatcaacaattctttttcaaaatgaatctcagaaagaactcgcagaaaggattatagctgaataccaagctcttctaattgagggaggttatggaaaaattagaaccaagctggagcctttagataacttttatcttgcagaagaatatcatcaggattatttaaaaaagaatcctaatggatattgcccagatctatcaacaggaattatttttaatgatgaagaaaaaattttcgaagataatgaataccttcttacaggaaagcaaattttagttctagactctcaaaattattgtccttattgtgaaaaatttaaggatgatgtgactaatagctataaaggaagcatccccttgagctatagaacttctgatcagttacatggtcttgaaattaaatctcctacctgggctactccatctttaatttttctagaaaatggaaaagagattttttcttatcagggatacataaatcaaaaagatttttatcaattattaggtaaatttaaattaggaaattcagaggcatataacgtcgcatttaacaaaggaactgatgcacgcttttgcaaagaatatcaaatttttaaaaatacaccagatggtatctttatagacaaactcagtggagaacctctttttgatacaagaaatagatttgtctcaaggtctggttggttatctttcacgaaacctgttgatggatctgtatatgaaacttcctgat

SEQ ID NO: 224433 - DNA, 430 bp, Unknown
  Bacterial polypeptide expressing nucleotide sequence isolated from the Sargasso Sea
agcgttggatactcggcaggaaaaacaactgatccaacataccgtgatgtttgttctggaacaaccgatcacgcagaagtggtccttgtcatctataatagccaacttatcgatttagaaaatctattgcgtgtgttttgggaagggcatgatcccactcagtttatgagacaaggcaatgatgtgggcagtcagtaccgctcgattattttctatgatgatgaccttgctcttgaaaagattaaatcctcacgggatcaatatcaaactgagttaagtaaagctggttttggtgagattgtgactgagataaaagcgccagaggagttcttctatgctgaggactatcaccaacagtatttggcaaagaatcctgctggttattgtggcttgggaggcacaggcatcaaatgcactccaaatgtataat

SEQ ID NO: 224434 - DNA, 442 bp, Unknown
  Bacterial polypeptide expressing nucleotide sequence isolated from the Sargasso Sea
atgaattatcataagaattcagaggcaatcgcacttttaagtccagaggaatattgggtcactcaggaaaatggtactgaaagacctggaactgggaaacttttgcacaataaagagcctggcatttatgtcgatatcgtttctggtgagccactttttctatcggatgataagtatgaaagtggctgcggatggcccagttttacaaaacctgttgaggcatcttatattactgagatttcggatacttctcatggtatgatcagaactgaagtacgttccacaaacggagatagccatttaggacatgtttttccagatgggcccaaagatcgagggggattgcgctactgtataaattcggcaagcctcagatttatacacttaaatgatatggaggctgagggctatggcaagtttgtggaattaataggagaataaa

SEQ ID NO: 224435 - DNA, 400 bp, Unknown
  Bacterial polypeptide expressing nucleotide sequence isolated from the Sargasso Sea
catggctaacaaatctaaagaagacttaaaaaaggaactttccagtgagtcatactatgtgacacaagagaatgggacggagcctccatttactgggcaattctgggatcattttgaaaatggatcatacacatgcatatgttgtggagaaacattatttcaatccgatgctaaatttgatgcgggttgtggttggccaagtttttatcaggccgctgacaataaaaatattaaagagctagatgattattctctctcaagagtaagaactgaaattcgatgtgcaaaatgtgacgctcatttaggccatgtatttactgacggacctcagccaactggcttaagatactgtttaaactcagttgctttagaatttgaaaaagaaatttcttccaagtaa

SEQ ID NO: 224436 - DNA, 290 bp, Unknown
  Bacterial polypeptide expressing nucleotide sequence isolated from the Sargasso Sea
agctttatttgcctcaattcataaatatgactcaaattctggatggccttctttttatcaacctattgaggaaaaaaatgtaaaatttgagcaggattatgaattaattcttcctagaacagaggtaaaaagtaatcagggagattctcatctaggtcatgtttttaatgatggaccaaatcccacaggattgcgctactgtattaattctgctgccttaaaattcattcccgttaaagaaatggaagaaaaaggatataagaagtatttatatctttttgagacttaat

SEQ ID NO: 224437 - DNA, 727 bp, Unknown
  Bacterial polypeptide expressing nucleotide sequence isolated from the Sargasso Sea
tatgtttaaatttttaaaatccattatgaataataaagattcagttatcacttatgatgctaatttagttcatagaattttaaatacagatattaaaaaagatcctaattatcaagaggatgaaataatatttgggtgtggttgtttctggggagcagaaaaatgtttttggaaacttcctggagttgtgacaacatcagtaggatatgccggtggtaataagaacaaccctacatattatgaagtatgttcaggtctaactggacattcagaagttgtaagagttatctgggataaaagtaaaatagacataagtgatttattaaaaatgttctgggaatgtcatgaccctacacaaaaaaatagacaaggtaatgatattggtacccaatatagatcagcgatatactataaaaatgaaaataataaaaatattatattagcgagtaaagaacaatatcaaaaagaactaaataaaaaaaatctaggtttaattgaaacagaaataaaaatgattaatacctatttttatgcagaagattaccatcaacaatatcttgcatcggcagggagcagacagtattgttctgcttctcctacaagagttaagttaggaaattttactggaagtaattacaaattagaaaattatatttgggaaaactttaattgggatgttgataaatgtgtattgagatctgataacaatcctattaagaatgacaaa

SEQ ID NO: 224438 - DNA, 397 bp, Unknown
  Bacterial polypeptide expressing nucleotide sequence isolated from the Sargasso Sea
tatggaaacaaatactaatagtgacaaaaaatggaaagatatccttgatgatgaaagctatagggtaacgagactatctggaacagagagaccatttacaggcaagtattggaattttaacgaaaaaggcagttataaatgcatttgctgtggtgaaaaattgtttgaatctgagacaaaatttgatgctgggtgtggttggccgagctttttcattccagctgatcaaacttgtataaacgaatttaaagatgactcattgggaatgagaagaatagaagttaaatgttccaaatgtgatgctcatttaggtcatgtttttaatgatggcccagaaccaacaggtttgagatattgtattaactcagcctcactagattttgaaaaaaatcaataa

SEQ ID NO: 224439 - DNA, 397 bp, Unknown
  Bacterial polypeptide expressing nucleotide sequence isolated from the Sargasso Sea
atgaataaaataattaagtctgatctagaatggaaaaaaattctttctgaacaagaatattatatcacaagacaaaagggtacagaaccagccttttctggaaaggcttttgatatttctaaagatggagtatttaaatgcaggtgttgtggggcgaaattatttgagagaacttccaagtatgaatctggctgtggttggcctagtttttttaaaggaatttccaatgatgcgataaaaactgaacaagatacttcttatggaatgatcagaacagaaatcatgtgtgctacttgtgatgcacatttaggtcatgtatttgatgatggtccagaaccaacaggtttacgttattgtgtaaattctctttcaattcaatataaagaatttgaataaa

SEQ ID NO: 224440 - DNA, 592 bp, Unknown
  Bacterial polypeptide expressing nucleotide sequence isolated from the Sargasso Sea
atgttctggagagttccgggcgtgtacaccacggcggtcggatacgtgggcggacacactccgaatccaacgtacgaggaggtgtgcagtggacgcaccggacacacggagggcgtgcaggtgctcttcgatccgagcgtcgtgtcgtacgccgatttgctcgccatgcattggacgtgccacgacccgactcaaggtaaccgtcaaggaaatgatcgtggaacgcagtatagaagcggcatctactgcacgtccgaggaacagttgaagacggcgcaagagtcggcggagacgtacgaagaggcgttgcaagcgaccggtcgcgccgcgcccatcacgacggagatcaagggtccgggcgacactttcttctacgccgaggattaccaccagcaatacttggcaaagcccagatctcgaccgtactgcagcgcgcaaccgacgggagtgcccgtgcccgcggattggttgaaggcgaacggcgccaagttcggtccgggatactggaagactttcggtccggcgccgggctgcaccatcaacgtcccgaacgcgccggtgaccctcgaagaagcattagccgccaactgaa

SEQ ID NO: 224441 - DNA, 352 bp, Unknown
  Bacterial polypeptide expressing nucleotide sequence isolated from the Sargasso Sea
ttatcacctgaagaatatagaattttaagaaaaaaaggtactgaaagaccatttcaaggtgaatatgataatcatttcatagaaggtaattataattgtgccggttgtggaaccaagctatttgagtctgatacaaaatataattcaggctgtggatggcccgctttttatgaggcggttccagaaaaaattaaagaaattgaagataattccttcggtatgagaagagttgaagtggtttgtaaaaaatgtgatggacacctagggcatgtttttaatgatggacctaatccaaccggcttaagatattgcataaattctgtatctatggactttgatcctaaaaaataaa

SEQ ID NO: 224442 - DNA, 340 bp, Unknown
  Bacterial polypeptide expressing nucleotide sequence isolated from the Sargasso Sea
gatgatactgaaacatcatttggaaaaattactagatattttttttaaaacacatgaccctacaacactaaatcgtcaaggtaacgacgttggaacacaatatagatcagttattttttatgaaaataaaaatgaattaattttttttgaggattacattaataaactaaatgaatcaaatagttttaattcaaaaattgttacaactcttgagaagaaatctcatttttattttgctgaagaatatcatcataattattttgaaaaaaacccattaaacggatattgtaatatggttgttaggccaaaagttgaaaagttcaggactgaaaataattag

SEQ ID NO: 224443 - DNA, 520 bp, Unknown
  Bacterial polypeptide expressing nucleotide sequence isolated from the Sargasso Sea
gatggatgaaagcactaaggcgacatttggcggaggctgtttctggtgcctggaagcggttttccaacaagtaacgggggtcatcaaggtggtttccggatacgctggcggagcatcaccgaatccaagttacgaagcggtctgcagcgggttgaccggccacgcagaagtggtacaaatcgaatatgatccgggacagactgacttcaggactctgctggattggttctggcgttgccatgatcccacgaccctcaaccggcagggagctgatgtcggaacccaataccgttcggtgatcttcttccatgatgaagaacaattggaacatgcccggacggccaagcaagatttggaaagttctggaatgttcagggatgctgttgtgactgaaatcagcatgatccctgaattctatcctgcggaggattatcaccagaattactaccagaaaaattccggggcaggctattgccaatttgtcatccgcccgaagatgcagaaacttggttttgagtag

SEQ ID NO: 224444 - DNA, 406 bp, Unknown
  Bacterial polypeptide expressing nucleotide sequence isolated from the Sargasso Sea
atgtcaaagatatataaatctgaagaagaatggcgaactttcttaaatgaagaatcttttcgagtaacaagaaaatcagggactgaaaaaccatttacaggaaaatactggaattttgataaagaaggtatttatagatgtgtttgttgtggccaagaattatttttatctaaagcaaaatttgattcaggatgtggttggcctagcttttttgtgccttcaagcaatcaagtaattgatgagcatgttgactcttcttttggcatggtaagaacagaagtaaaatgttcaaaatgtgatgcacatttaggccatgtctttaatgatggcccaaatccaacaggcttaagatattgtataaattcagcttctttggactttaaaaattatgacgaaaaaaaataaa

SEQ ID NO: 224445 - DNA, 532 bp, Unknown
  Bacterial polypeptide expressing nucleotide sequence isolated from the Sargasso Sea
gatggatgaaagcaacaaggcgacatttggcggaggctgtttctggtgcctcgaagcggttttccaaaaagtaacgggggtcatcaaggtggtttccggatacgctggcggagcatcaccggatccaagttacgaagcggtctgcagcgggttgaccggtcacgcggaagtggtacaaatcgaatatgatccgggacagacagactttaggactctgctggactggttctggcgttgtcatgacccgacgaccctcaaccggcagggagccgatgtcggaacccaataccgttcggtgatcttctgccatgatgaagaacaattggaacacgcccggacggccaagcaagatttggaaatttctggaatgtttagggaccccgtggtgactgaaatcagcatgatcccggaattctatcctgcggaggattatcaccagaattactaccaggaaaattccggagcaggctattgccaatttgtcatccgcccgaagatgcagaaactcggtttgagtagtgtcagggtaaaa

SEQ ID NO: 224446 - DNA, 589 bp, Unknown
  Bacterial polypeptide expressing nucleotide sequence isolated from the Sargasso Sea
atgtttgaatttctaaaaaacattatgaataaaaaaaattcagctttaacaaatgatattgatttagttcatagagttttaaaaacagatattaaaaaagtgcctaattctaaagaagatgaaataatttttggttgtggttgtttctggggagctgaaaaatgtttttggaaacttccaggagttgtgacaacttccgttggatatgctggcggcgataagagaaatcccacttattatgaagtttgttcgggattaactggtcattcagaagtagtaagagttatttggaacagagctgaaatagatataagcgatttactaaaaatgttttgggaatgtcatgaccctacacaaaaaaatagacaaggcaacgatatgggtacgcaatacagatcagcaatttattataaaaatgataataataaaaaaattatattagcaagtaaaaaacaatatcaaaatgaactaaataaaaaaaattttggtcttatcgaaactgaaataaaaatgatcgatacctatttttatgcagaacaagtaccatcaacaatatcttgcatcacctggcagcaggcagtattgttca

SEQ ID NO: 224447 - DNA, 507 bp, Unknown
  Bacterial polypeptide expressing nucleotide sequence isolated from the Sargasso Sea
gaatcccttgatggagttattgatgcagtttcaggctatgcgaatgggtatggagtaaatccaaattatagatctatcatccagcttaagaacaaatataatgaaaataattttgcagaggtggtaaaagtaacctttaacagcaatgcaatttcacttgatgaaattctaaaacatttctttgaaacccatgatccaacacaacttaatagacaaggaaatgatattggaactcagtatagatcagtgatcctattttcgaatgaaactcaaagaaaacttgctcaagatattttgaatgagtatcaatctcttctttttgaggcgggttatgggagagtagttacccttatagagccattagacaacttttatttagctgaaaactatcatcaggattatttaaagaaaaatcctaatggttattgtccagacttatcaactggtgttgtattcaatgaaaaagaaaaaaatattttagataatcaagatctgcttatcggtaag

SEQ ID NO: 224448 - DNA, 424 bp, Unknown
  Bacterial polypeptide expressing nucleotide sequence isolated from the Sargasso Sea
atggaagaaaaaaaatcaaaattaactgatatgcagtactatgttacacaagattgcggtacagaacctgcttttgacaatgaatattgggatcataaagaaccagggatatatgtagatatcgtatctggagaagcattattcgcttctgtacacaaatacgactcaaattccggatggccctcattttatcagcctattgaagatcaaaatgtaaaattcgagcaagattatgaattaattcttcctagaacggaggtaaaaagcaaacaaggagattctcatcttggacatgtatttaatgatggaccaaatcctactggattacgctattgtatcaattctgctgctttaaaattcatcccattaaaagaaatggaagaaaaaggatataaaaagtatttatatctttttgagacttaat

SEQ ID NO: 224449 - DNA, 445 bp, Unknown
  Bacterial polypeptide expressing nucleotide sequence isolated from the Sargasso Sea
cttgtcacaatacttcaaagacccaatgcgtattgaccaattaaatgagattgagcattgggttacccaagaaaacggtacagaacgaccgggtactggaaaataccttaataataaaaaagttggtatttatgtagatattgtttccggagagcctttattttcatccgatgataagtatgaatctgggtgtggttggccaagctttaccaaaccactagtttcgtctcatattgcagaattacaagacagtagccacggaatgttgcgtactgaggtgcggtcaaaatttgcagatagtcaccttgggcatgtttttccagatgggccgccagaaagaggtggtttacgttattgtataaactccgccagtctgcgatttattccattagatgagatggaagcagaaggctatggtgacttcattagtcaaataggagagtag

SEQ ID NO: 224450 - DNA, 299 bp, Unknown
  Bacterial polypeptide expressing nucleotide sequence isolated from the Sargasso Sea
tatgatggtcactttgaaaatgggcatgtatctttgtgctggtgtgggaaataaaatttttgactccgagactaaatatagatctggttgtggatggcctgcattttatgaggcattacctgaatctgtagaagaacatgaagataatagttttggaatgaggcgcattgagatcacttgtagtaaatgcgatgggcacttaggacatgtattcaatgatggtccacaaccaaccggattaaggtattgtattaattctgtatcaatggattttaaacctgatgaagaggatgaatgaa

SEQ ID NO: 224451 - DNA, 535 bp, Unknown
  Bacterial polypeptide expressing nucleotide sequence isolated from the Sargasso Sea
atgagtgaaggttacgataaggcttattttgccggaggctgtttttggtgcatggagccaccttttgaagacttggatggtgtaattgaggctacatcggggtatatgggtggaagtgtagaaaatccaacatatgaagaagtgactactggaacaacaggtcatgcagaagttgttgaaatactttatgatcctgaaatagtcacctatcaagaattattagaagttttttggagaaatattgaccctactgcattaaattatcaatttgccgatgttggaactcagtacagaacagaaatatttacagttggagaaagacaaaaaaaactagctgaagaatcaaagattgagttaggaaattctggaaaatttgataaaccaattgtcactgcaattacagaagcaccaacattttatattgccgaggaataccatcaagatttctataaaaaacaaagtatgcgttaccaaatgtatgctcaagcaagtggaagaaaagggtatttggaaaacacctggggagaagattagt

SEQ ID NO: 224452 - DNA, 535 bp, Unknown
  Bacterial polypeptide expressing nucleotide sequence isolated from the Sargasso Sea
aatgagtgaaggttacgaaaaagcttattttgccggaggctgtttttggtgcatggagccaccttttgaagacttggatggtgtaattgaggctacatcgggttatatgggtggaagtgtagaaaatccaacatatgaagaagtgactactgggacaacaggtcatgcagaagttgttgaaatactttatgatcctgaaatagtcacctatcaagaattattagaagttttttggagaaatattgaccctacagcattaaattatcaatttgccgatgttggaactcagtacagaacagaaatatttacagttggagaaagacaaaaaaaactagctgaagaatcaaagattgagttaggaaattctggaaaatttgataaaccaattgtcactgcaattacagaagcaccaacattttatattgccgaggaataccatcaagatttctataaaaaacaaagtatgcgttaccaaatgtatgctcaagcaagtggaagaaaagggtacttggaaaacacctggggagatgattag

SEQ ID NO: 224453 - DNA, 655 bp, Unknown
  Bacterial polypeptide expressing nucleotide sequence isolated from the Sargasso Sea
tatgtcgctatggagcagaaagctagaaatgccaacccctgagactgcgttaccggggcgtgatatcaaaatgccagtccctccaatacacgaggttcttagcgagccgcttactccacctttcgcggagccaagcgagcgaattgtctttggaatgggttgcttttggggtgccgagagagttttttggcaaaccccgggtgtcgttaccaccgctgtgggatattcggctggtctaacaaagaaccccacatacgaagaagtctgtagcggtcttactgggcacaacgaagtagtactagtggtctacaaccctgagcttgttgactttgcgaacatattgactctcttttgggaaaaccatgaccccacccaggggatgcgtcagggaaatgacattgggactcaatatcgatcaggtatttatgtctccaacgaacagcagcgaagcctggccgaatcaagtaagacagaatttcaaaaagcgctgaacggtgcgggttatggaaccataacaaccgagattctccttgaagatgagttctattacgccgagcactaccaccagcaatacctacacaaggtgcccaacggatactgcggattgggcggaactggagtctcttgcccttctgggatcaccattcgagactaa

SEQ ID NO: 224454 - DNA, 794 bp, Unknown
  Bacterial polypeptide expressing nucleotide sequence isolated from the Sargasso Sea
gatataggagttaaacctaattacagatcaataattcaatttaaaaacaaatacaatgaaaataattttgctgaggttgtgaaagttacatttaatagcaatgcaatatctttagaagagattttgaaacatttttttgaaaaccatgatccaactcaacataacagacaaggtaatgatgttggaactcaatatagatcaacaattctttttgaaaacaaatctcaaaaagatctcgcaatcagaataatggacacttatcaaagcttattaaatgctgcaggatatggaaaattaaaaacaaaactcgaaccgttagataatttttatcttgcagaagattaccatcaagattatttaaaaaagaatccaaatggatattgtccagatctttctacaggcattgtttttaatcaatcagaaaaagatttttatgataatacaagcctactttctggaaaacatattttaattttagattcacaagactactgtccatactgtgagaaacttaaaaatgatgtaacagataaatataagggcagtattcctctaacatatcgatcctcagatcagcttcatggattaagtattgaatctccaacttgggcaacaccttctctaattttattagaagatggaaaagaaatttttagttatcagggatatattgaatccaaagatttttataaaattttaggtagatttaaattaggcaataccgaggcatatgatgttgcttttaataaaggaactgattcaagattttgcaaagaatatgagatttttaaaaa

SEQ ID NO: 224455 - DNA, 862 bp, Unknown
  Bacterial polypeptide expressing nucleotide sequence isolated from the Sargasso Sea
agatgttgtctcaggatacaccggcggaacatcaaagaaccctaaatacagtaactatagtaaatcaggacacatagaagcagtccgaattgaatatcaaccatccttaattaactacatgcagttgctggaaattttctggactaatattgaccccactgataaagatggacagttctgtgaccgtggtcatggatatacatctgcagttttttttatcacagaagaacagaagaagcttgctttagaatccaaatctttgattgaacagtctggtatattaaaagaacttgtcaaaacaccggttctagaggctaaagagttttacaacgcagaagattatcaccaggattactacaaaaaaaacaaaataagataccattattatcgcttcagatgtggtcgtgacaaacggcttgaagaactctggggtgaaaagaaggaaaaattaaaaattttaaatcaaacttccagctatgaaatacctataaaagaagatttgttaaaaaaattaaccccactgcagtatgaagtgacacagaatgatgctactgaaccacctttcaggaataaatattggaacaataaaagtgaaggcatctatgtggacattgtttcaggtgaaccactattcagttcaactgacaaatataaatctggaactggttggcccagttttacaaaaccacttgaagcagaaaacgtagttatgaaagaagacagaagcttgtttactgtaagaaccgaggttagaagtaagcatgctgattcccaccttggacacctctttaatgacggtccaggaccgctaggattgaggtactgtattaattccgcctcacttaattttattgcccaaaaa

SEQ ID NO: 224456 - DNA, 919 bp, Unknown
  Bacterial polypeptide expressing nucleotide sequence isolated from the Sargasso Sea
acaagtttgtacgaacaagtttgtacgaacaagtttgtacgaacaagtttgtacgaacaagtttgtacgaacaagtttgtacgaacaagtttgtacgaacaagtttgtacgaacaagtttgtacgaacaagtttgtacgaacaagtttgtacgaacaagtttgtacgaacaagtttgtacgaacaagtttgtacgaacaagtttgtacgaacaagtttgtacgaacaagtttgtacgaacaagtttgtacgaacaagtttgtacgaacaagtttgtacgaacaagtttgtgcgaacaagtttgtacgaacaagtttgtacgaacaagtttgtacgaacaagtttgtacgaacaagtttgtacgaacaagtttgtacgaacaagtttgtacgaacaagtttgtacgaacaagtttgtacgaacaagtttgtacgaacaagtttgtacgaacaagtttgtacgaaaaagtttgtacgaacaagtttgtacgaacaagtttgtacgaacaagtttgtacgaacaagtttgtacgaacaagtttttacgaaccagtttttacgaaccagtttgtacgaacaagtttgtacgaaccagtttgtacgaaccagtttgtacgaaccagtttgtacgaaccagtttgtacgaaccagtttgtacgaaccagtttgtacgaaccagtttgtacgaaccagtttgtacgaaccagtttgtacgaaccagtttgtacaaaccagtttgtaccaaccagtttgtacaaactagtttgtacgaaccagctggcagggcctcggacctggctggatggcccagagggggggatggacggacgtacgtagggaaaaccaccccattctacaggactttgtcccttatcggggccactgcccaaaaagggagaacaaggctgtatacacgacagc

SEQ ID NO: 224457 - DNA, 634 bp, Unknown
  Bacterial polypeptide expressing nucleotide sequence isolated from the Sargasso Sea
cctgaaaaataaatttttagtaagtgcattaatatttttatttgcagcaccgattgtcaacgccaatcagacaaaccatatacaaagtatttatttaggctctggatgtttttggggagcagagaagggctatgaagctttagatggggtaataaatgctgagtctggttatgcaaatggctatggggttagacctaactacagatcaattatccaacttaaaaataaatataatgaaaataacttcgctgaagttgtaaaagtaacatttaacaataatgctataagtcttgaaaaaatattaaaacattttcttgagagtcatgatcctactcaactgaatagacaagggaatgacattggcacccaatatagatcaacaatattattttctaatgaagttcaaaaaaatctcgctaaaaaattaatcaatcaatatcaaggtcttttaactgcaaaaggatatggcaagataaggacaaaattagaagctttagataatttttatttggctgaagagtatcatcaggattatttaaagaagaatccaaatggatattgtccagacctttctactggtatagttttttctcaagaacagaaagaatatatagataattcagagttgttatta

SEQ ID NO: 224458 - DNA, 445 bp, Unknown
  Bacterial polypeptide expressing nucleotide sequence isolated from the Sargasso Sea
aagaaatgtacacttgcacttggttgtttttggaaacctgaggaaagctttaaaaataaacttggaattattgaaacagaagtaggttacgcaggaggagaaaatcctactgttacttataaagaagtgtgtgttggagatactggtcatgccgaagtggtaagacttacatttgatgaaaaaataatttcatttaaaaaaatattggatttgttctttaaaatgcatgatccgactcaaaaagacatgcagtttcctgatgttggaacacaatacagaagtgaaatattttatgaaaatgatgaacaaaaaaaagaggcgcaagaagttttgagtaaaaaaaataaggaattaaatggaaaaattcaaactaatatttcaaaaatcaaaaattattgcaaagcagaagagtatcatcaaaaatatatagaaaaaaatacatgat

SEQ ID NO: 224459 - DNA, 541 bp, Unknown
  Bacterial polypeptide expressing nucleotide sequence isolated from the Sargasso Sea
tatgatccattatatttttaaaatagaaattgatttccctgaagatagtaagctagagcaagctgtttttggtatggggtgtttctggggcgctgagaagaagttttgggaacttgatggtgtaaagcttacagctgttggatatgctggcggtattagtacaaatccgagttacagggatgtgtgcaccgggttgaccggccataatgaggttgttaaagtattgtacaatcctgaagaggttagttatgttgatatcttggcaacattttgggaaaaccatgacccaacacagatgaatagacagggtaatgatataggaacacaatatagaagtggcgcctattatttttctgacgcccaaaagtttaagttgctggaaactaaagcattatacgaaagctcactgcgaaaatcaggctttggtcctattgtgaccgagattaaaaaagcacctgagttttttctagctgaaggctatcatcagcaatatcttgctaagaacccgcacggttattgcggtttaggagggacgggcatc

SEQ ID NO: 224460 - DNA, 463 bp, Unknown
  Bacterial polypeptide expressing nucleotide sequence isolated from the Sargasso Sea
tatggaaaaagcattatttggtgcaggttgtttctggggtgtggaagaaacattttgtaaaactccaggtgtaataaataccttagttggttattctggaggtgatactattaacccttcttatgaaagtgtttgccagggaaatacaaatcacactgaggtagttttagttgaatttgataattctaaaatatcttatgaagatcttttgatggttttctggaaatgtcatgatcctaccactttaaatagacaaggtcccgatattggaacacaatataggtcagcgatatattattataacgaagatcaaaaaaataaatctatttattctaaaaataaatacgctaaaagtgcaggattaaatattgttactgaaatatcagaagctaaggaattctataaagctgaagaatatcatcaaaaatatatccaaaaaacaggcttacactgcgctatatag

SEQ ID NO: 224461 - DNA, 340 bp, Unknown
  Bacterial polypeptide expressing nucleotide sequence isolated from the Sargasso Sea
cttgtcacaatacttcaaagacccaatgcgtattgaccaattaaatgagattgagcattgggttacccaagaaaacggtacagaacgaccgggtactggaaaataccttaataataaaaaagttggtatttatgtagatattgtttccggagagcctttattttcatccgatgataagtatgaatctgggtgtggttggccaagctttaccaaaccactagtttcgtctcatattgcagaattacaagacagtagccacggaatgttgcgtactgaggtgcggtcaaaatttgcagatagtcaccttgggcatgtttttccagatgggccgccagaaaga

SEQ ID NO: 224462 - DNA, 314 bp, Unknown
  Bacterial polypeptide expressing nucleotide sequence isolated from the Sargasso Sea
catggcgtcaaaagaggcgaatttgggtgcgggttgtttttggtgcgtggaagcggtctttgaatctttagagggtgttgaatctgtggtttcgggttacatgggcggtcagactcccaatccgacttatgaagctatctgcactggaacaacgggtcatgcagaagtcgtacagattacttatgatcctaatgtgatttcttatgaaacaatactgaaacgtttttgggtggcacatgatccaaccactttaaaccgtcaaggagcagatgtggggacgcagtatcgttcggcgattttcacccattcagagg

SEQ ID NO: 224463 - DNA, 397 bp, Unknown
  Bacterial polypeptide expressing nucleotide sequence isolated from the Sargasso Sea
atgagtaaaattactaaaacagaagaagaatggaagtcttttctcacagaagatgaatattacgtaacaagacaaaaaggtactgaaccacctttttcaggtaaaaattttgaaatagtaaatggtggtatatttaaatgtaagtgttgtgataatgaattatttaatagctcaacaaaatatgaatcaggttgtggttggccaagtttttttgaacaattatcaccagaagcaattaaaacagaggaagataaatcacatggtatggcaagaattgaaattatgtgtgctaaatgtgatgcacatttaggacatttatttgatgatggaccaaaaccaacgggaaaacgatactgtgtaaattctttatctattaattacaaggaatgtgaataat

SEQ ID NO: 224464 - DNA, 460 bp, Unknown
  Bacterial polypeptide expressing nucleotide sequence isolated from the Sargasso Sea
aatggatacaccattctggtgttctgccacacctgaagaaagacaagaagctattaataaccttactgaagaacagagaattgttgctttggagaatggaactgagagaccattttttaatgaatattggaatagtaaagatgttggaatttatgttgatgtaatttcaggagaacctttattttcctctttagataaatttgactcaggaacaggctggccgagttttgataagccaataaaaggcatagaaattgtagaagttgttgataaatcacatggaatggttcgcacagaggtaagaagtcaatatggcgacgcacacctaggtcatttatttgatgatggacccactgaaactggattaagatattgtattaattcagcttcattaagatttgttcctctagaaaaattaagcgaagaaggctatgaagactttttagaattgtttaactag

SEQ ID NO: 224465 - DNA, 382 bp, Unknown
  Bacterial polypeptide expressing nucleotide sequence isolated from the Sargasso Sea
attgttgctttagagaatggaacagagaggccattttttaatgaatattggaatagtaaagatgttgggatttatgtggatgtaatttcaggagaacccttattctcctctttagataaatttgattcagggacaggttggccgagttttgataagccaataaatgggatagaaattgtagaagttgttgataaatcccatggaatggttcgcacagaggtaagaagtcaatatggcgacgcacacctaggccatttatttgatgatggaccaactgaaactggattaagatattgtattaattcggcttccttaagatttgttcctctagaaaagttaagtgaagaaggctatgaggattttgtagaattatttaactaaa

SEQ ID NO: 224466 - DNA, 547 bp, Unknown
  Bacterial polypeptide expressing nucleotide sequence isolated from the Sargasso Sea
atgagttttttaaaacataattctttcaaggaagttccaaaagactgtgagtatattaccttcggaatgggttgtttctggggtgctgaaaaaagattctgggatgtgaaaggtttaaaaactactattgttgggtatgctggtggtcaaacaaataacccaacatatgaaaaagtttgttctggacaaactggtcacgcagaagttgtgagagttattttagataaaaaaatattttcttgggatgaattatttcaagttttttgggagtctcatgatccaacacaaatgaatagacaaggtaatgacattgggacacaatatagatcagcaatttttgtgaaaaatgaaagggagttacaaatggcaattaactcaaaagaaaagttccaagaaattctaaatgttcataatcttggattaattcaaactgaggtaaagattatcaagacatttttttatgcagaagaataccaccaaaagtatctttataaaaatcccaatgaatattgcggtttgaagggattagcagtcagttataactaat

SEQ ID NO: 224467 - DNA, 634 bp, Unknown
  Bacterial polypeptide expressing nucleotide sequence isolated from the Sargasso Sea
aatgtttaattttttaaaagaaatagagattattcaaccacatgaagcactaaaagggagagcttcatctattacaggttcagaaaagagttttattaatggcagaccgttaaatggaccatggccagataattacgattttgcaatttttggaatgggctgcttttggggagctgaaagacttttttgggacatagatggcgtctatgttacatctgttgggtatgcaggtggttttactcctaatcctacatatgaagaagtttgttctggacaaacaggtcacgctgaggtcgttcaaatagtctttagtcaaaatgactgttcatacaaaagcttattaaaagttttttttgaatctcatgacccaacccaaggaatgagacaaggtaatgacagaggtacacaatacagatcagcaattatttataaggatgaaaatcaatataaaactgctcttggattgaaagatagttataatactaatctaacgtccaaaggttttaactgtataacaactgaaatgaaatcatttgatcactattatttagcagaaagttaccaccagcaatatctatctaaaaatcccaatgggtattgtggaattcaaggaactggaattaaatgcttataa

SEQ ID NO: 224468 - DNA, 449 bp, Unknown
  Bacterial polypeptide expressing nucleotide sequence isolated from the Sargasso Sea
gatggtgctttgctactggaaaatcaacataaagaaattatccccttttcatcaggtgaagtctccattaaaggtatctataatagttgatatgcaacattttttgtcaggtttagatctccaaagtgattgccctcaaggttgtgaatccattgtatttggagccggttgtttttggggtgtggaaaagaaattttggtcactggatggtgtttggttaacttctgtagggtattcaggtgggactctagaaaatccctcttaccaagaagtttgctcgggtacaactgatcatgttgaggtagttaaagtaatctttgaacccgatattatgccagtattggagctgctcaaagtattctgggagtgtcatgacccaacacaaggtatgagacaaggtaatgatgttggtagtcagtatcgatctgtcatttttgtaagctctaaga

SEQ ID NO: 224469 - DNA, 373 bp, Unknown
  Bacterial polypeptide expressing nucleotide sequence isolated from the Sargasso Sea
tggcgtagcgaactgacgcccgagcagtaccagattgcccgccaagcaggcaccgagccgcctttcaccggcaagtatcatgactcaaagggctcggggacgttttattgcgtgtgctgcggcgcggcgctatttgaatctgggacaaaatacgattccggcaccggctggcccagcttctggcagccggtggacccgaccgcggtcgagacccgtgtggatcgagcctatgggatggtacgaaacgaggtggtctgcgccaaatgtgatgcacacttgggccacgtgtttcccgacggcccccagccgacgggcctgcgctactgcataaactcggcgtcgctcgatctcaagtccgagggtgaggagtagg

SEQ ID NO: 224470 - DNA, 520 bp, Unknown
  Bacterial polypeptide expressing nucleotide sequence isolated from the Sargasso Sea
tatgttatcatctttaatagtaggcgcagggtgcttttggggtgttgaagttttatatgaacaaatgcctggtgttattaatgcaacttcaggttattctggtggtcatttagataatcctagatatgaggatgttttaactggtgagacaggtcacgttgaagtggtcaagattgattatgacaaaagtgaagttacttttaatgaattaattgatacattttttatcattcatgatcctacaactttaaatcgtcaaggacctgatattggcgaacaatataaatctatacttttttacaacagcgaagatgaaaaagaaattattgagagtaaaattgaaaaaattgatttatcaggcaagtttgaaaacccaatagttacagaaattagagaaactgcagagttttatcccgcagaagattaccatcaagattatgcaatgaaaacaggcaagttatgctaccagcaactttatgttatgtataattattcgccaataccagctgcaacaccataa

SEQ ID NO: 224471 - DNA, 349 bp, Unknown
  Bacterial polypeptide expressing nucleotide sequence isolated from the Sargasso Sea
atgtctaaggatttaaaaagtgatagtgaatggaaaaacatcttagatgatgaaagttacagagtgacaagacaatctggaacagagagaccattcactggaaaatattggaatttcaacaaagatggagtctacaaatgtatatgttgtggtgagagtctctttgaatctgatactaaatttgatgcaggatgtggttggcctagcttctttgttcctcttcgcaaagatgttataaatgaattccaagaccattcgtttggtatgttaagaactgaggtcaaatgcgcaaaatgtgacgcacatcttggccatgtttttaatgatggtcctgagccaactggttaag

SEQ ID NO: 224472 - DNA, 319 bp, Unknown
  Bacterial polypeptide expressing nucleotide sequence isolated from the Sargasso Sea
agaaccagccttttctgggaaggcttttgatatttctaaagatggagtatttaaatgcagatgctgtggggcgaaattatttgatagaacgtctaagtatgattctggttgtggttggcctagtttttttaaagaaatttccaatgatgcgattaaaactgaacaagatacttctcatggaatgatcagaacagaaatcatgtgctctacttgtgatgcacatttaggtcatgtatttgatgatggtccagaaccaacaggtttacgttattgcgtaaactctctatccattcaatataaagaatttgataaaaactaa

SEQ ID NO: 224473 - DNA, 199 bp, Unknown
  Bacterial polypeptide expressing nucleotide sequence isolated from the Sargasso Sea
atggagcaattggttctcggtggaggctgcttctggtgcacagagggtggcctgctaggcctcaagggggttcacgaggtcgtccccggttacagcggcggccatgtagacaatcccacttacgagcaggtatgcgggaagaagacaggtcacgcagaggtcgttagagtcaccttcgacccagaagtcatccccagga

SEQ ID NO: 224474 - DNA, 359 bp, Unknown
  Bacterial polypeptide expressing nucleotide sequence isolated from the Sargasso Sea
aatgaaaaaatctgaacaagagtggcgtcagcagctcaacgatgaacaatacagagtgacacggcaaaagggcactgagtatccttttagtggaaccttgctacataataaagacacaggcagttaccactgcgtttgttgtcagcagccgttatttgattcagcagataaatttgattcgggttgtggctggccgtcgttcagcaaggctattaaaggtcaggtgaagtacgaaaaagacacttcccatggtatgaccagaatagaaattttatgccaacactgcgacgcgcacttaggtcatgtgtttgacgatggcccggcaccgaccgggcaacgttattgtgtcaattcagtgt

SEQ ID NO: 224475 - DNA, 445 bp, Unknown
  Bacterial polypeptide expressing nucleotide sequence isolated from the Sargasso Sea
gatgaaatgtacactcgcacttggatgtttttggaagccagaggaaaactttaaaaataaacctggtattattgatacagaggtaggttatgcaggtggtaaaaaagcacaagtaacatataaagaagtatgtacaggaaaaactggacatgctgaagttgtaagactgacttttgacgaaaaaattataacttttaaagaaatattagatttgtttttcaaaatgcatgatccaactcagaaagatatgcaatatcccgatatcggaactcagtatagaagtgaaattttttatgaaaatgaaacacaaaaaaaggatgcagaagaaattgttaaaaatcaaaacataaaatttgagggtaaaattgaaaccaatatttctaaaataaaaaattattgtaaagctgaggattatcaccaaaaatatatcgaaaaaaatagttaa

SEQ ID NO: 224476 - DNA, 424 bp, Unknown
  Bacterial polypeptide expressing nucleotide sequence isolated from the Sargasso Sea
atggaagaaaaaaaatcaaaattaacagatatgcagtactatgttactcaagattgtggaacagaacctgctttcgataatgaatattgggatcataaagaaccagggatatatgttgatattgtatctggagaagcattattcgcctctgttcacaaatacgactcaaattctggatggccttcattttatcagccgattgaagatcaaaatgtaaaattcgagcaagattatcaattaattcttcctagaacggaggtaaaaagcaaacaaggagattctcatcttggacatgtatttaatgatggaccaaatcccactggattgcgctattgtatcaactctgctgctttaaaattcatcccattaaaagaaatggaagaaaaaggatataaaaagtatttatatctttttgagacttaat

SEQ ID NO: 224477 - DNA, 457 bp, Unknown
  Bacterial polypeptide expressing nucleotide sequence isolated from the Sargasso Sea
tatgaaatattctatagcaatactagcagctggttgtttttggggagttcaggattatttttcaaaaataaatggagttaaatcaacaaaagttggttattctggaggaaatacagataatccttcatatgagcaagtttgtagtggctcaactggtcatgcagaatgcattcttataaactttgatgaaaaaattattaattatgaggaaatacttagttatttttggaaatgtcacgatccaactcaattgaatagacaaggggcagatattggaactcaatatagatctgcaatattttattgtgatgaaaatcaggagaaaatagccataaattctatgaaaaatataaaacaaagtatttcaaatattgttactgaattatcagaggctaaaactttttatgatgctgaggaatatcatcaaaattatataacaaaatgtaaagtattttaa

SEQ ID NO: 224478 - DNA, 469 bp, Unknown
  Bacterial polypeptide expressing nucleotide sequence isolated from the Sargasso Sea
ggcagaacgactattctggacgttaaagggtgtttatagcaccgcggttggttatgccggtggcataacagtgaatccaacatacgacgatgtctgctcaggtcgtactggacataccgaggtggttctaaccttttttgatccatcggttgtttcctacgaggatttgcttaaagtattttgggaatctcacaatccgaccgaaggaatgagacagggtaatgacgtcggaactcaataccgttcagcaatatattgcgaaagcgatgaacagctccttaccgcaaaaatgagtcaagaggtgtttcaaagagaattagatacgaaaaagtttccgtcaattacgactgaaatcaatatgttaaatcatttttattatgctgaaacttaccatcagcaatacctaggaaagaatcctaatggctattgtggactagtgggcaccgggtgcacgtacgagcagttttga

SEQ ID NO: 224479 - DNA, 535 bp, Unknown
  Bacterial polypeptide expressing nucleotide sequence isolated from the Sargasso Sea
atgatctttaataaaccaatattatcaaattatgataaacatttgatagtatttggtatggggtgtttttggggagttgaaaaattgttctggggtattgatggtgttaatatgactgctgttggttattctgctggtaaaacagattttcctgattataaaaaagtatgctcaggctttacggatcacaatgaggttgtattgattaattttaatccagacataatttcgcttactgatttgttaaaaattttctgggaatcccacgatcctacacaaggtatgcgtcaaggtaatgacattggaacgcagtatagaagtggtatttatgctttttcagatcaggatttagatttggcaacccagtccaaaattatttatgaggaaagattaaaaaaagctaaatatggtgaaataactacagaaattaaaaaggcttcaaagttttattttgcagaagaataccatcaacagtaccttgctaaaaaccctaatggatactgttctttaaaaggtactggaataaagatgtaat

SEQ ID NO: 224480 - DNA, 341 bp, Unknown
  Bacterial polypeptide expressing nucleotide sequence isolated from the Sargasso Sea
aatgattcattttgttaataaaagaagtttattcgatagttatcctagcaattctaaagaaataatccttggagctggttgtttttggggtgttgaaaggatattttggcaattagaaggtgtttgggttacttatgcttcttactctggaggtaaaaggccaaatcctacatatgaacaagtatgtaccggtgttacggggcatgctgaaactatcaatgtaatatatgacgataaaataataacaaccaaagatattttaaaaattttctgggaatgtcatgatcctactcaaggcatgagacaaggcaatgatataggtgaacaatatagatcagcaa

SEQ ID NO: 224481 - DNA, 405 bp, Unknown
  Bacterial polypeptide expressing nucleotide sequence isolated from the Sargasso Sea
aacatatgtctaataaatcgaaagaggagcttcaaaacgaactttcacctgagtcttattatgtaactcaggagagtgggacagagcgaccttttacaggtcagtattggaatcacgtcgaggatggagtatacacttgtatttgctgcggtgagacgctttttaaatctgaaaccaaatttgatgcgggctgcggatggcctagtttttatgaagctgcaaataataataaaattaatgaattagaggattattctctctcaagagttagaactgagattagatgttcaaggtgtgatgcgcaccttggtcatgtttttacagatggtcctcagcctacaggcttgaggtattgcgtcaattcagcagctttacattttaaaaaagaaacaacctcaaattaag

SEQ ID NO: 224482 - DNA, 383 bp, Unknown
  Bacterial polypeptide expressing nucleotide sequence isolated from the Sargasso Sea
ataccgagaagtgtgcacaggcatgacaggacacaacgaagtggtcctagtagtttatgaccctgccaaattatcttatgagaatttactcacaaccttttgggaagaccatgacccaactcaaggcatgcaacaaggaaatgatgttggaacacaatacagatcaggcatctactttttaaatggctcagaagaagaaataattcttaaaactaaatcgcaatatcagagtcaattggataacaatggcctaggacaaataactaccgaagttagaaatgcaggtccgttttattacgcagagcattaccatcaacaatacttagcaaaaaatcctgatggctactgtgctttggcaggcacaggagtaaaaattaagtaga

SEQ ID NO: 224483 - DNA, 358 bp, Unknown
  Bacterial polypeptide expressing nucleotide sequence isolated from the Sargasso Sea
ttgacgccggagcagtttcatatcctgcgtgaacatggcaccgaacgcccctttaccggcccctactgggacagtttcgagaccggaacctattactgcgctggctgcgaaaccccgctgttccgctcggataccaagttcgacgccggctgcggctggccgagcttcttcgagccggtcaagcaagacgcggtgatcgaactgcgcgactcatcactcggcatggtgcgcaccgaaatccgctgcgccacctgcggcggccatctcggccacgtcttccccgatggcccgaagcccaccggcctgcgctactgcatgaacggccatgcaatgcatttcgtgcctgacgaaaagtagt

SEQ ID NO: 224484 - DNA, 348 bp, Unknown
  Bacterial polypeptide expressing nucleotide sequence isolated from the Sargasso Sea
aatgactaaaattattaaaacagatgaagaatggaaatcacttcttacagaagatgaattttatataacaagacaaaaaggaacagaaccagcattctcaggaaaaaattttcaaattgtaaatggaggcacatttaagtgtaagtgctgtgataataaactatttaatagttcaaccaaatatgattctggttgtggatggccaagtttttttgaacaattatcaccagaagcaatcaaaacagaagtagataaatctcatggcatggtaagaattgaaattatgtgctcaaagtgtgatgctcacttaggacatgtttttgatgatggtcctaaaccaacaggaaa

SEQ ID NO: 224485 - DNA, 535 bp, Unknown
  Bacterial polypeptide expressing nucleotide sequence isolated from the Sargasso Sea
atgtctcaaaatactgaaaaagcttactttgctggtggatgtttttggtgcatggaaccaccgtttgaagttcttgatggtgtacttgaagcaacctctggatatatgggtggagagatagagaatccaacatatgaacaggtaagtgtaggtaatactggtcatgcagaagtagttgagatcgagtatgacccaaatattattacatacagtgagctcctagaagttttttggcgaaatattgaccctactgcattaaattatcaatttgcagatgttggatcacaatacagaaccgaaatatttacggtaggtccagaacaaatggaagaagcacttagatctaaagatgagttagaaaagtcaaacaaatttgataaacccattgttactgctattacagaagcacctgttttttatattgcagaggaatatcatcaagatttttataagaaacaaagtgctcgttacaaaatatatgcagaagcaagtgggagaaaaggcttcttagaagatacatggggagacgagtaac

SEQ ID NO: 224486 - DNA, 508 bp, Unknown
  Bacterial polypeptide expressing nucleotide sequence isolated from the Sargasso Sea
atgtctcttactgacttactaaataaaaaaactcttcttccttcagagactgaggcgctgataggaagagatgaagaaattgaagttcctaaagaacacttcataaagggaactcctctaaaaaaaccctttccagaaggattagaagaagcaatctttgcaatgggttgtttttggggtgtagaaaagaaattttgggaaacagaaggagtttatacaactgcagcaggttatattggtggaataactaaaaaccctacttacaaggaagtttgtactggatttactggacatactgaagctgtattggttgtttttgaccctttaaaggtcacatatgcagatttattaaaaatcttttgggaagagcatgaccctactcagggaatgagacaaggcaatgatgtagggacgcaatatagatcaggtatttatcatttaaacatggaacaggaagctctagctaaggaaacaagggaaatttatcaaaaaaaattagatgagaacg

SEQ ID NO: 224487 - DNA, 208 bp, Unknown
  Bacterial polypeptide expressing nucleotide sequence isolated from the Sargasso Sea
tcgatcagatcaaaacacgtccgcaagtcgtttctgccgcgcgtacggtgataaattaatagaagcaggttttggtcctgtcactaccgaaattactgaccgattcccagacttttactacgctgaggactatcaccaacagtacctcgcaaaaaacccaaacgggtattgtggtttgggtggaacaggtgtgtcttgcaatctctaa

SEQ ID NO: 224488 - DNA, 643 bp, Unknown
  Bacterial polypeptide expressing nucleotide sequence isolated from the Sargasso Sea
atgtctttaatggatttattaaataagaaaagtttactaccacttgagtcagaagcgctaaaaggtagagaagaagaaattgaggttccaccagaacattttataaaaggaactccattaaaagcaccatttcctgaaggccttgagcaagcaatatttgggatggggtgtttctggggagtggaaagacgattttgggaattagaaggagtttataccacggctgttggttattcaggtgggtatactaaaaatcctacataccgagaagtgtgcacaggcatgacaggacataatgaagtggtcttagtagtttatgaccctgcaaaattaacttatgagaatttactcacaaccttttgggaagaccatgacccaactcaagggatgcaacaaggtaacgacgttggcacgcaatacagatctgggatctattttttaaataattctgaagaagaagtgatactgcaaacgaaatctcaataccaaagccaattggatagtaatggcttaggcgaaataactactgaagtaaccaatgcaggacctttctattacgctgagcattaccaccaacagtatttggcaaagaatccagatggttattgtgctttagcgggcacaggagtaaaaattaaataaa

SEQ ID NO: 224489 - DNA, 394 bp, Unknown
  Bacterial polypeptide expressing nucleotide sequence isolated from the Sargasso Sea
atgactaatatattaaagtctgatgaagagtggaaaaaactcttagatgatgaaagttttagagtgacaagaaaatcaggaacagaaagaccattttctggaaaatactgggattttaataaggatggtatttataaatgtatatgttgtggtgagccattgtttcaatctgatacaaaattcgatgcaggatgtggttggccgagtttttttattcctctaagtaaggattctataaatgaatttagtgataattcatttggcatgacaagaacagaagttaaatgttctaaatgtgatgcgcacttggggcatgtttttaatgatggcccaaagccaactggtttaagatattgtattaattctgcttctttagattttgaacaaaattaat

SEQ ID NO: 224490 - DNA, 556 bp, Unknown
  Bacterial polypeptide expressing nucleotide sequence isolated from the Sargasso Sea
atgaagcactttgtatatggaaatgaaatttctacaaatactcttaaggaaaccaaatcaataatttttggcggtggctgcttttggggtttagagaaaaaattttgggaattaaatggtgtggtattaacctcggttggctattcaggaggtaaaacagaaaatccaagctatgaagaggtatgctctggtttcacagatcacgtcgaagtagtgaaagttgattacaagccaaatgatatagaacttaaagatttgcttagagtattttgggaagcgcatgatcctactcagggaatgcgccaaggtaatgatattggttcccagtatcgctctgtagtttttattgaagatgaagctgatagagatgttgtcgaactctcattgaacctttttcaagaagaactttataacaataattttggcactataacaactgagatatcaattactgaaaaatactttcttgctgaggaatatcatcaacaatatcttgctaaaaatccaaatggttattgcggccttggaggaacgggctgtaaattaaaaatctaat

SEQ ID NO: 224491 - DNA, 397 bp, Unknown
  Bacterial polypeptide expressing nucleotide sequence isolated from the Sargasso Sea
atgactaaaattgtgaaatctgatcaagagtggagggaaatactctcagaagaggaatactacataacaagacaaaaagggactgagccggcattttctggcaaagcttttgatatttcaaaagaaggagtatttaaatgcagatgttgtggagcagaattattcgaaagttcatcaaaatatgagtcagggtgtggatggcctagtttttttaagggcatatcaaatgatgcaattaaaactgaacaagatacttctcatggaatgattagaaccgaaataatgtgcgctacttgtgatgcccatttaggacatgtattcgatgatggtccagaaccaacagggcaaaggtattgtgttaattcactatcgattaagtataaagaatttgaataat

SEQ ID NO: 224492 - DNA, 520 bp, Unknown
  Bacterial polypeptide expressing nucleotide sequence isolated from the Sargasso Sea
atgagcattaacctaataaaaagcattttcataatagggattatagtatcattcatttttgatgctaatttttctcaacagaagattaatttttctggtgtttctgactctaatagtaaggaagaaaaaaaaatgaaaaaaaccgaatcggaatggaaacgcagacttactccagaggagtactatattttacgtgaaaaaggtacggaaagggcgtttacggggaaatatgataaacattttgagcagggagtctacacatgtgcaggatgtggaacagacctctttgaatcaggcacaaagtatgattcaggttgtggatggcccgctttttatgaggctatgccagggactgtagaagaaactcaagataatagttatggtatgcgtcgcatagaaattacatgtagtaaatgcgatggacaccttggtcatgtattcaatgatggtccaaaaccaacgggtttaagatattgcattaattcagcctccatggatttcaatccagaaaaaaagtaaa

SEQ ID NO: 224493 - DNA, 361 bp, Unknown
  Bacterial polypeptide expressing nucleotide sequence isolated from the Sargasso Sea
aatgaaaaaaattacaaaaactgatgaagaatggaagaatttactatctaaagaagaatattatataactagacaaaaaggaacagaacctcctttttcaggaaaaaattttgaaattattaatggtggtatttttaaatgtaaatgttgtgacaatgaactttttaacagtgcaactaagtatgattcaggttgtggatggcctagtttttttgaacaactttctccagactcaattaaaacagaagtagacaattctcttggcatgacaagaattgaaattatgtgcgcaaaatgtgatgctcatttaggacatgtttttgatgatggacctcatccatctggtaaacgatactgtgta

SEQ ID NO: 224494 - DNA, 436 bp, Unknown
  Bacterial polypeptide expressing nucleotide sequence isolated from the Sargasso Sea
actgacaccggaacaatttgaaatcgcacgtaggaagggcactgaacgcgccttttcaggcacatactggaacacaaagactcccggaacatatcgctgtatctgctgcggcgaacccctatttcgctccggtgagaaatttgaaagtggatgtggatggccaagtttttatgcaccaattgatgcgaaaaaagaggacactaaggggaacgttgttgccgaacacgaagaccgttcacttgcaggtattgccggttttggcatacgtactgaagtaacttgtcgcaggtgtggagcccatcttggccacgttttcaatgatggcccgccacctaccggactccgttactgcatcaactcagcatccattatccttgatcccaaggtgcagagtaacggatcgaaggacgaggaagacgcctcaaaaagccgctaa

SEQ ID NO: 224495 - DNA, 607 bp, Unknown
  Bacterial polypeptide expressing nucleotide sequence isolated from the Sargasso Sea
catgccatcagctgccgatgcgcttccaggccgtgcttcgcccatgccggtaacggaaccacattttgtcaatggccattcactaacttcaccctatccggatggcatgagcaaaatcatattcgggcttggctgtttctggggtgcggagcgcatattctggcaattaaaaggcgtccacgttacagcagccggctatgccgcaggattcacgccaaaccccacttatgaagaggtctgttccggcatgacgggccataacgaagtcgtcttggtggtctatgaccagaaactggtatcttacgccgacctcctgcgcgccttttgggaaggccatgaccctacccagggcatgcgccagggcaacgacgtaggcacccagtaccgctctgggatttattgttattcccgcggggatctcctggaggcagaagctagcagcaagggctatgcccaaaaattggaagctgcgggccataacgcaatcactacggagatcctggacgccccggagttttatttcgcagagacctaccatcagcaataccttggcaggaaccctggcggctattgtggccttggcggcaccggcgtgcgctgcggctaa

SEQ ID NO: 224496 - DNA, 524 bp, Unknown
  Bacterial polypeptide expressing nucleotide sequence isolated from the Sargasso Sea
gcgggaggacagacggagcaaccgacctacaaccaaagtgtgctccggaagaacgggacacacggaagtcgtgcgcgtggtttggagtcgtccggcggtggatttcagcgacttgctgaagttgttctgggaatgccatgaccccacccagggcaatcgacagggcaatgacaccggtacgcaatatcgatcagcgatctacaccttcaaccaggagcatctgcaacaagccctcgccagccgggacgtctatcaagctgccctttccgagaagggctacggcgccatcaccaccgaaatcctggctgatcaaaccttctatttcgccgaggactatcaccagcaatatctggccaaaccgggaagccgcccctactgctcggccatgccaacccagacgcccctcgacaacttcgagggctccaattacaagctcccgaagcaggtctgggccaagtacgactggtccatcagtcactgcgtcctccgctcagacaacgccccaatccagctcaacgcctgaa

SEQ ID NO: 224497 - DNA, 445 bp, Unknown
  Bacterial polypeptide expressing nucleotide sequence isolated from the Sargasso Sea
ttgtcaaaatacttcaaagatccgatgcgtattgaccaattaaatgagattgagcattgggttacccaagaaaacggtacagagcgaccgggtactggaaaataccttaataataaaaaacttggtatttatgtagatattgtttcgggagagcctttattttcatccaatgataagtacgaatctgggtgtggttggccaagctttaccaaaccactagtttcgtctcatgttgcagagttacaagacagtagccacggaatgttgcgtactgaggtgcggtcaaaattcgcagatagtcaccttgggcatgtttttccagatgggccgccagaaagaggtggtttacgttattgtataaactccgccagtctgagatttattccattagatgagatggacgcagaaggctatggtgacttcattagccaaatgggagagtagt

SEQ ID NO: 224498 - DNA, 397 bp, Unknown
  Bacterial polypeptide expressing nucleotide sequence isolated from the Sargasso Sea
tatgtcgaatcatactaaaacagacaatgactggaaaaaactccttagcgatgagtcatttagggtaaccagacaatctggaactgaaaggccattcactggcaagtactggaactttaatgaagatggcatctataaatgcatctgttgtggagaaagtctctttgaatcagataccaaatttgatgctggctgcggttggccaagcttttttattcctgttgatagtgattgtattaatgagtttgaagataattcatttggaatgactagaactgaagtaaagtgttctaaatgcgacgctcatctcggacatgtgttcaatgatggacctcaacctactggtttgagatattgtataaattctgcatctttagattttgaacaaaatcaataa

SEQ ID NO: 224499 - DNA, 421 bp, Unknown
  Bacterial polypeptide expressing nucleotide sequence isolated from the Sargasso Sea
ctgtgctgcaacgccttctgcggcgcgctatctcggctcgaagagcgcatcatgggtgccgaaagcatggttccaaaggaccgcgcgctgcccgggcgcgagcagaagatgcgcgtgtcgccgacgcaccacgtgctcggcagcccgatggagggcccgtggccggcgggccacaaggtgttcgtcttcgccaacggctgcttctggggcagcgagaagggcatctggcggctgccgggcggcggcatcctcaccaccgccgtcggctacgccgcgggctacacgccgaacccgacgtacgaggaggcgtgctccgggctcaccggccacaccgaggcggtgcaggtcgtcttcgacccggcgaagatctcgctcgtcgacatcctgcggtggttctgggaggcgcacgacccgacgcagg

SEQ ID NO: 224500 - DNA, 559 bp, Unknown
  Bacterial polypeptide expressing nucleotide sequence isolated from the Sargasso Sea
gatgaattattttctatcaaacctagatcttcatagtgaaactcctcaagattatgaatcaattatttttggagctggttgcttttggggagttgaaaaaaagttttggcaactagatggagtttggctaacttcggttggatattctggcggcgaactagaagatccctcatacgaaattgtgtgttcaggaacaactaatcatgtagaggttgtaaaagttgtatttaatcccgaagttatatcattggcagatctcctcaaagttttttgggaatgtcatgatccaactcaaggaatgagacaaggcaatgatattggatcacaatatcggtcggtgatttttcttaattcagagttacataaagatgaatctctatcatctttggaaacttatcaggatgaacttgagcttaatggttacggccccattactactgaaatttcgatgatgaagaattactttttagctgaggaatatcatcagcagtatttagcaaaaaatccaaatggctattgcgggcttgggggaactggttgctctttccctaataattaa

SEQ ID NO: 224501 - DNA, 517 bp, Unknown
  Bacterial polypeptide expressing nucleotide sequence isolated from the Sargasso Sea
atgacgccacgcaagcccttcattattcaattgccggaaaaagaatccactctccctggtcgtgaggatccaatcatgatgcctgaaatccactacgtacttggaacatcaatcggccctccatttccagaggatgcagaacaagctgttttcggccttggctgtttctggggcgctgaacgtgcgttttggaaactaaacggtgttataagtaccgcagttggatatgcggggggatttaccccgaatccaacttaccaagaggtgtgttcagggatgacaggccataacgaagtggtccttgttatttttgatcctcttactgtctcatatccagaacttctaaaagttttctgggaaagccatgaccctactcaagggatgcggcaaggaaacgacgtaggaactcaatatcgaagtgggatttactggaatgacgagaatcagttaagtgaagcatctgactctcagaagaggtaccaaaccgagctaacgggtgctggacttggggaaatca

SEQ ID NO: 224502 - DNA, 453 bp, Unknown
  Bacterial polypeptide expressing nucleotide sequence isolated from the Sargasso Sea
catggcaaatttacaggtcgccacattggcaggcggatgcttttggtgcatagagtcagcgtataataccgttgagggtgtggaaaaagcgatatcggggtacgccggcggcgaagagccgtccccctcttaccagtcggtttgtggtggcagtaccggacatgctgaggtggtgcaagttaccttcgatgcagacaccattggctatcgtgaaatactggaaatcttttttgcgctgcacgatccaactcagcttaaccgtcaaggtaatgatgtgggtacgcagtatagaagcgcgattttctatcataacgaagcgcaaaaagaagaggcggaaaaaataattgctgagattaccgctgaagaaatttggcccaaccccgttgttaccgagatagttgaagtgaacaattatcatccggccgaagactaccatcaggattactttcaaaa

SEQ ID NO: 224503 - DNA, 397 bp, Unknown
  Bacterial polypeptide expressing nucleotide sequence isolated from the Sargasso Sea
aatgaaaaaaattataaaaacagatgaagaatggaaaaatttgctgactgaaaaagagtattatataactagacaaaaaggaacagaacctcctttttcaggaaaaaattttgaaattattaatggtggaatttttaaatgtaaatgttgtgaaaatgaactttttaacagctcaactaaatatgaatctggttgtggatggcctagtttttttgaacaactatctccagattcaattaaaactgaagttgataattctcttggaatgacaagaattgaaattatgtgcgcgaaatgtgatgctcatttaggacatgtttttgatgatggacctaagccatctggaaaacgatactgtgtaaattctttgtcaattaactacgaagaatttgaataa

SEQ ID NO: 224504 - DNA, 424 bp, Unknown
  Bacterial polypeptide expressing nucleotide sequence isolated from the Sargasso Sea
atatgcaaatggttatggaataaaacccaactatcgatcaattattcaatttaagaataaatataaagaaaataatttcgctgaagttgtgaaagttacttttaatagcaatgcgattaagcttcatgaaattttaaaacatttctttgaaacacatgatccaactcaactcaacagacaaggtaatgatataggaactcaatataggtccacgattctatttttagatgaaaatcaaaaaaaggttgcgcttgagataacaaagcaatatcaaaagcttctttatgctggtggttatggcaaagttaaaactaaaatagagccattagataatttttatcttgcagaggattatcatcaagattatttaaagaaaaatccgaatggatattgtccagatttatctaccggtatcgttttttct

SEQ ID NO: 224505 - DNA, 361 bp, Unknown
  Bacterial polypeptide expressing nucleotide sequence isolated from the Sargasso Sea
ggtcatactgaaacagttagagttttctataagcctagtctagtagattataatgttttattgaaaattttttgggagtctcataaccctactcagggaatgcgacaaggaaatgatataggcacccagtataggtcagcaatttttactcattcaagcgaacaaaaaaaattggcagatgattctttgaaggtctttaatttacaattaaaagaaaatggtttttctgatattacgacagatattacgcaaggatatgattttttctatgctgaggattaccatcagcaatacctttctaaaaacccaaatggttattgtggcttaggtggtactggagtttcataccctcttgattaaa

SEQ ID NO: 224506 - DNA, 520 bp, Unknown
  Bacterial polypeptide expressing nucleotide sequence isolated from the Sargasso Sea
atggaagaactagattcagcaatacttggaggaggatgcttctggtgtctggaagcagtatacataagactagagggtgtaaaatcagttatttcaggctactcaggaggtaacgttaaaaatcctacttacgaacaggtttgtactggtgaaacttctcatgctgaagtagtaaaaataaactatgatttaaacaaaacaagtttcgagattttactggaatggttttggagatgtcatgaccctactacccttaatcgccaaggaggagacactggcacacaatatcgttctgtaatttattatgaaaatgagagccaaaaatcgatagcacaaaagtcaaaaaaagatgccgaatcttcaggcatctttgagaatcccatagttaccgaaatcaataaacttgacgtgttttacccggcagaagattaccatcatgactattataaaaagaacccttatgcaggttattgctcatatataatccgtccaaaacttgaaaaattaaaactggaataag

SEQ ID NO: 224507 - DNA, 349 bp, Unknown
  Bacterial polypeptide expressing nucleotide sequence isolated from the Sargasso Sea
tggaaatagcaggcaaacaacctatgaagaagtttgtacaggtagaactggacatgctgaagttgtaaggcttacttttgatgaaaatatagttacgtttaaaaaaatattagatttgttttttaaaatgcacgatcctacacaaaaagatatgcaatttccagatgttggaactcaatatagaagtgagattttttatgaaaatgaaaagcagaaacaagacgctttagaagttttaaaagaatttaacgaaaaattagacggtaaaattcaaacaaatatctcaaaaattaaaaactacaataaagctgaggaatatcatcaaaaatatattgaaaaaaacaggtaa

SEQ ID NO: 224508 - DNA, 285 bp, Unknown
  Bacterial polypeptide expressing nucleotide sequence isolated from the Sargasso Sea
acgatccggcgcagggcatgcgtcaggggaacgaccagggtacgcagtatcgctccgccatttacccgttaacgccggaacaaaccgccgccgcacaggccagccttgagcgttttcaggcagcaatgaccgccgcaggcgacgagcgcaccattaccacggaaatcactacggcaacgcctttctactatgccgaggacgatcaccagcaatatctgcataaaaatccttatggatattgtggcattggcgggattggcgtttgcctgccgccagagcgttaat

SEQ ID NO: 224509 - DNA, 364 bp, Unknown
  Bacterial polypeptide expressing nucleotide sequence isolated from the Sargasso Sea
taccttcgatgcagacaatattagctatcgagaattactagaaatctttttcgcattgcataaccccactcagcttaatcggcaaggcaatgatgttggaacccagtaccgcagtgcagtgttctatcacgatgaagtgcaaaaagcagaagcggaaaaaataattgcagagatcaccgaagaagcgatttggccagatcctgtagtgactgaagtagtagaaatcaataactactacagtgcggaagattaccaccaaagttactttaaaaataacccgcaaaatcaatattgctcaatggttgtagcgcccaaattagcaaaatttaagaagacgtttgcatcgcgcttacgcactgaataa

SEQ ID NO: 224510 - DNA, 367 bp, Unknown
  Bacterial polypeptide expressing nucleotide sequence isolated from the Sargasso Sea
tatgttaaataaaaaagatttaatttatcaggtaactagagaaggaggcacagaacctcctttttcaggaaaacatgttaacaacaaaaaaattggtaactatacatgtattaactgtgatgcaataatattttcttcagagcacaaatttgactcagggacaggatggccttctttttatgatttattagataataaagctgtggatgaaatagaagataatagttttggcatgaaaagaatagaagtaaaatgtagcagttgtaattctcatttagggcatgtatttccagatggaccacctcctactggtctaaggtattgtattaattctgttgcactaaattttaaagaagaaaaaaaataa

SEQ ID NO: 224511 - DNA, 392 bp, Unknown
  Bacterial polypeptide expressing nucleotide sequence isolated from the Sargasso Sea
aaatgaaatgcaatattatgtgacccaagagaatggcacagagcctgcttttagaaatgcgtattggaaccataaagaaccgggtatttatgtggatgtaataagtggtgaagccttatttagttctaaagataagtttgattcgggtacaggttggcccagttttaccaagccattggtaaacttaatcaaaaagagtgatcgatcttatggaatgaaacgtacagaggtacgtagcccaaatgccaatagtcatttagggcacgtgtttaatgatggcccaactggtaagcgctattgtattaactcggccagtttaagatttattcataaagatgatttacaaaaagaagggtatgctaattatgtgtacttgtttgaattgaagtgac

SEQ ID NO: 224512 - DNA, 328 bp, Unknown
  Bacterial polypeptide expressing nucleotide sequence isolated from the Sargasso Sea
atttgagcagatcctaaatgtattctggcaggcacacgacccaacaacactcaatagacagggtaatgacgttggaacacagtatagatcagtgatcttctaccacaatgataagcaaaaatcactagccatagaatcaataaaaaaggccaatgactctggatactggccaaataaaatcgtaacagaggttactgaactttttaattattcagatgccgaagactaccataacgactattatgataataatccaaatcaaccttattgtctttttgtcattaaaccaaaactcgataaactagaaaagaaaggtatcatcaagtaa

SEQ ID NO: 224513 - DNA, 735 bp, Unknown
  Bacterial polypeptide expressing nucleotide sequence isolated from the Sargasso Sea
gtgaccgtgggaatgaatattcatctgcaattttttatttaacagaagaacagcagaaactggctgccgcatttaaaactatgattgaacagtctgaaatattgagtgaacctgtaaaaacaccaattctaaaagctagagagttttatgacgcagaagactatcaccaagattactacaaaaaaaacaagttaagataccattattaccgtttcaggtgtggacgtgacaaaagattgttagaactttggggtgataggaaggataaattagaaaaaattaatcaaacttctggctttaaaatacctacaagagaagaactggtaacaaaactaactcccctgcaatttaatgtcactcagaatgatgctacggaaactcctttcagtaacaaatattggaacaataaaagtgaaggcatctatgtggacattgtttcaggtgaaccactattcagttcaactgacaaatataaatctggaactggttggcccagttttacaaaaccacttgaattagaaaacatagttatgaaagaagacagaagtttgtttacggtaagaaccgaggttagaagtaagcatgctgattcccaccttggacacctcttcaatgacggtccagggccgctaggcttgaggtactgtattaattccgccgcacttaagtttattgccaaaaatgatttggaacaagaaggataccagatctaccagagtttatttaataactgat

SEQ ID NO: 224514 - DNA, 277 bp, Unknown
  Bacterial polypeptide expressing nucleotide sequence isolated from the Sargasso Sea
gtgtcatgaccctactcaggggatgcgacaaggaaatgacataggaactcaatataggtctgtaattttttgcacaaatgaagttgatattaagcaagcttgctctagcaaagaaaagtttcagagtattttaagtaaaaaccaatttggtgatattacaactgaaataagtttgttaaaaaactactatttagcagaagaatatcaccaacaatacctagctaaaaatccaaatggatattgtgggcttggtggaactggctgtactctagattaa

SEQ ID NO: 224515 - DNA, 406 bp, Unknown
  Bacterial polypeptide expressing nucleotide sequence isolated from the Sargasso Sea
ggagggtatactaaaaatcctacatatcgagaagtgtgcacaggtatgacaggtcacaatgaagtggtcctagtggtttatgacccagccaaattatcttacgagaatttactcacaaccttttgggaagaccatgacccaactcaaggtatgcaacaaggaaatgatgttggaacacaatacagatcaggcatctactttttaaatagctcagaagaagaaataattattaaaactaaatcgcaatatcagagtcaattggataacaatggcctaggacaaataactaccgaagttagaaatgcaggtccgttttattacgcagagcattaccatcaacaatatttagcaaaaaatcctgatggctactgttctttggcaggcacaggggtaaaaattaagtagc

SEQ ID NO: 224516 - DNA, 505 bp, Unknown
  Bacterial polypeptide expressing nucleotide sequence isolated from the Sargasso Sea
ggtggaggatgtttttggtgtgtagaagctgtttatcaacgtgttgacggcattatatcggtaaaacctggatacgcaggtggacatattgacaaacctacgtataaacagatatgcactggcacaactggacatgctgaagtggcaagaatagagtttgaccccacagtagttaattatgaacagatcttaaatgttttctggcaagcccatgaccctactacacttaacagacaagggaacgacgttggaacccaatataggtctgtcatcttttatcacaatgatgatcaaaaaacacgtgcggaaagatctaaaataggtgctgatggatcaggttactggcccaactcaatagtgacagagataaccctcattaataattattctgatgctgaggactaccaccataactattataatgataacccaaaccaaccatattgtttattcgttatcaaaccaaaattggataaacttgaaaaaagtggtgttattgaatgat

SEQ ID NO: 224517 - DNA, 739 bp, Unknown
  Bacterial polypeptide expressing nucleotide sequence isolated from the Sargasso Sea
cctgcttttattaaaagtaagagttataaatatgaaccagaaagttaaaatcttaaattacttaatactagttttgttaataactccatatgtaggtgcaagtaaaacctcgcatgtagaaacaatttatctgggatcaggttgcttttggggggctgaaaagggctatgaattaatggatggagttattaatgcagaatctggctatgcaaatggatatggcataaaaccaaattacagatctataattcagtttaaaaataagtataacgaaaagaattttgcggaagtagtgaaagtaacttttaatagtaatgccatatcccttgaaaatatattaaaacacttttttgagactcatgatcctactcaacataataggcagggcaatgatataggtactcaatatagatcaacaattctttttcaaaatgaatctcagaaagaactcgcagaaaagattatagctgaataccaagctcttctaattgagggaggttatggaaaaattagaaccaagctggagcctttagataacttttatcttgcagaagaatatcatcaggattatttaaaaaagaatcctaacggctattgcccagacctatcaacaggaattgtttttaacgatgaagaaaaaattttcgaagataatgaataccttcttacgggaaagcaaatattagttctagactctcaaattattgtccttactgtgaaaaatttaaggatgatgtaa

SEQ ID NO: 224518 - DNA, 529 bp, Unknown
  Bacterial polypeptide expressing nucleotide sequence isolated from the Sargasso Sea
aatgaatagtagcatatatttaggaggtggatgtttttggtgtattgaatcggtatttaaaaaagttaatggaattacttttacatcacctggatatatgggtggtaaaagtgataatcccacatatgaagaagtttgtgagggatatacaaaccatgttgaggtagttgaattacagtatgatcaaacaatagatttaaaccaaattttaaatattttttttactgtccacgatcctacatctataaatagacaaggtgctgatgttggaactcaatatagatctgctattttctgtaaaccagaagaaaggtcatctattgtaaattttattcaagaacttgaaagccaaggtatttttaaagataaaattgtaacagaggttaatgatattcaaaagttttttgtagctgaaaattatcatcatgattattttacaaaaaatcctgaaaatgcatactgtcaggcagtgattaatccaaaattaaataagttgagatcttcattttcagaattaatctctgaataa

SEQ ID NO: 224519 - DNA, 835 bp, Unknown
  Bacterial polypeptide expressing nucleotide sequence isolated from the Sargasso Sea
gaaaaaattatttttggtgcgggatgtttttggggtgctgaaaaagaatatgcggcaattccaggtgttattaatgccgtttcgggttattcagacggtgaaggagttgaacccacttataaagcaatcacacaacccgaaaataagaataatcccgacaaccatgcagaggttgttgaagtaacattcaactcaaatgaaatttcgattgagaaactaacccaacacttcttcgagaaccacgatccaacacaactcaatcgtcagggtaacgatgtcggtactcaatatcgctctattattttaacaacgagcgaaatgcaaagtgatatagctaatcaggtatcggatcagtatcaactattacttagtgccgtaggctatggtgagattacaacagttattaagccactagataaattttatccagcagaagagtatcatcaagattacctagtaaaaaatccaaatgggtattgtccgattcatgcaacgggcgttaggtttgataaaacagaaattgtaacggttgataattcagatcttatgaaaggtaagactatcattgttatagaaacggagaaccactgtccgtattgtgaaaagtttaaagaagatgtcgcgaataattatcaaggaacaattcctttgacatatagattagcaaatcaacttgagggactaaaaattaaaactgccacatgggctacaccaacaatattatttctagaggatggcatggaagtttttggacatcagggctacatgacatcagaagttttttatcaggcactaggtgcttttaaattaggtgaatcggaagcttataatgtcg

SEQ ID NO: 224520 - DNA, 559 bp, Unknown
  Bacterial polypeptide expressing nucleotide sequence isolated from the Sargasso Sea
aatgattcattttgttaataaaagaagtttattcgatagttatcctagcaattctcaggaaataatccttggagccggttgtttttggggcgttgaaagagttttttggcaattagaaggtgtttgggttacttatgcttcttactcagggggtaaaagaccaaatcccacatatgaacaagtatgtaccggtgttacagggcatgctgaaactatcaatgtaatatatgacgataaaataataacaaccaaagatattttaaaaattttctgggaatgtcatgaccctactcaaggcatgagacaaggcaatgatataggcgaacaatacagatcagcaatatattgcattaatgataaacagcttgaattagcaaataaatccaaagaactatatgagaaagttctaatagaccgaggacatacgacaataacaactcaaattagcattaatcaatcaagctaccctgcagaggaatatcatcaacaatacttagctaaaaatccaaatggttattgtggggttaaaggtactggttgtgcacttcctccattgtaa

SEQ ID NO: 224521 - DNA, 499 bp, Unknown
  Bacterial polypeptide expressing nucleotide sequence isolated from the Sargasso Sea
atgagtatatttgaaaaagacctcacaatagatgaacctagccatctctctcagatattttttggtatgggttgtttttggggagctgaaagaaaattttggcagttagatgggttgtacacaacggctgtcggatacgctggggggcataccaaagatccaaattatgaaactgtttgcaatggggatacaggtcatgcagaagttgtaaaagtcatttatgatcaacaaatagttagtctaaaacaattactaaaaattttttgggagtctcacgatcctactcaattaaatagacaaggaaatgatatcggcagtcaatatagatcaattattttatcaaataatagtaaagaaattcaacctctacaggattcaaaaaagaaatttcaaattgaactagataaactgtcatatggatcaattaaaaccgaaatagtcattcttgataaattttacttagctgaagactatcatcaaaagtatttacataaaaatc

SEQ ID NO: 224522 - DNA, 660 bp, Unknown
  Bacterial polypeptide expressing nucleotide sequence isolated from the Sargasso Sea
atagagtattaaaaacagatattaaaaaaatccctaatccacaagaagatgaaataatttttggttgtggctgtttctggggtgccgagaaatgtttttggaaacttcccggagtcatcacaacttccgtaggatatgctggcggtgagaagagcaatccaacttattatgaagtatgttcaggtttaactggtcattcagaagtagtaagagttatttggaataaaagtgaaatagatataagcgatttactaaaaatgttttgggaatgtcatgaccctacacaaaaaaatagacaaggaaacgatatgggtactcaatacagatcagctatttattacaaaaacgaaaataataaacaaattatactagccagtaaaaaacaatatcaaaatgaactaaataaaaataattttggtaaaatagaaactgaaataaaaatgattgatacctatttttatgcagaaaagtaccatcaacaatatcttgcatcacccggtagtaggcagtattgttcagcttctccaacacaagttaaattaaaagattttactggaagtaattacaaattaaaagaacacgtatgggaaaacttcgactgggaagttgataagtgtgtattgagatctgataacaatccgataagtaattataattgaa

SEQ ID NO: 224523 - DNA, 505 bp, Unknown
  Bacterial polypeptide expressing nucleotide sequence isolated from the Sargasso Sea
atgtctttaatggatttactaaataagaaaagtttactaccgctcgagtcggaagcgctaaaaggtagagaagaggaaattgaggttccaccagaacattttgtaaaaggaactcccttaaaagcaccatttcctgaaggtcttgagcaagcaatatttggaatgggatgtttctggggagtggaaagacgattttgggaattagaaggtgtttacaccacagctgttggttattcaggagggtatactaaaaatcctacataccgagaagtgtgcacaggcatgacaggtcataatgaagtggtcttggtggtttatgatccttcagtaattacctatgaaaatttactcgtcaccttttgggaagatcatgatccaactcaaggcatgcaacaaggcaatgatgttggaacacaatacagatcaggtatctacttcttaaataactcagaagaagaagtcattcttaaaactaagtcacaatatcagagtcaattagacaaca

SEQ ID NO: 224524 - DNA, 712 bp, Unknown
  Bacterial polypeptide expressing nucleotide sequence isolated from the Sargasso Sea
atgctcccctcctggctgacccaaagcggtggtgagtccgccaaagaggcaatgcatgccgtgctcgacacacccttgcgtgctccactgatgagagaccaggaggaagccctttttgcctgcggatgtttttggggagctgagaaggggttctggcgtcttcctggcgtggtcaatacagccgtgggatacgccggtggtgagagagtgaacccgacttatcaggaggtctgctcgggcaccactggccacaccgaagtggtgcgggtggtctggagcacgctggccgtcgatttcagtgatctgctgaaactgttctgggagtgccatgaccccacccagggaaaccgccaggggaacgacaccggaacccagtaccgctcagcgatctacaccacaacggatcagcagttgagcctggctcaggccagccgaacctcttaccagaaggccctgaaccatcgtggattcgggccgatcaccacggagattttggcggatcaggccttttatttcgctgagccataccaccagcagtacctagccaaacccggtagtcgtccctactgctcggccatgcctacccaagctcttctgggggatttcaacggcaacaactatctccttccatcaacggtctgggcggcctacgactggagcatcaaccactgcgttttgcgcagcaacaatgcaccgatccgcctggcttgag

SEQ ID NO: 224525 - DNA, 727 bp, Unknown
  Bacterial polypeptide expressing nucleotide sequence isolated from the Sargasso Sea
ctgaaacctagactagttacattttttttattaatcctatttgcaaactcttttgttcatgcaaataaaactgatcatatccaaactattcatcttggttctggttgcttttggggtgctgaaaagggttatgaatcccttgatggagtcattgatgcagtttcaggttatgcgaatggatatggagtaagtccaaattatagatctatcatccagcttaagaacaaatataatgaaaataattttgctgaagtagtaaaagtaactttcaatagcaatgcaatttcacttgatgagattctaaaacatttttttgaaacccatgatccaacacaacttaataggcaaggaaatgatattggaactcagtataggtcattaatccttttctcaagtgaaactcaaagaaaacttgctgaaaatattttaaacgagtatcaatcccttctttttgatgcaggttatgggaaagtagttactcgtatagagttattagataacttttttttagctgaaaattatcatcaggattatttaaagaaaaaccctaatggctattgcccagatttatcaaccggcgttgtattcaataaaaaagagaaagatgttctagataatcaagatctgcttattggaaagcaaatattgatcttagattcactaaattattgcccttactgtgagaaattaaagttggatgtgactaatgattataaaggtactattc

SEQ ID NO: 224526 - DNA, 316 bp, Unknown
  Bacterial polypeptide expressing nucleotide sequence isolated from the Sargasso Sea
aatgaactatcataagaattcagaggcaatcgcacttttaagcccagaagagtattgggtaactcaggaaaatggtactgaaagacctgggactgggaaacttttgtttaataaagagcctggcatttatgtcgacatcgtttctggcgagccactttttatatcggatgataagtatgagagcggctgtggatggcccagttttacaaaacctgttgaagcatcttatgtcactgagatttctgatacttctcatgggatgatcagaaccgaggtacgttcaactcatggggacagccacttaaggcatgttttt

SEQ ID NO: 224527 - DNA, 298 bp, Unknown
  Bacterial polypeptide expressing nucleotide sequence isolated from the Sargasso Sea
ggaaaaaattttaaaataattaatggtggaatttttaaatgtaaatgttgtgataatgaactttttaatagttcaaccaagtatgaatctggttgtggatggcctagtttttttgagcaactatctccggattcaattaaaacagaaatagataattctcatggaatgacaaggattgaaattatgtgtgccaaatgtgatgctcatttaggacatgtttttgatgatggacctcaaccaactggtaaacgatattgtgtaaattctttgtcaattaattacgaagaatttgaataat

SEQ ID NO: 224528 - DNA, 457 bp, Unknown
  Bacterial polypeptide expressing nucleotide sequence isolated from the Sargasso Sea
tctgtctcgcgatgtgagtttagataaagcgagatgtgagcaaatggctaatcaaccttctccagaagaactgaaaaaaaatttaaccgaaatgcagttctacgtgacgcagaatcacgggacagaaccgccatttaccgggcgtttgctgcataataagcgagacggcatctaccactgtctgatctgcgataaaccgctatttcgttccgagacaaaatatgactctggctgcggctggcccagcttttacgagcctgtcagcgatgaggctatccattacataaaagatacgtcacacggcatgcagcgcatagaaatccgctgcggaaactgtgatgcgcacctgggacacgtcttcccggatgggccgaaacctaccggtgaacggtactgcgttaactcagcgtctttgaacttcactgatagtgaaaacggtgagcaaaccaagggttga

SEQ ID NO: 224529 - DNA, 453 bp, Unknown
  Bacterial polypeptide expressing nucleotide sequence isolated from the Sargasso Sea
tgccaattcaaaaagctcttataggcgctggatgtttttggggaattgaagaatattataaaaagcttaacggtgtagagaaaacaaaagttggttattcaggtggtaattcaataaatcctacttatgaagaagtttgttttggaaacactggacatgcagaagtagttttaattgattttgatcatgaaataattaaatattctaaaattcttgaacatttttggaagtgtcacgatcctactcaattaaacagacaaggatacgatattggaactcaatatagatctgtaatattttattttgatgaaaatcaaaaaaaaatagcattagattcttttaaacaaattcaaaataaaactaacaaaaaaatagttactgaaatttctgcagcaaatgaattttatctagcagaagaatatcatcaatgttatttagaaaaaagaagttgat

SEQ ID NO: 224530 - DNA, 511 bp, Unknown
  Bacterial polypeptide expressing nucleotide sequence isolated from the Sargasso Sea
agttattgatgcagtttcaggctatgcgaatgggtatggagtaaatccaaattatagatctatcatccagcttaagaacaaatataatgaaaataattttgcagaggtggtaaaagtaacctttaacagcaatgcaatttcacttgatgaaattctaaaacatttctttgaaacccatgatccaacacaacttaatagacaaggaaatgatattggaactcagtatagatcagtgatcctattttcgaatgaaactcaaagaaaacttgctcaagatattttgaatgagtatcaatctcttctttttgaggcgggttatgggagagtagttacccttatagagccattagacaacttttatttagctgaaaactatcatcaggattatttaaagaaaaatcctaatggttattgtccagacttatcaactggtgttgtattcaatgaaaaagaaaaagatattttagataatcaagatctgcttatcggtaagcaaatattgattatctaa

SEQ ID NO: 224531 - DNA, 473 bp, Unknown
  Bacterial polypeptide expressing nucleotide sequence isolated from the Sargasso Sea
tatggctcaaagtgaagttgcaacccttggtggaggatgtttttggtgtgtagaagctgtttatcaacgtgttgacggcattatatcggtaaaacctggatacgcaggtggacatattgacaaacctacgtataaacagatatgcactggcacaactggacatgctgaagtggcaagaatagagtttgaccccgcagtagttaattatgaacaggtcttaaatgttttctggcaagcccatgaccctactacacttaacagacaaggaaacgatgttggaacccagtatagatctgtcatcttttatcacaatgatgatcaaaaaacacgtgcggaaagatctaaaatagatgctgatgaatcaggttactggcccaactcaatagtgacggagatcaccctgattaataattattctgacgctgaggactaccaccataactattataatgataacccaaaccaaccatatt

SEQ ID NO: 224532 - DNA, 422 bp, Unknown
  Bacterial polypeptide expressing nucleotide sequence isolated from the Sargasso Sea
aatgactgatatagcaatatttgcagctggttgtttttggggtattgaagaaaagtttaactcaaccaaaggtgtggttgaaacagaagttggctatattggtggaaaaacaaataatcctacatatgaagaaatatgtcgaggtgacacatttcatgccgaagcagttagagttttttatgatacagaaataattacttatgatcagctcttagacatattttttgatattcatgatcctacaacccttaatagccaagggcctgattttgggacacaatatagatcagcaatattttgtaagaatgattttgaaaagctatcaagtcaaaataaaataaaagaattgaatagagatagatttaacaataaaatagttaccacaattgagcttaatgatgatttttggatagcagaagaat

SEQ ID NO: 224533 - DNA, 529 bp, Unknown
  Bacterial polypeptide expressing nucleotide sequence isolated from the Sargasso Sea
tgtagagcccgtgccggaccacatagataaagctgtatttggattaggctgtttctggggggctgagcgtctcttttggtcgcttcctggcatatacagcacagccgttggttatgctggaggaataaccgcaaatccgtcttatgaagacgtttgctcagggcaaaccggccatactgaggttgtgttagttttctttgatccgacgcaaatatcattcaaacatttactcaaagtgttctgggaatctcataacccaactgaaggaatgaagcagggtaacgatgtcggtacgcagtatagatccgccatttatggttatagtgaggaccaacttagcgaagccaagagcagtttggggttatttcaggatgctttgtcagagtataaatatccagctatcacaactgaaatcaaatacttgaaagcattttattatgctgaaacttatcatcagcagtatttaggaaaaaatccaaatggatattgtgggatagagggtactggagcgcaatttaagatcagataa

SEQ ID NO: 224534 - DNA, 361 bp, Unknown
  Bacterial polypeptide expressing nucleotide sequence isolated from the Sargasso Sea
ggaagtattttaaccaaagaatcttatttagtgacaagagaaggagccactgaaagaccattttctggagagtactgggatcattttgaagatggatcttacaaatgcatatgttgcggtacagaactttttaaatctaattcaaaatttgatgctgggtgtggttggccgagtttttttgagtccattgatcctcgatgtataaatgaaatacctgatcattcacatggcatgataagaacagaaataaaatgcagtaaatgcgatgctcaccttggacatgtctttaatgatggtcctcaaccaactggacttagatattgtgtaaactcagcatcccttgatttcaaggacaaataat

SEQ ID NO: 224535 - DNA, 547 bp, Unknown
  Bacterial polypeptide expressing nucleotide sequence isolated from the Sargasso Sea
atgtctcttactgacttgctaaataaaaaaacacttcttccttcagagtctgaagcactggtaggaagggatgaagaaattgaaattcctgaagagcattttttaaatggaactcccttaaaaaaaccttttcctgaaggattagaagaagcagtctttgcaatgggttgcttttggggtgtagaaaagaaattttgggaaacagaaggtgtttatacaacagcggtaggatatgttggaggggtaaccaagaaccctacttataaggaagtttgcacaggatttactggtcatactgaagctgttttggttgtttttgatcctcaaaaggtcacatatgtagatttattaaaaatcttttgggaagaacatgaccctactcaaggaatgagacaaggtaacgatgtaggaacgcaatatagatcaggtatttattatctaaacacggaacaagaagctctagctaaggaaacaaaagaaatttatcaaaagaagttagatgagaacggtttgaatagaattactactgaattagcccaaaaataat

SEQ ID NO: 224536 - DNA, 400 bp, Unknown
  Bacterial polypeptide expressing nucleotide sequence isolated from the Sargasso Sea
agcggccagaccgggcacaacgaggtcgtgctggtcgtctatgaccccgcccaggtcagctatgagacgctgctcggcgctttttgggaaaatcacgaccctactcagggcatgcgtcagggtaacgacataggcacccagtaccgttcgggtatttattgctatggcgacgcgcaagagaccggagcgcgggtcagccttgagacctatcagccggcgttgaggtcagcgggctacggcgagatcaccacagaaattctgccggccccgacgttttattttgccgaggactaccatcagcagtatctgcacaaaaatcctgccggctattgcggcatgggtgggaccggtgtcgtttgtcccctcggaacgggcgtcggcgctcaggcagggcactagg

SEQ ID NO: 224537 - DNA, 421 bp, Unknown
  Bacterial polypeptide expressing nucleotide sequence isolated from the Sargasso Sea
aatgtttggagcgggatgcttctggggtgttgaatataacttctccaaagtcaaaggtgtgaaggatgttgtctctggatatagtggtggtaaaacccaaaatccaacctatgaacaagtttgtagtaattctacagatcatgctgaagtcgtcttaattgattatgatgcaaacgtagtgtcttatgacacattactaaatgtattctgggaaaaacatgaccctactacattaaatcgacaaggggccgacgttggcactcaatatagatctgcgatattctactttacagaggttcagaaagaaattgcaagaaaatctttggagtatcgccaaaataaattagggaacagaaagatagtcactgaaataactgaggctaaagagttttggaaagctgaagaatatcatcaaaaatat

SEQ ID NO: 224538 - DNA, 225 bp, Unknown
  Bacterial polypeptide expressing nucleotide sequence isolated from the Sargasso Sea
aatgaagaacaaaattaaaaaaactgatgaagaatggaaaaatttattaaccaatgatgaatattttgtaactagacaaaaaggaacagagccacctttttcaggcaaaaattttacaataataaggggtggaatttttaaatgtaaatgttgtaataatgaattatttaatagctctaccaaatatgaatctggatgtggttggcctagtttttttgaacaatt

SEQ ID NO: 224539 - DNA, 463 bp, Unknown
  Bacterial polypeptide expressing nucleotide sequence isolated from the Sargasso Sea
tatgaaaaaagcattatttggcgcaggttgtttctggggtgtggaagaaacattttgtaaaactccaggtgtaataaataccttagttggttattctggaggcaacactattaacccatcttatgaaagtgtttgccaaggaaatacaaatcatactgaggttgttttagttgaatttgataattctaaaatatcttatgaagatcttttgatggttttctggaagtgtcatgatcctacaactttaaatagacaaggtcctgatattggaacacaatataggtcagcgatatattattataatgaagatcaaaaaaataaatctattaattctaaaaatgaatacgctaaaagttcaggattaaatattgttactgaaatatcagaagctaaggaattctataaagctgaagaatatcatcaaaaatatatccaaaaaacaggtttacactgcgctatatag

SEQ ID NO: 224540 - DNA, 419 bp, Unknown
  Bacterial polypeptide expressing nucleotide sequence isolated from the Sargasso Sea
agaaaaaaaatcaaaattaactgatatgcagtactatgttacacaagattgcggtacagaacctgcttttgacaatgaatattgggatcataaagaaccaggaatatatgtcgatatcatatctggagaagcattattcgcttctgtacacaaatacgactcaaattctggatggccctcattttatcagcctattgaagatcaaaatttaaaattcgagcaagattaccaattaattcttcctagaacggaggtaaaaagcaaacaaggagattctcatcttggacacgtatttaatgatggaccaaatcctactggattacgctattgtatcaattctgctgctttaaaattcatcccattaaaagaaatggaagaaaaaggatataaaaagtatttatatctttttgagaattaat

SEQ ID NO: 224541 - DNA, 368 bp, Unknown
  Bacterial polypeptide expressing nucleotide sequence isolated from the Sargasso Sea
tatgtcaaaacttgtaaaaaatgatagcgagtggaagaagctattaaatgaagaaagctatagagtaacaaggcaatctggaacagaaagaccattcacaggtaaatactgggactttgacaaacaaggagtctataaatgtatttgttgcggtgaaaaattatttgaatcaaaaacaaaatttgatgcaggttgtggttggcctagtttttttattccaataaacaatgaatcaataaatgaatctgaagataactcatttggtatgaatagaacagaagtcaaatgttctaaatgtgacgcacatctcggacatgtttttaatgatgggcctaagccaactggcctaagatattgtataaaatcag

SEQ ID NO: 224542 - DNA, 292 bp, Unknown
  Bacterial polypeptide expressing nucleotide sequence isolated from the Sargasso Sea
tatgtttggcatgggctgtttctggggtgcagaaaagaaattttgggagcttgagggagtaaagctcactgctgtcgggtatgctggtggtattagcagaaatccacgttatagagatgtatgtactggactaaccggtcataatgaggttgttaaattacaatttgatcccactgaaatacgttacaatcaacttttagcgttattttgggagaatcatgatcccacacagttaaataggcaaggtaatgattttggcacgcaatatcggagcggggcttattatttttaa

SEQ ID NO: 224543 - DNA, 655 bp, Unknown
  Bacterial polypeptide expressing nucleotide sequence isolated from the Sargasso Sea
tatgtcactgtggagtaggaaactggaaatgcctgcgcctgaatcggcgttgccgggccgagcggaatctatggctgtccctgaggcgcatgaagttttggcaacacccataacgccaccttttgcggcgggaagtgaacgcatagtttttggcatgggatgtttctggggagccgagcggattttctggcaagcccctggcgtcgtaactacggccgcaggctacgcaggcggctatacgccgaacccgacatatgaagaagtgtgtagcggtctaaccggccataacgaagtcgtactcgtcgtatttgacccgacggagacgacgtttgacaatatgctcaagctcttttgggaaaaccatgatccgacgcaagggatgcgtcaaggcaacgatattggtactcaatatcgatccggtatctacgtttcttcggataatcagcgacgacaggcggaagactctcgggttgaatttcaagccgagttgcaaaaagcgggctacggcgccataagcaccgaaatcttagatgaagatgatttcttctatgccgagcactatcaccagcagtatctccacaaagtaccgaatggctattgtggcttgggtgggaccggcgtgacctgtccctcgggaattgcgatcactgactag

SEQ ID NO: 224544 - DNA, 442 bp, Unknown
  Bacterial polypeptide expressing nucleotide sequence isolated from the Sargasso Sea
atgaactatcataagaattcagaggcaatcgcacttttaagtccagaagaatattgggtaactcaggaaaatggtactgaaagacctgggactgggaaacttttgtataataaagagcctggcatttatgtcgacatcgtttctggtgagccactttttatatcggatgataagtatgaaagcggctgtggatggcccagttttacaaaacctgttgaagcatcttatgtcagggagatttctgatacttctcatgggatgatcagaaccgaagtacgttccactcatggggacagccacttaggccatgtttttccagatgggcctaaagatagaggggggctgcgctattgtataaattcggcaagtcttcgatttatacacttaaatgatatggaggctgaaggctatggccagtttgtggagttaataggagaataaa

SEQ ID NO: 224545 - DNA, 559 bp, Unknown
  Bacterial polypeptide expressing nucleotide sequence isolated from the Sargasso Sea
aatgaaacattttctatcaaatctagatcttgagagtgagactcctcaaaattttgaatcaattatttttggagctggttgcttttggggagttgaaagaaagttttgggagctagatggtgtttggttaacttcagttgggtattccggtggtcagcttgaagatccctcttatgaaattgtatgctctgggacaactaatcatgtagaagttgtaaaagttgtatttaatccagaagttatatcattggcagatctcctcaaagtattttgggaatgtcatgatccaactcaaggaatgagacaaggcaatgatattggatcacagtatcgatcagtaatttttcttaattcagattcacataaagatgaaacatcatcatctttagagacttatcaggatgaactagagcttaatggttatggtcccataactactgaaatatcaatgatgcagaattactttctagcagaggaatatcatcagcagtatttagctaagaatccaaatggctattgcggacttgggggaactggttgctctttcccaaataattaa

SEQ ID NO: 224546 - DNA, 397 bp, Unknown
  Bacterial polypeptide expressing nucleotide sequence isolated from the Sargasso Sea
tatgaataaaataattaagtctgatctagaatggaaaaaaatactttctgaagaagaatattatgtcacaagacagaagggtacagaaccagccttttctgggaaggcttttgatatttctaaagatggaatatttaaatgcaggtgttgtggggcgaaattatttgagagaacttctaagtatgaatccggttgtggctggcctagtttttttaaaggaatttccaatgatgcgattaaaactgaacaagatacttcttatggaatgatcagaacagaaatcatgtgtgctacttgtgatgcacatttaggtcatgtatttgatgatggtccagaaccaacaggtttacgttattgtgtaaactctctttcaattcaatataaagaatttgaataa

SEQ ID NO: 224547 - DNA, 544 bp, Unknown
  Bacterial polypeptide expressing nucleotide sequence isolated from the Sargasso Sea
atggggtcggagttcgctaccctagggggtgggtgtttttggtgtctagaagcggtttttgatctggtcaggggcgttaagggtacgcagtcgggctataccggtgggcacacattggagccgacgtacaagcaggtctgcaccggaaccacgggacacgctgaggtcgttcaggttgagtttgatcctgacgtcattgggtatgctgatctgctggagattttctttgggatccatgacccaacgacactcaaccggcaaggtggggatgtgggcacacaatatcgatcggcaatctttacgcactccgatcagcaggccgtaatagctagcgacgtgcttgctgagctaggtgtggaaggtccttggcatgacccgattgttactgtgataactcctttagaggcttttcatgcggccgagcctgatcatgatgcctacttcgagcgaaacgggggacaaccatactgcgcggctgtgatcgctcccaaggtcgtcaagtttcgtcaacgtttcgcacataggctgatggccgccgagtagc

SEQ ID NO: 224548 - DNA, 625 bp, Unknown
  Bacterial polypeptide expressing nucleotide sequence isolated from the Sargasso Sea
atgcaattgccattacctacttcagaccaagctttacctggaagggatattcctattcaagtaagtgaccttcattttgtaaatggtaatcgaataaaaccaccatttgaagatgatatcgaaatagctgattttgctttgggctgcttttggggtgccgagcgaaaattttgggaagttgaaaatatttattcaactgcagtcggttatatgggtggattcacacctaatgcatcatatgaggaggtatgttcagggttaacaggccatactgagacagttagagttttctataagcctagtctagtagattataatgttttattaaaaactttttgggagtctcataatcctacacagggaatgcgacaaggaaatgatataggcacccaatataggtcagcaatttttactcattcaagcgagcaaaaaaaattggcagatgattctttgaaggtctttaatttacaattaaaagaaaatggtttttctgatattacgacagatattgcgcaaggaaatgattttttctatgctgaggattaccatcagcaatacctttctaaaaacccaaatggttattgtggtttaggtggtactggagtttcataccctcttgattaaa

SEQ ID NO: 224549 - DNA, 553 bp, Unknown
  Bacterial polypeptide expressing nucleotide sequence isolated from the Sargasso Sea
aatgatacattatgttaaaaatatttctatcaatgaaaatattcctggggatttagaagaaatagtttttggagctggctgtttttggggtgtagagagaaaattttggaatttatctggagtatttgttacatcagttggatactcaggcggtgatacagataatccaacttatgaagatgtttgttataaagatacaggtcatgttgaggtagtaaagatttattacgatccgaaagtcattagcctcaatgaaatactaaaaatattctgggagtgtcatgatcctactcaaggcatgcggcagggcaatgatattggaactcaataccgatcagtaatcttttgtacaaatgaggaagacattaaaagagccaatgatagcaaagaaaagtttcaaaacgttttaagcaaaaataaatatggtgatattacaactgaaattagtttaataaagaattactttttggcagaagaataccaccagcaatacctagccaaaaatcctaatggatattgtggtctaggcggaactggttgtactctagattaa

SEQ ID NO: 224550 - DNA, 634 bp, Unknown
  Bacterial polypeptide expressing nucleotide sequence isolated from the Sargasso Sea
catggaacagattatttcgccggcagacgcgctgccgggacgccgcgaggcgatggtgattggccagcagcatgcggtcaatggtcacccgactcagggaccctggcctgaagggatggcggtggcctggttcgggatgggctgcttctggggggtggaacgcctgttctggcagcagcccggggtctactccaccgccgccggctatcagggcggggtgacccagaatcccacctacaaggaggtgtgcagcggattgaccggccatgccgagacggtgcaggtggtgtttgatcccaaggtgatcagttacggcgatctgctcaagctgttctgggagcagcacgatccggcccagggcatgcgccagggcggcgacatcggcacccagtatcgctccgtcatcttcttcggggacgacacccaggaggcgattgcccagcagagcctggccgcctaccagcaggcgatgacggcgagcggtgacgggcgcaccatcaccacccgcattctgccgctggcgcccttctattacgccgaggattaccatcagcaatatctggagaagaatccggacggttattgcggcctgggtggcatcggcgtctgcttgccaccgagcctcaaccgctag

SEQ ID NO: 224551 - DNA, 610 bp, Unknown
  Bacterial polypeptide expressing nucleotide sequence isolated from the Sargasso Sea
catgccgctgatggctgaagcactgccgggccgtgacacacccgtctgggacggcgccccgcattgcgttctgggcacgcctaccatgggccctttcccagaccatctggaagaggtgcacctgggccttggctgtttctggggtgcggaacggctgttctggcagatcgacggtgttcacagcacggcggtcggctacgcgggcggcatatcgccgaacccgacctatgaagaggtctgctccggccgcactggccataccgaagtcgtgatggtggtattcgacccgtccgtcgtgacgctggaaacgatcctgaagactttctgggaagagcatgatccgacccagggctatcgccagggcaatgatatcggcacgcaatatcgctcggcgatctattgcacgaccgatgaacagctggttgccgcgcgcggtgttgccgagcgttatggcgcggccctgaaagcggccggacgagatgccattaccactgagatcggccctgctggtcccttctattacgccgaggactaccaccagcaatatctttacaaggtgccgaacggatattgtgggctgaagggcacgggcgttgcctgtgcaggctag

SEQ ID NO: 224552 - DNA, 433 bp, Unknown
  Bacterial polypeptide expressing nucleotide sequence isolated from the Sargasso Sea
atgtcccacgattccgacgacaagatcttcccgtacgagaaggacgacgccgagctgcgccgccggctcacgccgatgcagtacgaagtcacgcagcatgcggccaccgagcgcgcattcaccggcgaatacaccgacaccgaagacgacggcatctacaaatgcgtcgtctgcagcacgccgctgttcgagtccggcgccaagttccactcgggctgcggctggcccagctacttcaagccgctcaatggcgaggtgatcgacgaaaaggtcgactactcgcacgggatggtgcgcgtcgaggtgcgctgcaaccactgcggcgcgcatctcggccacgtcttcgaggacggcccgcgcgacaagaccggtttgcggtactgcatcaattcggctgcgttaaacttcgagtcccgacccgaaaacgaatgag

SEQ ID NO: 224553 - DNA, 526 bp, Unknown
  Bacterial polypeptide expressing nucleotide sequence isolated from the Sargasso Sea
gatggagcaattggttctcggtggaggctgcttctggtgtacagagggtggcctgctaggcctcaagggggttcacgaggtcgtccccggttacagcggcggccatgtagacaatcccacttacgagcaggtatgcgagaagaagacaggtcacgcagaggtcgttagagtcaccttcgacccagaagtcatccctaggatgacgcttctgagggtcttccacacgctcttcgaccccacccaactgaatcgccaggggaatgacatcggcccccattaccgcagcatcgtcctgtacgcggacgagggtcagaagcaggatgccgaggcggccatagaagagatctcccagtactacgacgctcctgtggtcacggaagtggttccactggagaagttctggctggcggaggactaccaccacgactacttcgccaggaacggctcctcgaatccgtactgcgtggcagtcgtggcaccgaaaatcgctaaggctagggcccgtcacgcggacctgtatgagtga

SEQ ID NO: 224554 - DNA, 490 bp, Unknown
  Bacterial polypeptide expressing nucleotide sequence isolated from the Sargasso Sea
tatggcaaatgatactgaaaataagaaggctgtgtttgcagcaggttgtttttggggtgtagaatcaacatttcaacagatggatggtgtaaagtcaactactgtaggttatataggtggtaaagttaaaaatccatcatatgagcttgtttgtacgggtataactggacatgcagaagctgttgaggttgaatacaatccaaatgttgtatcattcgaaaaattattagatactttttttcaacttcatgatccaacaactttaaatcgtcaaggtccagatgttggaacacaatatcgttcagctgcttatttttcagacgatgaagaaaaaaaaataattgaaagtaaagtgaatacacttaacgaatctggtaagtttaaatcgaaaatagtcactgagattgaggctctttcagaattttataatgctgaagattatcaccaagattattacaaaaaaaggggaattgacggatgcgcaatttaa

SEQ ID NO: 224555 - DNA, 490 bp, Unknown
  Bacterial polypeptide expressing nucleotide sequence isolated from the Sargasso Sea
atgaggtcaaaaatggcaaaagcgatgtttggggcaggatgtttttggggaatagaggaaacattcagaaaggtacctggcgtatcggatgtagcggtaggatatagtggcggcgccacagataatccaacctacgaggaagtttgttcaggtgcgacaggacacgccgaggttgtggaagtcgattttgatgagcaaaaagttagctttgagagtctattaggggttttttgggattgccatgatcccacacaattaaatcatcaaggtccagatgtaggaacgcagtatcggacagcagttttctttatggacgaagagcagaaaacaacagcgatttcttctaaacaatcggaacaaacaagcggaaagcatcgcagcgacgttgtaacagaaatatcccccgctaagaaattttggagagccgaggaataccatcagcaatatattacaaaaaatagaagtaggttcggacgattattcggataat

SEQ ID NO: 224556 - DNA, 577 bp, Unknown
  Bacterial polypeptide expressing nucleotide sequence isolated from the Sargasso Sea
tttgagaaacgatattccaagaaaacataaagttttaggtagtgtgatatatcctccgtatcaaaaagaagcgtcggaaatttttctgggcatgggttgtttttggggtgccgaaaaattattttgggatgttgatggcatcatttcaacatcagtcggttacggtgagggtgaaactgttgagcctacatatcaagaagtttgttctggaaagacaaaccatattgaactagtaaaattagtttttcaggatgatcaaaacacattaaaaaatattttaaaagttttttgggagtcgcatgacccaacgcaaggtaacagacaaggaaatgatatggggtcgcaatatcgctcagctatacttactacttctgatagacatcttaaattagtaagagcatctttaaattcttatcaaaaaaggattgaaccaaagttaattacaactgaggtgaaagaatgtgaaagtttttattatgctgaagattatcatcaacaatatttacacgataacccaaatggctattgcatgcattggaatctgggagtcaattttgaattaagtgatttagattaa

SEQ ID NO: 224557 - DNA, 553 bp, Unknown
  Bacterial polypeptide expressing nucleotide sequence isolated from the Sargasso Sea
aatgttgcattatgtaaaaaatatatccattaatgaaaatattcctaaaaacttaaatgaaattgtttttggagcaggatgtttttggggagtagaaagaaagttttgggatttacatggaatatatgttacttcagttggatattcaggtggaaatactgaaagtccctcctatgaagatgtatgttacagaaatacaaatcatgttgaggttgttaaagttcattatgatccaaatgaaattaaactcgatgaaatactaaaagtattctgggagtgtcatgaccctactcaaggtatgcgtcaaggaaatgatattggaacccagtatagatctgtaattttctgttcaaatgaggatgacattaaacaagctatcaatagtaaagaaaaatttcaaaatattcttacagaaaataaatttggtgatattacaactgaaataagcttaattaaaaactactattttgctgaagaatatcatcagcaatacctagccaaaaaccctaatggatattgtggactaggtggaactggttgtactctcgattaa

SEQ ID NO: 224558 - DNA, 574 bp, Unknown
  Bacterial polypeptide expressing nucleotide sequence isolated from the Sargasso Sea
tatgattcattttgttaaaaatattcccattaatgacgatgtacctaaaaattgtaaagagatagtattcggcgctggatgtttttggggagttgaaagaaagttttgggatttaccaggagtttttttaacctctgttggatattcgggtggggatacagaaaatccctcatacgaagatgtttgttatagaaatacaaatcatgctgaggttgtaaaagttacatatgactcaaatgtcatagatctattggaattgttaaaaattttttgggaatgtcatgaccctactcaaggcatgagacaaggcaatgatgttggaactcaatacagatcggtcatttatacgaacagtgatgatgatctaaaagttgcattagaatcaaaggacacttatcaaaaagaactagtcgaaaataatttcaaagctgataaccttgaaagcattaccactgaaatagaacctgttaagaattattatttagcagaagagtatcatcaacaatatttagctaaaaatcccaatggttattgtggtattggtggaactggatgctctttcccaaaagaataa

SEQ ID NO: 224559 - DNA, 577 bp, Unknown
  Bacterial polypeptide expressing nucleotide sequence isolated from the Sargasso Sea
atgttgaaaattgctgaaaatcattttgttaatggaaacaaagtcaaacctccatacccagacaatcacaaaagactgattgttggcatgggttgtttctggggggcagaaagaatgttttggcaacaagaaggcgtttattcaacaagcgttggatattcggctggaaaaacaagcgatccaacataccgtgaagtttgttctggaacgaccgaccacgcagaagtggttcttgtcatttatgacagccaactcatcggattagaaaatctattgcgtgtgttttgggaagggcatgatcccactcaatttatgagacaaggcaatgatgtgggcagtcagtaccgctcgatcattttctatgatgacgagcctactcatgaaaagattaaatcctcacgagatcaataccaaactgagttaagcaagggtggttttggtgagattgtcacccagataaaatcgccagaggaattcttttttgctgaggactatcaccaacagtatttggcaaagaatcccggcggttattgtggcttgggaggcacaggcatcaaatgcactccaaatgtataat

SEQ ID NO: 224560 - DNA, 463 bp, Unknown
  Bacterial polypeptide expressing nucleotide sequence isolated from the Sargasso Sea
tatggaaaaagcattatttggtgcaggttgtttctggggtgtggaagaaacattttgtaaaactccaggtgtaataaataccttagttggttattctggaggtgatactattaacccttcttatgaaagtgtttgccaaggaaatacaaatcatactgaggttgttttagttgaatttgataattctaaaatatcttatgaagatcttttgatggttttctggaagtgtcatgatcctaccactttaaatagacaaggtcccgatattggaacacaatatagatcagcgatatattattataacgaagatcaaaaaaataaatctgttcattctaaaaatgaatatgctaaaaatgcaggattaaaaattattactgaaatatcacaagctaaggaattctataaagcagaagaatatcatcaaaaatatatccaaaaaacaggtttacactgcgctatatag

SEQ ID NO: 224561 - DNA, 520 bp, Unknown
  Bacterial polypeptide expressing nucleotide sequence isolated from the Sargasso Sea
gatggatgaaagcaataaggtgacatttggcggaggctgtttctggtgcctagaagctgttttccaacaagtaacgggggtcatcaaggtggtttccggatacgctggcggagcatcaccgaatccaagctacgaagcggtctgcagcgggttgaccggtcacgcagaagtggtacaaattaaatatgattcgggacagacagactttaggactctgctggactggttctggcgttgccatgatcccacgaccctcaaccggcagggagctgatgtcggaacccaataccgttcggtgatcttttgccatgatgaagaacaattggaacatgcccagacggccaagcaagatttggaaagttccggaattttcagggaccctattgtaactgaaatcagcctgatcccggaattctatcctgcggaggattatcaccagaattactaccaggaaaattccggggcaggctactgccaatttgtgatccggccgaagatgcagaaactcggttttgattag

SEQ ID NO: 224562 - DNA, 529 bp, Unknown
  Bacterial polypeptide expressing nucleotide sequence isolated from the Sargasso Sea
atgataaggactatatatttcggaggtggttgtttctggtgtgtagaatcaatatatcttaaaataaatggagttgttgatgtaaagcctggatatatgggaggatcaactattaatcctacttatgaagaggtttgcgaaggaaacactgaccatgttgaggttgctaaagttatgtttgatgaaactataacattaagcgatttattaaaagtttttttttcaattcatgatccgacaacacttaatagacagggtgctgatgttggcactcaatatagatcagccattttttgtgaaatttcagatagagctcagataattgactttataaaaaacattgaaaaatctgatatatttaaagataacatagtgactgaagtcaatgaagttgtcgaattttacgaagctgaagaataccatcataactactttaataataatccgaacaacagttattgtcaaatcgttgtatctccaaaaattgaaaaattcaataagggattcccttctttaatctcgaaataaa

SEQ ID NO: 224563 - DNA, 643 bp, Unknown
  Bacterial polypeptide expressing nucleotide sequence isolated from the Sargasso Sea
atgtctttaatggatttattaaataagaaaagtttactaccactcgagtcggaagcgcttaaaggtagagaagaagaaattgagattccaacagagcattttgtaaaaggaactccgctaaaagctccatttcctgaaggacttgagcaagcaatatttggaatgggatgcttctggggagtggaaagacgattctgggaattagaaggtgtttataccacggctgttggttattcaggtgggtatactaaaaatcctacatatcgagaagtttgcacaggcatgacaggacataatgaagtggtcttagtggtttatgaccctgccaaattaacttatgagaatttactcacaaccttttgggaagaccatgacccaactcagggaatgcaacaaggtaacgacgttggcacgcaatacagatccgggatctattttttaaataattctgaagaagaagtgatattgcaaacgaagtctcaataccaaagccaattggatagcaatggcttaggcgaaataactactgaagtaacaaatgcaggtcctttttattacgctgagcattaccatcaacagtatttggcaaagaatccagatggttattgtgctttagcgggcacaggggtaaagatcaagtaac

SEQ ID NO: 224564 - DNA, 397 bp, Unknown
  Bacterial polypeptide expressing nucleotide sequence isolated from the Sargasso Sea
tatgtctaaccatactaaaacagataatgactggaaaaaacttctaagcgatgagtcatttagagtaaccaggcaatctggcactgaaagacccttcactggtaagtactggaactttaacgaagatggcatctataaatgcatctgttgtggagaaagtctctttaagtcagatactaaatttgatgctggttgtggttggccaagtttttttattccttttgatagtgattgtattaatgagtttgaagataagtcatttggaatgactagaactgaagtaaagtgttctaaatgtgatgctcaccttggtcatgtgttcaatgatggacctcaaccaactggtttgaggtattgtataaattctgcatctttagattttgaacaaaatcaataa

SEQ ID NO: 224565 - DNA, 460 bp, Unknown
  Bacterial polypeptide expressing nucleotide sequence isolated from the Sargasso Sea
aatggatacacctttttggtgttctgccacgcctgaagaaagacaggaagctattaataaccttactgaagaacagagaattgttgctttagagaatggaacagagaggccattttttaatgaatattggaatagtaaagatgttgggatttatgttgatgtaatttcaggagaacccttattctcctctttagataaatttgactcaggaacaggttggccgagttttgataagccaataaacgggatagaaattgtagaagttgttgataaatcccatggaatggttcgcacagaggtaagaagtcaatatggcgacgcacacctaggccatttatttgatgatggacccactgaaactggattaagatattgtattaattcggcttcattaagatttgttcctctagagaagttaagtgaagaaggctatgaggattttgtagaattatttaactaa

SEQ ID NO: 224566 - DNA, 559 bp, Unknown
  Bacterial polypeptide expressing nucleotide sequence isolated from the Sargasso Sea
aatgattcattttgtaaaaaatataccgattgcagatgaccattctgaagaatttaaagaaataatttttggggcgggatgtttttggggagtagaaaaaagattttgggatatccaaggcgtctacttaacttcagttggttatgccggaggaaacacgaaagatcctacctatgaagatgtttgttataaaaataccaatcatgccgaagttgtaaaaataatctatgatccaaaaagtatagaattaaatacattacttaaaatcttttgggagtgccatgaccctacccaaggaatgaggcaaggaaatgatgtgggcacacaatatagatcagttatttatacttctaatgaggatgattttaggtatgcaattgaatcaaaagaaatatatcaatctgagctagttaaaaataactttaataaaattacaactgaaattgaaattgctccagagtactatttagctgaggagtatcatcaacaatatttagcaaaaaatccaaatggttattgtggcattggtggaaccggttgctctttcccaaacaaataa

SEQ ID NO: 224567 - DNA, 562 bp, Unknown
  Bacterial polypeptide expressing nucleotide sequence isolated from the Sargasso Sea
catggtgaacgagatgcttgaaacggcgacattgggaggcgggtgtttctggtgcacggaggcggtgtttctcgacgtcgacggcgtgacggccgtccagtcgggctacgcgggcggccatacgcgcaatcccggctatcgcgacatctgcgagggcgatacgggccacgcggaagtcgtcaacgtgacgttcgatccggcacgcatcggctatcgcgagatcctcgagatcttcttcgcgacgcacgatccgacccagttgaaccggcaaggcaacgacgtcggcacgcagtaccgttcggtcgtgttcacccattcggacgcacagcgcgacacggcgctcgacgtgatccgcgaactggagcgcgagcaggtgttcgggcagccgatcgtcacgcaggtcgcgccgctcgacgacaactactggccggccgaggattatcaccagaactactatgcgcgtaacccggggcagggctactgctcggtcgtgatcgggccgaagctcgcgaaattccgtcagaagttctcgcaccgcctgaagtcgctgcgcggcgcgtaa

SEQ ID NO: 224568 - DNA, 397 bp, Unknown
  Bacterial polypeptide expressing nucleotide sequence isolated from the Sargasso Sea
gatgtcgaagttgaatagaaataaagaggaatggaaaaagctactaactgatgaaagttatagagttacaagagaatctggaacagaaagagcattcacaggcaaatattggaactttcatgaagatggagtatataaatgcatctgttgtggtgagagtttatttgattcattttctaagtatgattcaggttgtggctggccaagcttctttgttcctgccaataataatattattaatgaattcgaagataattcattgggaatgacaagaacagaagttaaatgttctaattgtgatgctcatcttggacatgtttttgatgatggacctcagcctactggtttaaggtattgtataaattcagctgcattagattttgaaaaaaacaactga

SEQ ID NO: 224569 - DNA, 442 bp, Unknown
  Bacterial polypeptide expressing nucleotide sequence isolated from the Sargasso Sea
aatgaattatcataaaaattcagaggcaatcgcacttttaagtccagaggaatattgggtcactcaggaaaatggtactgaaagacctgggactgggaaacttttgcacaataaagagcctggcatttatgtagatatcgtttctggtgagccactttttctatcggttgataaatacgaaagtggctgtggatggcccagttttacaaaacctgttgaagcatcttatttaactgagatttcggatacttcttatgggatgatcagaaccgaagtacgttccacaaatggagatagccatttaggccatgtttttccagatgggcccaaagatcgagggggactgcgctactgtataaattcggcaagtcttcgatttatacacttaaatgatatggaggctgagggctatggcaagtttgtggagctaataggagaataa

SEQ ID NO: 224570 - DNA, 394 bp, Unknown
  Bacterial polypeptide expressing nucleotide sequence isolated from the Sargasso Sea
tatgagcggcaacacccccaaccccgagcagtggcgccggcagttgagcgccgagcagtatcacgtctgctgggagaagggcacggagcgtccctacagcggcgccctgctccacaaccgcaagagcggcgactacctgtgcgtctgctgcaagcaggtgctgttccactcggatgccaagtttgactcgggctgcggctggccctcgttcgatcgggccatcgaggggaccgtgacctacaccgaggatggcagccacggcatgaagcgggtggagatcacctgcagtcagtgcggctcccacctcggccacgtcttcccggacggaccgaccgaaaccggtcagcgctactgcgtcaacagcctgagtctggatttcgatcccgagccctga

SEQ ID NO: 224571 - DNA, 559 bp, Unknown
  Bacterial polypeptide expressing nucleotide sequence isolated from the Sargasso Sea
aatgattcattttgttaataaaagaagtttgtttgataattatcctaataattcgcaggagataattctcggagctggttgcttttggggtgttgagcgagttttttggcaattagaaggtgtttgggtaacttatgcttgttattcaggtggtaaaaggccaaatcctacatatgaacaggtatgcacaggtgttactgggcatgttgaaactgtcagtgtgatatatgacgaaaaaataattgcaacagaagatattttaaaaattttttgggagtgtcatgaccctacccaaggcatgagacaaggtaatgatgtaggcgaacaatataaatcagcaatacattgctctaatgaacatcaacttgaattagcaaatagatcgagggaagtgtatgaaaaggttttaattaatcgagggcatacaaaaataaccactgaaattagaatcaaccaatcgtcttaccctgctgaagaataccatcagcagtatttagctaaaaatccaggcggttattgtggaatcaaaggtactggctgcgcattgcctccattgtaa

SEQ ID NO: 224572 - DNA, 559 bp, Unknown
  Bacterial polypeptide expressing nucleotide sequence isolated from the Sargasso Sea
gatgaaacattttctatcaaatctagatcttcatagtgaaactcctcaagattatgaattaattatttttggagctggttgtttttggggagttgaaaaaaagttttggcaactagatggtgtttggttaacttcggttggatattctggcggtgaactagaagatccttcttacgaaattgtatgttcaggaacaactaatcatgtggaagttgttaaagttgtatttaaccccgaagttatatcattggcagatctcctcaaagttttttgggaatgtcatgatccaactcaaggaatgagacaaggcaatgatattggatcacaatatcgatcggtgatttttcttaattcagagttacataaagatgaatctttatcatctttggaaacttatcaggatgaacttgagcttaatggttacggccctattactactgaaatttcgatgatgaagaattactttttagctgaggaatatcatcagcagtatttagccaaaaatccaaatggctattgcgggcttgggggaactggttgctctttccctaataattaa

SEQ ID NO: 224573 - DNA, 1291 bp, Unknown
  Bacterial polypeptide expressing nucleotide sequence isolated from the Sargasso Sea
cctgcttttattaaaagtaagagttataaatatgaaccagaaagttaaaattttaaattacttaatactagttttgttaataactccatatctaggtgcaagtaaaacctcgcatgttgaaacaatttatctgggatcaggttgcttttggggggctgaaaagggctatgaattaatggttggagttatcaatgcagaatctggctatgcaaatggatatggcataaaaccaaattacagatctataattcagtataaaaataagtataacgaaaagaattttgcagaagtagtgaaagtaacttttaatagtaatgccatctcgcttgaaaacatattaaaacacttttttgagactcatgaccctactcaacataataggcagggcaatgatataggtactcaatatagatcgacaattctttatcaaaatgaatctcagaaagaactctcagaaaggattatagctgaataccaagctctcctaattgagggaggttatggaaaaattagaacaaagctggagcctttagataacttttatctagcagaagaatatcatcaggattatttaaaaaagaatcctaatggctattgcccagacctatcaacaggaattgtttttaacgatgaagaaaaaattttcgaggataatgaataccttcttacgggaaagcaaatattagttctagactctcaaaattattgtccttactgtgaaaaattcaaggatgatgtgactaatagctataaaggaagcatccccttgagctatagaacttctgatcagttacatggccttgaaattaaatctcctacctgggctactccatctttaatttttctagaaaatggaaaagagattttttcgtatcagggatatataaatcaaaaagatttttatcaattattgggtaaatttaaattaggaaattcagaggcatataacgtcgcatttaacaaaggaactgatgcacgcttctgcaaagaatatcaaatttttaaaaatacaccagatggtatctttatagataaactcagtggagaacctctttttgatacaagaaatagatttgtctcaaggtctggttggttatctttcacgaaacctgttgatggatctgtatatgaacttcctgataatagttatggtatgaaaaggactgaaataagatcagtttcctcggatatacatttgggacatgtatttgatgatggtccaaatggcatgccaagatattgtatcaatgctaccgtattggaatttaaaccaagaaacgaaatttcttag

SEQ ID NO: 224574 - DNA, 559 bp, Unknown
  Bacterial polypeptide expressing nucleotide sequence isolated from the Sargasso Sea
atgattcaccatataaaaaatatttcattagaaggcgatctacctaacaacttaaaagaggttgtgcttggagcaggttgcttttggggagtagagaagaaattttgggacttgaagggagtttacctgacatcagtaggctactcaggcggtgagactgacaatccaacttatgaagatgtttgttacaaaaatacaaatcatgctgaagttgtaaaagtgatatatgatcctgctattatcaatttgatagatattttaaaagttttttgggaatgtcatgatccaactcagggaatgagacaaggtaatgatatcggaacacaataccgatcagtaatatatacctccgataataatgatcttaatcttgcaaaagaatcaatggagatttatcaaaaggaattagaaaaaaataattttcacaaaattacaacagaaatcgatgttataaaaaattactttttagcagaagagtaccatcaacaatatctcgccaagaatccaaatggctattgtggtattggtggaacaggatgctctttcccaaaagaataat

SEQ ID NO: 224575 - DNA, 535 bp, Unknown
  Bacterial polypeptide expressing nucleotide sequence isolated from the Sargasso Sea
tatgtctcaaaatactgaaaaagcttactttgctggtggatgtttttggtgcatggaaccgccatttgaagttcttgatggtgtacttgaagcaacctctggatatatgggtggagaaactgaaaatccaacttatgaacaagtgagtatgggtaatactggtcatgcagaagtagttgaaatagagtatgacccaaatattattacatacagagaactattagaggttttttggcgaaacatagacccaacggcattaaattatcaatttgcagatgttggatcacaatacagaaccgaaatatttacggtaggaccaaatcaaatggaagaagcacttaattctaaagatgagttagaaaagtcaaacaaatttgataaacccattgttactgcaattacagaagcacctgtgttttatattgccgaagaatatcatcaagacttttataagaaacaaagtgctcgttataaaatatatgcagaagcaagtgggagaaaaggcttcttagaagatacatggggagacgagtaa

SEQ ID NO: 224576 - DNA, 640 bp, Unknown
  Bacterial polypeptide expressing nucleotide sequence isolated from the Sargasso Sea
cctgaaacttagattagttatatttttttcatttatcctatttgcaaattcttttgtatatgcaaataaaaccaatcatattcaaaccattcatctcggttcaggttgtttttggggcgctgaaaagggttatgaatcccttgatggagttattgatgcagtttcaggttatgcaaatggctatggagtaagtccaaattatagatctatcattcagcttaagaacaaatataacgaaaataattttgcagaggtggtaaaagtaacttttaacagtaatgcaatttcacttgatgaaatcctaaaacatttctttgaaatccatgatccaacacaacttaatagacaaggaaatgatattggaactcagtacagatctgtgatccttttctcgaatgaaactcaaagaaaacttgctcaaaatattttgaatgagtatcaatctcttctttttgaagcgggttatgggagagtagttacccttatagagccattagacaacttttatttagctgaaaactatcatcaggattatttaaagaaaaatcctaatggttattgcccagacttatcaaccggtgttgtattcaatgaaaaagaaaaagatattttagataatcaagatctgcttattggtaag

SEQ ID NO: 224577 - DNA, 559 bp, Unknown
  Bacterial polypeptide expressing nucleotide sequence isolated from the Sargasso Sea
atgaaacattttctatcaaatctagatcttcacagtgaaacacctcaaaattttgaatcaattgtttttggagctggttgcttttggggagttgaaaaaaagttttggcaattagatggtgtttggttaacttcggttggatattctggtggtgaacttgaagacccttcatacgaaattgtatgttcaggaacaactaatcatgtagaagttgtaaaagttgtatttaatcccgaagttatatcattggcagatctgctcaaagttttttgggaatgtcatgatccaactcaaggaatgagacaaggcaatgatattggctcacaataccgatccgtaatttttcttaattcagagcaacataaagatgaatctttattatctttggaaacttatcaggatgaacttgagcttaatggttacggccctattactactgaaatttcaatgatgaagaattactttttagctgaggaatatcatcagcagtatttagcaaaaaatccaaatggctattgcgggcttgggggaactggttgctctttcccaaataattaat

SEQ ID NO: 224578 - DNA, 490 bp, Unknown
  Bacterial polypeptide expressing nucleotide sequence isolated from the Sargasso Sea
gatggcaaatgatgctgaaaataaaaaagctgtatttgcagcagggtgtttttggggagtagagtctacttttcaacaaatggacggagtaaaatcaacaacggttggttatataggaggaaaagtaaaaaatccttcttatgaacttgtttgtaccggattaactggtcatgctgaagctgtggaaattgaatataatccaaatgaggtttcattcgaaaaattgttagatacctttttcgagcttcatgatcctacaactttaaatcgacaaggtccagatatagggacgcagtatcgttcagctgcatatttttctaatgacgatgaaaagcaaattattgaaagcaaaataaatgcattaaatgaatctggaaaatttaaatctagaatagtaactgaaattgaagcaatttcagatttttataatgctgaagattatcatcaagattattacaaaaaaagaggaattgacggatgcgctatttaa

SEQ ID NO: 224579 - DNA, 574 bp, Unknown
  Bacterial polypeptide expressing nucleotide sequence isolated from the Sargasso Sea
aatgttgaaaattgcagaaaaccatttcgttaatggaaataaagtcaaaccaccatatccggattatcataatagattgattgtcggtatgggttgcttttggggagctgaaagaatgttttggcaacaagaaggtgtttattcaacgagtgttggatatgcggctggaaaaacaattgatccaacatatcgagaggtttgctctggaaccactgaccatgctgaagtcgttcttgttgtctatgatactgatatcaccaatttggattctttactctcaatattttgggaaggtcatgaccccacacaattcatgagacaaggaaatgatgtgggcagtcagtacagatcgatcattttttatgataacgatgagatgtatgaaaagattaaatgctctcgtgatcaataccaaaaagaattatcaaatgctggatatggaaatattgtcacagagatcagagcgacagaagaatttttttatgctgaagactatcatcaacagtacttggctaagaatcctggtggttattgtggtttgggtggaacaggcgttaagtgtagtccagattga

SEQ ID NO: 224580 - DNA, 397 bp, Unknown
  Bacterial polypeptide expressing nucleotide sequence isolated from the Sargasso Sea
atgtcaaaaattgtcaaaactgatgatgaatggagaaacttacttgatcatgaaagttatagagtaactagacaatctggaacggaaagaccttatactggaaaatattgggacttcaagggtcaaggaaactataaatgtatctgttgtggtcatgagttatttcagtcagatactaaatttgattcaggttgtggttggccaagttttttcttacctaaagatgaaaattttattaacgaatttgaggacaattcatttggtatgaaaagaatagaggttaagtgcgcaaaatgtgatgcacatcttggtcatgtatttaatgatggtccaatgcctactggactaagatattgcataaattcggcatccttagattttgaacaagatacataac

SEQ ID NO: 224581 - DNA, 493 bp, Unknown
  Bacterial polypeptide expressing nucleotide sequence isolated from the Sargasso Sea
aatgcttaaaaaactcatatttgtactaatgctaactattagtatcaatgctcaaacaatggaagaagttatggaagaaaacaaatctaaattaaatgacatgcagtattatgttactcaagagtgtggaactgaacctgcttttgataatgaatattgggatcataaagagcctggaatatacgtagatgttgtgtctggagaagctttatttgcctctgtacataaatatgactcaaattcaggatggccttcatttttcaagccaattgaagacaaaaatgtcaaattcgagcaagattatgagctaattcttcctcgaacagaagttaaaagtaagcaaggagattcgcatttaggtcatgttttcaatgatggtcctaatccaactggtttacgctattgtatcaattcggctgctctaaagttcataccttttaaagaaatggaagaaaaagggtataaaaagtatttatatctttttgagacttaa

SEQ ID NO: 224582 - DNA, 529 bp, Unknown
  Bacterial polypeptide expressing nucleotide sequence isolated from the Sargasso Sea
atgaatagtagcatatatttaggaggcggatgtttttggtgtattgaatcgatatttaaaaaagttaatggaattacttttacatcccccggatatatgggtggtaaaagtgataatcccacttatgaagaagtttgtgaggggtatacaaatcatgttgaagtagttgaattacattacgatcaaacaatagatttaaaccaaattttaaatattttctttacagtccatgatcctacatctataaatagacaaggtgctgatgttggaactcagtatagatctgctattttctgcaaaccagaagaaaggtcatctattgtaaattttattcaagaacttgaaggccaaggtatttttaaagataaaattgtaacagaagttaatgatattcaaaagttttttgtagctgaagattatcatcatgattattttacaaaaaatcctaaaaatgcatactgtcgggcagtgattaatccgaaattaaataagttgagatcttcattttcagaattaatctctgaataag

SEQ ID NO: 224583 - DNA, 397 bp, Unknown
  Bacterial polypeptide expressing nucleotide sequence isolated from the Sargasso Sea
atggcaaaggaagatttaaaaaataaagactggaagtcaattcttgacgaagatgcttatcaagttacaagatgttttgctacagaggtgccttactctggtaaatttcttgataacaagagagaagggacctatatttgtatttgttgtaaaaaggagcttttttcttcttccacaaaatataattcaggttgtggatggccaagtttttttcagccaattgatgatgtttgcatcacagaatataaagattcatcccatggaatgataagaacagaagtaagatgttctgattgtgactcacatttggggcatgtttttgatgatgggccgccgccgacatttttaagatattgtataaactctctttctttagattttaatgagcgcaaataaa

SEQ ID NO: 224584 - DNA, 532 bp, Unknown
  Bacterial polypeptide expressing nucleotide sequence isolated from the Sargasso Sea
tatggctaagtctgatattgctactttaggtggtggatgcttctggtgcgtagaggcggtttttcaaagaatagagggtgttttatctgtaaagcctggttatgcaggaggggatataaaaaacccaacatacaaacagatttgcactggaaacactgggcacgctgaggtagcaaaaatcgaatttgatcctgaaaaaatcacttactctcaaattttgaacgtattttggcaatcccacgatccaactacactaaataggcaagggaatgatgttgggacacaatacaggtcagttattttctttcatggtgagagtcaaagggaaattgcggaaaaatcaaagatagatgctaataaatctggatattgggataataagattgtgacagagatcacacttttaaataattactatgatgctgaggattatcacgataactattacaataacaatcccaaccaaccgtactgtttatttgtaattaaaccaaaactggataaactagaaaaacaaggcctatttgattaa

SEQ ID NO: 224585 - DNA, 625 bp, Unknown
  Bacterial polypeptide expressing nucleotide sequence isolated from the Sargasso Sea
atgcaattaccattacccacttcagatcaagctttaccaggaagggatattcctattgaagtaagtgatcttcattttgtaaatggtaatcgaataaaaccaccatttgaagatgatatcgaaatagctgattttgctttgggttgcttctggggtgccgagagaaaattttgggaagttgaaaatgtttattcaactgcagtcggttatatgggaggattcacacccaatgcgtcatatgaggaggtatgttcagggttaacaggtcatactgaaacagttagagttttttataaccctagtctagtagattataatattttattgaaaactttttgggagtcacacaaccctacacagggaatgcggcagggaaatgatataggaacacaatataggtcagcaatttttacccattcaagtaaacagaaaacattggcagatgagtctttgaaggtctttaatttacaattaaaagaaaatggtttttctgatattacgacagatattacgcaaggaaatgattttttctatgcagaggattaccatcagcaatacctttctaaaaatccaaatggctattgtggtctaggtggaactggaatttcataccctcaaggttaaa

SEQ ID NO: 224586 - DNA, 556 bp, Unknown
  Bacterial polypeptide expressing nucleotide sequence isolated from the Sargasso Sea
atgcagcattatgtaaaaaacctcccccttgatcaaaatttcagcaaggcgacaaatgaaatagttgttggtgctggctgtttttggggcgttgaaaaaaaattttgggatttaccaggagttttaatgacatctgtaggatactcaggtggtgaaactgataatccaacatatgaagatgtgtgctacaaaaacactaatcatgttgaggttgtcaagattacctatgataaagaaattactagtcttaaagaaatcttaaaaatattttgggaatgtcatgatcctacacaaggcatgaggcaaggcaacgatgtaggtactcaatatcgatctgcgatttattgttcaaacgaagatgatttgatagctgcagaagaaagcaaaaaatcttatcagaagactttatctaaaaatagttatcctgaaataacaactgaaataagtttgattagaaattactattttgccgaggaataccaccaacaatatcttgctaaaaatcctttgggatattgtggaataggagggactggctgtaaatttgaagaataaa

SEQ ID NO: 224587 - DNA, 397 bp, Unknown
  Bacterial polypeptide expressing nucleotide sequence isolated from the Sargasso Sea
atgtctaagttgaatagaaataaagaggaatggaaacagctgcttactgaagaaagttttagagtaacaagggaatctggaacagaaagagcattcacaggaaaatattggaactttcatgaaaatggagtgtataagtgcatctgttgtggcgagagtttgtttgattcattttccaaatatgattcaggctgtggctggccaagcttttttgttcctactaataaaaatattattaatgaattggaagataattcattgggaatgacaagaaccgaagttaagtgttctaattgcgatgctcatcttggacatgtttttgatgatggacctcagcccactggtttaaggtattgtataaattcagctgcactagattttgaaaaaaacaactgaa

SEQ ID NO: 224588 - DNA, 385 bp, Unknown
  Bacterial polypeptide expressing nucleotide sequence isolated from the Sargasso Sea
gatgagtgaaattaaaaaagattgggaaattattttaaccaaagagtcttatttagtgacaagagaaggagccactgaaagaccattttctggtgagtactgggatcattttgaagatggatcttacaaatgcatatgttgcggtacagaactttttaaatctaattcaaaatttgacgctgggtgtggttggccaagtttttttgagtctattgatcctcggtgtataaatgaaatacctgatcattcacatggcatgataagaacagaaataaaatgcagtaaatgcgatgctcaccttggacatgtctttgacgatggtcctcaaccaactggacttagatattgtgtaaattcagcatcccttgatttcaaggaaaaataa

SEQ ID NO: 224589 - DNA, 382 bp, Unknown
  Bacterial polypeptide expressing nucleotide sequence isolated from the Sargasso Sea
atgacaaagaaagataatagttattggtcaaaaaaactagatagttttagttataaagtattaagagaagcagggacagagatgcctttttctggtgaatacaatatgcattttgaagatggatcgtataagtgtaaaggatgtggcaatctgctgtttgaaagcaactctaaatttgacagtggctgtggatggccaagttttgataaggcagttaagggttcggttgtttataaagaagataattcattaagcaggattagaactgagatattgtgttctaaatgtgatggacacctaggtcatgtatttaatgatggacctactgaaactgggatgagatactgtgtaaattcagcaagtttaaattttaaaaaataaa

SEQ ID NO: 224590 - DNA, 448 bp, Unknown
  Bacterial polypeptide expressing nucleotide sequence isolated from the Sargasso Sea
atggaaatagcaactttagcacttggatgtttttggggacccgaaataaaatttagcaagttagatggagtaataaatacagaggttggatattgtggaggtaatactgagaagacatcttataaagaagtatgttatggtgacaccaatcacgcagaagtagttaaagttgaatttgacaatactaaaatttcttatgaggaaataataagaaatttttttgaatttcatgatccaactactttaaaccggcaaggtccagatgtaggtactcagtatagaagtgaaatatttgttcatgatgaaaatcaaaataaaatcgctaacaaagtattgaaagaaattaatgaaaaatttaagggtaaaatcgttaccaaaatatcaaaatcaaaaaattataacaaagccgaagattatcatcagaaatatttggaaaaaagtttctaat

SEQ ID NO: 224591 - DNA, 397 bp, Unknown
  Bacterial polypeptide expressing nucleotide sequence isolated from the Sargasso Sea
tatgtctaaagtatataaagatgaatctgagtggcaaaagttgcttgatgatgaaagttatagagtaacaaggcttgctggcacagaaagaccattttctggtaaatattgggatttcaaagaatcaggttcctacaagtgcatttgttgcggtgagcatttatttgattccagttcaaaatatgattcaggttgtggatggccaagtttctttataccttcaaatgaagaatcaatagatgaatatgaggataattcttttggcatgcaaagaattgaagtcaaatgttcgaaatgcgatgcccatttaggccacgtttttaatgatggcccacaacctactggattaaggtattgtataaattctgcatcactagattttgaacaagataaataa

SEQ ID NO: 224592 - DNA, 1061 bp, Unknown
  Bacterial polypeptide expressing nucleotide sequence isolated from the Sargasso Sea
caactataggtcaatcatacaatttaaaaacaagttcaatgataataattttgctgaggtcgtaaaagttacttttaactcaaacgcaattgaagtagtagatattttaaaacatttttttgagacacatgacccaactcagctgaataggcaaggtaatgatgttggaacacaatatcgttcgacaatactttatattaacgaaatccaaaaggaactagctgaaaaaattatgggagaatatcaaattcttctcaacaatggtggctatggtgaaataaaaactatgttagagcccttagataatttttactcagctgaagattatcatcaagactatttaaaaaagaatcctaatggctattgcccagatttatcaaccggaattgtttttaatgatagcactaaaaccctccttgataatgaaatccttttaaccggcaagcaaatattagttttagattcacaaaattactgcccgtattgcgaaaaattaaaagtagatgtcacagatgactacaaaggaactataccgctatcctatagaacatctgatcaattacatggactaaaaataaattcgccaacttgggcaacaccttcattaatttttatggaaaatggaaaagaagttttttcgtatcaaggatatatcaatcataaagatttctatcaattattaggtaaatttaagctgggagattctgaagcatatgatgtggctttcaataaaggaactgatgcgcgtttttgcaaagaatatgaaatttttaaagatacaccagatggtatttttgttgataaacttagtggcgaatctttatttgacacaaaagataggttcgtttctaaatcgggatggctatcattcacaaaacctgtagatggttccgtatatgagcttcctgacaatagctacggtatgagaagaacagagataagatcagtttcttctgatatacatttgggtcatgttttcaatgatggacctaacggaatgccaagatattgtattaatgcaactgtattggaattcaaaaaacgtaaagaattaagttagt

SEQ ID NO: 224593 - DNA, 370 bp, Unknown
  Bacterial polypeptide expressing nucleotide sequence isolated from the Sargasso Sea
atgagtttaaaagaaaagctttctaagatggaatatcatgttacgcaggaagctgggactgagccccctttttcaggtaagtatcatgatgaaaaatctgaaggtatatatcaatgtgtttgctgtgatgatgatttatttagctctaagagtaaatttgattctggttcaggctggccaagcttctatgattgtattaaaaaggaaaatatcgattataaagaggattcttcacatatgatgttaagaatcgaggttagttgtaaaagctgtggttcacatttagggcatgtatttaatgacggaccagagcctacaggacttaggtattgtattaattctgcctcattaatatttaagaaatcttaaa

SEQ ID NO: 224594 - DNA, 550 bp, Unknown
  Bacterial polypeptide expressing nucleotide sequence isolated from the Sargasso Sea
atgagtcagacaggcgaaatcgccaccctcggtggcgggtgtttctggtgtctcgaagcggtgtatctgggcgtcgaaggcgtgaactcagtggagtccggctatgcgggcggccacacccagcggccgacctatgagcaggtgtgcgacggcgtgaccggccacgcggaggtcgtgaacgtcgacttcgatccggcgaagatcagctatcgcgagattctcgatattttcttcgcgatccacgatccgacccagttgaaccggcagggtaacgacgtcggcacgcaataccgctcggtgatttttacccattccgacgcgcagcgcgaaacggccttgcaggcgatccgcgagatcggcgaacagggtatctacgatggccagatcgtcacccaggtgctgccgctcgacggcaactactggccggccgaggcatatcaccagaactatttcgcgcagcatccgaatcagggctactgctcgttcgtggtggcgccgaaggtcgcgaaattccgtcagaagttcgcgcatcggatcaaggcgagctgag

SEQ ID NO: 224595 - DNA, 535 bp, Unknown
  Bacterial polypeptide expressing nucleotide sequence isolated from the Sargasso Sea
atgtctcaaaatactgaaaaagcttactttgctggtggatgtttttggtgcatggaaccaccatttgaagtccttgatggtgtaattgaagcaacctctggatatatgggtggagagatagaaaatccaacatatgaacaagtaagtatgggcaatactggtcatgcagaagttgttgagatagagtatgacccaaatattattacatatagtgagctcctggaagttttttggagaaacatagacccaacggcattaaattatcaatttgcagatgttggatcacaatacagaaccgaaatatttacggtaggaccagaacaaatggaagaagcacttagttctaaagatgagttagaaaagtcgaacaaatttgataaacccattgttaccgccattacagaagcacctgttttttatattgcggaggaatatcatcaagatttttataagaaacaaagtgctcgatacaaaatatatgcagaagcaagtgggagaaaaggcttcttagaagatacatggggagacgagtaac

SEQ ID NO: 224596 - DNA, 614 bp, Unknown
  Bacterial polypeptide expressing nucleotide sequence isolated from the Sargasso Sea
aagcatcttacctcttgaatctgaagctttgattggtagagaagaggaagttgaagttccagagcaccattttgtaaagggaacgccattaaaaggtccttttccagatcacctaaaacaagccatatttggaatgggatgtttttggggagtcgagagaaggttttgggaattagatggcgtctattctactgcagcaggatatgctggtggatatacaaaaaatccatcttataaagaagtttgtaccggttttacagggcataacgaagttgttcttgttgtttatgatcctacaattgtaagttatgaatcattactaaaaacattttgggaagatcatgatcctactcaaggcatgagacaaggtaatgatatgggcacccaatatagatcaggcatttattactcctcagatgaagagaaagaaatcattgccgagacaaaacaaaaatatcaatctcaattaaacctaaacggatttggctcaattacgactgaagtgaaggaagctcgtatcttttattatgcagaacattatcatcagcaatatctagctaaaaatcctgatggttattgtgctctagccggcacaggggtaaaaattaattaag

SEQ ID NO: 224597 - DNA, 397 bp, Unknown
  Bacterial polypeptide expressing nucleotide sequence isolated from the Sargasso Sea
aatgagtaaaattacaaaaacagacgaagaatggaaaacacttctaacggaagatgagtattatgtaacaagacaaaaaggaactgaaccaccattttctggaaaaaattttgaaattgtaaatggtggtatttttaaatgtaggtgctgtaataacgaattatttaatagttcatcaaaatatgaatcaggttgtggttggccaagtttttttgaacaattgtcaccagaagctattaaaactgaagtagataaatctcatggcatggttagaatagaaattatgtgtgcaaaatgtgatgcacatttaggacatgtatttgatgatggacctcaaccaactggtaaaagatactgcgtcaattccttatcgataaattacgaagaagttgaataa

SEQ ID NO: 224598 - DNA, 424 bp, Unknown
  Bacterial polypeptide expressing nucleotide sequence isolated from the Sargasso Sea
atggaagagaaaaaatcaaaattaaccgatatgcagtactatgttacccaagattgtggtacagaacctgcttttgataatgaatattgggatcataaagaacccggaatctatgttgatattgtttctggagaagctttatttgcctcaattcataaatatgactcaaattctggatggccttcattttatcaaccaattgaggaaaaaaacgtaaaatttgagcaggattatgagttaattcttcctcgaacagaagtaaaaagtaagcaaggagattctcatttaggtcatgtttttaatgatggaccaaatcctacaggattacgttactgtattaattctgctgccttaaaattcattcccgttaaagaaatggaagaaaaaggatataagaaatatttatatctttttgagacttaat

SEQ ID NO: 224599 - DNA, 1255 bp, Unknown
  Bacterial polypeptide expressing nucleotide sequence isolated from the Sargasso Sea
ctgaaaaataaatttttagttagcgcattaatatttttatttgcagcgccgattatcaacgctaatcaaaccaaccatatacaaacaatttatttaggctcaggatgtttctggggagcagaaaagggctatgaggctttagatggagtaataaatgctgaatctgggtatgcaaatggttatggcgtaagacctaactatagaaccattactcaacttaaaaataaatataatgaaaataactttgctgaagttgtaaaagtaacatttaacaataatgctataagtcttgaaaagatattaaaacattttcttgagaatcatgatcctactcaacttaatagacaaggaaatgatattggcactcaatacagatcaacaatattattttccaatgatactcaaaaaaatcttgctaaaaaattaatcaatcaatatcaagatcttttaactgcaaaaggatatggcaagataaggacaaaactagaagctttagataatttttatttagccgaagagtatcatcaggattatttaaagaagaatccaaatggatattgtcctgatctctctacaggtatagttttttctcaagaacaaaaagaatatatagataattcaaagttattattaggcaaacaaatattaattttagattcacagagtttttgtccgtattgtaaaaaattaaaagaagatgttacaaatagttataaaggaagcattcctttaacttatagaacttcagatcagttacatgaccttcaaatacaatcaccaacttgggttacaccatcagtaatttttttagaaaatggtaaagaaatttttgcatatcaagggtatttagagcctaagcaattttatcaaatgctaggaaaatttaagttaggcgattcagaagtttatgatgttgccttcaaaaaaggaaccgatgctagattttgcaaagaatatcaaatatttaaaaatacacctgatggtatatttattgataaattaagtggagaaccactatttgatacaaaagatagatttgtttctagatctggctggctttcatttacaaaacctttagatggatctgtgtatgaattgcctgataatagttatggcatgcaaagaactgaaattagatcagtctcaacagacatacatttgggacatgtttttgatgatggtccaaatggaatgcctagatactgtataaatgctaccgtattagaattcaaagccagaaaagatatctcttaat

SEQ ID NO: 224600 - DNA, 218 bp, Unknown
  Bacterial polypeptide expressing nucleotide sequence isolated from the Sargasso Sea
aaaaaacgtaaaatttgagcaggattataagttaattcttcctcgaacagaggtaaaaagtaagcaaggagattctcatttaggtcatgtttttaatgatggaccaaatcctactggattgcgctattgtatcaactctgctgccttaaaattcattcccgttaaagaaatggaagaaaaaggatataagaaatatttatatctttttgagacttaat

SEQ ID NO: 224601 - DNA, 514 bp, Unknown
  Bacterial polypeptide expressing nucleotide sequence isolated from the Sargasso Sea
atgtttaaattcctgaaaaacatcatgaataatgaggaggtaaatttaactaatgattcttatttattacatagaatattaaaaacagatatccaaaaagatcctgatgtgtatgaagatgaaattttttttggatgtggttgtttctggggatctgaaaaatgtttttggaaacttcctggagttatcacaacttctgtaggctatgcaggaggtgaaaaaaacaatcccacttattatgaagtatgttctggcttaactggtcattcagaagttgtaagagttatctgggataaaagggaaattgatgttagtgatttattaaaaatgttttgggaatgtcacgaccccactcaaaaaaacagacaaggtaatgacatgggaacacaatatagatcagcaatatattacaaaaatgaaaataacattaaaaccatattagctagtaaggaaaaatatcaaaacgaacttagtgaaaaaaatcttgggttaattgaaacggaaataaaaatga

SEQ ID NO: 224602 - DNA, 429 bp, Unknown
  Bacterial polypeptide expressing nucleotide sequence isolated from the Sargasso Sea
ctgaagaaagacaggaagctattaataaccttactgaagaacagagaattgttgctttagagaatggaacagagaggccattttttaatgaatattggaatagtaaagatgttgggatttacgttgatgtaatttcaggagaacctttattttcctctttagataaatttgactcgggaacaggttggccaagttttgataagccaataaaaggaatagaaatagtagaaattattgataaatcccatggaatggttcgtacagaggtaagaagccgatatggcgacgcacacctaggtcatttatttgatgatggacccactgaaactggattaagatattgtattaattcagcttcattaagatttgttcctctagagaagttaagtgaagagggttatgaggattttgtggaattatttaattaaa

SEQ ID NO: 224603 - DNA, 535 bp, Unknown
  Bacterial polypeptide expressing nucleotide sequence isolated from the Sargasso Sea
tatgtctcaaaatactgaaaaagcttactttgctggtggatgtttttggtgcatggaaccaccatttgaagctctggatggtgtacttgaagcaacctcaggatatatgggtggagaaactgaaaatccaacttatgaacaggtgagtatgggtaatactggtcatgctgaagtggttgaaatagagtacgacccaaatattattacatacagtgagctcttagaggttttttggcgaaacatagatcctactgcgttgaattatcaatttgcagatgttggatcacaatatagaaccgaaatatttacagttggacctaatcaaatggaagaagcacttaattctaaagatgagttagaaaagtcaaacaaatttgataagcctattgttactgcaattacagaggcacctgtgttttatattgcagaggaatatcatcaagacttctataagaaacaaagtgctcgttataaaatatatgcagaagcaagtgggagaaaaggcttcttagaagatacatggggagacgagtaa

SEQ ID NO: 224604 - DNA, 280 bp, Unknown
  Bacterial polypeptide expressing nucleotide sequence isolated from the Sargasso Sea
ccataatccaacacaaggaatgcgccagggaaatgatattggtactcaatataggtcagcaatatttacacattcgagcgaacaaaaaaaattagctgatgaatctatgaagatatttagttctcaactaaaagaacatggtttttcagacataacaactgaaatttctgaagcaaatgaattcttttatgctgaggattatcatcagcaatatcttgctaaaaatccaaacggttattgtggtttaggtgggacaggaatttcatgttcacttgattaa

SEQ ID NO: 224605 - DNA, 307 bp, Unknown
  Bacterial polypeptide expressing nucleotide sequence isolated from the Sargasso Sea
agaccattcactgggaaatactgggactttaatgaagatggggtttataagtgtatttgttgtggtgaaaatttatttgaatcattttcaaaatatgatgcaggctgtggctggcctagtttttttattccaagcaataataattcaataaatgaattcaaagataattcattaggtatggtgagaaccgaagtaaagtgttcaagttgtgatgctcatctcggacatgtttttaatgatggccctcaacctactggtttgaggtattgtataaactcagctgcactagattttgacaaaaattaat

SEQ ID NO: 224606 - DNA, 294 bp, Unknown
  Bacterial polypeptide expressing nucleotide sequence isolated from the Sargasso Sea
cagaagtagttaaagttgaatttgacaatactaaaatttcttatgaggaaataataagaaacttttttgaatttcatgatccaactactttaaaccggcaaggtccagatgtaggtactcagtatagaagtgaaatatttgttcatgatgaaaatcaaaataaaatcgctaacaaagtattgaaagaaattaatgaaaaatttaagggtaaaatcgttaccaaaatatcaaaatcaaaaaattataacaaagccgaagattatcatcagaaatatttggaaaaaagtttctaat

SEQ ID NO: 224607 - DNA, 574 bp, Unknown
  Bacterial polypeptide expressing nucleotide sequence isolated from the Sargasso Sea
aatgttgaaaattgcagaaaaccatttcgttaatggaaataaagtcaaaccaccatatccggataatcataataggttgatcgttggcatgggttgtttttggggagctgaaagaatgttttggaaacaagagggtgtttattctacaagtgttggatattcagctggaaaaacaaaggatccaacatataaagaggtttgctctggtaccacagatcatgctgaggtggtgcttgttgtctatgataatcagcttatcaatttggattctcttctggcaatattttgggaagggcatgaccccactcaatttatgagacaaggaaacgatataggaagccagtatcgttctatcattttttatgatgacgatgaaacatcccaaaaaattaaatcatctcgagaccagtatcagaagaaattatcagatgctggctatggaaatatcgtcacagagattaaagctacagaagatttcttctatgccgaagactaccatcaacaatacttagcaaaaaatcctggaggttactgtggtttgggaggaacaggaataaagtgcactcctgggtga

SEQ ID NO: 224608 - DNA, 1261 bp, Unknown
  Bacterial polypeptide expressing nucleotide sequence isolated from the Sargasso Sea
tatgaaccagaaagctaaaatattaaattacttaatactaattttattaacaatcccatatctagatgcaagtaaaacctcacatgttgaaacaatttatctgggctcaggttgcttttggggggctgaaaagggttatgaattgatggatggagttatcaatgcagaatctggctatgcaaatggatatggcataaaaccaaattacagatcgataattcagtttaaaaataagtataacgaaaagaattttgcagaagtagtgaaagtaacttttaatagtaatgcgatttcccttgaaaatatattaaaacacttttttgagactcatgatcccacccaacataataggcagggcaatgatataggtactcaatatagatcaacaattctttttcaaaatgaatcccagaaagaacttgcagaaaagattatagctgaataccaagctcttctatttgagggaggttacggaaaaattagaaccaagctagagcctttagataacttttatcttgcagaagaatatcatcaggattatttaaaaaagaatcctaatggctattgcccagacctatcaacaggaattgtttttaacgatatagaaaaaatttttgaagataatgaataccttcttagtggaaagcaaatattagttctagactcccaaaattattgtccttactgtgaaaaatttaaggatgatgtgaccagtagctataaaggaagcatccctttgagctacagaacttctgatcaattacatggccttgaaattaaatctcctacctgggctactccatctttaatttttttagaaaatggaaaagagattttttcgtatcagggatacatcaatcaaaaagatttttatcaattattgggtaaatttaaattaggaaattcagaggcgtataacgtcgcatttaacaaaggaactgatgcacgcttttgcaaagaatatcaaatttttaaaaatacaccagatggtatctttatagataagctcagtggtgaacctctttttgatacaagaaatagatttgtctcaaggtccggttggttatctttcaccaaacctattgatggatcagtatatgaacttcctgataatagttatggtatgaaaaggactgaaataagatcagtttcctcggatatacatctgggacatgtttttgatgatggtccaaacggtatgccaagatattgtattaatgctactgtattagagtttaaacctagaaaagaaatttcttag

SEQ ID NO: 224609 - DNA, 1258 bp, Unknown
  Bacterial polypeptide expressing nucleotide sequence isolated from the Sargasso Sea
tatgaagaagacaaataaatttttaatatatttcttaattacatttgtaataaatgtttcatccaatcaaacaaatcatatacaaacaatatatttaggctctggatgtttttggggagcagagaagggttacgaagctctagatggggtaattgatgcagaatctggatatgcaaatggttatggaataaaacccaactatcgatcaattattcaatttaagaataaatataaagaaaataatttcgctgaagttgtgaaagttacttttaatagcaatgcgattaagcttcatgaaattttaaaacatttctttgaaacacatgatccaactcaactcaatagacaaggtaatgatataggaactcaatataggtccacgattctatttttagatgaaaatcaaaaaaaggttgcgcttgagataacaaagcaatatcaaaagcttctttatgctggtggttatggcaaagttaaaactaaaatagagccattagataatttttatcttgcagaggattatcatcaagattatttaaagaaaaatccgaatggatattgtccagatttatctaccggtatcgttttttctaataaacaaaaaaatcttctaaataacgatgatcttttaattggtaagcatatattaattttggattcacaagcctattgtccatattgtgaaaagttgaaagaagatgttaccaatcaatataaaggaaccattccattatcctatagaacatcaaatcaattacatggcttaaatattaagtctccaacatgggcaacaccttcgatttttttcatagaaaatggaaaagaagttcttggacatcagggttatcttgctcccaaggagttttatcaacttcttggaaaatttaaattaggcaatacagaggcttatgatgttgcttttaataaaggaacggatgctagattttgtaaagaatatcaaatatttaaaaatactccagacggagtttttgtcgataaattaagcggagagccgttatttgatacaaatgatagatttgtttcaaggtcaggatggctttcttttacaaagcccgttgatggttctgtatatgaattgccagataatagttatggcatgcgaaggacagaaataagatcagtatcttctgatattcatttgggacatgtttttgatgatggaccaaacggaatgcctagatattgtataaatgcaactgttctggaattcgttgatagagaaagtatcagtagctga

SEQ ID NO: 224610 - DNA, 178 bp, Unknown
  Bacterial polypeptide expressing nucleotide sequence isolated from the Sargasso Sea
ggattctgagcaaataaaggaagaagtagatacttcacatggcatggtaagagttgaaataacatgtgtaaaatgtgatgctcatttagggcatgtatttccagatggaccagcgccaaccggtttaagatattgtatcaattccgtttctttggattttaaaagttcttctgaatag

SEQ ID NO: 224611 - DNA, 346 bp, Unknown
  Bacterial polypeptide expressing nucleotide sequence isolated from the Sargasso Sea
agaagaatatcatatcgcaagacaggcaggcaccgagaggccctttacgggtgtctactgggacacagaaactgctggaacatacaggtgtaaatgttgcaatgcgcctctatttgattccgatacaaagtttgatgccgggtgtggctggccgagtttctttgcgccgcttgacgagggctcagttaagacaagagaggatttgagtcttgggatgcgcaggttagaagtgctttgtagtcgttgcgatgcgcatttggggcatgtgtttcctgacgggcctcaacccacgggcttaaggttttgcatgaattccgcctcgctgagtctggaagaattaaattga

SEQ ID NO: 224612 - DNA, 466 bp, Unknown
  Bacterial polypeptide expressing nucleotide sequence isolated from the Sargasso Sea
tatgtttaaattcctgaaaaatattatgaataatgaggatgaaaatttatctaatgattcatattcattacatagaatattaaaatcagatatcaaaaaagatcctaatgtagaagaagatgaaataatatttggatgtggctgtttctggggcgctgaaaaatgtttttggaaacttccaggagttatcacaacatctgtaggttatgcaggaggaaaaaaaaacaatccaacttattatgaagtatgctctggcttaactggtcattcagaagttgtaagggttatatgggacaaaagggaaattgatgtaagtgatttattaaaaatgttttgggaatgtcatgaccctactcaaaaaaacagacaaggtaatgatatgggaacacaatatagatcagcaatatattacaaaaatgaaaataatattaaaaccaatattagcccagtaaggaacaatatcaaa

SEQ ID NO: 224613 - DNA, 397 bp, Unknown
  Bacterial polypeptide expressing nucleotide sequence isolated from the Sargasso Sea
tatgaataaaatcattaagtctgatcaagaatggaaagaagtactttctaaagaagaatattatgtgacaagacagaaggggacagaaccagccttttctgggaaggcttttgacatttctaaagatggagtttttaaatgcagatgttgtggagcgaaattatttgagagaacgtctaagtatgagtctggttgcggctggcctagtttttttaaaggaatttccaatgatgcgattaaaactgaacaagatacttcttatggaatgatgagaacagaaatcatgtgtgctacttgtgatgcacatttaggtcatgtatttgatgatggtccagaaccaacaggtttacgttattgtgtaaactctctatccattcaatataaagaatttgaataa

SEQ ID NO: 224614 - DNA, 319 bp, Unknown
  Bacterial polypeptide expressing nucleotide sequence isolated from the Sargasso Sea
ggaactgagccaccattctctggaaaaaattttgaaattgtaaatggtggtatttttagatgtaagtgttgcaataacgaactatttaatagttcttcgaaatatgactcaggctgtggttggccaagtttttttgaacagttatcaccagacgctattacaactgaagtagataaatcacatggtatggtccgaatagaaattatgtgcgctaaatgtgatgcacatttaggacatgtatttgatgatggacctaaaccaacaggaaaaagatactgtgtaaattctttatcgataaactacgaagaagttgaataat

SEQ ID NO: 224615 - DNA, 397 bp, Unknown
  Bacterial polypeptide expressing nucleotide sequence isolated from the Sargasso Sea
aatgaataaaattactaaaacagaaaaagaatggaaatctcttcttacagaagatgaatattatgtaacaagacaaaaaggaactgagccaccattttctggaaaaaactttgaaattataaatggaggcacatttaagtgtaagtgctgtgataatgaattatttaatagttctactaaatatgattcaggttgtggatggccaagttttttcgagcaattatctcctgaagcaataaaaacagaagttgataattctcacggaatggtaagaattgaaatcatgtgttcaaagtgtgatgctcatttaggtcatgtttttgatgatggtccaaaaccaactggaaaaagatattgtgtaaattctttgtcaattaattataaagaatttgaataa

SEQ ID NO: 224616 - DNA, 526 bp, Unknown
  Bacterial polypeptide expressing nucleotide sequence isolated from the Sargasso Sea
atggaggaattggttctcggcggaggctgcttctggtgcacagagggtggcctgctaggcctcaagggggttcacgaggtggtccccggttacagcggcggccatgtagacaaccccacttacgagcaggtatgcgggaagaagacaggtcacgcagaggtcgttagagtcaccttcgacccagaagtcatccccaggatgacgcttctgagggtcttccacacgctcttcgaccccacccaactgaatcgccaggggaatgacatcggtccccattaccgcagcatcgtcctatacgcggacgagggtcagaagcaggatgccgaggcggccatagaggaggtctcccagtactacgacgcccctgtggtcacggaagtggtcccactggagaagttctggctggcggaggactaccaccacgactacttcgcccgaaacggatcctccaatccgtactgcgtggcagtcgtggcaccgaaaatcgctaaggcaagagcccgtcacgcggaattatatgagtgag

SEQ ID NO: 224617 - DNA, 1195 bp, Unknown
  Bacterial polypeptide expressing nucleotide sequence isolated from the Sargasso Sea
tatgaagaaaacaaataaatttctaatatgttttttaattgcatctgtaattaatatttctgctaaccaaacaaatcatatacaaacaatatatttaggttctggatgtttttggggagcagagaaaggttatgaatccataaaaggagtaattaatgctgaatctggatatgcaaatggttatggaataaaaccaaattacagatcaattattcaatttaaaaataaacataatgaaaataattatgctgaagttgtcaaagttacctttaataataatgcaataactcttgaagaaatattaaaacatttttttgaaacacatgatccaactcaattaaatagacaaggtaacgatattggaactcagtatagatccacaatcctattttcaaacgagaatcaaaaaaatattgcattagaaataattgaagaatatcaaaagctactttttgcttctggatacggcaatattaaaactaaattagagccattagataacttctatctagctgaggaatatcatcaagattatcttaaaaaaaatccaaatggctattgtcctgatttatctaccggcattgttttttctgaaaaagataaagatctgcttaataatgacagtcttttattaggtaagcatattttaattttagactcacaaacatattgtccatattgtgataagttaaaggagaatattacaaatgattataaggggagtataccgttgtcttatagaacatctgatcagctgcatggtttaaaaattcaatccccaacatgggcaacaccttcaattctttttattgaaaatggaatagaggtatttggatatcagggctatctttcaccaaaagaattttatcaattgctaggaaaatttaaattaggcaatactgaggcttatgatgttgcctttaacaaaggaactgacgctagattttgtaaagaatatcaaatatttaaggatactccagatggagtatttattgataaattaagtggcgagcctctatttgataccaaagatagatttgtttcaagatcaggttggctttcatttacaaaacctgttgatggttcggtttatgagttgcctgataatagttatggtatggaaagaacagaaatacgatctgtatcttctgacatacatcttggtcatgtttttgatgatggaccaaatgggaat

SEQ ID NO: 224618 - DNA, 535 bp, Unknown
  Bacterial polypeptide expressing nucleotide sequence isolated from the Sargasso Sea
catgtcaaaagataataatgaatatgcaatttttggtggaggttgtttttggtgcgttgaagctgtttttgaaagaattgatggtgttagcgaagtagtctctggctatgcaggtggtcaaactaaaaatcctacttataaagaagttacatccggtaaaactggacacgcggaagtatgcaaaatcgtctttgatcccaacatagtgacatacgatgaattgcttgatattttctggcaagcgcatgacccaacgaccttgaaccgtcaaggtggtgatattggcacccaataccggtcagctatttactatatcaacgacgcccaaaaaaaatctacacaattggctttagagaaagccgctaaaatgtttgatgaccctattacaacagaagtaaaagaattagataatttttatttggctgaaggatatcatcaagattactatgaaaataaccccaacgctccttattgtgcttttgttattcgtcctaagataaaaaagcttggtaaaaaaggactatgggatgaataa

SEQ ID NO: 224619 - DNA, 634 bp, Unknown
  Bacterial polypeptide expressing nucleotide sequence isolated from the Sargasso Sea
gatggacctactaaataaaaaaagcatactgcctcttgagtctgaagcacttaaaggtagagatgaagcagttgaagtgcctgcggaacattttgtgaagggcacaccattaaaagctccatttcctgaaggccttgaggaagcaatatttggaatgggctgtttctggggagtagaaagaagattttgggaattagaaggagtttataccacagcagtgggttattcaggtggctttactaaaaaccctacttacaaagaagtgtgtacaggtatgacagggcataatgaggtggtcttagtagtttatgatccttcaataattagttatgagaacctgctgacaactttttgggaagatcatgacccaactcaaggtatgagacaaggtaatgatgtgggaacacaatatagatcaggaatatattttttaaataattctgaagaagaagtgatacttaaaactcaggcactgtatcagagccaattagataataatgggttaggaggaatcactactgaagtaaagaatgcaggacctttttattatgctgaacattatcatcaacaatatttagcaaagaatcctgatggatattgcgcattagcaggcactggaataaaaattaagtag

SEQ ID NO: 224620 - DNA, 1255 bp, Unknown
  Bacterial polypeptide expressing nucleotide sequence isolated from the Sargasso Sea
ctgaaacttagattagttatatttttttcatttatcctatttgcaaactcttttgtatatgcaaataaaaccaaccatattcaaaccattcatctcggttcaggttgtttttggggtgctgaaaagggctatgaatctcttgatggagttattgatgcagtttcaggttatgcaaatggctatggagtaagtccaaattatagatctatcattcagcttaagaacaagtataacgaaaataattttgcagaggtggtaaaagtaacttttaacaataatgcaatttcacttgatgaaatcctaaaacatttctttgaaacccatgatccaacacaacttaatagacaaggaaatgatgttggaactcagtacagatctgtgatccttttctcgaatgaaactcaaaaaaaacttgctaaagatattttgaatgagtatcaatctcttctttttgaagcgggttatgggaaagtagttactcttattgagccattagacaacttttatttagctgaaaactatcatcaggattatttaaagaaaaatcctaatggttattgcccagacttatcaactggtgttgtattcaatgaaaaagaaaaagatattttagataatcaagatctgctcatcggtaagcaaatattgatcctagattcgcaaagttattgtccatattgtgagaaattaaagcttgatgtaacaaatgaatacaaaggaagcattcccatgtcttatagaacatcggatcaattgcatgacttagaaattaatgctcccacttgggcaactccatctgtaatcttcttagaagacggtaaagaggttttttcacatcaaggctatattgatcaaaaagacttctatttaatgcttgggaaatttaaattaggagactcagaagcatatgatgtcgcatttaataatgggactgatgctcgattttgtaaggaatatgagatttttaaaaatacaccagatggcatatttatagataagttaagtggagagcctctatttgatacaagagatcgttttgtatcaagatcaggatggctttcatttacaagacctgtagagggctcagtctatgaaaaacctgataatagttatggtatgcaaagaactgaaatccgatccgtgtcctctgacattcatctaggtcatgtatttgatgatggtccaaatgggttaccaagatattgtataaacgcaaccgtattagaatttattcctaggaaaggttcaatctaat

SEQ ID NO: 224621 - DNA, 295 bp, Unknown
  Bacterial polypeptide expressing nucleotide sequence isolated from the Sargasso Sea
acacgacccaacaacacttaataggcagggtaatgacgttggcacacagtatagatccgtgattttctatcacaatgataagcagaaatcactagccttagaatcaataaaaaaggcagaagtttctggatattggtcaaataaaattgtgacagaggttactgaactttttaattattcagatgccgaagactaccacaataactactatgataataatccgaatcaaccttattgcctatttgtcattaaaccaaaactcgataaactagaaaagaaaggcatcatcaagtaa

SEQ ID NO: 224622 - DNA, 520 bp, Unknown
  Bacterial polypeptide expressing nucleotide sequence isolated from the Sargasso Sea
tatgttatcatctttaatagtgggcgctggatgcttttggggcgttgaagtcttatatgaacaaatgcctggtgttattgatgcaacctcaggttattctggtggtcatttagataatcctagatatgaagatgttttaactggagaaacaggtcacatcgaagtagtcaagattgattatgatagcagtgaagttacttttaatgaattaattgatagattttttatcattcatgatcccacaaccttaaatcgtcaaggtcctgatattggcgaacaatataaatctatacttttttacaacagcgaagatgaaaaagaaattattgagagtaaaataaaaaaaattgatttatcaggcaagtttgaaaacccaatagttacagaaattagagaaacaacagagttttatcctgcagaagactaccatcaagattatgcagtaaaaacaggcaaactatgctaccagcaactttatgttatgtataattattcaccgatacccatctcaacaccctaa

SEQ ID NO: 224623 - DNA, 547 bp, Unknown
  Bacterial polypeptide expressing nucleotide sequence isolated from the Sargasso Sea
atggcaaatttacaagtcgccacgttggcaggcggatgcttttggtgtatcgaatcagcgtttaatagcgttgaaggcgtggaaaaagcaatttctggctatgctggaggcgaaaaggccgatccaacctatgaagaggtatgcaaaggaaatactggccatgctgaagtggtacaagtaacgtttgatgccgacagcattagctaccgagagatactagagattttctttgcgctgcataaccctacacagcttaacagacagggcaatgatgtaggcacacagtatcgcagcgcggttttctatcacgacgatacacaaaaagctgaagcagaaaaaattatcgcagaaatcacagaagaagagatttggcccgatcccgtagtgactgaaatagtagcagtaaataactactacgacgccgaagactaccaccaagattacttcaaaaataatccacaaaaccaatattgctctatggtggtggcgcctaaacttgcgaagttcaaaaaaaccttcgcttctcgacttcgcagcgacgcataaa

SEQ ID NO: 224624 - DNA, 430 bp, Unknown
  Bacterial polypeptide expressing nucleotide sequence isolated from the Sargasso Sea
tatgagtaatattttagatgcaacttttggggcaggttgtttttggggtgttgagaataagtttatgaatctggatggagttatcgaaacttcagttggctatatggggagtaaatttaaaaatcctacatactttgatgtctgctctggacttactggtcatgcagaagttgtaaagcttaaatatgattctaatctaattgattataagtctttgtgcgaattcttttttcagatccatgatgctaccacactcaataggcaaggaccagatgtaggaactcaatatagatccataattttttgttatgactctacccaaatgaaaatagctaataatttaatttccgaactaaacaaggaaagaccttcggctccattgatagtaagtgatgttgcttctgcaatggaatattacttagctgaagat

SEQ ID NO: 224625 - DNA, 397 bp, Unknown
  Bacterial polypeptide expressing nucleotide sequence isolated from the Sargasso Sea
atgaaaaaaattataaaaactgatgaagaatggaaaaatttactgactgaaaaagaatattatataactagacaaaaaggaacagaacctcctttttcaggtaaaaattttgaaattattaatggtggtatttttaaatgtaaatgttgtgaaaatgaactttttaacagttcaactaaatatgaatctggttgtggatggcctagtttttttgagcaattagctccagactcaataaaaacagaagtagataattctcttggaatgacaaggattgaaattatgtgtgcaaaatgtgatgctcatttagggcatgtttttgatgatggacctcagccatctggtaaacgatactgtgtaaattctttgtcaattaattacgaagaatttgaataat

SEQ ID NO: 224626 - DNA, 400 bp, Unknown
  Bacterial polypeptide expressing nucleotide sequence isolated from the Sargasso Sea
aatgaaaaaaactgaacaagaatggcgtcagcaactcaccgaagagcaatacagagtgacacggcaaaagggtactgagtatccttttagcggctccttactgcacaataaagcaacaggctgttatcactgtatctgttgtcagcagcccttgtttgattctgcagataagtttgactccggctgtggttggccatcatttagtaaagccatcaaaggtcaggtcaagtatgaaaaagatcactctcatggcatgaaccgtatcgagattttatgtcagcactgtgatgcacacttaggtcatgtgtttgacgatggcccggctcccaccgggcaaaggtattgtgtcaactccgtatcattactctttaacgcggatgttaaaatttcggcggagtaa

SEQ ID NO: 224627 - DNA, 730 bp, Unknown
  Bacterial polypeptide expressing nucleotide sequence isolated from the Sargasso Sea
tatgtttaaattccttaaaaacattatgaataatgatgaggttaatttaattaacgatgcttattcattacatagaatattaaaaacagatatcaaaaaagaccctaatttagaagaagatgaaataatttttggatgtggttgtttctggggtgctgaaaaatgtttttggaaactccctggagttatcacaacatctgtaggttatgctggaggagaaaaaaacaatccaacttattatgaagtatgttcaggcttaactggtcattcagaagttgtaagagttatatgggataaaagggaaattgatgtaagtgatttattaaaaatgttttgggaatgtcatgaccctactcaaaaaaacagacaaggtaatgatatgggaacacaatatagatcagcaatatattacaaaaatgaaaataatattaaaaccatattagccagtaaggaacaatatcaaacggaactaagtaaaaaaaattttggtttaattgaaacggaaataaagttgattgattcatatttttatgctgaacaataccatcaacaatatctcgcatcagctggaagcaggcagtattgttcggcttcacctacaaaagttaagttaggagtatttactggaagcaactataaattagaagaccatatatgggaaaactttaattgggaagttgacaagtgtgtattgagatctgataacaatcctataaagaataacatttaa

SEQ ID NO: 224628 - DNA, 388 bp, Unknown
  Bacterial polypeptide expressing nucleotide sequence isolated from the Sargasso Sea
atgtcaaagatagttaaaaaagatgaagaatggaaagaattactcaaccaggaaagttatagagtaacaaggcaatctgggactgaaaagccatttacaggtaaatattgggattttaataaagatggtatatataagtgtatttgttgcggtgaaaatttatttgaatctaaaacaaaatttgatgcagggtgcgggtggcctagtttctttattcctcttaatatggagtctataaatgaatttgaagataattcatttggtatgaataggacagaggtaaaatgcgcaaaatgtgatgcacatcttggacatgtttttaatgatggccctcaaccaactggtttgagatattgtataaattcagcatctttaaattttgaataac

SEQ ID NO: 224629 - DNA, 351 bp, Unknown
  Bacterial polypeptide expressing nucleotide sequence isolated from the Sargasso Sea
gcgatgagtcatttagagtaaccaggcaatctggtactgaaagacccttcactggtaagtactcgaactttaacgaagatggcatctataaatgcatctgttgtggagaaagtctctttgagtcagatactaaatttgatgctggttgtggttggccaagtttttttattccttttgatagtgattgtataaatgagtttgaagataagtcatttggaatgactagaactgaagtaaagtgttctaaatgtgatgctcaccttggtcatgtgttcaatgatggacctcaaccaactggtttgaggtattgtataaattctgcatctttagattttgaacaaaatcaataat

SEQ ID NO: 224630 - DNA, 535 bp, Unknown
  Bacterial polypeptide expressing nucleotide sequence isolated from the Sargasso Sea
atgtctcagattgaaataactacactaggagggggatgtttctggtgtgtagaagctgtttttcagcgtgtagatggcgttttatcagtaaagccaggttatgcaggcgggcatattgataatcccacatataaacaaatttgcactgggacaactggacatgctgaagtggctcagattgaatttgattcagatattataaaatttgatcagatacttaatgttttctggcaggctcacgatcctacgacacttaaccgacaaggaaatgatgttggtacccaatataggtcggttatcttctatcatgatgaacagcaaaaagagaaggcagaaatatctaagaaaaatgctgataagtcaggatattggccggaccctattgtgacggagatcacacaattaaataattattctgacgcagaagactatcaccacaattattataatgataatccaaaccaaccatattgcatttttgtgatcaaacctaagctagataaacttgaaaaagatggtgttatagaagattaaa

SEQ ID NO: 224631 - DNA, 397 bp, Unknown
  Bacterial polypeptide expressing nucleotide sequence isolated from the Sargasso Sea
aatggcaaaggaagatttaaaaaataaagactggaaatcaattcttgacgaagatgcttatcaagttacaagatgttttgctacagaggcgccttactctggtaaatttcttgataacaagagagaagggacctatatttgtatttgttgtaaaaaggagcttttttcttcttccacaaaatataattcaggttgtggatggccaagtttttttcagccaattgatgaagcatgcatcacagaatataaagattcatcccatggaatgataagaacagaagtaagatgttctgattgtgactcacatttgggacatgtctttgatgatgggccgccgccgacatttttaagatattgtataaactctctttctttagattttaatgagcgcagttaa

SEQ ID NO: 224632 - DNA, 397 bp, Unknown
  Bacterial polypeptide expressing nucleotide sequence isolated from the Sargasso Sea
aatggcaaaggaagatttaaaaaataaagactgggagtcaattcttgacgaagatgcttatcaagttacaagatgttttgctacagaggcgccttactctggtaaatttcttgataacaagagagaagggacctatatttgtatttgttgtaaaaaggagcttttttcttcttccacaaaatataattcaggttgcggatggccaagttttttccagccaattgatgaagcatgcatcacagaatataaagattcatcccatggaatgataagaacagaagtaagatgctctgattgtgactcacatttgggacatgtttttgatgatgggccgccaccgacatttttaagatattgtataaactctctttctttagattttaatgagcgcaaataa

SEQ ID NO: 224633 - DNA, 448 bp, Unknown
  Bacterial polypeptide expressing nucleotide sequence isolated from the Sargasso Sea
aatgtcaaaagcattgtttggagcaggatgtttttggggcattgaagaatattttagtaaaataaatggtgtaaataatacagcagttggatattcaggaggaaatactgaaaatccgacttatgaagaagtgtgtcaaggcgatacagaacacgtcgaagtagtagaaataaattatgatgaaaatattattagttatgaaagtttacttgaacatttttggaattgtcacgatcctactcaattaaatagacaaggacctgacgtaggtagacaatataggtcagctattttttattattcagataatcaaaaagatatagcagagctttcaaaaaaagaaaaacaaaatgattttaataatatgattgtaactgaaatagttgaagcacaaactttttatttagcagaagagtatcatcaacaatttttaaaaaaaagagtttaa

SEQ ID NO: 224634 - DNA, 397 bp, Unknown
  Bacterial polypeptide expressing nucleotide sequence isolated from the Sargasso Sea
atgtctaatcatactaaaacagatagtgactggaaaaaactacttagcgatgaatcttttagggtaaccagacaatctggaactgaaaggccattcactggcaagtactggaactttaatgaagatggcatctataaatgcatctgttgtggagaaagtctctttgaatcagataccaaatttgatgctggctgcggttggccaagcttttttattcctgttgatagtgattgtattaatgagtttgaagataattcatttggaatgactagaactgaagtaaagtgttctaaatgcgatgctcatctcggacatgtgttcaatgatggacctcaaccaactggtttgagatattgtataaattctgcatctttagattttgaacaaaatcaataat

SEQ ID NO: 224635 - DNA, 1261 bp, Unknown
  Bacterial polypeptide expressing nucleotide sequence isolated from the Sargasso Sea
atgaacctgaaacttagattagttacttttttctcacttatcctatttgcaaactcttttgtatatgcaaataaaactaatcatattcaaaccattcatcttggttcaggttgtttttggggcgctgaaaagggatatgaatcccttgatggagttattgatgcagcttcaggctatgcgaatgggtatggagtaaatccaaattatagatctatcatccagcttaagaacaaatataatgaaaataattttgcagaggtggtaaaagtaacctttaacagcaatgcaatttcacttgatgaaattctaaaacatttctttgaaacccatgatccaacacaacttaatagacaaggaaatgatattggaactcagtatagatcagtgatcctattttcgaatgaaactcaaagaaaacttgctcaagatattttgaatgagtatcaatctcttctttttgaagcgggttatgggagagtagttacccttatagagccattagacaacttttatttagctgaaaactatcatcaggattatttaaagaaaaatcctaatggttattgtccagacttatcaactggtgttgtattcaatgaaaaagaaaaagatattttagataatcaagatctgcttatcggtaagcaaatattgatcctggactcgcaaaattattgtccctattgtgagaaattaaagcttgatgtaactaatgaatacaaaggaagcattccgatgtcttatagaacatccgatcaattgcatgacttagaaattaatgctcccacttgggcaactccatctgtaatcttcttagaagacggtaaagaggttttttcacatcaaggctatattgatcaaaaagatttttatttgatgcttggaaaattcaaattaggagacacagaagcatatgatgttgcatttaataatgggactgatgcaagattttgtaaggaatatgaaatctttaaaaatactcctgatggcatatttatagataagctaagcggagagcctctatttgatactagagatcgattcgtatcaagatcaggatggctttcatttacaagaccagtagagggctcagtttatgaaaaacctgataatagttacggcatgcgtagaactgaaattcgttctgtatcctccaacattcatctaggtcatgtttttgatgatggcccaaatggattgccaagatattgtataaatgcaaccgttttagaatttgttcctagaaaaggttctatttaat

SEQ ID NO: 224636 - DNA, 517 bp, Unknown
  Bacterial polypeptide expressing nucleotide sequence isolated from the Sargasso Sea
atgaaagatattattttactttccgtagttatcgcttccataatattcaataatatttcgagtcaggttccttatgaagatgagaaggtgttaaattcaactaataatgatgaatccaagaaagtgaaaagatcagattcagaatggcgccgtatgctttcatcagcggaataccatatactccgcgagaaaggtaccgaaagagcattcacaggtgaatatgatggtcactttgaaaatggcatgtatctatgtgctggttgtgggaataaaatttttgattctgagactaaatatagatctggttgtggatggcctgcattttatgaggcattacctgaatctgtagaagaacatgaagataatagttttggaatgaggcgcattgagatcacttgtagtaaatgcgatggacacttaggacatgtattcaatgatggtccacaaccaaccggattaaggtattgtattaattctgtatcaatggattttaaacctgatgaagaggacgaatgaa

SEQ ID NO: 224637 - DNA, 481 bp, Unknown
  Bacterial polypeptide expressing nucleotide sequence isolated from the Sargasso Sea
atgctcccctcctggttgacccaacgtggtggtgagtcttcggcggacgcgatgcatgccgtactcggcacccccctgagggctccattgatgagcgaccaggaggaagccctgtttgcctgcggatgcttctggggggctgaaaagggattctggcgtcttccaggcgtggtcagtacagccgtgggctacgccggtggtgaacgtgtcaacccgacctatcaggaggtctgcaccggaaccacagggcataccgaggtggtgagagtggtctggagcactccagccatcgacttcagtgatctgctgaaactgttctgggaatgccatgaccccactcaggggaaccgccagggaaacgacacaggaacccagtaccgctcggcgatctacaccacgacagatcagcagatgagcctcgtcctggccagcaaaacggcctatcaggatgccctgaatcaacagggttacggcccgatca

SEQ ID NO: 224638 - DNA, 326 bp, Unknown
  Bacterial polypeptide expressing nucleotide sequence isolated from the Sargasso Sea
cgaagttatatcattggcaggtctcctcaaagttttttgggaatgtcatgatccaactcaaggaatgagacaaggcaatgatattggatcacaatatcgatcggtgatttttcttaattcagagttacaaaaagatgaatctctatcatctttggaaacttatcaggatgaacttgagcttaatggttacggtcccattactactgaaatttcgatgatgaagaattactttttagctgaggaatatcatcagcagtatttagccaaaaatccaaatggctattgcgggcttgggggaactggttgctctttccctaataattaat

SEQ ID NO: 224639 - DNA, 342 bp, Unknown
  Bacterial polypeptide expressing nucleotide sequence isolated from the Sargasso Sea
tatggaaaaagccacttttgccgccggttgcttctgggggatagaaacagcataccgtagactagaaggtgtacttgatgtcgccgtgggttatgagggtggtagtaaagataatccttcttatcaagatgtatgcactggacagactggacacgcggaagttgttgaagtggattatgatcctgaaaaaatttcttatgacgagttactggaagtattctggaacatccatgaccccactactcttaaccgacaaggtccagatataggcacccaatatcgttccgctatattttttcatactgaggaccaaaagaaaaaagctgagttatcaaaatcttc

SEQ ID NO: 224640 - DNA, 433 bp, Unknown
  Bacterial polypeptide expressing nucleotide sequence isolated from the Sargasso Sea
aatgtctttaatggacctactaaataaaaaaagcttgctgcctcttgaatctgaagcacttaaaggcagagatgaagaaattgaagttcctgcggaacattttgtgaaaggcacgccattaaaagctccatttcctgaaggtcttgaggaagcaatatttggaatgggctgtttctggggagtagaaagaagattttgggaattggaaggagtttataccaccgcagtgggttattcaggtggatttactaaaaatcctacttataaagaagtgtgtacaggtatgactgggcataacgaggtggtattagtggtttatgatcctttagtaattagttatgaaaacttactgacaactttttgggaagatcatgacccaactcaaggcatgagacaaggtaacgatgtagggacacaatacagatcaggaata

SEQ ID NO: 224641 - DNA, 430 bp, Unknown
  Bacterial polypeptide expressing nucleotide sequence isolated from the Sargasso Sea
tatgtcgacagataaaaatacaaactcatcaactaacgaaaaagactggaaaaccgagcttaatgacgaggaatactatgtatgccgcgaagcggggactgagcggcctttcactggtgtactgctagacgagcagcgagatggtttgtacgtgtgcaaatgctgtgaggcgccacttttcccatctgataccaaatttgatgccgggtgcggttggccctctttttataaacagctcgacgacggcaacgtcgactatagagaagatttgacccacggcatgcgcagggtagagatattttgcaagcagtgtggttcgcatttaggtcacgtttttcccgacggcccggcaccaacgggtcagcgctactgcgttaattcgttatcaatgacgtttataggtgaagacaacgctaaagttagaggctaa

SEQ ID NO: 224642 - DNA, 445 bp, Unknown
  Bacterial polypeptide expressing nucleotide sequence isolated from the Sargasso Sea
ttaaaaggtgtgtacgtaacatcagtaggctatgctggcggatttactcctaatccaacttatgaggaagtctgttcgggcaaaacgggtcacgcagaagtcgtacaagttgtttttgataagcaaaattgtaattacagtgatttacttaagttgttttttgagtctcataacccaacacaaggaatgagacagggcaacgatagaggcactcaatacagatcaataattctttataaaaatgagcagcaaaaggttgaagccaatcaaattaaagataattacaaccaaagtttaactaaaaatggctttaattgtataaccacagagattaatgagtataaagattattttttagctgaagaataccatcagcagtatcttgcaaaaaatccaaatggatactgtggccttcaaggcactggtattgcatgtcaacagtaaa

SEQ ID NO: 224643 - DNA, 397 bp, Unknown
  Bacterial polypeptide expressing nucleotide sequence isolated from the Sargasso Sea
aatggtaaatgaagatttaaaaaataaagactgggagtcaattcttgatgaggatgcttatcaagttacaagatgttttgctacagaggcaccttattctggtaaatttcttgataacaagagagaagggatctatatttgtatctgttgtaaaaaggagcttttttcttcttccacaaaatataattcaggttgtggatggccaagtttttttcagccaattgatgaagcatgcatcacagaatataaagattcttcccatggaatgataagaacagaagtaagatgttctgattgtgactcacatttggggcatgtttttgatgatggaccgccgccgacatttttaagatattgtataaactctctttctttagattttaatgagcgcaaataa

SEQ ID NO: 224644 - DNA, 601 bp, Unknown
  Bacterial polypeptide expressing nucleotide sequence isolated from the Sargasso Sea
tatgaaaaatttaaaatttatttttctactactattgttttcatgcataagtttaaggacatcagatatgactcaaaatactgaaaaagcctactttgctggtggatgtttttggtgcatggaaccaccatttgaagtccttgatggtgtactagaagcaacctctggatatatgggtggagaaattgagaatccaacttatgaacaggtaagtatgggtaatactggtcatgcagaagtagttgagatcgagtatgacccaagtattattacatacagtgagctcctagaagttttttggaggaacatagatcctaccgcgttgaattatcaatttgcagatgttggatcacaatatagaactgaaatatttacggtgggaccaaatcaaatggaagaagcacttaattctaaagaagaattggaaaagtcaaacaaatttgataagcctattgttactgcaattacagaggcacctgtgttctatattgcggaggaatatcatcaagacttttataagaaacaaagtgctcgttataaaatatatgcagaagcaagtgggagaaaaggattcttagaagatacatggggagacgagtaa

SEQ ID NO: 224645 - DNA, 427 bp, Unknown
  Bacterial polypeptide expressing nucleotide sequence isolated from the Sargasso Sea
tatgagcaataatacggcggttacagagcaagtattatcgctagatatcagcaaggaagagcttgctgatatcaacgagtcgctcgaagcgatgacggcacaacaacgagtggaatgggcctttaacaatttgcctgatactcatattgtgtcttcaagctttggtgctcagtctgcggtaatgctgcatatgctgacacaagcaaagccagatattcctgttgtgttaaccgacacgggctatttgtttcccgagacttaccaattcatcgatgaactggttgctaagctcaagcttaacctacacgtataccaagcgaatatgtcatcggcatggcaagaggctcgatttggcagactttgggagcaaggcatagagggaattgaaacttacaattctcttaacaaagttgagcccagcaaagag

SEQ ID NO: 224646 - DNA, 235 bp, Unknown
  Bacterial polypeptide expressing nucleotide sequence isolated from the Sargasso Sea
gctggacacagaacaacagcaacaactgctggcagaagccaatcagctgttactatcttttacagctgcagagcgcgtcaggtgggcgcttgaacatttgccggatcagcagatcttaagttctagttttggtatacagtccgctgtgatgctgcatctggtgacgactgagcgacctgatattccagtcgtattaacagacacggggttatctgttcccggaaacttatcagtt

SEQ ID NO: 224647 - DNA, 418 bp, Unknown
  Bacterial polypeptide expressing nucleotide sequence isolated from the Sargasso Sea
gcaatgggctttacagcatttgccggatcagcagatcttaagttccagctttggcattcagtccgctgtgatgctgcatctggtgacgactgagcgacctgatattccggtggtattaacagacacgggttatctgttccctgaaacttatcagtttattgatgagttaaaagagcgcctccagctgaacctgaaagtctaccgtgctcatttaagccctgcctggcaggaggcccgttttggtaagttatgggaaaccgaagcaggtattaaacaatacaaccatatgaataaagtggagcctttgcagcgcgctttaaaagagctgaatgtcggcacttggttcagtggtttacgccgcagtcagtccagcacgcgcgctgataaaaatataatcgaaatcagccgcggtacagtc

SEQ ID NO: 224648 - DNA, 466 bp, Unknown
  Bacterial polypeptide expressing nucleotide sequence isolated from the Sargasso Sea
cctgataagcgcagcgccatcaggcaaggcaaacagtgaggaacttatgtccaaactcgatctcaacgcgttgaacgaactgccgaaagttgaacgcgttatggcgttggcgcaaaccaacgaccaactggaaaaattgagcgccgaggatcgcgtggcgtgggcgctggaaaacctgcctggcgaatatgtactgtcatcaagttttggtattcaggcggcagtgagcctgcacctggtaaatcaggttcgccctgatatcccggtgatcctcaccgataccggttatctgttcccggaaacctaccagtttattgacgagttaacggacaagctcaagcttaatctgcaagtctaccgggcgaaggaaagtgcggcctggcaggaagcgcgctatggcaaactgtgggagcagggcgttgagggcattgaaaaatacatgacatcaacaaagtcgagccgatga

SEQ ID NO: 224649 - DNA, 751 bp, Unknown
  Bacterial polypeptide expressing nucleotide sequence isolated from the Sargasso Sea
ttgcagagcgtggtaagtagcagcgaattgaaggcgctgctgacggcgcctaaggatgtgcagcgagccgaactggaacgcattaatcgcttcttagctggcttgacggctcaagagcgagtgctctggggcttagcctatttgccgggtaatcacgcgctgtcatccagttttgggatccaagcggcggtgatgttgcatatggtgagtcaggtgcaatcggatattccggtgattttaacggatactggatacctctttcctgagacatatcagtttattgaccagcttaccgagcgtttatccttaaatcttaaggtctaccaagcgccgatgacggcggcatggcaggaggcgcgctttggccaattgtgggagcagggcttagagggtcttgaacgttataatcgcctcaataaagtggagccgatgcaacgtgctttggcggaacttgaagtaggcacttggtttgcgggacttcgccggagccagtcgagcactcgcgaagagttaccgatattggctatccacggtactcgctttaagctgctgccgattatcgaatggtcgaacaaagatgtgcatctgtatttgactcaatttgacttgccttaccatcctctatgggagcaaggttatgtttccgttggggatacccattctactaaacccttagaattagggatgtctgaagaagaaacacgctttaatggcttaaaacgcgaatgcggtctgcattacgaaatatagc

SEQ ID NO: 224650 - DNA, 568 bp, Unknown
  Bacterial polypeptide expressing nucleotide sequence isolated from the Sargasso Sea
tatgctgcatatgcttacccaagcacaaccggatattcctgttgtgcttaccgacacaggttacctttttcctgagacgtacaagttcattgatgaacttgtagaaaagctcaatttaaatttgcacgtgtacagcgcagagatgtcttctgcgtggcaggaagcgcgctttggcagactttgggaacaaggcatcgaaggtattgagaaatacaataagatgaacaaagttgagccaatgcagcgcgccttacgtgacctgaaagcaggtacgtggtttgcaggtttgcgtagaagccaatcagataccaggggaaagcttccagttctacaaaaagtagggcagcagtttaaactttacccgatcattgattggagtaacaaagacttacattactacctgaaagataacgacttgtcttatcatccgctttgggagcaagggtatgtatccatcggtgattggcataccacgcagtcgctccaagaaggaatgagtgagcaagacacgcgcttctttggtttgaaacgcgagtgtggattgcacgagtttggtgacggtatttaa

SEQ ID NO: 224651 - DNA, 778 bp, Unknown
  Bacterial polypeptide expressing nucleotide sequence isolated from the Sargasso Sea
gctggcgcgcaccgccgatggccggctcgacctcgacgccctgctggccttgagtcgcgaggagcaggtcgaagcgctggcccctatcaatcgggctctcgatgccatgagcgcccccgagagggtgcgctgggcgctggccaacctgccgggggagcacgtgctgtcatcgagcttcggcatccaggcggcgctgatgctgcacctggtgagccgcgagcaggccgacgtgccggtggtgctgaccgataccggttatctcttccccgagacctaccgcttcatcgacgagctgaccgagcggctcgccctcaacctcaaaatctaccgggccgagctcagtccggcctggcaggaggcccgcttcggcctcctgtgggagcagggggtagaggggatcacccgctacaaccagctcaacaaggtggagccgatggaccgcgccctgaacgagctcggcgctcgcacctggttctccggcctgcgccgggagcagtcaggcagccggggcaagttgccggttctggccatccagcgcggccgcttcaagttcctgccggtgatcgactggagcaacaaggacgtcttctactacttcaaggagttcgacctgccctaccacccgctgtgggagcagggctacctgtcggtgggcgacgtgcacaccaccaccaagtgggagcccggcatgagcgaggagcagacccgcttcttcggcctcaagcgcgaatgcggcctgcacgaggagaacggcgagaacgacggctccggcatctga

SEQ ID NO: 224652 - DNA, 751 bp, Unknown
  Bacterial polypeptide expressing nucleotide sequence isolated from the Sargasso Sea
ttgcagagcgtggtaagtcacagcgaacttaaagcgctgctgacggcgcctaaggatgttcagcaagcggaactggagcgcattaatcgcttcttggccggattgacggctcaagagcgagtactctggggcttagcctatctgccgggtaatcacgcgctgtcatccagttttgggatccaagcggcggtgatgctgcatatggtgagtcaggtgcaatcggatattccggtgatcttaacggatactggctatctctttcctgagacatatcagtttattgaccagcttaccgagcgtttatccttaaacctcaaggtttaccaagcgccaatgacctcggcatggcaggaggcgcgttttggcaagttgtgggagcagggcttagatgggctcgagcgttacaatcgactgaataaagtggagccgatgcaacgtgctttggcggaacttgaagtcggtacttggttcgcgggactgcgccgaagccagtcgagcacacgcgaagagttaccgatattggctatccacggaactcgctttaagctgctgccgattatcgagtggtcgaacaaagatgtgcacctatatctgacgcaatttgacttgccttaccatcctctatgggatcaaggttatgtttctgttggggatacccattcgagtaaacccttagaattagggatgactgaagaagaaacccgctttaatggcttaaaacgcgaatgcggtttgcattacgaaatataac

SEQ ID NO: 224653 - DNA, 343 bp, Unknown
  Bacterial polypeptide expressing nucleotide sequence isolated from the Sargasso Sea
catgagtcagtataaacagctattacagctggacacagaacaacagcaacaactgctggttgaagctaaccagttgttgctgcctttaacgcctgcacaacgggtgcaatgggcgcttgagcatttgccggatcagcaaattttaagttccagctttggcattcagtctgctgtgatgttgcatctgatcaccactgagcggcctgatattccggtgttactcaccgacaccgggtatctgtttcctgaaacttatcagtttattgatgagctgaaagagcggttacagctgaacctgaaggtgtatcgtgcgcacttaagcccagcctggcaggaagcccgt

SEQ ID NO: 224654 - DNA, 691 bp, Unknown
  Bacterial polypeptide expressing nucleotide sequence isolated from the Sargasso Sea
atgtctaacaaccaaaccgtatcttttgaacactcaattcctgacaatttaaaggggttggttgctgattggtcttcagatgttcaaaccttcagggtgagatggagcaaggccatgatgtggatcttcttggtcagtgatacttttatatttggctccttcctatgtgcttacatggcagtaaggttgaccaccatcgagccttggccctctaccagtgaagtctttgctcttcatgtaggtggagcagatgttcccttattgctgattgcaattatgacattcatactgatcagtagtagcggaaccatggcaatggcagtcacctctggttataagaaagagaggaagaaaacagctttcttgattctcttaacagcacttggtggtcttgcatttgttgggatgcaaatgtttgagtggagtaagcttatttttgaagagggtattcgaccatggggcaatccgtttggtgccgctcaattcggtggcttcttttttatgatcacaggctttcacggactgcatgtatcaataggtgttgtttacctctgcatcgttgcaaaaagagtttgggaaggccgttatgacaggcttaacgattaccaaatggttgaggtagcaggattatattggcactttgtcgatttggtctggatattcattttcgcattcttttatttatggtagg

SEQ ID NO: 224655 - DNA, 325 bp, Unknown
  Bacterial polypeptide expressing nucleotide sequence isolated from the Sargasso Sea
aatggctgagggccactcaagagatcatagttaccatttagtagatccaagcccatggcctatagttggagcctttgcagcctttattcttaccttaggaatggttctttggtttcacgatgttactatttgggtttttattattggtgcagtaattactgcatacgtttttcttgtttggtttagagacattataaaagaaggggagcacttaggttttcatacaccagttgttcagcttgggctcaggtatgggatggttctctttattgcatcagaagtaatgttttttgctgcttggttctgggcgtattataacgcagcc

SEQ ID NO: 224656 - DNA, 898 bp, Unknown
  Bacterial polypeptide expressing nucleotide sequence isolated from the Sargasso Sea
agcggagggggaagcccatttgctgtggcaacattattttgggtttttagcgcatcctgaagtgtatgttcttattctacctgctatgggtattgtttcagaagtcattgcaaataattctaggaagccattatgggggtataattcattagtctttgctacaatatttcttggattcatgtcatttattgtttgggctcatcatatgtttttaactggtatgggcacggctatgagtgcgttttttcaaacaactacaatgattatatcgataccatctgtaattatcttgtctgctttatttatttctttatggggagcctctatacgatttaatactccaatgttatttgccttagcttttttaccaatgtttgggattggcggccttactggtctacccttagggcttgcagctgcagatatatatcttcatgatacgtattatgtaattggtcattttcattatgttgttgctcctggaacaatatttggtttgtttgctggtatttattattggtatcctaaaattactggaagaaaaatgagtgaactactaggcaaaatgcatttttggccatcattattatttatgaatggtgtttttatgccaatgtttattcaaggattagctggagtttctagaagactttgggatggtggtcttgaatatgctcatgctagtggagtttttcattggaatgaatttatgtcgatttctgcgtggttgctcggtatagcacagatcccatttattataaatgtcttttatagtatttttcgaggtgaaaaggttgataataatccttggcaagcaacaactttagaatgggctgcgccatcaccgccattacctcatgtcaattttgatacactcccctactgttcatcgcgatcc

SEQ ID NO: 224657 - DNA, 495 bp, Unknown
  Bacterial polypeptide expressing nucleotide sequence isolated from the Sargasso Sea
aaattttatacaaacaagatgcaattcctaaggcggatataactgttaaagctataggatatcaatggtactggggatacgagtatccagatgaaaatattttcttcgactcttacatgatcgaaactaaagacttaaaagaaaacgagccaagactgttagctgtggataatgaactggttgtcccagtaaataaagttgttaaggtaatgatcactgcaaatgatgttttgcatgcatgggcactcccttcatttggagtaaaacgagatgctgtacctggaagaataaatgaaacatggtttaaagcagaaaaagttggaacttattatggtcaatgttctgaattgtgtggaattaaacatgcgtttatgcctatcgaagtaagagttgttactcaagaagaatatcaagagtggctgttagacgctaaagttaaatttgcaaaagaagttaatgaagcggatcaatttaaaaaactagcgagtaaataat

SEQ ID NO: 224658 - DNA, 661 bp, Unknown
  Bacterial polypeptide expressing nucleotide sequence isolated from the Sargasso Sea
atgatgtggttctttttaatatcggatgccttcacattttctgcatttttaattgcttatggtgttattaggttaaaacatcctgcctatgaaggtactttatccgattttactttttctcaatcatattggcctgttcctgagaaagttttcgaagcgtttcctttttttcatggagttgaacttcctttagtctttgtaggattgatgacatttattctaatacttagtagcgttacgatggtattagctgttgaggcaggacatagaatggacaggaaaggtgtagaaaaatggatgctttggactatagtgggagggtttacatttttaggctgtcaagcatgggaatggtctcattttattcatggaactgatttgggaagcagattattagatggttctattatttatggtgcaaatttgcagataaatcaatacggaccccctgactttgcagcatttttctttttcataacaggatttcatggatttcatgtattttctggtgttgctttaaattttttgattttttatcaaacgactgttggtatctatgagaaaagaggacattatgaaatggttgagaaagtcgggttatattggcattttgttgatttagtttgggtttttgtatttacatttttttatttaatttaat

SEQ ID NO: 224659 - DNA, 396 bp, Unknown
  Bacterial polypeptide expressing nucleotide sequence isolated from the Sargasso Sea
gctaatacctatgatggtcggagcaccagatatggccctgcctagattaaataatttaagtttttggttacttccatttgcctttggtattttgctttcatcactatttatggagggaggagcaccaaactttggttggacattctacgcacccctttccactacatatgcacccccgagcgttactttctttattttttcagttcatattatgggagcatcatcaattatgggatcaattaatgtgatagtaacaataatgaacatgagagctccaggaatggatctaatgaaaatgccgctatttgtctggtcatggttaattactgcctatcttcttatagctgttatgccagtgttggcaggtgcagtaaccatgatgttaatgctggaaag

SEQ ID NO: 224660 - DNA, 734 bp, Unknown
  Bacterial polypeptide expressing nucleotide sequence isolated from the Sargasso Sea
tatgcttaaaaaatatgcatacactttatttttattattgccaggttcagttttagctaaccaacctaaagattggcaattaggatttcaaaaatcagcctcagaaactatggatgatattgtatggtttcatgattacatgttgctacctgttattactgcaataacagtatttgttctttttttaattgcttatgcctgtatccgatttagagcatcaaaaaataaagaggcatcgactactagtcataatactttcatagaggtgatatggactctggttccttgtttgattttaatcgtattagccgttccttcatttaaagttttgtattcccaagatgaaatcccaaaagctgatgtaactataaaagccataggctatcagtggtactggggttacgaatatcctgatgaaaatataatttttgactcatatatgattgaagagaaagatttaaaggagggtcaaccaagattactctcagtggataatgaagtttatgttcctgttaataaagtagtgaaagtaatgatcactgcaaacgatgttttgcatgcttgggctctaccttcattcggagtaaaaagagatgcagttccaggaagaattaatgaaacgtggtttaaggcagacagagtaggaactttttatggtcaatgttctgaactatgtggaatcaaacacgcgtttatgcccattactgtaaatgtagtttctcaagaggaatata

SEQ ID NO: 224661 - DNA, 280 bp, Unknown
  Bacterial polypeptide expressing nucleotide sequence isolated from the Sargasso Sea
aatgtttgagtggagtaagcttatttttgaagagggcattcgaccatggggcaatccgtttggtgccgctcaattcggtggcttcttttttatgatcacaggctttcacggactgcatgtatcgataggtgttgtttacttgtgcattgttgcaaaaagagtttgggaaggccgttatgacaggcttaatgattaccaaatggttgaggtcgcgggattatattggcactttgtcgatttggtctggatattcattttcgcattcttttatttatggtag

SEQ ID NO: 224662 - DNA, 793 bp, Unknown
  Bacterial polypeptide expressing nucleotide sequence isolated from the Sargasso Sea
tttgccttttgtagcatttgctaaagagggcaaatcagaaaactggcaacttagctttcaagagccagcaactgatttgatgtcagatattatttctttccatagttacatccttatgccaattataactggtatttctttgcttgtcttaggcttgcttctttacataatgtttaggtttaacagtaagagaaatgtagttgcatctacgacaactcataatacgaccattgaaatattatggactgtaatcccagtcatacttttaataataatagccattccatcttttagattactttatgtttcagaaacaattccaaaagctgacttgaccattaaggcaataggtaaccaatggtattggacctacgaatatcctgattacgaagacatcgcgttcgacgcaaatatgcttttagaaaacgagttatcagaccctaagttgagactcttagagacagatacccagattgttgtacctgtaaataaggtagtcaaacttcaaatcacatctgcagatgtacttcatgcatggaccattcctgcatttggagtaaaaatggatgcggtacctggtagactgaatgaaacatggtttaaggctaataaagaaggtatttattacggtcaatgttcagagttgtgtggagctaagcacgcattcatgcctattaatgttaaggttgtatcagaaagtgaatttgacaattggctagacttcgcaaaagaagaatatgcatcgtctggaatagattattcaagtgaaacgtttgaaattgcaaagaactag

SEQ ID NO: 224663 - DNA, 829 bp, Unknown
  Bacterial polypeptide expressing nucleotide sequence isolated from the Sargasso Sea
atgaaaaatattattaagatattattttttcttcttataccttctttttcactagcaaatgagggtatttctgaaaattggcagctaagctttcaacagcccgcaactgatttaatgtctgacattatatcatttcatagttatatcttaatgcctatcattacaggcatatcacttttagtacttggtcttctgctatacatcatgttcagatttaatagcagccgtaatcatgttgcttccacgacaacacacaacacaacaattgaaatattgtggactgtaattccagtaatattgttaattattattgctattccatctttcagattactttacgtttctgaaacaataccaaaggcagatataacaatcaaggctatcggcaatcaatggtattggacttacgagtaccctgatttcgatgatatctcttttgatgctaacatgcttgctgatcatgagctatcagatccaaagttaagattgttagagactgatactcaaattgttgtaccagtagataaagtggtcaagcttcagttaacttcagcagatgtgctgcacgcttggacaattccagcatttggtgtcaagatggatgctgtaccaggaagattaaatgaaacatggtttaaggctaataaagaaggaatttattatggccaatgctcagagctttgtggtccaaaacatgcatttatgcccattaatgtaaaagtcgtctcaaacaaagagtttgaagagtggatcgaatttgctaaatctgagtatgcatccctagagattaattacagtaacgatacatttgaaatggctaaaaaataaa

SEQ ID NO: 224664 - DNA, 367 bp, Unknown
  Bacterial polypeptide expressing nucleotide sequence isolated from the Sargasso Sea
agtttattattggataccaaagtggacaggtaatatgtatgacgaaagaatgggcagattgcatttctggctttcgtttgtgggagtaaatgtcacatttttccctcagcactggattggattggcaggaatgccaagaagatatccagactatgctcttcagtttgcagactggaacatggtttcaactgcaggagctttcttatttggagcttctcaaatcttattcttatttattgttctaaaaacagtaatgggtggaaagaaagctactcctcaagtttgggaaggagcaagaggtttggagtggtcagttgaatcaccagcaccctatcatacgttttcaacaccacctaaagtcaattaa

SEQ ID NO: 224665 - DNA, 475 bp, Unknown
  Bacterial polypeptide expressing nucleotide sequence isolated from the Sargasso Sea
gaaatgcagtctgtacgaagaagcaatgtttcttacaaaatttgcatcaaaagtacaattaattcatagaagaaatgaattaagagctgaaaaattacttcaaaaaaaattaatggaaaataaaaaaattgaaattatttgggatagtgttgttgaagaagtcattggcgatgaagatcctaaaaatgtaaaaggtttaaaaattaataatgttaaaactaatgaaattaaggaattaaaaatagatggtctttttattgctattgggcacgatcctgctactcagctattcaaagatcaattaaatatggataaagaaggttatttaataactaaaccagactccactgagacaaatatccctggtgtttttgctgcaggtgatgttaaggataaaatctttagacaagcagtaactgctgcgggaatgggttgcatgtctgcattagaagctgaaaaatatttggcatcataa

SEQ ID NO: 224666 - DNA, 994 bp, Unknown
  Bacterial polypeptide expressing nucleotide sequence isolated from the Sargasso Sea
aaatagagaggtagatataagcttagatagagtatatgggaaaagtgataatgagtttattggaatgtgcagaagagaagttatggatgcctttatgcgcaatagagcatcagatcttggtgctacattaataaatggattagttacttctattgatactggcgataataatcaagggccatataagctttcctactcagattttacgaatggagataaaaaaggggaacttaaagagcttactgttgaccttttaatcggagctgatggagccaatagcagagtcgcaaaagcaatggatgcaggagattacaaagttgccatagcatttcaggaaagaattaaattacctaaagaagaaatgagttactacgaagatcttgctgaaatgtatgtcggaactgatgtttctcctgatttttatggatgggtatttcctaaatatgatcatgttgctgtgggcactggaaccatgcaaaagaatcagtcattaattaaaggacttcaagagggtgtaagaaatagggcgaagaaaagacttgttaatggtgaagtaataaaggtagaagctcaccctattcctgagcatccaaggccaagaagagtagttgggagaatggcattggttggtgatgcagctggttatgttacaaaaagctctggagagggcatttattttgctgcaaaaagtggaagaatgtgtgctgaagaaattgttgaagcatcaaaaaacggtcaaataattccatcagaaaaagatttaaaaaactatcttaaaaaatgggataaaaaatatggcacaacttataaagtgctagaaatccttcaaaatattttctacagaaatgattctgcaagagaagcctttgtagagatgtgtgatgacatggatgtacaaagacttacttttgatagttacttatacaaaagagttgtcgccatgaaaccattacagcaacttaaaattacaatgcttacacttggttcgatttaa

SEQ ID NO: 224667 - DNA, 362 bp, Unknown
  Bacterial polypeptide expressing nucleotide sequence isolated from the Sargasso Sea
ggtacttgcgcataatgcgcttgaaactaatgatcaagaaaaaacaagagtttggttacttgcaacggctatgcttggtgctgtttttttagctggccagatttatgagtttacagagttttaccataagggttttgaactatcaacaaacatcttcagttcaactttctatgttttaactggcttccacgggcttcatgtatttattggtgttgttttgttgttggctttatggggtattggccagagacaaaaaggcttatctttaaatgaaggtatgaatcttgaatttattgcactttattggcactttgttgacattgtttggattgtattgtttacagtagtctatcttatctaat

SEQ ID NO: 224668 - DNA, 604 bp, Unknown
  Bacterial polypeptide expressing nucleotide sequence isolated from the Sargasso Sea
aatgacgactctagatagttcaaaagaaattataaatgattctagtgatgtaaatgaacatcatcaagacttcaggatgtttggattaataacttttttaatcgcagatgggatgacttttgctggcttctttgctgcctaccttacatataaagcagttaatcctttaccagatggagctatatatgaattagagttacctatccccacattaaatacaatcttattgcttgtaagtagtgcgactttccataaagcaggtaaagcacttctgaaaaataaaaattctgttacacagaaatggctaatagtaactggtttacttggtattgcatttttaatttgtcaactatttgaatattttaacttgcctttcggactaacagaaaacttatttgcaagtactttttatgctttaacaggctttcatggtctacatgtaactttaggaacgttaatgatattaattattacttggcaaacaaggtcaaagggtgggagaattacaaatcaaaatatgtttccattagaagctgttgaattatattggcattttgtagatgggatctgggttattttattcatcattttatatcttttgtaa

SEQ ID NO: 224669 - DNA, 640 bp, Unknown
  Bacterial polypeptide expressing nucleotide sequence isolated from the Sargasso Sea
gttgtggtggaaagcccggaggattgggacagctggtacagggacaacgccaaagccgcacctgaagacgaaacgctcaccatcgcgaacgcctgatatgacaatcagtttacccccggaaacgtccagccctccacggcttcaacccagcggctggttgcggtatttcagcttcagcgttgatcacaaggtgatcgggctgcagtacctcgtctgcggctttgttttttatctgattggcggcgccctagccggtgccattcgcacggaactcaccagtcccgtgtccgacttcatggcacgtgatgtctacaaccaggtgcttacgctccacggcacggtgatgatctttctctggattgtccccgtggtgaatggtgcttttgggaactatttgatccccttttatgtgggtgcaagggacatggccttcccgcgcctgaatgccgtggcgttctggctgatccctccagccggtttgatgctgatcaccagctatttcctcacgggggctgcacaatcgggctggacggcctatccacctctgagcatcaccacaccagcaactggccaaatcatctggatcttgagcgtgctgctcctgggcggaagttcgatcttcggaggcatcaacttcatc

SEQ ID NO: 224670 - DNA, 384 bp, Unknown
  Bacterial polypeptide expressing nucleotide sequence isolated from the Sargasso Sea
catgtctgcatcaggtcaaaaacacgattatcacttagttgatccaagtccttggcctttagctacatcagttgcaacattaataaccgccgttggctcagtttattattttcacacagaagttatgtgggcaatgcttttaggatttttgttacttatttattgtgcatttatgtggtttagagatgttgttatagaggctgaacataagggtcatcatacccctgtagtacaaatccatcatagatacggcatgacattatttatagcatctgaggtcatgttttttgttgcatggttttgggcatattttgatgcaagtttatttccaaacgaatttatggggaatgtttggccaccaaaagatatcaaaacttttgatcc

SEQ ID NO: 224671 - DNA, 380 bp, Unknown
  Bacterial polypeptide expressing nucleotide sequence isolated from the Sargasso Sea
ccaagcaaaattaaaggcaaataagaaaattgaaattatatgggacagtgttgtagaagatgtattaggagaaaaaagtccaaagtctgttaaaagtataaaaattaaaaatgttaaaacaaacaagattagtgagctaaagatagatgggcttttcattgctattgggcatgatcccgctacgtcactttttaagggtcaattaaatatggacaaagagggttatatagttactaagcctgattctacagttactaatgtgcctggggtcttcgcggccggggatgtaaaagataaaatatttagacaagcggtaacagcagcaggcatgggctgtatggctgcacttgaggctgaaaaacatttatcatcaaaatgac

SEQ ID NO: 224672 - DNA, 676 bp, Unknown
  Bacterial polypeptide expressing nucleotide sequence isolated from the Sargasso Sea
gccaattataactggtatttctttgcttgtcttaggtttgcttctttacataatgtttaggtttaacagtaagagaaatgtagttgcatctacgacaactcacaatacaaccattgaaatattatggactgtaatcccagtaatacttttaataataatagccataccatcttttagactactctatgtttcagaaacaattccaaaagctgacttgaccattaaggcaataggtaatcaatggtattggacctacgaatatcctgattacgaagacatcacgtttgacgcaaatatgcttttagaaaatgaattatcagaccctaagttgagactcttagagacagatacccagattgttgtacctgtaaataaggtagtcaaacttcaaatcacatctgcggatgtccttcatgcatggaccattcctgcattcggagtaaaaatggatgctgttcctggcagactgaatgaaacttggtttaaggctaataaagaaggtatttattatggtcaatgttcagagttgtgtggagctaagcacgcattcatgcctattaatgttaaggttgtatcagaaagtgaatttgacgattggctagactttgcaaaagaagaatatgcatcgtctggaatagactattcaagtgaaacgtttgaaattgcaaagaactag

SEQ ID NO: 224673 - DNA, 807 bp, Unknown
  Bacterial polypeptide expressing nucleotide sequence isolated from the Sargasso Sea
ttgtttgggctcaccacatgtatgtaagcggaatgaacccatggtttggtttcttctttgcaacaacaacattgataattgcagttccaacagcgataaaagtttataactggattttaactttgtggagaggaaatatacagttatctcttccaatgttattttcacttggttttatagtaacttttttaaatggtgggttgactggtctatttttaggaaacgtaacagttgatgttcctttatcagatacttactttgttgttgctcatttccacatggttatgggtattgctccgatacttgtcatcttcggagctatttatcattggtacccattaattactggtcgtatgatggacgaaactctgggtaaaattcatttttggattacatttttaggatcttatgcaatttatttcccaatgcattaccaagggtttgttggagttccaagaagatactttgaaatttatgatagcccatacatcgacacatcaactttacttttaaataaatttattactattgcagtgctaatagtaggagctgctcaattattgtttttatataacttatttgcaagcgctagacttggaaaaaaatctgaaaaaaatccttggaaagccaactctttagaatggcaaactcctcaaatgcctccagaacatggtaactggggtaaagaacttccaaaagtttatagatggccatacgacttcagtgttcctggtgcaaaagaggattatattccacaaaaccaacctccaagtgagattataggagcgaaagttgagaagacgtgaa

SEQ ID NO: 224674 - DNA, 805 bp, Unknown
  Bacterial polypeptide expressing nucleotide sequence isolated from the Sargasso Sea
ctttgtatgggctcaccacatgtatgttagtggaatgaatccttggttcgggttcttctttgcaacaactacattaattattgccgtcccgaccgcaatgaaagtttataattggatacttactttatggagaggaaatattagaattaacactgtaatgttatggtgcctaggatttatagtaacatttgtaaatggtggaattactggaatatttttaggaaatgtttcagttgatgttccattatctgatacatattttgtaatagctcacttccatatggtcatgggtattgcgccattaatggttattatgggagcagtttatcattggttcccattagtagctggaaaaatgttacacgaaggtctaggaaaatggcacttctggattactttcttaggggcttattcaatttatttcccaatgcattacctaggttttatcggagttccaagaagatactttgaaatgtatgatagtccgtatatgacatctgcagttggtatgaacgaatttattagtattgcagcatttatagttggtgcagcacagtttattttagttttcaatatcattaaaacattaaaaacaggtaaaaaagctgaacaaaacccttggaaagctaattcacttgaatggtatacatctactgttccaccagaacatggtaactttggtgaaagacttccagttgttcatagatggccatacgattttagtgttccaggagcaaaagatgattttattccgcaaacaacagcacctagtgaagtaatacacacagaagtagagaaaacttaa

SEQ ID NO: 224675 - DNA, 301 bp, Unknown
  Bacterial polypeptide expressing nucleotide sequence isolated from the Sargasso Sea
gcaacagcaatgcttggctctgtctttcttgctggacaaatttatgaatttactgagttttaccataaaggatttgagctttctacaaatatttttagctcaacattttatgttttaactgggtttcacggactacatgtttttattggtgtagtttttctaattggactttggataattggtcaaagacaaaaagggttgtctttagatagtggatttaatcttgaattcattgcattatattggcactttgtcgatattgtatggattgttttatttactgtggtgtatttaatctaat

SEQ ID NO: 224676 - DNA, 811 bp, Unknown
  Bacterial polypeptide expressing nucleotide sequence isolated from the Sargasso Sea
tttggaatagtctcagatctgatttcagtacactctagaaaaaatatctttggatatagaatgatggtttgggcgattgttggaattggcgctctaagcttttttgtttgggctcaccacatgtacgtaagtggtatgagtccttggtttggtttcttttttgcaactactacacttattattgcggttcccacagcgttgaaggtctataattggatacttacactttggagaggaaatataagaataaatactgtgatgcttttctgtttaggttttattgtcactttcgtaaatggtggtataacaggtattttcttaggaaatgttgctgtggacgttccattgtctgatacttatttcgtaatcgctcactttcatatggtgatgggaatagcaccactaatggtaatttttggagccatttatcattggttccctttagtgactggaagatttctagatgaaaaattaggtaaatggcatttttggataacttttttaggcgcttactctatttatttcccaatgcactatttaggtttcattggtgtaccaagaagatactttgaaatgtatgacagtccatatatgacatcagctgtaggaatgaatgaatttataagtcttgcagcattcatagtgggagctgctcaatttatcttcttttataaccttgtaaaaagcttaagactaggtaagccagcaggtaagaacccatggaaagctaattctttagaatggcttacacctgacgttcctcctacacatggtaactggggagaaaaacttccggtagttcacagatggg

SEQ ID NO: 224677 - DNA, 526 bp, Unknown
  Bacterial polypeptide expressing nucleotide sequence isolated from the Sargasso Sea
tatgacatcagaatcggcaacctcacagccttggcatgtccccgagcccagtccttggccaattgttgggacagccgctgccttggctaccgctctaggattagtctggtttatgcatactgggtcaccgtggttgcttggaataggcggaatattggtattatggacgatgattggttggtggcgccaagttattttggaagcaaatgatagagcatcccacacctctccagtaaaggtcggtttgcgaataggaatgctgttatttattgcctctgaggttatgtttttctttgcgtttttctgggcatactttcattctagtttgccaattttaaacattgttgccggtccatggccaaatgagggtgttgaggcaattggggcagcagggattcccttgttgaacacattgcttttaatcacttcaagcctaaccgtaactatagctcaccatgcaattctggagaatgaacgggaaaaggttatattttggacaggaataacggcagttttgggaattatt

SEQ ID NO: 224678 - DNA, 439 bp, Unknown
  Bacterial polypeptide expressing nucleotide sequence isolated from the Sargasso Sea
aatgaaattaactgatgtttatgacattccttttacatctgtaagctcttttgttttattaatgagctcattaactatggtgcttgcccacaatgcattagaaaatgaagatcaagaaaaaacaagggtttggcttttagcaacagcaatgcttggctctgtctttctagctggacaaatttatgaatttactgagttttaccataagggatttgagctttctacaaatatttttagctcaacattttatgttttaactgggtttcacggactacatgtttttattggtgtagttttcctaattggactttggataattggtcaaagacaaaaaggattgtctctagatagtgggtttaatcttgaattcattgcattatattggcactttgttgacattgtatggattgttttatttactgtggtgtatttaatctaa

SEQ ID NO: 224679 - DNA, 775 bp, Unknown
  Bacterial polypeptide expressing nucleotide sequence isolated from the Sargasso Sea
ctttttactagtttaccagctttatctaatggagcaattgattggcagttaggatttcaaaaacccgctagcgatcatatgcaaaatatatttgatctccataattttgtattaatcatgatgacagcaataacaatttttgtattgatacttctgatttatgttgcaataagatttcgtaaaagtgcaaaccctaatccttcaaaaagaacacataacgcccttttagagacattatggactgctatacctgtggttattttaatttttatggctgttccttcttttaaactcttatatgaacaagatgttattccagaagctgacatgacaataaaagttattggtcatcaatggtattgggaataccaatatccagaacatgatgatctgtcttttgaaagttatctcgttcctgatgaagaacttaaggacgggcagccgagattacttacagttgataacagactagtattaccagttaataaaaacattcacgttcttgttacagctggcgatgtacttcatagttttgctatgccttcactcggagtaaaaagagatgcagtgcctggaagactgaatgaaacgtggatgagaatagatagaccagggatatatagaggtcaatgctctgaaatttgtggaactggtcatggttatatgcctgtagttattgaagcattaagtgaaaatgattttgctgcttgggtaaatcaagctaaaaatgaattcgctgaattaaatagtagaacaattgcattatcaaaatagg

SEQ ID NO: 224680 - DNA, 571 bp, Unknown
  Bacterial polypeptide expressing nucleotide sequence isolated from the Sargasso Sea
tagtgccttagatataaatcttcatgatacatattttgttgttgctcattttcatctggtaatgggtatatctgctctttatggtttgtttgctggagtatatcactggttcccaaaaatgtttggaaggatgatgaataaaaatctaggatatatacatttttggataactgcaataggagcatatggagtctttttcccaatgcactttatcggaatggcaggacttccaagaaggtactatactaatacaaatttcccatatttcgatgatttagctaatataaatgttgtcattaccatgtttgcattaatagcaggtgctgcacaaataatattcttatataattttataagcagtatattttatggtaagagaacagagaaaaatccttggaaatcaaatactctggagtggactgctccaataaagcatattcatggaaattggcctggtaaaatacctcatgttcatagatgggcatatgactattctaaacctggatctaaagaggattttatacctcaaaatataccccttaagaaaggagaaaaagaactccaacattaa

SEQ ID NO: 224681 - DNA, 925 bp, Unknown
  Bacterial polypeptide expressing nucleotide sequence isolated from the Sargasso Sea
tatggcatatccaaaattaaatgccgtagcattttggatgattccaccagcaggagcactcatctggttaggatttgcagactttacttggtacgcatatccaacatattctgtagttagtgcaccaggtcctgcagcagacatgtggattttcggactgaagattttaggtgtctcatcaattcttggttcaattaattttgtagttacaattatgaaatgtaaacatcctgatttaccattaagtaaaatgccattgttggcttgggcttatcttacatcttcattaatcactctagttgcagttccaacattcgctgcagcactgttaatgttacttacagatagattaggtgcatcaggattcttcaatcctgcaatgggtggagatccgattgcttatcagcacttgttctggtttacattccatcctgaagtatacattctggtaattcctgcaattggtttcatgtatgaaatattcccacgtttctcaagaaagccaatctttagtcacggctctggcgtagctgcatttactttactaaccattgtcggattcgcatcctgggctcatcacatgtatgcaaccggaatgtcatttacagaaaaaactgtattcatggttggaactttagcagcagttccagcatctgcaatgcacacattcaacttccttgcaactatgtggggtggaagaatcaaattcgcaactccaatcatgtgggctgtaggcggaattgcactattcttctctgctggagcaggtggtgtcgtaaacagtgcaatgccattagacttcatcactcacgactcttactgggtagttggacacttccatctatttgtcatgggtacaatcctattcggtacagtaggattcgtttactacttctttccatacgtaactgggaagattgtatag

SEQ ID NO: 224682 - DNA, 265 bp, Unknown
  Bacterial polypeptide expressing nucleotide sequence isolated from the Sargasso Sea
aatgcattttttgggtttggctgggatgccaaggcgctacgcagattaccctgaggcttttgcagggtggaatatggtggcttctctggggtcgtacttgtctgcattttcggcgcttttgttcgtgtatattcttatcaggaccgtcacatctggggagcgcgtttcggaaaatccgtggggtgagggtgcaacaacgatggagtggaagttaccctctccgcctgagtttcatacctatgatgaactcccggttattaaataa

SEQ ID NO: 224683 - DNA, 648 bp, Unknown
  Bacterial polypeptide expressing nucleotide sequence isolated from the Sargasso Sea
aatgagcgaagcagaagcaatgaatgacagtcctgaaggaatgacgggattagtagacgactggtcagctgacaggcaggcttatcaggtgccttggggaaaggccatgatgtggattttcctcgtgagtgacacgtttattttttcttgttttttggtgggctacttaaatgttagattaacaactacagcgccctggccccctcaaagcgaaatctttgcgctgtctttcggtggtgccccgataccgcttatcctgatagctattatgactttcatactgatcacgagttctggaacgatggcgcttgcggttaacatgggatatcgaaaagataaagtaaaggcattctggctaatctgcataacggcagcctttggtgcttcgtttgttggtatgcaaatgttcgagtggtctaagttaatcttagatgagggtgttaggccatggggtaatccattcggagcccctcaatttggatctatattttttatggtgaccggttttcatgggcttcatgtaaccggcggtgtaatttatttactctgggtcgccttcagggttaaacgcggatactatgacaacaagggttttgagataattgaaattgccggtttatactggcacttcgttgacttggtgtgggt

SEQ ID NO: 224684 - DNA, 241 bp, Unknown
  Bacterial polypeptide expressing nucleotide sequence isolated from the Sargasso Sea
agttaaaagagatgcaattcctggaagaataaatgagacgtggtttaaagctgaccgaactggaactttttatggtcagtgttctgagttatgtggaattaaacacgcttttatgccaatcacagttaatgttgtgtctgaggatgaatataataaatggttagaggaggctaaagttaaattcgccaaagaagaaattaaagataaaattaaaattgtaaaaaaaattaaggagttataa

SEQ ID NO: 224685 - DNA, 955 bp, Unknown
  Bacterial polypeptide expressing nucleotide sequence isolated from the Sargasso Sea
catgagtaaatccaatgcagctgctgatgtggcatcaatttcagcatcaggaataacaatttccttaggtgctgctggtaactttagttcaaacataattgctgctgataaagcatttaccatggatggatcaggtatgtcatccgctgatattacccttacggcagtttcagcagttgattcaatatcaattacattagcaggaagtgcgcaagtatcttctggaacaattgatactgttgacacatttacactgagtgcttctggtgccagtgagtcgattgacatcaataatgtatccgcatctggtattagtattaccactggaatccaaggtgactttagtgcatcttctgtaaactctaagagtactattacagttgatgcctcagggtctactacagctcagggaatttcactaactgctgtatcagcttctggtgctatttcgattactatgggtgctggatcaggctttatagcaatgactacagctaattcaactgaaaaagcatttaccttagatgcaagcagatttgacggcgaagttgacattagtaatgttaatgcatcgggtgtaacaatttcgatcggtagcggtggtgactttagtgcttcagctgtcggtggttacggtaatgggttcaccctaaacgcaacaagttccgatgcatctggtgaacaaattaatatcggtgtaatttctgcaagtggtgttgctatgaatatgtcggcagcagcctttgtaactgctcaggtcagtgccctaaacactggaggaggtgacttcacatttagtggtaccaactttaacggtgggttgcacataatgtcgattagcggctcaggggcatcgataatcacaggtgagaatttcatcggcagtgcacagtctgttcttcttactgaccacttcactttaaacggtgcagcgctgacatctgctactataact

SEQ ID NO: 224686 - DNA, 890 bp, Unknown
  Bacterial polypeptide expressing nucleotide sequence isolated from the Sargasso Sea
atttaatatctgttcacgcaagaaaaatatttttggataccggatgatggtgtgggcaattgtcattattggtgctcttagttttattgtttgggctcaccatatgtatgttagcggaatgaatccctggtttggatttttctttgccacaaccactttgattattgcagttcctaccgccattaaagtttataattgggttttaactctgtggagaggaaatatacatctaacaattccgatgttattttcattaggatttatagttacttttgttaatggaggcatcaccgggttattcttaggtaatgtaattattgatgttcctctttctgatacttactttgtggttgcgcattttcatatggtaatggggatagcacctttgatggtagtatttggagctatttatcattggtaccctttaattactgggcgacatttaaatcaaactttaggaaaaattcatttctggataacttttgttggtgcttacgcaatatattttccaatgcactatctaggttttattggagtgccgcgtagatattttgaaatgtacgatagtccatatatgacttctggagttggcttaaatcaatttattacagtagcagctttaattgtaggatttactcaatttttatttttatacaatttatttacaagttggtataagggagaaaaatcagagagaaatccatggaaagcaaattcgttagagtggcatacacctgactatccgccaacacatggaaattttggcaaggagttgccagtagtatatcgttggccatatgattttagcgttcctggatctgacaaagagtacattcctcaagatgtgcctccaagccaagttccaacagcaaaggcagaacaaacgtgag

SEQ ID NO: 224687 - DNA, 695 bp, Unknown
  Bacterial polypeptide expressing nucleotide sequence isolated from the Sargasso Sea
caattttcatgataagttgttgttaccaatcataattgctatcagtgtttttgttctatttttaatggtttatgcttgtataagatttagagcttcagcaaatccagtaccttctaaaagaactcataatgttgctgttgaagttttatggactttaattccatgtctaattctgatcgtgatggcagttccatcatttaaaattttatacaaacaagatgcaattccaaaagcagacataactgtaaaagctataggataccaatggtactggggatatgagtatccagatgaaaatattttctttgattcatacatgatcgaaactaaagatttaaaagaaaacgaaccaaggctattagctgtagataatgaattggtagttccagtaaataaagttgttaaggtaatgatcactgctaatgatgttctacatgcgtgggcactcccttcatttggagtgaaacgagatgctgtgcctggaagaataaatgaaacttggtttaaagcagaaaaagtcggaacttattatggccaatgttctgaactgtgtggaattaaacacgcgtttatgccaattgaagttagagttgttactgaagaagaatatcaagagtggttgttagacgctaaagtcaaatttgcaaaagaaattaatgaagaagatcaatttaaaaaactagcgagtaaataat

SEQ ID NO: 224688 - DNA, 586 bp, Unknown
  Bacterial polypeptide expressing nucleotide sequence isolated from the Sargasso Sea
atgagtagttcacatgcatatccccatgaacctacaggtgtagaaactagaaaacttggtatgtgggtatttttatccactgaaatattattttttggtacattaattaccacttttatgatatttaaaggtagcgactttcctggaatgaaattaacagatgtatatgatattccatttacatccattagctcttttatattgttaatgagttcattgactatggttttggctcacaatgcgttagaagcaaatgatcaagaaaaaacaagggtttggcttttagcaacagctatgttgggtgcggtatttttagcaggacaaatatatgaatttacagagttttaccataaaggttttgaactaacaacaaatatatttagttcatccttttatgtattaactggctttcatggattgcatgtctttattggtgtagtcttacttttagcattgtggggaattggccaaagacaaaaaggattaacacttgaaggcggaatgaatcttgagttcgttgcactttattggcactttgttgacattgtatggatagtattgtttacagtagtttacttaatttgat

SEQ ID NO: 224689 - DNA, 872 bp, Unknown
  Bacterial polypeptide expressing nucleotide sequence isolated from the Sargasso Sea
tgtcgctctgacagagcccagacgtaaaccccgcattgtcattactcagctggatttgctgtcatctccgattaaaagcccgctgactgacttatcaggtcagcattttactttaccttatgacagccagggtttaacgatcagttattccagcctgaatttccgcgacagcgcaaaaatgcgttatcgttattggctggacggcccacagcgtctggtgtttccggaacaaagctccagttcggtgatgtttccacagcttactccgggagattaccagtttaatgtagtggccgtctctccagtcactggtcttgaaagtgaagtggccaccttacaacttcaggtccaagctgcaccatggctcagtcattgggcttatatgctttatgcatctgtcagcctcgtcatcatgctgttttaccttagaacccgccaaaaacagcaacgcatgctcaaagtagctcataccaaagtaaccaccagtgaacagcgcttaaaacaagcgttggactcgatagacagcggagcctgggagtggcatgcccgtaaaaatattatgtttgcctcccgtattcacagcatgctggggtatcaggaagctttaaatccgctggcgatgacgcaacatttgtcgttagtgcatccggaagataaagacgcttaccagcaagcctggcaaaaactgatgcaaacgccggacaaaacctttgaccacacttacagaatgcagcataaaaacggcaaatggttgtggttccgcgatataggcaaagtggcagaagtggatgacaaaggccaacctgaacgggtgataggcacctttagcaacatcactgaaaccagagccaaccaggaaaaagcccggttat

SEQ ID NO: 224690 - DNA, 630 bp, Unknown
  Bacterial polypeptide expressing nucleotide sequence isolated from the Sargasso Sea
ggcctatgcttgtttttagattcagagagtcaagaaatcctaatccttctaagacaacccacaatgttgctattgaagttctttggactttaataccttgcttaattttaattgtaatggcagtcccatcttttaaaattttatattctcaagatactatacctaaagctgatgtaactattaaagctatcggctatcaatggtactggggttatgaatatcctgatgagaatataatttttgactcttatatgattgaagaaaaagatctattaccaggtcaacctagattgttagcagttgataatgaagtaattgttcctgttaataaagtagtaaaagttttaataactgctaatgatgtattacacgcttgggcactacctgcttttggagttaaaagagatgctatgcctggtagagtaaatgaaacttggtttaaagcagatagagtaggaactttttatggccaatgttcagagctctgtggaattaagcatgcttttatgccaatcactgtaaaagttgtaacagaagaggaatatcaagaatggcttgatgaagctaaaataaaatttgcaaaagaagaaataaataatcaaaacaataatttaatagcgagtaaataaa

SEQ ID NO: 224691 - DNA, 547 bp, Unknown
  Bacterial polypeptide expressing nucleotide sequence isolated from the Sargasso Sea
acgtttattttttcttgttttttggtgggctacttaaatgttagattaacaaccacggcaccctggcccccgcaaagcgaaatctttgccctgtctttcggtggtgccccgataccgcttatcctgatagctatcatgacgttcatactgatcacgagctctggaacgatggcgctggcggttaacatgggatatcggaaagataaagtaaaggcattctggctaatctgcataacggcggcctttggtgcttcgtttgttggtatgcagatgttcgagtggtctaagttaatcctagatgagggtgttaggccatggggtaatccattcggagcccctcaatttggatctatattttttatggtgaccggttttcatgggcttcatgtaaccggcggtgtaatttatttactctgggttgccttcagggttaaacgcggatactacgacaacaagggttttgaaataattgaaattgccggtttgtactggcacttcgttgacttggtgtgggtattcatatttgcatttttctatctactttaga

SEQ ID NO: 224692 - DNA, 409 bp, Unknown
  Bacterial polypeptide expressing nucleotide sequence isolated from the Sargasso Sea
ttgttcttatcaatttctgcaacagctcaaattgatagatctgtacaacctaaaccaggtcctgctccaaccattactctagaagtaccaggagaatttcaacttaaaaatggacttaaagttttagttgtagaaaaccacaaattaccacgcgtatcttactctttaacaattgacaacaatccaattgtagaaggagataaagctggagtatctagtatacttggagctatgttaggtaatggaactactaacatatctaaagacgaatttaatgatgaaattgactttttaggagctagattaaactttggatctagtagcgcatacgcttctggtttatctaaatattctgagcgtattatggagttaatggcagacgctgcaatcaatccattattaacacaag

SEQ ID NO: 224693 - DNA, 201 bp, Unknown
  Bacterial polypeptide expressing nucleotide sequence isolated from the Sargasso Sea
aatgtcagcaggaaaaccaaaacacgattaccatttagttgacccaagtccttggcctatttatgtttcattcgctactttagtcttagcttttggagcagtttattatttccactccaaagctctttggttattattaattggttttgcattagtagtttacggtgcatttatgtggtggcgggatgttatagaagaagc

SEQ ID NO: 224694 - DNA, 784 bp, Unknown
  Bacterial polypeptide expressing nucleotide sequence isolated from the Sargasso Sea
gaagatgaacttggaataaaattaaatgaatatcagaatataattcctccgaaggatagattttatgctgatccatttcctgtttatcataaaaataaattatatattttttttgaagaaatgctttttaatcaaaaaaatgcatttttatctgtgctttcaatagattcagattgtagtataagtataccaaaaaaaattcttgaagaaaaatttcatctttcttatccatttattatttatcacgataacgagtatttcatgattcccgagactgcatctaacaataaaatatcattgtataaatgtgatagttttccatacaaatggtcattttgtaaacatttaatgcataatgtcaaagcagttgatactactgtattttattataatgattatttttggatgtttactaatttagctgaaagtgaaggttgttcaacttgggatgaattatttttgtttttttcaaaagacttattttcagattgttgggaatctcatcctttgaatcctattatttcagatgtaagcaaagctcgcccagcagggaatatattttattcacaaaaagatatcattcgcccttcgcaaaataattctatgatatatggaggtaatatagaatttaataaaatagttaagctcagtgagaatgagtatgaagagattactattaaatcatcagatatatctttcgatagctctattttaggtgcgcatacaataaattctcttcagggatttaccgttgcggatacacttaataaaataaagcggtgac

SEQ ID NO: 224695 - DNA, 889 bp, Unknown
  Bacterial polypeptide expressing nucleotide sequence isolated from the Sargasso Sea
aaaaagttaaaacccatggtgctagataataaacacataaaagcgagaagtgtagtaaataaacttaaaaaagctttaaataaattattatcagagtatagcaattcatttgtttttgactttataaaagatgataatgtcaccagtcaaatggacgcacatatttctagtggaataattgatagaggtgttgctactcccgatcatgtcatccgaattaaacctaaacccttgatattaactctctctattcaggaaaataggcggggaagtatcgaaaaggcagtaaaatcatatgttaacgattataaaacatattttgaaacatggtctagaaaaacaaaagaagagaaaatcatgcttgatccagttccaaaaattgcctgggtagaaggtattggattaattggaattggacgttcaatgaaagaagcaaaaactattacagacttagccgttcaaaatatagcagtgattacagactctgaaggcgcgggaggtttttaccctgttaaaaataaagatttatttgaaatggagtattggtctcttgagcaagcaaagttgagtaaaaaacctttatccaaattgaatgggaaggtaaccattgttactggagctgggggtgctattggggcagcaatcgtcagattattcgaatctgaaggagctgaagtaatagctgtagacctagatgaaaacgctctaaaaaagcataatttttcgtcgcgagtatctaagcagtgtctagatattactgatgaagcgcaggcaaaaaaattaattgatgatatcgtggatcaattcggaggattggatattcttatttcaaatgctggaagtgcaatgcaatcttctatacttgaaatggatattaaagatctgcgaa

SEQ ID NO: 224696 - DNA, 903 bp, Unknown
  Bacterial polypeptide expressing nucleotide sequence isolated from the Sargasso Sea
taaaattattggaatacaatatgggtttactgccttattctttcttctagttggtttttcattaatgatggttatgcgctggcaattagcatatcctgaaacgcctattccttttgtaggatctatctttggcgatgatggtatactgcttcctgaaatctataattctttaggagcaatgcatggaacaattatgattttcttaggtattgttccgcttgctgtaggtgcttttggtaattatttagttccacttcaaattggtgctcctgacatggctttcccgaaacttaatgctgctagttattggagttatttagtaggtggccttgtaatgatgagcagtttttttactgaagagggtgctgctagatcggggtggacctcttatccacctttagctgatatagaagtaggacaaactatttggctaattggaatgatatttttaattacttctagcttgctaggttcgatgaatattattactactatagtgcaattacgtgctccaggattaacctggatgcgtttacctttttttgtttgggctcagcttgtaacatcctttttgcttgttttggcatttcctccattagaagctgctgctgtgcttcaattgatggatcgtgtcgtaggaactagtttcttcttaccaagcggcttagttgtatcaggtgaattaatggaggtcagcggagggggaagcccattgctgtggcaacatttattttggtttttagcgcatcctgaagtgtatgttcttattctacctgctatgggtattgtttcagaagtcattgcaaataattctaggaagccattatgggggtataattcattagtctttgctacaatattttcttggattcatgtcatttattgtttgggctcatcatatgt

SEQ ID NO: 224697 - DNA, 548 bp, Unknown
  Bacterial polypeptide expressing nucleotide sequence isolated from the Sargasso Sea
tatggcagacgcagccatccacggccacgagcatgaagatcagcgcgggttttttacacgttggtttatgtcaaccaatcataaagatatcggtattttatacctcgtcgtttcggcacttgtagggtttatagcagtatcattcacgatctacatgaggctggaattgatgaacccaggcgtgcagtacatgtgtatggaaggaatgcgcctcacggccgcaggcattggtgaatgtacaccaaacggccatctctggaacgtacttattactggtcatggcatcctgatgatgtttttcgttgtaattccggctctattcggcggttttggcaactactttatgccattacaaataggatctccagacatggcctttccaagaatgaataatctgtcattttggatgtatgtagctggaacgactttagccatatgttctgtactatcccccggaggcaacgatcaattggggtctggcgttggctggatattgtatccaccgctatccgtaaatgagggtggtatgtcaatggatttggcgattt

SEQ ID NO: 224698 - DNA, 273 bp, Unknown
  Bacterial polypeptide expressing nucleotide sequence isolated from the Sargasso Sea
aatgtcagcaactactgcagatcacgaacaccatcataatccaactggttggaagagatgggcctattcaacaaatcataaagatattggtacgatgtatcttatctttgcaattattgctggtttaattggatctgctttctcagttttaatgagaatggaattaatgcatccaggggacggaattctaggaggtgattatcatttatataacgttttagtaactggtcacggtctaatcatgattttctttatggtcatgccagcaatgat

SEQ ID NO: 224699 - DNA, 574 bp, Unknown
  Bacterial polypeptide expressing nucleotide sequence isolated from the Sargasso Sea
atgagcgcagtaatagaaaatcatcatgacgaccatcatcatgggcctgctaaaggcataacaagatggttgtatacaacaaatcataaggatataggaactctttatttatggtttagttttgccatgttcttaattggcggtgcaatggcaatggttataagagcagagcttttccagcctggaatgcaaatagttgaacctgaattttataaccaaatgattacgctgcatggattgataatgatttttggaggggtaatgcctgcttttgttggattagcaaactggttagtaccaatgatgattggagcgcccgatatggctttaccaagaatgaataatttgagcttctggatactaccttttgcattctttattttattatcatcattatttatggagggtggagctccaaactttggatggacgttttatgctccgctttcaacaacttatgctcctccaagtgttactttttttatattttctgttcacataatgggagcatcttcaataatgggctcaattaatgtcgtggtcactattatgaatatgagagcacccaggcgta

SEQ ID NO: 224700 - DNA, 849 bp, Unknown
  Bacterial polypeptide expressing nucleotide sequence isolated from the Sargasso Sea
tccctaattactttagttgcagttccaacatttgctgcagcgttgttaatgttgcttacagatagattaggtgcatcaggattcttcaatcctgcaatgggtggagatcctattgcttaccagcacttattctggtttaccttccatcctgaagtatacattctggtaattcctgcaattggtttcatgtatgaaatattcccacgtttctcaagaaaaccaatctttagtcatggctctggtgtagccgcatttactttactaactattgtcggatttgcatcatgggctcatcacatgtatgcaacaggaatgtcatttacagaaaagactgtattcatggtcggaactctagcagcagttccagcatctgcaatgcacacattcaacttccttgcaaccatgtggggtggaagaatcaaattcgcaaccccaatcatgtgggcagtaggcggaatcgcactattcttctctgctggagcaggtggtgttgtaaacagtgcaatgccattagactttatcactcacgactcttactgggtagttggacacttccacctatttgtaatgggtacaatcctcttcggcactgtcggcttcatatactacttcttcccatacgtaaccggcagaatgtacaatgagacaatgggcaaaattcactttatcctatctttcgtaggaaccgttctagtattctttactcaacacatcttgggactctttggaatgccaagaagaatttacgattatccagcaattccggaatgggtacaaatgaacatcattatttcaattggcgcattcatcatcggtatcggcatggcaatatttctttggaaacctaat

SEQ ID NO: 224701 - DNA, 778 bp, Unknown
  Bacterial polypeptide expressing nucleotide sequence isolated from the Sargasso Sea
gctcttagtttttttgtttgggctcaccatatgtatgttagtggaatgaatccatggtttggatttttctttgcaaccacaacacttatcattgcagttccaacagcgatgaaagtatataattggattctaacattgtggagaggaaacattagaattaacactgttatgctgtggtgtcttggttttatagttacttttgtaaatggaggaataactggaatttttttaggaaatgttactgttgatgttccgttatcagatacttattttgttatagcgcacttccatatggttatgggcatagccccgcttatggtaatcatgggagcagtttatcattggtttccattagtagctggaagaatgttaagtgaaaaattaggtaagtggcatttttggataacttttttaggagcttattcaatttattttccgatgcattatttaggttttataggagtgcctagaagatatttcgaaatgtatgatagcccttatatgacatctgcagttggaatgaatgaatttataagtttagcggcctttatagtaggagctgctcaatttatattaatttataatattattgtaagtttaagaatgggcaaaccatcaggaaaaaatccttggaaagcaaactcactagaatggcacacatctacagttcctccagaacatggtaattttggagatgaacttccagttgttcacagatggccctatgatttcagtgttcatggggcaaaagaagattttattcctcaaacaacgccac

SEQ ID NO: 224702 - DNA, 390 bp, Unknown
  Bacterial polypeptide expressing nucleotide sequence isolated from the Sargasso Sea
tgtattactggctgccaaaatggactggctacatgtacgacgaagtattaggtaagacgcacttttggctgtcgtttatttctgtgaacctaactttcttcccaatgcattttgttggattggcgggaatgccaagaagaattccagattacgccatgcaatttgctgattacaatatgattgtgagcgttggagcttttcttttcggactttcgcaattactgtttttattcaatgttttgaaatgtgtttattacggtaagtcagcgactgctgaagtttgggaaggcgctaaaggcaaaggcttggagtggactgttgattcccctgcgccgtaccacacgtttgaaacgtcgcctgatctaactaagccacaaaccaattcataac

SEQ ID NO: 224703 - DNA, 451 bp, Unknown
  Bacterial polypeptide expressing nucleotide sequence isolated from the Sargasso Sea
tatgtttttaacaaaatttgcttcaaaagttcaacttatacacagaagagatagtttgagagcagaaaaattacttcaaaagaaattaatggaaaataaaaaaatagaaataatttggaactctgttgttgatgaagttattggggataacgatcctaaaaatgtaactggattaaaaattaaaaatgttaaaacaaataaaatagacgaactaaaaattgatggcttgttcattgctatagggcatgatccagcaacctcattatttaaagaccaactagaaatggataatgagggttatttaataacaaaaccagagtctacggaaacaaatataccaggagtttttgctgctggtgatgtgaaagataaagtatttagacaggcagttacagcagctggtatgggatgtatggcagcattagaggctgaaaaacatttatccgaataa

SEQ ID NO: 224704 - DNA, 783 bp, Unknown
  Bacterial polypeptide expressing nucleotide sequence isolated from the Sargasso Sea
ttatcacttcaagcgcattcgctaatcaaccagttgattggcaactaggttttcaaaaggctgcttccgagactatgagagatatagttaattttcatgataaattgttgttaccaattataatagcaatcagtgtttttgttctatttctgatggtttatgcttgtataagatttagagcttcagcaaatccagttccatcaaaaagaactcataatgttgctgttgaagttttatggactttaattccatgtttaattctgatcgtgatggcggttccatcatttaaaattttatacaaacaagatgcaattccaaaagcagaaataactgttaaagctataggatatcaatggtactggggatatgagtatccagacgaaaatattttcttcgactcttacatgatcgaaactaaagacttaaaagaaaacgagccaagactgttagctgtcgataatgaactggttgttccagtaaataaagttgttaaggtaatgatcactgctaatgatgttctacatgcttgggcactcccttcatttggagtaaaacgagacgctgtacctggtagaataaatgaaacttggtttaaagcagaaaaagttggaacttattatggtcaatgttctgaactttgtggaattaaacacgcgtttatgccaattgaagttagagttgttactgaggaagaatatcaagagtggttgatagacgctaaagtcaaatttgcaaaagaaattaatgaggaagatcaattcaaaaaactagcgagtaaataat

SEQ ID NO: 224705 - DNA, 798 bp, Unknown
  Bacterial polypeptide expressing nucleotide sequence isolated from the Sargasso Sea
ttaagtttcttcgtatgggctcaccatatgtatgttagtggtatgaacccttggtttggatttttctttgcaacaacaacattaattattgccgttccaactgctatgaaagtttataattggatacttactttatggagaggaaatattagaattaatacagtaatgttatggtgcctaggatttatcgtgacatttgtaaatggtggaattactggaatatttttaggaaatgtatcagttgatgttccattatcagatacatatttcgtgatagcccacttccacatggtcatgggtattgcaccattaatggtaattatgggtgcagtttatcactggtttcctttagtagctggaaaaatgttgcatgaaggcttaggcaaatggcatttctggattactttcctaggagcatattctatatacttcccaatgcactatttaggttttattggagttccaagaagatattttgagatgtatgacagtccatacatgacatctgcagttggaatgaatgagtttataagtattgcagcatttatagtcggtgcagcacagtttattttagttttcaatatcattaaaacattaaaaacaggtaaaaaagctgaacaaaatccttggaaagcaaattcactagaatggtatacatctactgttccacctgaacatggaaacttcggtgagagacttccagttgttcatagatggccgtatgattttagtgttccaggagctaaagatgattttattccgcaaacaactgctcctagtgaagtaatacatactgaa

SEQ ID NO: 224706 - DNA, 599 bp, Unknown
  Bacterial polypeptide expressing nucleotide sequence isolated from the Sargasso Sea
cctatttttgggaaatgtaacagtagatgttcctttgtcggatacatatttcgtcgttgctcatttccatatggtaatgggtattgccccaatcctggtaatttttggtgcgatttatcattggtatccattaataactggcaggatgatgaatgaaacattaggacaaattcacttttggataacatttataggatcgtacgcaatctattttccaatgcactaccaaggatttgttggagttccaagaaggtattttgaaatttatgacagtccatatattgatacatcaacattgcttttaaataaatttatcactattgcagttttaatagttggtgctgcgcaattattgttcttatacaatttaattgtgagtgctcgactaggaaagaagtcagaaaaaaatccttggaaagccaattctttagaatggcaaacacctcaaatgcctccagaacatggtaattggggcaaggaacttccaaaggtttacagatggccttacgattttggtgttcctggagcgaaagaagattatattccacaaaatcaacctccaagcgagataataggagagaaagttgagaaaacgtgaa

SEQ ID NO: 224707 - DNA, 353 bp, Unknown
  Bacterial polypeptide expressing nucleotide sequence isolated from the Sargasso Sea
ggcagtgcttgctcaccaagcggcagaaaagggtaaaggaaaggaggcggctaagctcctcgcttttacgattctgggcgctctaacgtttctcatgatcaagtcgtatgaatggacgatcgagatcatggctgggtacacaatcaccgcgaataccttctggtccttttattacactgcagcaggattgcatgcactccatgtgatcgcgggtgccatcattatgggatttattgcggtcgatgcctaccggggccgtgaattgcaccgtgtcgagatcatcgggatctattggcactttgtggatgtcgtttggattttcttgttcccgcttctctacatagcgaagtagg

SEQ ID NO: 224708 - DNA, 343 bp, Unknown
  Bacterial polypeptide expressing nucleotide sequence isolated from the Sargasso Sea
gatgagcacactgactcaagatcaaattgccgcccatgatgatcaccatcacggtgcacctaaaggcatcatgcgctggttactcaccaccaaccacaaggacataggcaccctgtacctatggtttagtttcataatgtttttaaccggtggtgcaatggccatggtgatccgcgccgaactctttcagcccggattacaactcgttgaacctaacttcttcaaccaaatgaccacagtgcatgggttaatcatggtattcggcgccgtgatgccggcctttacagggctggctaactggctgatcccgataatgattggtgcgcccgatatggcgcttcca

SEQ ID NO: 224709 - DNA, 628 bp, Unknown
  Bacterial polypeptide expressing nucleotide sequence isolated from the Sargasso Sea
catgttgtgggcccttggatttctagtttcatttctgataggcggagtcacaggaatttatttgggcgctagtgctttggatgtttattttcatgatagttatttcgtgattgcacactttcattatacctttttcccgatcaccattatcggaatgtttgctgcgattaccttctggtttccaaagatgtttggaaggatgatggacgaaactctaaacaagattcatttttggggaaccttcattccttttaacggccttttccttccgcttttcctggtgggaatggcaggacaacacagaaggatcgctgacttcacccaatatcctgacctcgcttcccccgatcttcaaagtatcaggatatttgcaacggtatcattagtgattttgttactgttccaatttgtttttatctataatttctttaacagcatgttcaaagggaagaaagcaccgatgaatccatggcgtgctaccactttggagtggacggttccttctcctcctccccacggtaattttgctgaattgcccacggtttatagagggccctatgagtatagcgtgccagggcatgaggaagatttttggccccagcatctacctcctaaaaccacttcctga

SEQ ID NO: 224710 - DNA, 450 bp, Unknown
  Bacterial polypeptide expressing nucleotide sequence isolated from the Sargasso Sea
tatggtcccgcctgcagaatccggcgctagcgccacagattacgattatcacggccacaagcatccctaccatctggtagaccccagcccctggccatttataggttcgatttccggcctggttatggcggttggcgccgtgctttacatgcacgagcaaatcgcctgggtgctgatcctgggaacattaggcgtcatgggcaccatggccggttggttctgggaagttatcaaagaggccgaattccgcggttatcacaacccggttgtccaggtcggcatgcgctacggtatggcgctgtttatcgcctccgaagtgatgttcttcgtttgctggttttgggcctatttcaacgctgcgctgtttccgtcagagcagatcgaaggcacctggccgccgcccggcgtccagaccttcgatacctgggacctgcccttcctgaacacgct

SEQ ID NO: 224711 - DNA, 798 bp, Unknown
  Bacterial polypeptide expressing nucleotide sequence isolated from the Sargasso Sea
gggtttaagtttctttgtatgggctcaccacatgtacgttagcggtatgaacccttggttcggatttttctttgcaacaacgacattaattattgccgttccgacagccatgaaagtttataattggatacttactttatggagaggtaatattagaattaatactgtaatgttatggtgcttaggatttatcgttacatttgtaaatggtggaattactggaatatttttaggtaatgtttcagttgatgttccattatctgatacatattttgtaatagcccacttccatatggtcatgggtattgcaccattaatggttattatgggcgcagtttatcattggttcccattagtggctggaaaaatgttacatgaaggcctaggaaaatggcacttctggattactttcttaggggcttattcaatttatttcccaatgcattacctaggttttatcggagttccaagaagatattttgaaatgtatgatagtccgtatatgacatcagcagttggtatgaacgaatttataagtattgctgcatttatagttggtgcagcacagtttattttagttttcaatatcattaaaacattaaaaacaggtaaaaaagctgaacaaaacccttggaaagctaattcacttgaatggtatacctctactgttccaccagaacatggtaactttggtgaaagacttccagttgttcacagatggccttatgactttagtgttccaggtgcaaaagatgactttattccgcaaacaacagcacctagtgaagtaatacacac

SEQ ID NO: 224712 - DNA, 491 bp, Unknown
  Bacterial polypeptide expressing nucleotide sequence isolated from the Sargasso Sea
tttatattctcaagacactattcttaaagctgatgtaactattaaagctatcggatatcaatggtactggggttatgaatatcctgatgagaatataatttttgactcatatatgattgaagacaaagatctgttaccaggtcaacctagattgttagcagtcgataacgaagtaattgttcctgttaataaagtagtaaaagttttgatcaccgctaatgatgtactacatgcttgggcactacctgcttttggagtcaaaagagatgctatgcctggtagagtaaatgaaacttggttcaaagcagatagagtaggaactttttatggccaatgttcagagctttgtggaattaagcatgcttttatgccgatcacagtaaaagttgtaacagatgaggaatatcaagagtggcttgatgaggccaaaataaaatttgcaaaggaagaaataactaatcaaaataataatttaatagcgagtaaataaa

SEQ ID NO: 224713 - DNA, 439 bp, Unknown
  Bacterial polypeptide expressing nucleotide sequence isolated from the Sargasso Sea
ccatcctgaatgggctgaagcggcgtcacacactcagacatggattggcgcggtaaacacttttgtactgctcacctcgagcttcacggcagtgctggctcaccaagcggcagaaaaaggcaagggaaaggaggcggcgaagctcctcgctttcacgattctcggcgctctaacgtttctcatgatcaagtcgtatgaatggacgatcgagatcatggctgggtacacgatcaccgcgaataccttctggtccttttattacactgcagcaggactgcatgcactccatgtgattgcgggcgccatcattatgggattcattgcggtcgatgcctaccggggccgtgaattgcaccgcgtcgagatcatcgggatctattggcacttcgtggatgtggtttggattttcttgttcccgcttctctatatagcgaagtag

SEQ ID NO: 224714 - DNA, 883 bp, Unknown
  Bacterial polypeptide expressing nucleotide sequence isolated from the Sargasso Sea
tcagttcacgcaagaaaaaatatattttggttacagaatgatggtttgggcaattgtagcaataggagcccttagtttttttgtttgggcacaccacatgtatgttagtggaatgaatccttggtttggatttttctttgctactactactctaataattgcagtcccaacagcaatgaaagtttataattggatacttactttatggagaggaaacataagaattaatactgttatgttatggtgtctgggatttatagtgacttttgtaaatggcggtataactggaatatttttaggaaatgtttcagttgatgtacctctatcagatacatattttgttattgctcactttcatatggttatgggtatagcgcctctaatggttattatgggagctgtgtatcattggtttccattagtatccggaagatttttagatgaaaaattaggaaagtggcatttttgggcaacatttttaggagcatattcaatttatttcccaatgcattatttgggttttatcggggtgccaagaagatattttgaaatgtatgacagtccatatatgacttcagctacaggaatgaatgaatttataagtttagctgctttcatagttggagctgcacaatttattttaatttataatattataaaaactttaaaaattggaaaaactgcaggaaaaaatccatggaaagcaaattcgcttgagtggcacacatctacagttcctcctgagcatggaaattttggagatagacttccggtagtccatagatggccatatgattttagtgttccaggtgctaaagatgattttattccacaaactacaccaccaagtgaagtggctcatacagaggtagaaaaaacttaa

SEQ ID NO: 224715 - DNA, 382 bp, Unknown
  Bacterial polypeptide expressing nucleotide sequence isolated from the Sargasso Sea
catggcgatggcagtgacctctgggtataagaaagagaggaagaaaacagccttcttgattctcttaacagcacttggtggtgttgcatttgttgggatgcaaatgtttgagtggagtaagcttatttttgaagagggcattcgaccatggggcaatccgtttggtgctgctcaattcggtggtttcttttttatgatcacaggctttcacggactgcatgtatcgataggtgttgtttatctaacaattgttgcaaaaagggtttgggaaggccgttacgataggcttaacgattaccaaatggttgaggtcgcaggactatattggcactttgtcgatttggtctggatatttattttcgcattcttttatttgtggtag

SEQ ID NO: 224716 - DNA, 745 bp, Unknown
  Bacterial polypeptide expressing nucleotide sequence isolated from the Sargasso Sea
aatgaaaaaatttttatatatatttctatcatatttcgttacatctaaagtttttgctaaccagccaaaagattggcaattaggcttccaagaggcagcatcttcaacaatgagagacatcgtgaattttcacgacaagttgttgttaccaatcataattgcaatcagtgtttttgtattatttttgatggtatatgcttgtgttagatttagagcatcagcaaacccagttccatcaagaagaactcacaatgtagcggttgaagtattatggactttgataccttgtttaattttaattgttatggctgttccgtcttttaaaattctatattcacaagatgcaattccaaaagcagatgtaactgttaaagccataggttatcaatggtattggggctatgagtatcctgatgaaaatattatcttcgattcctacatgatagaagacaaagatcttaaaactaatcaaccaaggttattagcggtagataatgaagttgttgtaccagtaaataaagtagttaaagttttaattacagcaaatgatgttcttcatgcatgggcattaccttcttttggagtaaaaagagatgcagtaccaggaaggataaatgaaacttggttcaaagctgaaaaagttggaacttattacggtcagtgttctgagctttgtggaatcaaacatgcatttatgccaattacagtaagagttgtttctgaggaaaatatcaagaatggctaa

SEQ ID NO: 224717 - DNA, 790 bp, Unknown
  Bacterial polypeptide expressing nucleotide sequence isolated from the Sargasso Sea
aagaattaaattacctaaagaagaaatgagttactacgaagatcttgctgaaatgtatgtcggaactgatgtttctcctgatttttatggatgggtatttcctaaatatgatcatgttgctgtgggcactggaaccatgcaaaagaatcagtcattaattaaaggacttcaagagggtgtaagaaatagggcgaagaaaagacttgttaatggtgaagtaataaaggtagaagctcaccctattcctgagcatccaaggccaagaagagtagttgggagaatggcattggttggtgatgcagctggttatgttacaaaaagctctggagagggcatttattttgctgcaaaaagtggaagaatgtgtgctgaagaaattgttgaagcatcaaaaaacggtcaaataattccatcagaaaaagatttaaaaaactatcttaaaaaatgggataaaaaatatggcacaacttataaagtgctagaaatccttcaaaatattttctacagaaatgattctgcaagagaagcctttgtagagatgtgtgatgacatggatgtacaaagacttacttttgatagttacttatacaaaagagttgtcgccatgaaaccattacagcaacttaaaattacaatgcttacacttggttcgattttaagagggaaagccctagcacctctaaaatataaacccgttgatagtgctgttagggaaaataaagaagtagaaaaaatgttagaaaattattcaataaagggaggcattaaagttaagagttcaaaagtgtaa

SEQ ID NO: 224718 - DNA, 334 bp, Unknown
  Bacterial polypeptide expressing nucleotide sequence isolated from the Sargasso Sea
aatgtcatcaggagaaaaaaaacatgattaccacctagttgatcctagtccatggccaatattcacttcatttgcttgtttggttttagcaataggagcagtctattattttcacactaaagctttatggttgttactaatcggaacagcattgttaatatacggatctttcatgtggttcagagatgttgttgatgaggcagaaaaacaaggacatcatacaatggtagttcaaataactcacagatacggtatgacactttttatcgcttcagaagttatgttttttgtagcttggttctgggcattttttaatgcaagcttatttccaaca

SEQ ID NO: 224719 - DNA, 719 bp, Unknown
  Bacterial polypeptide expressing nucleotide sequence isolated from the Sargasso Sea
ccaagtcgctggcctatcgttggcaccttagcactatttgttgcctttattggcggaggcatggtgttaaatggttatattggtagcggccaatatgttctagctcttggtattttagcaatcatttatcttttttacggttggtttaaagatgttatagatgaaagtattgctggaaaatataatgaacaagttgatattagttttcgctggggtatggcctggtttattttttctgaagtaatgttttttgctgcattctttggtgcactattctatacacgagttctttcaattccttggctaggtttagaggagagtgttagtaatcagtttttgtggcccgattttcaagccgtttggcctttgttaacaacgccagatatgacaattgcggggcttgaatctaaatatatagctattaaggaggttattcctgcttgggatattcctgcgtggaatacagcaattcttttaaccagcggcgcaaccgtcacctttgcacattgggctttaaagaaaggaaatcgctccgcactctgttggtggttagcagctacggtgttgttgggtattatctttgtttatttgcaagttgctgagtatgggcatgcttatcatgaattagacctaacgcttaaatcaggggtctatggatcaactttctttatgttaacagggtttcatgggtttcatgtaaccatgggcgctacaatgct

SEQ ID NO: 224720 - DNA, 922 bp, Unknown
  Bacterial polypeptide expressing nucleotide sequence isolated from the Sargasso Sea
ttcatctttgccgcaactggtgctgccgtgggactgggtaacatctggcgctttccctatttaatgggatccaatggcggcagtgcttttctggttttgtacattatttttctctgcattctgggcctacccatcttaatgtcggaaattttaattggacgacacgcgcgccaaaactccatcgatgcgatgagctcgctcgcagtggctcatcggcattcaccgtcttggaaatgggtcagcatatggggggcactcgcgctcatcattgtattgtcattctacagcgtggtatccggatggagtattgcatatctatggcacagcatttcgattggcttccagcacactacccaaatgcaagccacacacacatggcaaaaattaatttccaacccttggcagttactgttgtggcacaccctctttatgtcactcaccatcggcgtcattattctcggcgtggaaaaaggcttagagcgcgccactaagtttatgatgcctgcactttatcttattctatttattttagttgctgttgctgcacacgtcgggcatttttcaaaagcttggcactatctgttccagtttgatacacgcgccatcacagtgaaaacggcagttagtgcactcggtcaagcatttttcactttagcaataggagccggcgccatgctcacctacggcgcgtatgctccacaaaaaacatctattccgttcacggtcagtgttgttgctgtttttgacgtgcttgtggcattattatcaggtctggccattttccctctggtatttgcctttcacctccccatcagctcaggccccaatctgatgtttgtaacgctaccgttggctttttcacatgttgcactgggtaatgtaatcgccatgctatttttcctgttacttttgttcgccgcct

SEQ ID NO: 224721 - DNA, 844 bp, Unknown
  Bacterial polypeptide expressing nucleotide sequence isolated from the Sargasso Sea
atggcagttgttgaacaagagcaagctccacttgaactagaatcaggcgaagatcaaattactgagcgtcccctcggagctttcacaaggcccggcggcggcggtggctggaaaagctggctcttcaccgttgaccataagaaaatcggcattatgtatggagcagctggcctgttgttcttcatcattggcggtatttatgctctgtttatgaggttgcagcttgctcgtcccggtaactctattctttcagctgaaacctacaatcaagtcttcactatgcatggagtcgtgatgatcttcctagctgcgattcccctaggtgcagcattttctaattatcttattccactccaaataggggctcgagatgttgcattcccaagacttaatgctttcagtttctgggtttttctaggtggtgggcttttcctactaacctccatgtttattgggggatggtgggagaacgctccggatggtggatggttcgcatactccccaaatacaggagtgctcttttccccaagtaagggcatagattttttcgcaattggacttcaaatcactggaatagcttccctcgttggtgctattaacctaatcgtgaccgtgcttaatatgcgttcacctggaatgacattgatgaagatgccagttcttacctggatgctattcatcgtgcagatgcttcttctgttcgcaatgccagttatttctgtggctttatttcttctcacatttgatcggttgtttggtgcgaacttcttcaatgtcgcacaaggcgccgatccattactctggcagcacctgttttggattttcggtcatccagaggtctaca

SEQ ID NO: 224722 - DNA, 454 bp, Unknown
  Bacterial polypeptide expressing nucleotide sequence isolated from the Sargasso Sea
tatgagctcagttatagaaaaccatcatgaagatcatcatcatggacctgctaaaggaataaccagatggttatatacgaccaatcataaggatataggaactttatatttatggtttagttttgcaatgttcttaattggcggagctatggcaatgattataagggctgaattattttcacctggaatgcaaatcgtagaaccagaattctataatcaaatgataaccttgcatggtttaataatgatatttggtggagttatgcctgcttttgttggattggctaattggctagttccaatgatgattggagcccctgatatggctcttccaagaatgaataatttaagtttttggatactcccttttgccttttttattttattatcatctttatttatggaaggtggcgctcctaattttggctggactttttacgcacctctttcaaca

SEQ ID NO: 224723 - DNA, 662 bp, Unknown
  Bacterial polypeptide expressing nucleotide sequence isolated from the Sargasso Sea
aatagcaatcagtgtttttgtgctatttttgatggtttatgcttgtataagatttagagcttcagcaaatccagttccatcgaaaagaacccataatgttgctgttgaagttttatggactttaattccatgtttaattctaatcgtgatggcggttccatcatttaaaattttatacaaacaagatgcaattccaaaggcagacataactgtaaaagctataggataccaatggtactggggatatgagtatccagacgaaaatattttcttcgactcttacatgatcgaaactaaagacttaaaagaaaatgagccaagacttttagctgtagataatgagttagttgttccagtaaacaaagttgttaaggtaatgatcactgcaaatgatgttttacatgcttgggcactcccttcatttggagtaaaacgtgacgctgttcctggaagaataaatgaaacttggtttaaagcagaaaaagtcggaacttattatggccaatgttctgaactgtgtggaattaaacacgcgtttatgcctattgaagtaagagttgttactgaagaagaatatcaagagtggttgttagacgctaaagtcaaatttgcaaaagaaattaatgaagaagatcaatttaaaaaactagtgagtaaataat

SEQ ID NO: 224724 - DNA, 442 bp, Unknown
  Bacterial polypeptide expressing nucleotide sequence isolated from the Sargasso Sea
ggatctgttggagaaacatctgttattgctatagctattgccgcagttattctattaggaacaggtgttgcatcttatagaataatattaggaacaatattaggaatgattttaatgtcgtcaatcttaaatattgtaggatcagatacaaatcctatgttttatgttccttggtactggcattttgtaattggcagttttgcatttggattagtttttatggctactgagccagtttcaggttcaggtacaaatcttggaagatggatatatggagctttgattggagtaactgttattttaattagggttatcaatccagcatttcctgaaggaatgatgttagcaatattatttgcaaatctttttgctccagtcattgatcatatggtcgtatccaataatatcgcaagacgcaagagggctttatcatatgaatgat

SEQ ID NO: 224725 - DNA, 301 bp, Unknown
  Bacterial polypeptide expressing nucleotide sequence isolated from the Sargasso Sea
aattatttaattccattttatgtaggtgctagagatatggcatttccaagattgaatgctgtagctttttggttaattcctccttcaggtttgatgctggtagcaagctattttgttgagggtgcagctcaggctggatggacggcttatcctcctttgagcataactactcctcaatcaggacaaattatttggattctgagcgttctattacttggaggcagttctatatttggtggaataaactttatcgcgaccattatcaaattaagaaggccaggattaaaacttagcaattgcc

SEQ ID NO: 224726 - DNA, 862 bp, Unknown
  Bacterial polypeptide expressing nucleotide sequence isolated from the Sargasso Sea
tacattgttgcattgcctgcatttggaatagtttctgacttaatatcagttcatgcaagaaaaaacatatttggttacagaatgatggtttgggcaattgtcggtattggaggtttaagtttcttcgtatgggctcaccacatgtacgttagtggaatgaacccttggtttggatttttctttgcaacgacaacattaattatagccgttccaaccgccatgaaagtttataattggatacttactttatggagaggaaatattagaattaatacagtaatgttatggtgcctaggatttatcgttacgtttgtaaatggaggaattactggaatatttttaggaaatgtatcagttgatgttccattatcagatacatactttgtaatagctcacttccatatggttatgggtattgctccattaatggtaattatgggtgcagtttatcactggttccctttagtagctggaaaaatgttacacgagggtttaggaaaatggcacttctggattactttcttgggagcatattcaatttatttcccaatgcattacttgggatttataggagttccaagaagatattttgaaatgtatgacagtccatatatgacatctgcagttggaatgaatgaatttataagtattgcagcatttatagttggtgcagcacagtttattttagttttcaatatcattaaaacattaaaaacaggtaaaaaagctgaacaaaatccttggaaagcaaattcacttgagtggtatacatctactgttccaccagagcacggtaactttggtgaaagacttccagttgttcatagatggccatatgattttagtgttccaaggagctaag

SEQ ID NO: 224727 - DNA, 448 bp, Unknown
  Bacterial polypeptide expressing nucleotide sequence isolated from the Sargasso Sea
atggaaatcataagatcattgaaagatatacaaccattgaaagaatcggttattactgttggaaattatgatggaattcatttaggacatcaagatattatcactcatatagttgaatttggcaaaaaacataatattccatcttgcgttattacatttgatccgaatccctattatgtgcttagaaatgaaaataaaccaatcaatatccaaagcgttgaatcaaaattaaattcattagaaaaaatgggtgttgataaagtgcttgttgttccttttacagaacagttttctaaggtaactgctgcagaatttgcaattaatattattaaagacatatttaatccaaaattaattgcagttggaactaatcatcattttggattcaacaaggaaggggatatagagtttattacggatttctgtgataaaaataatattgatcttt

SEQ ID NO: 224728 - DNA, 382 bp, Unknown
  Bacterial polypeptide expressing nucleotide sequence isolated from the Sargasso Sea
atgcttcaaagtaaattaatggctaacaaaaaaattgaaattatttgggatagtgttgttgaagaagttattggagatgatgatcctaaaaatgttaagggattaaaaattaaaaatgtaaaaacgaataaaattgatgaattaaaaattgatggattgtttattgcaattggacacgatcctgctactcaactatttaaagatcaattagatatggataaagagggctatttaacaacaaaatcagattcaacagagacaaatataccgggtgtttttgctgcaggagatgttaaagataaaatatttagacaagctgtaactgctgctggaatgggttgtatggctgctctagaagctgaaaaatttttatcgcactaaa

SEQ ID NO: 224729 - DNA, 709 bp, Unknown
  Bacterial polypeptide expressing nucleotide sequence isolated from the Sargasso Sea
agacattatatcatttcacagctatattttgatgcctattatcactggcatatcatttttagttcttggccttttgctatatatcatgttcagatttaacagcagccgtaatcaagttgcttccacaacaacacataacacaacaattgaaattttgtggactgtaattccagtaatattgttaattattatcgctattccatcttttagattactctatgtttctgaaacaataccaaaggcagatataacaattaaggctattggtaatcaatggtattggacttacgagtacccagattttgatgatatctcttttgatgccaacatgcttgctgatcatgaactatcagatccaaagttaagattgttagagactgatactcaaattgttgtaccggtggataaagtagtgaagcttcagttgacttcagcagatgtactgcacgcttggacaattccagcatttggcgtcaagatggatgctgtaccgggtagattaaatgaaacatggtttaaggctaataaagtaggaatttattatggccaatgctcagagctatgtggtccaaaacatgcatttatgcccattaatgtaaaagttgtatcaaataaagaatttgaagattggatcgaatttgctaaatctgagtatgcatcctcagagattaattatactgacgatacatttaaaatagctaaaaaataa

SEQ ID NO: 224730 - DNA, 677 bp, Unknown
  Bacterial polypeptide expressing nucleotide sequence isolated from the Sargasso Sea
ttgggggcgcacttcttggtctttgtcagggttatattattggtgcccaaaatttactggaaaatttttaaatgaaaaaatcggctatctacattttgcaattgtattaattggtttcaatttaacattctttccaatgcattggcttgggctagatggaatgccaagaagaattgctacataccctgaatctatgggttgggaggtatcaaaccttgttgctagcttaggaagctttattcttggttttggtgtactagtattcttatataatgtcttctactcaagtaaggggcctaagaatgctggaaacgatccatgggatggcagaacccttgagtggtcaataccttcgcctccacctcattataattttgaagttattcctgaagttaaatatagagatgacttttggtaccaaaaataccctgaattagctaataatagtcatggtggcggttcaggagccgaagaaaatcatggtagccatctagagggtcatgaagaacctcacatgcctgacccgtcgtattatcctttatttttaggtcttggaatgaccataatggttggaggctttttgccttttactggccactggattgtttgcggggttggattatttatttttacatggtcctttttaggatggtgttatgaacctgtaaacgattagg

SEQ ID NO: 224731 - DNA, 670 bp, Unknown
  Bacterial polypeptide expressing nucleotide sequence isolated from the Sargasso Sea
accaattataatagcaatcagcgtttttgtactatttttgatggtttatgcttgtataagatttagagcttcagcaaatccagttccatcaaaaagaacgcataatgttgctgttgaagttttatggactttgattccatgtttaattctaatcgtgatggcggttccatcatttaaaattttatataaacaagatgcaattcctaaggcggatataactgttaaagctataggttaccaatggtactggggatacgagtatccagatgaaaatattttcttcgactcttacatgatcgaaacaaaagacttaaaagaaaatgagccaagacttttagctgtagataatgaactggttgttccagtaaataaagttgttaaggtaatgattaccgccaatgatgttttgcatgcatgggcactcccttcatttggagtaaaacgagacgctgtgcctggaagaataaatgaaacttggtttaaagcagaaaaagttggaacttattatggtcaatgttctgaactgtgtggaattaaacacgcgtttatgccaattgaagttagagttgttactgaagaagaatatcaagaatggttgttagacgctaaagtcaaatttgcaaaagaaattaatgaagaagatcaatttaaaaaactagcgagtaaataa

SEQ ID NO: 224732 - DNA, 499 bp, Unknown
  Bacterial polypeptide expressing nucleotide sequence isolated from the Sargasso Sea
atggagggagaaggcgtcggccagcaagatgccacatcacccaccccatccaccaccgccgtttcgcaaggccgagagggcaaagtgtggcccagtcgaggtcgaggtgtcgctcaagctcgagggccaggtctgcgcaggactgggaggaggtggacaacatctttcgccaggagctggagacgcgcctcaagatgcagagggagttcttcgagcagaagattgcggactaccaggagcacgcgctcgcgaagcgcaaggagatggaggacaagatcgagagcctcgagcagaagctcatcttccagaaggggaagttcgagcgcaagttcaaagagcacgagggcaagaccgacaagaacattgccgataacatcgatgcgatcaactcttgggtgcagtgggcacacgatgtccagtcggtcctcaacgagaagactggcaaagccgatgtcgctgggatcaacgccaagatcgagctggtgcaggcccagatgaa

SEQ ID NO: 224733 - DNA, 214 bp, Unknown
  Bacterial polypeptide expressing nucleotide sequence isolated from the Sargasso Sea
atcgttacatttgtgaacggaggtataacaggaattttccttggaaatgtttcagtagacgtaccattatctgatacatactttgttgttgcgcattttcatatggtaatgggaattgcaccacttatggtaatcatgggtgcagtttatcattggtttccactagttgcaggaaggatgcttcacgaaggtttgggcaaatggcatttttgga

SEQ ID NO: 224734 - DNA, 448 bp, Unknown
  Bacterial polypeptide expressing nucleotide sequence isolated from the Sargasso Sea
attaaagtcataggccatcagtggtactgggagtatcaatacccagaacatgatgacatttcttttgagagttacatgacacctgatgaagaattagaaccaggtgacataagattattaacagtagataaccatctagttttaccagcaaataaaaatattcacgtattagttactgccggtgatgtgcttcatagttttgctatgccctcattaggtgtaaaaaaagatgcggttcctggaagacttaacgaaacatggttcaatatagatgagccaggaatatatagaggtcaatgttccgaattatgtggaacaggtcatgggtacatgcccattgttatagaagcacttaatgaaaaagattttaataattggataattgaacaaaaaagtaagttagcattagcaaacgaaataactactaaagagaatacaatagaatagg

SEQ ID NO: 224735 - DNA, 693 bp, Unknown
  Bacterial polypeptide expressing nucleotide sequence isolated from the Sargasso Sea
attttcatgataagttgttgttaccaatcataattgcaatcagtgtttttgttctatttttaatggtttatgcttgtataagatttagagcttcagcaaatccagtaccttctaaaagaactcataatgttgctgttgaagttttatggactttaattccatgtttaattctgatcgtaatggcagttccatcatttaaaattttatacaaacaagatgcaattccaaaagcagacataactgtaaaagctataggatatcaatggtactggggatacgagtatccagatgaaaatattttctttgactcttacatgattgaaactaaagacttaaaagaaaacgaaccaagattgttagctgtagataatgaattagttgttccagtaaataaagttgttaaggtaatgattacagccaatgatgttttgcatgcatgggcactcccttcgtttggagtaaaacgagacgctgtacctggaagaataaatgaaacatggtttaaagcagaaaaagttggaacttattatggtcaatgttctgaactgtgtggaattaaacacgcgtttatgccaattgaagttaaagttgttactgaggaagaatatcaagagtggttgttagacgctaaagtcaaatttgcaaaagaaattaatgaagaagatcaatttaaaaaactagcgagtaaataat

SEQ ID NO: 224736 - DNA, 441 bp, Unknown
  Bacterial polypeptide expressing nucleotide sequence isolated from the Sargasso Sea
aatttgcttctaaagtaaaacttattcatagaagaaatgcattaagagctgaaaaaatgctccaagaaaaattgaaaagaaataataaaattgaaattatttgggacagtgtagtggaggatgtgattggtcaagataatccaaaagaagttaatgcgattaaaataaaaaatgttaaaaataataaaataacagagttaaaagttaatggattatttatagctataggacacgatccagcgacatctttgtttaaaaatcaattaaaaatggacaaagaaggatatctaataacaaaagcggactcgacagaaacaaatatacctggggtttttgcagctggagatgttaaagataaaatttttagacaagctgtgacggccgcaggcatgggatgtatggctgctctagaggcagaaaaacacttgtctcatttataaa

SEQ ID NO: 224737 - DNA, 451 bp, Unknown
  Bacterial polypeptide expressing nucleotide sequence isolated from the Sargasso Sea
aatgtcatcaggagaaaaaaagcatgattaccacttagttgaccctagtccatggccaatatttacctcttttgcttgcttggttttagcattaggagcagtttattattttcacactaaagctttgtggctcttattaattggaacagcattattaatatatggatctttcatgtggttcagagatgttgttgatgaagctgaaaaacaaggtcaccacacaatggtggttcagataactcacagatatggtatgacactttttattgcttcagaagtaatgttttttgttgcttggttctgggcattttttaatgcaagcttatttccaacagaagctatcgggaaaatatggcccccagcagatattaaaacttttgacccatgggatataccattgataaatacattaatcttattattgtcaggaacgacagtaacctgggcacac

SEQ ID NO: 224738 - DNA, 756 bp, Unknown
  Bacterial polypeptide expressing nucleotide sequence isolated from the Sargasso Sea
aatttctaattgaaacagaaaataactttcctacttcctgtgggctagccagctcttcaagcgggatggcggctttaactctagctctttgcgctgctgtaagtcaaagttcatcactcaatgaattagaaaaaaagggatactcgagaaaaaaaatctctgacctcgccagaaaaggatctggaagtgcttgccgaagtctttggggtggttttgtttgttggatgaaaatgaatagccacataaagcaatatgcagcacaaatagaagaaagttcaaactggcctatagaacattgtgtgctcattttatcagacgaagtaaaaaaagtgagctcaactcttggacattcttcttcttggacgagccctttatttaagccccgacttgaaattattccttatcgtatagaaaaaatgaaagcagctattaaagaaaaaaacttaacaaaacttggcgaacttatggaagaagactgccttgaaatgcatgcggtagctatgagctcttctccccctcttttctactttcaaaaagaaacatctgctgttcttgcatggctcagaaaaaaaagaaaagaaaacggactgagagcttatttcacactcgatgctggaccaaacattcacttaattggagaaaaagaatcactagaaaaaattaaaaaagatgtagccctctttaatccaaaaattcgagttttaaaaagtcaacttggaaaagggccatctctaaaagcttatccctcttcataaa

SEQ ID NO: 224739 - DNA, 779 bp, Unknown
  Bacterial polypeptide expressing nucleotide sequence isolated from the Sargasso Sea
tatcggtgggttaagcggagtatcacatgctgttgctcttagtgactaccaacaacaggacacatactacatcattgctcatttgcattatgtgttgtttggaggagctattttaggtatattctcagggatttatttctggttccctaaagtgacaggcaaacttttgagcgaaaaattaggaaagcttcatttttggataactttcgtgggactgaatttgactttcttccctatgcactatcttggtatgaatggaatgcctagacgaatttatacttatgcgactgaatttggttgggataacttgaacgcgctttcctcttttggatatatagtcttgtttgtttcgatgttgatatttgtatataacataattaaaagttataagtcaggcgaagaagcgggtcacgatccgtgggatgcaccaggcctagaatggactatcacttcacctccgcctgtatataatttctcagaattacctgttgtagaagggagagacccatactggattgttaaaagacgggctgtagcagaagggaaagagataccagggcctcagcctttagtggatccttccactgtgcatcttccagacccgtcatattggccaattttcacatctgtagcactgttgattttggctatcggttttatgattgagattcctgtttggtttgttaaatatcctatatccgtggtaggaggcctgctggtattcgtaggtgttctcgcgtggagtaacgaacctccaactaaagaaaaggatcactaga

SEQ ID NO: 224740 - DNA, 808 bp, Unknown
  Bacterial polypeptide expressing nucleotide sequence isolated from the Sargasso Sea
tatacacttttattatatggccctgctaatcttttagccaatgaaccaaaagattggcaattaggttttcaaaagtcagcatctaaaagcatggatgatatagtctggttccatgattacatgttggtgccaataattacagctattactgcttttgttttatttttactattatacgtgtgtataagatatcgagcttcaaaaaaccaagttccatcaacaacaagccataatactttaattgaggttatttggacgcttgtcccatgtttaattttaattgttatggcagttccctcttttaaagttttatattctcaagatgaaattcccaaggctgatgttacaataaaagcaatcggatatcagtggtattggggttatgaatacccagatgaaaatataatttttgactcatatatggttgatgaaaaagacctgaaagaaaatcaaccaagattattagcagttgataatgctgtttacgtaccagtgaacaaggtagtaaaagtaatgataacagctaacgatgttttacatgcgtgggccttaccatcttttggtgttaaaagagatgctattccaggaagaataaacgagacatggtttaaagcagatcgaactggaaccttctatggtcagtgttctgaattatgtggaattaaacacgcattcatgccaatcacggtgaatgttgtatcagagaatgaatataataaatggttggaagaagctaaagttaaatttgccaaagaagaaattaataataaaattaaagtagcgaaaaaaattgaggagataaaataat

SEQ ID NO: 224741 - DNA, 583 bp, Unknown
  Bacterial polypeptide expressing nucleotide sequence isolated from the Sargasso Sea
catgagtgaattggcagggcaccacgaagagcatcacgaccacaatccgagtggggttatgcgttggttgacaacgactaatcacaaagatatcgggacactttatttatttttcgctctaatcatgtttttcattggtggggcgatggccatgatcattcgtctcgaattattcgaaccgggtttgcagtttgtagatccgcaattttttaattcaatgactacgatgcacgctctgattatgatcttcggcgcggtcatgcctgcatggactggtttcgcgaactggcttatacctataatgatcggtgctccggatatggcgttgccgcgattgaataattggagtttttggatactcccatttgcttttactctgttattaggaacgctattcttgccggggggtgccccagccggtggatggaccatgtacccacccctcgtgcttcaaacaggggacgcattcccttttctaatattcgcggtccatttcatgggggcttcttctattgcaggggctataaatgtaatagtgacagtttttaacatgcgacccccgggtatgactcttatgaaattg

SEQ ID NO: 224742 - DNA, 520 bp, Unknown
  Bacterial polypeptide expressing nucleotide sequence isolated from the Sargasso Sea
tttttcttaaaagataaaacagtagctgttgtaggtggtggaaatgctgccgtggaagaagctatgtttcttacaaaatttgcaacaaaagtacaattaattcatagaagaaattctttaagagctgaaaaattacttcaaaaaaagttaattgaaaacaaaaagatagaaattatttgggatagcgttgttgaagaggtaattggagatgatgagccgaaaaatgtaaaaggattaaaaattaaaaatgtaaaaacagatgatattaaagaactaaaaatagatggcctttttattgctattgggcatgacccagcaacacaattattcaaagatcaattaagtatggataaagaaggttatttgataactaaaccagactccactgaaacaaatataccaggagtatttgctgctggcgatgtaaaagacaaaattttcagacaagctgtaactgctgcgggaatgggttgtatgtctgctctagaggctgagaaatttttgtcttcttcaaattaat

SEQ ID NO: 224743 - DNA, 565 bp, Unknown
  Bacterial polypeptide expressing nucleotide sequence isolated from the Sargasso Sea
atggcacatgaaaaaaatcacgattaccatattcttaatccgagtttgtggccgtttttaagtgcacttggggcgtttatacttctctttggaagtgtgctgttcatgcatggaggtagtgtttttatcgcagcattgggtcttctagtggttttatactgcatgttcgcctggtggtcagatgtagtttttgaaagtaaggatggtgaccatacaccagttgttcagataggtttgagatatggtgtgatcatgtttattacatccgaagtaatgttctttctagcttggttctggactttttttaaacatgccctttatcctatggaggccgtgggtggtgtttggccgccgacaggaattgagacctttgatccttggcatcttcctttaataaacaccttaattctactttgctcaggtgcagcagcaacatgggcccaccacgcaattgcgcatgagaatgataggaaaggtttggaaaatggcttgatactggcaattgggctaggcgctcttttcacggtatttcaaatatatgaatatacgcacgcttcgttctcct

SEQ ID NO: 224744 - DNA, 502 bp, Unknown
  Bacterial polypeptide expressing nucleotide sequence isolated from the Sargasso Sea
atggcacacgatacacatcaccaccataaagaaagtttctttacgaagtatatttttagtcaagatcataagatgattggtaagcagtatttactgactgccatttttatgggagcaatcggtataactttatctgccttgtttagaatgaaattaggatggcctgacacgcagttttcaattttagaatctattttaggatcagacgctgcacctgatggtatgttagattcaaattggtatttaggacttgttacgctgcatggcactattatggtattctttgtattaactggtggtttatctggaacattctctaatcttctaattcctttgcaagtaggagcaagagatatggcttcagggctgatgaacatgattgcttactggttatttttcttatctagtgtattgatggctgcatcactttttattgagacagggcctgccatggctggctggaccgtttatccacccttgagtgttctgaagaattcaacca

SEQ ID NO: 224745 - DNA, 473 bp, Unknown
  Bacterial polypeptide expressing nucleotide sequence isolated from the Sargasso Sea
aatggttgatttagtattcaaagactcagaaaagaaacataaattccaccttgtaaatccaagtccttggcctatcgttggtgccttttcagctctttttttagtttcaggtgctattttatatatgcactatgagatgatatggccaatgctagctggtctttttttaatactttttactatgttcatgtggtggagagatatcatcaaagagagtactttcttaaaagttcataattcaattacggagattggtctcaggtgggggatggctctatttatcacctcagaagttatgttttttgtcgcttttttttgggctttttttgatgcaagtctattgcctaaaacatttttagctgaatacaaagaagtttttacaggcacgcttggaataggagtttggcctccaaaaggaattgaaacttttgatccattagacattccatatttaaatactttaattttgcttc

SEQ ID NO: 224746 - DNA, 572 bp, Unknown
  Bacterial polypeptide expressing nucleotide sequence isolated from the Sargasso Sea
tatgtctgaattttctaaagagctacttgttactgctgaattttgccaatcacaggatattgatgtattcgccaaacatgttcccatggattgggtggctgaggctgtgcaacaaactggcagggcatcacttcgaacccgtcgtttccctgcagagcaagctgtttggttggttctaggcattggtttgatgcgtaaccgctcgattcagcaagtctgtgatacgctctcactggcctttcccgatgccaagggggagctcccgccactggcgactagtagcatcatcaaagccaaagaaaagttgggttcagagcccatgcgttatctgttcaaaacaaccgctgcacagtgggaaacacagtgtgaatttgatgagatagcgggattgaaattgctcagtgttgatgggacgtattttaagacgcataacactgaagaaaaccatcactttggctttgcacaaagcacggcttcttttccctctgtgctggcggtcaccttaatgtctactcgtagccacttactttctgatgcggctttcgggcctgttacccacagtgaaattcact

SEQ ID NO: 224747 - DNA, 526 bp, Unknown
  Bacterial polypeptide expressing nucleotide sequence isolated from the Sargasso Sea
tgtgatggatttttctttaaggataaaacagtagctgttgttggaggaggaaacgctgcagttgaagaagctatgtttcttacaaaatttgcctcaaaagtacaattaattcatagaagagattccttaagagctgaaaaaatgcttcaaaataaattaatgtctaacaaaaaaattgaaatcatatgggatagtgttgttgaagaagtgatgggtaatgataagccaaaaaatgttaagggattaaaaattaaaaatgtaaagacaaatgaaataaaagaattaaaaattgatggactttttatagcaattggccatgatcctgcaactcaattgtttaaggatcaattagatatggataaagagggttatttaacaacaaagcctgactctacagaaactaatataccaggaatttttgcagcaggagatgtaaaagataaagtttttagacaagctgttacagctgcagggatggggtgtatggctgcacttgaagcagaaaaacacctatcctcgaaatgag

SEQ ID NO: 224748 - DNA, 292 bp, Unknown
  Bacterial polypeptide expressing nucleotide sequence isolated from the Sargasso Sea
atgttaggtgcggtatttttagcaggacaaatttacgaatttacagagttttaccataaaggttttgagctttctacaaatattttcagttcaactttttatgttcttactggttttcacggacttcatgtattcattggcgtggtcctcctccttgctctttggggtattggacaaagacaaaaaggccttactttagagggtgggatgaatcttgagtttgtagccctttactggcattttgttgatattgtctggatagtattgtttacagtagtttatttaatttaaa

SEQ ID NO: 224749 - DNA, 425 bp, Unknown
  Bacterial polypeptide expressing nucleotide sequence isolated from the Sargasso Sea
gggatatgaatatccagatgaaaatattatttttgactcatacatgatagaagaaaaagatttacaagccggccaaccaagattgctagcagtagataatgttgtagttgttccagtcaataaagtagtgaaagttttaataacggctaacgatgttttgcatgcttgggcactcccagcatttggggttaaaagagatgcaatgccaggtcgtataaatgaaacatggtttaaagcggaaagagaaggaacattctatggacaatgctcggaactttgtggaattaaacatgcatttatgccaattgaagttagagtagtttctgatgaagagtatcagttatggcttgatgaagcaaaaataaaatttgcaaaagatgaaatttttgaaaataataaattaatagcgagcaataaacaatgag

SEQ ID NO: 224750 - DNA, 622 bp, Unknown
  Bacterial polypeptide expressing nucleotide sequence isolated from the Sargasso Sea
attcaagaagtaacaaaagaaatagctgaactagaaaaattaaaaaaaccagaaggtgccttggtagctagtgtttctgaaaaaagcccagcagataaagccggaataaaagctggagatattattttagaatttgatgggaaaaaagttgataccatgagaactcttccaaaattagttgcccaaacaaaagtaggaaaaagtgttacgctgaaaatttggagaagtcaaaaactaatttcaaaaaaagttttattaggaagattagagtcttcaaaagaattcaaagcggaaaataaagttgagacagatacgagtaaacacttagatatagagagtttaaagatttcgattagaaatttaaataaagaagatattgttgagcggaagctcccaaaaaatacaactggagtagtagtgacaaaaatatatgaaggcagtccattaatgtttgttggtgttaacgatattattgttgaactacaaaaaaaaagagttattaatccaaatcaattttctaatttaattaaagaaattattaacaaaggtgataaaactttatatttagcaatttataattcaagcaatcaaagatcttatttaacagtaaaattgaaataaa

SEQ ID NO: 224751 - DNA, 370 bp, Unknown
  Bacterial polypeptide expressing nucleotide sequence isolated from the Sargasso Sea
gctgtttattattgtgattccaaaatggacaggcaatatgtacgatgaaagacttggaagactgcatttttggctctcatttattggagtaaatgtaaccttcttccctcagcattttattggtcttgctggaatgcctagaagatatcctgactatgctcttcaatttgctgactggaatatggtatcaagcgtaggagcgtttttgtttggattttctcagttactgttcttattcatagtacttaaaacagtgatgggtggcaaaaaagctactggccaagtatgggaaggtgctaaaggcttggaatggtctgtagcatcaccagctccttatcataccttttcaactccacctaaagtagattaa

SEQ ID NO: 224752 - DNA, 421 bp, Unknown
  Bacterial polypeptide expressing nucleotide sequence isolated from the Sargasso Sea
tttcactatgttctagtgcctggggcactgtttggaataatagcaggagcttactattggttgcctaaatggacaggtaacatgtatgacgaaactttaggaaaattacatttctggttaacatttatatctgtaaacgttacattcttcccaatgcattttgttggattagctggaatgcctagaagatatcctgactatgcacttcagtttgctgattttaatgctctgataagtgtcggtgcttttatgtttggtttaacccagcttttattcctctttatagtcatcaaaacaatcagatctggtaaacaagcaaaaccagaggtttgggaaggtgcaggagatttaggtttagagtggacgttaacttcacctccaccttatcattcgttcacagttcaaccgcaagtaaagtagt

SEQ ID NO: 224753 - DNA, 493 bp, Unknown
  Bacterial polypeptide expressing nucleotide sequence isolated from the Sargasso Sea
atggtttctgaaacaataccaaaggcagatataacaattaaggctataggcaatcaatggtattggacttacgagtacccagattttgatgacatctcgtttgatgccaacatgctagctgatcatgagctttcagatccaaagttaagattattggagacagatactcaaattgttgtaccagtagataaagtagtgaagttacagttgacttcggcagatgtgcttcacgcttggacaattccagcatttggtgtcaagatggatgctgtaccgggcagattaaatgaaacatggtttaaagctaacaaagagggaatttattacggccaatgctcagagctttgtggtccaaaacatgcatttatgcccattaatgtaaaagttgtatcaaataaagaatttgaagaatggatcgaatttgctaaatctgagtatgcatccttagatataaattatactaacgatacatttgaaatggctaaaaaataaa

SEQ ID NO: 224754 - DNA, 885 bp, Unknown
  Bacterial polypeptide expressing nucleotide sequence isolated from the Sargasso Sea
ggagctcccgccactggcgactagtagcatcatcaaagccaaagaaaagttgggttcagagcccatgcgttatctgttcaaaacaaccgctgcacagtgggaaacacagtgtgaatttgatgagatagcgggattgaaattgctcagtgttgatgggacgtattttaagacgcataacactgaagaaaaccatcactttggctttgcacaaagcacggcttcttttccctctgtgctggctgtcaccttaatgtctactcgtagccacttactttctgatgcggctttcgggcctgttacccacagtgaaattcactacgcacagcaattggttggctcagctcccgagcattcgctcacgttgtttgaccgtgggtttatgtctgccgaattgctcatcagctggcaaggaagcgggactaacacctattggttaaccccgataaagtctaagacccgctatagaattatcgagtcattctcagagtatgaccatctggttgagatgccgatatcaccccaagctaaacaacaagcgccttatctgggggagagctggcaagcccgccttatccttattccatcacccaaaggtgatatcaaagggtttatcacgtcctgcctatgtcccgacacttatccagtgaacgatttgctcaaggtgtattggcagcgatgggagatagagaggggttatggtgagctgaagcaatatcaattggaaaacaaacccgtcctgcgcagtaagaagaaggatggggtgtatcaagaattatgggggatcttgacgacctacaatattgtgcggctagagatggctgccatggcagtgcagcatcaagttgagccacagagaataagtttcattaatgccctgtttttaat

SEQ ID NO: 224755 - DNA, 382 bp, Unknown
  Bacterial polypeptide expressing nucleotide sequence isolated from the Sargasso Sea
cgccccagccgagccctactcaagctgcaacggctgttcgatcgccatgccttctgggcccgcggccgcagcttcggacagttgcggcgattgctggccggcagcgatgccgtggtgagcctctggcgtggcaaacgactggtgggctttggccgtgccagctccgatggcttcagccgggccgtgctgtgggacatcgtcgtggccggtgatctgcagggccatggcctgggccgccgcgtaatcgaagaactgctccatgccccgccggtggtcggcgtggaacgggtgtatctgatgaccactaacagtgccggtttttaccaccaactgggcttccaggatgcctcgccccagcagctgatggtgctgcgccgatgac

SEQ ID NO: 224756 - DNA, 744 bp, Unknown
  Bacterial polypeptide expressing nucleotide sequence isolated from the Sargasso Sea
atgaatccatggtttggatttttctttgccacaacaactctaattattgccgttccaactgcaataaaagtttataactgggttcttactttatggagaggaaatattaaattgactcttccaatgttattctcaattgcctttattattactttcgttaatggaggtttgactggactgtttttagggaatgttgccgttgatgtaccattgtctgatacttattttgtagtagctcattttcacatggttatgggtatagcacctgtacttgtaatcttaggatcagtatatcattggtttcctcttataactggtcgttttcttaatgaaagacttggtagaattcacttttgggtaacgtttattggatcgtattcaatatattttccaatgcattacctaggctttatgggagttactagaagatattttgaagtttttgaaggtgaagcttttacatattcaattacaggaattaatcagtttataactattgcagcactaattactggagcggtccagttcttattcatatacaatattatagttagttctaaatttggcaaaaaagctggtaaaaatccttggaaggcatgctctttggaatggagaacaaaagatgttcctccaactcatggaaattttgataaggaattacctgttgtttatcgatgggcatatgattacagtgttccaggtgctgatgaggattatattactcaagatacacctccaagcgcg

SEQ ID NO: 224757 - DNA, 424 bp, Unknown
  Bacterial polypeptide expressing nucleotide sequence isolated from the Sargasso Sea
gctgcatgcagtggcctctaaaggtggcaaggaagcagaggcagccgtagcagcaatcacagcagcagcggcggcgaaaacggccgaagcggcggagcaagctgtcgatgaccgttcgctcgcgcagctgatgctggaccagatcgaatttgccaacgtgattgttgtcagtaaggttccgctctttttgagtcaacacagcgacggcgacgttgatggagagaaaaagctcggaatgatcgagggactgctgcaaaagctgaacccaaaggcgagggtgatcgcacctcgcatcgaaaattacggcgatctagaggttgcagctactctgatgaacaccggcatgtttaacatgcaagaggcgcagatgtcggcaggctggatacaggagctggcccaaggacaccacacgccagagacggaa

SEQ ID NO: 224758 - DNA, 700 bp, Unknown
  Bacterial polypeptide expressing nucleotide sequence isolated from the Sargasso Sea
tatatgttattgccaattatcactgctatcactgcttttgttctttttttagtaatttatgcttgtataaagtttagagcttcaaataataaagttgcgtcgcaaacaagtcacaatacaataatcgaggtaatctggacattggttccatgttttattctaatcgttatggctgtgccatcattcaaagttttatactcccaagataagataccaccagctgatgttactgtaaaagcaatcggttaccaatggtattggggttacgagtatccagatgaaaatattatttttgactcttacatgatagaagagaaagatctaaaagccaaccagccaagattgcttagtgtagacaatgaagttgttgttcctgtgaacaaaaatataaaagttttgataacagcaaacgatgttttacatgcttgggctctaccctcatttggagttaaaagagatgctgttccgggtagaataaacgaaacttggtttcgagcagatagaactggaacgttctacggacagtgctcagaactatgtggcatcaaacatgcattcatgcctataactgtaaaagttgtaactgaggaagaatataaaaaatggttaattgaagccaaacaaaagtttgcaaaagaagttattgaaaaagatttcaaaattgctaaaaaaattgctaaagaaaaggatttaaaataat

SEQ ID NO: 224759 - DNA, 444 bp, Unknown
  Bacterial polypeptide expressing nucleotide sequence isolated from the Sargasso Sea
catggaggaagcccacgtagaaacaagccgatataatagaaaggactggagtcattggatagatgacgatggcgactgccaaaatacaagggcagaagtattgatatcgcaatcagatgtcagggtagaattcgcgacttccagacagtgccgagtagtgaaaggttattggataggcggactcactggaattgtcctctcagacgcatcagatgtagatatagatcacgtaattccgcttagctatgctcataggcatggtggcttttcttggacgccatcaaaaaaagaacaatttgcaaacgatccgctaaacctcattcccgcatatgaccttgagaataggaggaaatccgacaaaggtccatctgaatatctgccatcagataaaaccttagcttgcgcttatcttgaacgatggcaagccattgcaaacaaagtatg

SEQ ID NO: 224760 - DNA, 718 bp, Unknown
  Bacterial polypeptide expressing nucleotide sequence isolated from the Sargasso Sea
atgaaaaaaattttttacatatttttaggaatttttacatcgcaaaatgcttttgccaatcaacctgttgactggcagttaggttttcaaaaagctgcatcagagtctatgagagaaattgttgcttttcatgacaaacttttattaccaattattattgcaataagtgtattcgttttatttttaatgctttatgcatgtgtaagatttagagcatcagcaaatccaaatccttcaaaaagaacacacaatgtaacagtggaagttttgtggacattaattccttgtttaattttaattataatggcagtcccttcatttaaaattttatataaacaagacacaataccaaaagcagatttaacaatcaaagctattggttatcagtggtactggggatacgagtatccagatgaaaatattatttttgattcttacatgatcgaagaaaaagatttaaaagcaaaccaaccaagattattagcagtagataatgaagtggtagttccagttgataaagttgtaaaagttttaattactgcaaatgatgttttgcatgcttgggctttaccatcatttggggtaaaaagagatgcagttcctggaagaattaatgaaacttggtttaaagcagaaaaagttggaacttattatggccagtgctcagaactttgtggaattaaacatgcatttatgccgatcacagttagagtagtaa

SEQ ID NO: 224761 - DNA, 652 bp, Unknown
  Bacterial polypeptide expressing nucleotide sequence isolated from the Sargasso Sea
atgattaaaaaaattgcttatacacttttcttaacctggccaacagcgcttttagctaatgagccaaaggattggcaactaggtttccaaaaatcagcatcaaagagtatggatgatattgtctggtttcacgattacatgcttgtaccaataattacagctatcactgcatttgttttatttttacttttgtatgtttgtgttagatacagagcttctaagaatcaagttccatctactacaagtcataacacattaattgaggttatttggacattagttccttgtttaattttgatcgttatggcagttccttcatttaaagttttatattcacaagatgaaattcccaaagcagacgttactatcaaagctataggatatcagtggtattggggttatgagtacccagatgaaaatataatcttcgactcttatatgattgatgaaaaagatttgaaagaaaatcaacctagattattagcggttgacaatgcggtttacgttccagtcaacaaagttgtaaaggttatgataaccgcaaatgatgttttacatgcatgggcactaccatctttcggggttaaaagagatgcaattcctggaagaataaatgaaacatggtttaaagctgatcgaactggaacttttt

SEQ ID NO: 224762 - DNA, 151 bp, Unknown
  Bacterial polypeptide expressing nucleotide sequence isolated from the Sargasso Sea
cttgcgggaatgccaagaagatatgctgactatccagatgcttttgcaggatggaattacatttcttcaattggttcttatatttctgtaattggattagtagtatttcttataaaacgcataagcaaggtttataaaaaatactactaat

SEQ ID NO: 224763 - DNA, 436 bp, Unknown
  Bacterial polypeptide expressing nucleotide sequence isolated from the Sargasso Sea
atggtaagcacagcagcagacctgcacgacaaacacgacgagcatcacggcccggccaagggtatcggccgctggttgttcacgacgaatcacaaggacatcggtacgctgtacctgattttcagcctcgtgatgttcttcatcggcggcgcaatggcgctcgtaattcgttccgagctcgcacagcccgggctgcagttcgttcaccccgagttcttcaactcgatgacgacgatgcacgcgctgatcatggtctttggcgctgtcatgccggccttcgtcggcctcgccaactggatgatcccgatgcagatcggcgcgccggacatggcgttgccgcgcatgaacaactggtcgttctggatcctgcccgtcgcgttcggcatcctgctgtcgacgctgttcctgccgggcggtgcgccggccagcggctgac

SEQ ID NO: 224764 - DNA, 869 bp, Unknown
  Bacterial polypeptide expressing nucleotide sequence isolated from the Sargasso Sea
aatgtggattggggctgtatattttgttccaatctatgcggtaacatttgctgttggtatcctttgggaaatactctttgctgtggttcgtaagcatgaaattaatgagggtttatttgtttcatcaattttattcgctttaagttgccctccagatcttcctctatggcaagctgcaatgggaataacttttggaatcgttattggtaaggaagtttttggtggtaccggtaaaaatttcttaaaccctgctttaactggccgagcattcctctattttgcttatccatcacaactttctggtgataaggtatggatagctggcctttctgacactggcataattcctgaaggctttagtggagcaacgccacttggatatgctgcagaaggtggtttgcaagggttaactgataatttttcatggtttgatgcattcttaggaaatatccctggatctgttggtgaaacttctgttattgcaattggtattgctgcggtaatacttttagcaactggcgttgcctcgtatagaattatcttaggtacatttttaggaatgatagtgatgacatcaattttaaacattgttggatcagatactaatcctatgtttcaagttccatggtattggcattttgttataggtagctttgcatttgggctagtttttatggcaactgaaccagtctccggctcaggaactaatgctggtagatggatttatggggctttgattggtgttactgtagtattaattcgagtcatcaatccggcgttcccagaaggcatgatgttagcaattttatttgctaatctatttgctcctgtaatcgatcacatggttgtatcaaataatattgcaaaac

SEQ ID NO: 224765 - DNA, 916 bp, Unknown
  Bacterial polypeptide expressing nucleotide sequence isolated from the Sargasso Sea
gtacatgtttactggtttgatcatggcggcattggcggatatttcgcttatgccttccggatgcaactggcgtggcctggagaggaagtaccgttttatggcctggtcgatgcggctaaatataacatgctggtcactaaccacgggacgatcatgattttctgggttgctatgccggtcctgatagcggcattcggcaactggatgattcccttgatgatcggttgtgatgatatggtttttccaagactcaaccgtctgtcttaccaggtatttctggtaagtgctttggttttgatcctttccttttttgttgaaggtggtggcttcggaggtgcgtggacctcttatcctccattatctgcagctgcagagtataacctgaccaactggggggcatctttgtggcttcttgctgtttttcttgaaatcgtggctttcttactcggtgggattaatttcatcaccaccaccatgaatgcgcgtgctcctggaatggggatgatggatattccgatcgtcatttggatgatcaacattgctgtgatcctttttatggcctccgttggtcctttggtagcaggagcagtgatgctcttttttgaccagcgtctaggaacatctttttttctgccctcaggtggtggagatccattactttgggagcatctgttctggtttttcggacatcctgaagtttatgtggttctattaccaaccatgggtatcgtagctgaaatcataaccgttttttccaggaagaaactgtttggatatcgcaccattctctacaccgcatttggaaccggaggactttccttcatcgtatgggcccatcaccagtttgttgccgggatcgatcccagaatggcgaacgtgtttgtggtaaccaccattttgatctcaattccaattg

SEQ ID NO: 224766 - DNA, 981 bp, Unknown
  Bacterial polypeptide expressing nucleotide sequence isolated from the Sargasso Sea
gctgctctggaaggacacgccgaatgcgtgcggctactgtgcggcgcgggcgcgtgggtggacctggcccgcaacaacggtgctacgccgctgctcagggctgcatcgaagggccacgccgagtgcgtgcggctgctgtgcggcgcgggcgcgtcggtggacctggccgacagcgagggcgccacgccgctgctgatggctgcatcgaggggccacgccgagtgcgtgcggctgctgtgcggcgcaggcgcgtcggcagatctggactccggcagatctggcggtgttacgccactgcttattgctgcatcgaggggccacgccgagagcgtgcaggcgctgtgcgacgcgggcgcgtccgtggatctggccgaccacaacggcttcacaccgctgcgcatggctgcatcgaagggccacgccgactgcgtgcaggtgctgtgcggggcgggtgcgtccgttgaccgggcccgcagcgacggaaaaacgccgctgctcgcggctgcgcatcacggccacgctgagtgcgtgcaagtgctgtcttcctacggcgctgcgcgagtgtcggatgcgatgcagacgaatgccgaggcggttgtaccggagcgtaaccacgtgcaggtgctcgcgtggctgcagagcagccgcgcctggacagccctccatcacgtcgaggttctgactgccgcgcgcgcacgcgagctgctgcgcggtggtgcggatttgcacgcgggctctccttcgccactcgagcgtgcgcgcgctgtggagggtgaggcgagcgcaatcattcaccgcgcggccgtgtggtcgccagaagcgcacgatctcttcccgcctgcggcgcgcgcgcgagctgtgcgcctgctgcagctcggctatttgctcgcatggtcgggccacgatatgctgcggaggcgggatcgcttgtcgatgcgtgggtccgcttcgtcctgccgcatgccatcgtgcgaggctcgg

SEQ ID NO: 224767 - DNA, 367 bp, Unknown
  Bacterial polypeptide expressing nucleotide sequence isolated from the Sargasso Sea
aaagataatcagccaagattattagctgttgataacgcagtttatgttcctgtaaacaaagttgtaaaagttatgataacagcaaatgatgtattgcatgcctgggcccttccttcttttggcgtcaaaagagatgccattcccggaagaataaatgagacttggtttaaagcagatcgtactggaacattctatggacaatgttctgagctatgtggaataaaacacgcgtttatgccaatcacagtacatgtagtatctgaagatgattacaataagtggttagaggaagctaaagttaaatttgccaaagaggaaattaataataatataaaaatagcaaaaaaaattaaggagataaaataat

SEQ ID NO: 224768 - DNA, 487 bp, Unknown
  Bacterial polypeptide expressing nucleotide sequence isolated from the Sargasso Sea
aggtggaggaaatgccgccgttgaagaggcaatgtttcttactaaatttgcctcaaaggtttatttaatacataggagaaacgaacttagggcagaaaaaatgcttcaatcaaaattaaaatctaataagaaaatagaaattatttgggatacagtagttgaggatgttattggtactaaagagccaaaaactgtaaatgcactaaaaattaaaaatgtaaaagataataaagttaaagatcttaaagttgatggtttatttattgccataggtcatgatccagctacatctttatttaaagatcaacttaaaatggacaaagaagggtatttaattacaaaacctgactctactgaaactaatattccaggagtttttgctgctggagatgtaaaggataaaatttttagacaagctgttactgctgctgggatgggttgtatgtcagcacttgaagctgaaaaatatctatctgagtctaattaa

SEQ ID NO: 224769 - DNA, 406 bp, Unknown
  Bacterial polypeptide expressing nucleotide sequence isolated from the Sargasso Sea
gaccttcaagagggagacctaaggctcttgacagttgataatcctcttgtaattcctgccaataaaaatattcaaatactaataaccgccggagatgttttgcatagctgggccgttccctcaatgggattaaaaactgatgctgttcctggaagactcaatgaaacgtgggtcaatgttaaagaaccaggaatatacagagggcaatgctccgaaatatgtggtactggtcatggatttatgccagttgttgtaaaagtattacctgaaagtgaatttattgcatgggctaatgaagccaaaaataattacgcaatcaatgaagatattaaaactaacgaaacaaatgaggaaatcattatttcacaaaataatttaataaaattagaggagaataatttatgag

SEQ ID NO: 224770 - DNA, 254 bp, Unknown
  Bacterial polypeptide expressing nucleotide sequence isolated from the Sargasso Sea
aggattagcaggaatgccaagaagatacgctgattacccagatgcatttgctggttggaattatatttcttctattggttcgtatatatcgattatcggcttagcagtatttttattaaatcttttgtatgcttttatgaaaaagaaaaaagctgaacaaaatccatggggagaaggagcaacaactctggaatggacagtgtcatcaccgccaccattccatacttttgaagagctacctaaaataaagtaaa

SEQ ID NO: 224771 - DNA, 638 bp, Unknown
  Bacterial polypeptide expressing nucleotide sequence isolated from the Sargasso Sea
gtttttaatgctttatgcaatggtaagatttagagcatcaagaaatcctaatccttcaaaaagaacacataatgttttaattgaagttatctggacgcttgtaccatgtttgattttaatagtaatggccgtgccatctttcaaagttttatactctcaagatacaattccaaaagcagacgtaacaattaaagcgataggataccagtggtactgggggtatgaatacccagatgaaaatattatttttgactcatatatgattgaagaaaaagatcttcaaaaaggacaacctaggttgttagcagttgataatgtcgtagttgttccagtaaataaagttgtaaaagttttaataacagcaaatgatgttttgcatgcttgggcactaccagcattcggagttaaaagagatgctatgccaggaagagtaaatgaaacatggtttaaagcagagagagaaggaactttttatggacaatgttccgagctttgtggaataaagcatgcatttatgccgattgaagtaagagtggtttctgaagaagattaccaattatggcttgaagaagctaaaataaaatttgcgaaagaagatattcttgaaaaaaataaattaatagcgagcaataaataat

SEQ ID NO: 224772 - DNA, 892 bp, Unknown
  Bacterial polypeptide expressing nucleotide sequence isolated from the Sargasso Sea
aatgagtagcatagcagaacaaccaaacgccaatgaagcgcatcatgctcatcatccagctaaaggctttaagcgctggctttatacaacaaatcataaagatattggcagtttatatttaatattttcgttgaccatgtttttaattggtggcgccatggctatggtgatcagagccgaattatttcagccagggttgcagttggtcgatccccacttttttaatcaaatgactacagttcacggtttaataatggtgtttggcgccgttatgcctgcctttacgggattagccaattggatgataccgttaatgataggtgcgccagatatggcattacctagaatgaataactggagcttttggatcttacctttcgcatttttaattttgcttgcttctttatttatgcctggagggggacctgcttttggctggaccttctatgctccgctttcaaccacatacagtaacgacaatactgccttgtttgtatttgcggtgcacataatgggtattagctcaattatgggtgctattaatgtggttgtgactatagttaatttgcgtgcacctgggatgacgtggatgaaactccccttgtttgtatggacatggctaataacggcatttttactcattgctgttatgcccgttttggcaggggcggtgaccatggttttaaccgataaatattttgcgactagcttttttgatgctgccggcggtggcgatccggtgatgttccagcatatattttggttttttggtcaccccgaagtttacatcatgattttgccagcgtttggtatcatttcaaccatagtgcctactttttcgcgtaaaaagctatttggctatgcatctatggtttatgccacgtcatctata

SEQ ID NO: 224773 - DNA, 607 bp, Unknown
  Bacterial polypeptide expressing nucleotide sequence isolated from the Sargasso Sea
gcaataagatttcgcaaaagtgtaaatcctaatccttcaaaaagaacacataaccctcttttagagaccttgtggactgctatacctgtgattattttaatttttatggcagttccttcatttaaacttttatatgaacaagatgtaataccagaagctgagatgacaataaaagtcattggtcatcaatggtattgggaataccaataccctgagcatgatgatttatcttttgaaagttatctagtgcctgatgatgagcttaaggaaggtgagccaagattactgacggttgataacagattagtattaccagttaataaaaacatacacgttcttattacagcgggagatgtacttcatagttttgcaatgccttcattgggagtaaaaagagacgcagtacctggaagacttaatgaaacatggatgaaaatagatagaccaggaatatatagagggcaatgctctgaaatttgtggcactggtcatggttatatgcctgttgttattgaagcattaagtgaaaatgatttcgcagcctgggtaaatgaagctaaaaatgagtttgcagaattaaatagtagaacaattgcatcaaaatagg

SEQ ID NO: 224774 - DNA, 242 bp, Unknown
  Bacterial polypeptide expressing nucleotide sequence isolated from the Sargasso Sea
tatgagttacggagagactgttagccacgatcatcatgaccataaaccaggttttattagacgttggttgttttcaactaaccataaagatattggaactctttatataatttttgctctagtagctggcctaataggtggtttcttttcactattaatgagagcagaactagcagcacctggattagatattgttgctgatggtcaggcttggaatgttattattacagctcatggactat

SEQ ID NO: 224775 - DNA, 587 bp, Unknown
  Bacterial polypeptide expressing nucleotide sequence isolated from the Sargasso Sea
aatgaaaaaaattttatttatattttcaagtatttttatctttcaaaatgcttttgcaaaccaacctgttgattggcaattaggtttccaaaaagcagcatctgaatcgatgagagatattgtagcttttcacgataacttgttattaccgataataatagcaataagtgtatttgttttatttttaatgctttatgcttgtgtaaaatttagagctacagccaatcctaatccttctaagagaacacacaatgtgactgttgaagttttatggactttaattccttgcttaattttaattgttatggcggttccatcatttaaaattttatataagcaagatacgattccaaaagcagatttaacaatcaaagcaattggctatcagtggtactggggttatgaatatcctgatgaaaatttggaattcgactcttacatgattgaagaaaaagatttaaaagcaaatcaaccaagattattagctgttgataatgaagttgttgttccagttggtaaagtagttaaaattttaatcactgcgaatgatgttttacacgcatgggctttaccttcatttggagtaa

SEQ ID NO: 224776 - DNA, 463 bp, Unknown
  Bacterial polypeptide expressing nucleotide sequence isolated from the Sargasso Sea
gatgagcacactgactcaagatcaaattgccgcccatgatgatcaccatcacggtgcacctaaaggcatcatgcgctggttactcaccaccaaccacaaggacataggcaccctgtacctatggtttagtttcataatgtttttaaccggtggtgcaatggccatggtgatccgcgccgaactctttcagcccggattacaactcgttgaacctaacttcttcaaccaaatgaccacagtgcatgggttaatcatggtattcggcgccgtgatgccggcctttacagggctggctaactggctgatcccgatgatgattggtgcgcccgatatggcgcttccacggatgaataactggagtttttggatcctccccttcgcctttgctattttactaagctcactgtttatggaaggtggcggccctaacttcggttggaccttctacgcaccactctccact

SEQ ID NO: 224777 - DNA, 590 bp, Unknown
  Bacterial polypeptide expressing nucleotide sequence isolated from the Sargasso Sea
tatgatttgggatgatattggatttttgttaaagaaaaatagatataatgaaaattcaataattgctgaaatatttacgaaggatcatggaaaagttgcaggtataatttttggaggaacttctaagaaggtaaagaattatttacaaattggtaataagatacatgtcaattataacactaaaactgaaaataaaatgggatattttaaaattgaaatacaagatgctacatctccgtattattttgataatcgacaaaagttatcttgtattacttctacgatggatttaataaaattgctgacagctaattctcaacaaaaccaatccatctacaatctaatagaagaattttatatcttattaaaagcaaaacactggataaaaaattatattttttgggaattagaactatttaaagttctaggatatgatttagaattcgaaaatatagttgaaaaaaagatgattggtaatcagtttcaatatatttctaagtcaactaaagaaaaaaaaataattccaaattttttagtcgaaaagaatgataaattagaggatttatctactttattaagtggtttaaaat

SEQ ID NO: 224778 - DNA, 387 bp, Unknown
  Bacterial polypeptide expressing nucleotide sequence isolated from the Sargasso Sea
aaagcaaattaatggcaaataaaaaaattgaaattatttgggatagcgttgttgaagaagttattggagacaatgaaccaaaaaatgttaaaggattaaaaattaaaaatgtcaaaacaaataaaattcaagaattaaaaatagatggtcttttcatagcaattggacatgatccagcaactgaactatttaaaaatcaattagatatggataaagaaggctatttaacaacaaaaccagattctacggaaaccaacattcctggcgtctttgctgcgggtgatgttaaagacaaaatatttaggcaagctgtaacagctgcaggaatgggttgtatggctgctcttgaggcagaaaaacatttgtcgcatagccaatcaaaataaa

SEQ ID NO: 224779 - DNA, 586 bp, Unknown
  Bacterial polypeptide expressing nucleotide sequence isolated from the Sargasso Sea
tattattttaggtgacagtgctcttgatattaatgttcatgacacttattttgttgttgctcactttcatttagtaatgggtatttctgcattgtacggcctgtttgccggagtatatcattggtttccaagattatatggaagaatgatgaataaatcacttggatatattcatttttggattacagctattggcgcatatggtatatttttccctatgcattttgttggtatggcaggtcttccaagaagatattacactaacactgcttttccttattttgatgatttagcagatattaatgtattaataactgtatttgccttaattgctggattagctcaattagtgtttttatttaatttcttctacagtatgtattatgggaaaaaagctgagcaaaatccttggaaatctaatacattagaatggacagcaccagtcgaacacatgcatggtaactggccaggaaaaataccacaagtttttagatgggcatacgattatagtaagccaggaaaagaagaagattttgttcctcaatctgtaccaattgccaaaggagagaagattacagaacattaa

SEQ ID NO: 224780 - DNA, 376 bp, Unknown
  Bacterial polypeptide expressing nucleotide sequence isolated from the Sargasso Sea
tatgagtacaaacaatccaaaaggtcatgattaccacctagtagacccaagtccatggcccttattggcttcaattggtgccttagttctatgttttggtgctgtaatctactttaggactgataacgcttggaccatgattattggactacttgctgtcacctatgtagcgtttatgtggtttagggatatcataattgaaggcgaaaaagatgggcatcatactacagttgttcaacttggtttaaggtatggaatgacattatttattgcatcagaagttatgttttttgttgcatggttttgggcctattttaatgcaagcttatacccaactgagcaaataggctctacatggccaccacttgatattgag

SEQ ID NO: 224781 - DNA, 493 bp, Unknown
  Bacterial polypeptide expressing nucleotide sequence isolated from the Sargasso Sea
attggtttctgaaacaataccaaaggcagatataacaattaaggccatcggcaatcaatggtattggacttacgagtaccctgatttcgatgatatctcttttgatgccaacatgcttgctgatcatgagctatcagatccaaagttaagattgttagagactgatactcaaattgttgtaccagtagataaagtggtcaagcttcagttaacttcagcagatgtactgcacgcttggacaattccagcatttggtgtcaagatggatgctgtaccgggaagattaaatgaaacatggtttaaggctaataaagaagggatctattatggccagtgctcagagctttgtggtccaaaacatgcatttatgcccattaatgttaaagttgtttcaaataaagaatttgaagagtggatcgaatttgctaaatctgagtatgcatctttagagattaattacagtgacgatacatttgaaatggctaaaaaataa

SEQ ID NO: 224782 - DNA, 713 bp, Unknown
  Bacterial polypeptide expressing nucleotide sequence isolated from the Sargasso Sea
aatgacaaagattattgagccagataaacaaactaatatttttagaagaccttcttcagaatacggaatctggagttggctaactacagtggatcacaaaaaaattgggattatgtatggttatgctgcatttttctttttattaattgggggcttagaagctttagttcttagaatacaacttgcccaaccagataataactttttaagtgccgctgaatataatgcaatgtttactatgcatgggactacgatggttttccttgcaatcatgccaattagtgctgccttctttaattaccttcttcctcttcaaataggagcaagagatgtcgcttttccaagattgaatgctcttagtttttggatttgggtttttggtggacttttcttatattcaacatttgtatttggtacagctggagctcctgaagggggttatctagctgaggaagttggatggcttggtaatgcaccaaatggtggctggtttggatatcaacctaatgcaggttttaaatactcaccagggacagcaatggattattgggcaataggattacaaatattgggtatttcttctcttgtatcagcctttaatttcatcgtaacaatattaaatatgaggactcaaggaatgagattgatgagaatgcctgtctttacatggatgacttttgcagtggcgttttctcttgcatttttcatgccaa

SEQ ID NO: 224783 - DNA, 514 bp, Unknown
  Bacterial polypeptide expressing nucleotide sequence isolated from the Sargasso Sea
aatgacaaaaataattgaaccaagcaaacaaagcagtattttcagaaggccttcttctgaaactggtatatggagctggataactactgtagatcataaaagaattggaataatgtatggttatgcagcgtttttctttcttttgattggtggacttgaagcactcatccttagaattcagctttcacagccagataacaatttcttaacagcggcagagtacaatgcaatgttcacaatgcacggaaccacgatgattttcttggcaattatgccaatcagtgctgccttctttaattaccttttaccgctacaaattggtgctcgtgatgttgcctttccaagacttaatgctctctccttctggatatttatttttggaggtgcgtttttatattctacatttatattcggtactgcaggagcaccggagggcggatacttagctgaagaagtcggttggttagggtcagcacctaacggtggttggtttggctatcaacctaatgcaggt

SEQ ID NO: 224784 - DNA, 814 bp, Unknown
  Bacterial polypeptide expressing nucleotide sequence isolated from the Sargasso Sea
agcttttttgtatgggcgcaccacatgtatgtaagcggtatgaatccttggtttggtttcttttttgcaacaacaactttaattattgcggtccctacagctataaaagtttataactggattttaactctttggagaggaaatatacaactttcattgccaatgttattttctttaggttttattgtcacttttttaaatggtggattaacaggattgtttctaggaaatgttactgtcgatgttcctttatccgatacttattttgtggttgcacattttcatatggtcatgggcatcgcgccaatacttgtaatctttggagcaatttatcattggtacccattaataactgggagaatgatggacgaaacactcggaaaaatccacttttggatcacatttataggatcatatgcaatttattttcctatgcattaccaaggctttgttggtgtcccaagaagatattttgaaatttatgatagcccatatattgatacatctacacttcttttaaataaatttataaccattgcagttctaatagtaggagcagcacaattactatttttatataatttaatcactagtgctcgactaggaaagaaatcagaaaaaaatccttggaaagcaaattctttagaatggcaaacacctcaaatgccacctgaacatggtaactggggcaaggaacttcctaaggtttacagatggccttatgatttcagtgttcctggggctaaagaagattatattccacaaaaccaacctccaagcgagatagtaggagcgaaagttgagaaaacgtgaa

SEQ ID NO: 224785 - DNA, 580 bp, Unknown
  Bacterial polypeptide expressing nucleotide sequence isolated from the Sargasso Sea
gatggctcacgcaagaccgattgcaacgacccgtagtgctacagggattccaactcctcgcctagctgtgtggtggatccttgcgtcagaggtggtcattttcggcggcctgctcggcgcatatttgatgcaccgtattggccatcccgaatgggctgaggcggcttcacacactcagacatggattggcgcggtaaacacttttgtactgcttacctcgagcttcacggcagtgcttgctcaccaagcggcagaaaaaggaaagggaaaggaggcggctaagcttctcgctttcacgattctcggcgctctaacgtttctcgtgatcaagtcgtatgaatggacgatcgagatcatggctgggtacacgatcaccgcgaataccttctggtccttttattacactgcagcaggattgcatgcactgcatgtaattgcgggtgccatcattatgggattcattgcggtcgatgcctaccgcggccgtgaattgcaccgcgtcgagatcatcgggatctattggcatttcgtggatgtggtttggattttcttgttcccgcttctctacatagcgaagtag

SEQ ID NO: 224786 - DNA, 382 bp, Unknown
  Bacterial polypeptide expressing nucleotide sequence isolated from the Sargasso Sea
cttcagcaaattaaaaaataacaaaaaaatagaaattatttgggacacagtagttgaagatgtagttggaaccaaggaacccaaaactgttaatgctctaaagattaagaatgttaaagataatagagtcaaaaatcttaaggtagatggtttatttattgcaattggtcatgatccagctacctctttatttaaagatcaattaaaaatggataaagagggatacttgataactaaacctgactcaaccgctacaaatgtcccgggagtttttgctgctggcgatgtaaaggataaaatttttagacaagctgttaccgctgctggtatgggatgcatgtcagcccttgaggctgaaaaatatctctctgagactaattaa

SEQ ID NO: 224787 - DNA, 403 bp, Unknown
  Bacterial polypeptide expressing nucleotide sequence isolated from the Sargasso Sea
tttgccagtttttttatggttatttctatatgtgaatatcttaaatgcttcggatgactctttttgtgacccagaaaatctagagatagtgactgcaaataaagtactgctatataaggtagaagttgctgatactgtttacagaagacagaaggggctgatgaatagaaaacatttgtcatcgaatcgaggtatgttatttatttttgatagactgcattacgccaagatgtggatgaaaaacactagtattgtgctggatataatttttgttaatgaactaggcattattacgaaaatagtacgagaggcagagccctttagccttgaaatacattcaagcaataggcctgttaaatttgttcttgaggtcccatcttttggaaaaattcagattttataa

SEQ ID NO: 224788 - DNA, 355 bp, Unknown
  Bacterial polypeptide expressing nucleotide sequence isolated from the Sargasso Sea
ctgccgaagtggaccggccacatgtatgacgaaaccctggccaagctgcatttctggatgagcttcatcggcatgaacctggcgttcttcccgatgcacttcgttggcttggcgggtatgccgcggcgtatccccgactacaacatgatgttcgccaacttcaacatgatctccagtatcggcgcgttcatgttcggggctacccagctgttgttcctgttcatcgtcatcaagtgcattcgcggcggcaagccggccccggccaaaccctgggacggtgccgaaggcctggagtggacggtgccctcaccggcgccttatcacaccttcagtacgccgccggaagtgaaatagg

SEQ ID NO: 224789 - DNA, 136 bp, Unknown
  Bacterial polypeptide expressing nucleotide sequence isolated from the Sargasso Sea
atggcggacataacaactgatcaagtaggaagtcatgaccatcatccaacgggatggagaaggtatctatattctacaaatcacaaagatataggaaccttatacttaatttttgcaattattgcgggcttagtcg

SEQ ID NO: 224790 - DNA, 589 bp, Unknown
  Bacterial polypeptide expressing nucleotide sequence isolated from the Sargasso Sea
tctacgacaactcataatacaaccattgaaatattatggactgtaatcccagtaattcttttaattataatagccattccatcttttagattactgtatgtttcagaaacaatcccaaaagctgacttgaccatcaaggcaataggtaatcaatggtattggacctacgaatatccagattacgaagacatcgctttcgacgcaaatatgcttttagaaaacgagttatcagaccctaagttgagactcttagagacagatacccagattgttgtgcctgtagataaggtagtcaaacttcaaatcacatctgcagatgtccttcatgcatggaccattccggcatttggagtaaaaatggatgcggtacccggtagactaaatgaaacatggtttaaggctaacaaagaaggtatttattacggtcaatgttcagagttgtgtggggctaagcacgcattcatgcctattaatgttaaggttgtatcagaaagtgaatttgacgattggctagacttcgcaaaagaagaatatgcatcgtctggaatagactattcaagtgaaacgtttgaaattgcaaagaactagt

SEQ ID NO: 224791 - DNA, 496 bp, Unknown
  Bacterial polypeptide expressing nucleotide sequence isolated from the Sargasso Sea
tttaaattggtgtatcaacaagatgtaatccctgaaaccgacatgacaattaaagttattggacatcagtggtattgggaatatcagtatccagaacatgatgacctatcatttgaaagttatatgactccagatgatgaactacaagagggcgatattagacttctaaccgttgataatcatctggttttgccagcaaacaaaaatattcatgtcttggttacaggtggagatgttttacatagtttcgcaatgccatcacttggtgtaaaaaaagatgctgttccaggaagattaaatgaaacatggtttaacattgatgagccaggtatttatagaggtcagtgttctgagatatgcggcaccggacatggtttcatgcctattgtaattgaagcattaaatgagactgattttaacaattggattattgagcaaaaaaataagttagcaatgtctaacaatattaataataatgaactaattatagagtagg

SEQ ID NO: 224792 - DNA, 765 bp, Unknown
  Bacterial polypeptide expressing nucleotide sequence isolated from the Sargasso Sea
ttgctaaccagccaaaagattggcaattaggttttcaaaaagcagcatccgagtctatgagagatatcgtaaattttcacgataaattgttgctaccaatcataattgcgataagtgttttcgttttatttttgatggtctatgcatgtataagatttagagcatcagcaaatccagtcccttctaaaagaactcacaatgttgctgtagaagtattatggacattaattccatgtttgattttaattgttatggcagttccatcatttaaaattttatacaaacaagacgcaataccaaaagcagatgtaaccgtcaaggcaatcgggtatcaatggtattggggatatgagtatccagatgaaaatattattttcgactcttatatgatcgaagataaagacttaaaagaaaaccagcctagattattagctgtagataatgaactggttgttccagtaaataaagtagttaaagttttaattactgcaaatgatgttttgcatgcttgggctttaccttcttttggagttaaaagagatgcagttcctggaagaataaatgaaacatggtttaaagcagaagaagttggaacttattatggacagtgttctgagctttgtgggattaaacatgcttttatgccgataacagtaagagtagtttctgaggaggaatatcaagaatggcttactggagctaaaataaaatttgcaaaagaaattaatgaagaagatcaatttaaaaaactagcgagtaaataat

SEQ ID NO: 224793 - DNA, 307 bp, Unknown
  Bacterial polypeptide expressing nucleotide sequence isolated from the Sargasso Sea
atggctgatggtcattcaagagatcatagttaccatttagtagacccaagcccatggcccatagttggggcatttgctgcactagtcctgacctttggaatgattttgtggtttcatgacgtcactgtttgggtttttataattggatctttaataacagcttatgtttttcttgtttggttcaaagatataatcaaagaaggtgaacatcaaggttttcataccccagttgttcagcttggcctgagatatggtatggttcttttcatcgcttctgaagtcatgttttttgctgcttggttttggg

SEQ ID NO: 224794 - DNA, 808 bp, Unknown
  Bacterial polypeptide expressing nucleotide sequence isolated from the Sargasso Sea
atgacaatgacaagacttcctttaacagtatgggcatttttagttactgcaattataggtgttgtgtcctttccagtacttttatctgcagcattattattaataatggatagaagttttggaacctcttttttcctttcagatatctttatacaaggtgaggtactccactatcaaggtggttccccagttttatttgagcaccttttttggttccttggacatcctgaggtatacattgtacttttacctgctcttggaattgcatctgaggtaattgcaacaaatgctcgtaagccaatttttggatatagagcaatggtaggatcaatccttgctattgcatttttatcaacaatagtttggggtcatcatatgtttgtaactggaatgaatcctttcttaggatcggtatttactttcacaactttattaattgctattccatctgctgttaaggcatttaactacataaccacaatatggaaaggtaatattcaattcaatccagcaatgttatttgctattgggcttgtttctacatttataacaggtggtctaactggaattattcttggagatagtgcgctggatataaacttacatgatacatattttgttgtagcacactttcatttagtaatgggtatttctgctctttatggtttatttgccggtgtataccattggtatccaagaatgtttggcaggatgatgaataagacactaggatatgttcatttttggattacagcaattagtgcctatggagtattcttcccaatgccattttattggtatggctggt

SEQ ID NO: 224795 - DNA, 793 bp, Unknown
  Bacterial polypeptide expressing nucleotide sequence isolated from the Sargasso Sea
ataagctttcctactcagattttacgaatggagataaaaaaggggaacttaaagagctttactgttgaccttttaatcggagctgatggagccaatagcagagtcgcaaaagcaatggatgcaggagattacaaagttgccatagcatttcaggaaagaattaaattacctaaagaagaaatgagttactacgaagatcttgctgaaatgtatgtcggaactgatgtttctcctgatttttatggatgggtatttcctaaatatgatcatgttgctgtgggcactggaaccatgcaaaagaatcagtcattaattaaaggacttcaagagggtgtaagaaatagggcgaagaaaagacttgttaatggtgaagtaataaaggtagaagctcaccctattcctgagcatccaaggccaagaagagtagttgggagaatggcattggttggtgatgcagctggttatgttacaaaaagctctggagagggcatttattttgctgcaaaaagtggaagaatgtgtgctgaagaaattgttgaagcatcaaaaaacggtcaaataattccatcagaaaaagatttaaaaaactatcttaaaaaatgggataaaaaatatggcacaacttataaagtgctagaaatccttcaaaatattttctacagaaatgattctgctagagaagcctttgtagagatgtgtgatgacatggatgtacaaagacttacttttgatagttacttatacaaaagagttgtcgccatgaaaccattacagcaacttaaaattacaatgc

SEQ ID NO: 224796 - DNA, 700 bp, Unknown
  Bacterial polypeptide expressing nucleotide sequence isolated from the Sargasso Sea
tatgagcatagtaacggatatatttttacccatagctttagcatttattatgtttgctttaggtttaggattaactggagctgattttttaagagttttaaaacaaccaaaagatttttttgttggagcaatcagtcaaattattttacttccaatcattgcatttattttagttaaaatttggcctatttcacctgagcttgcaattggtgttatgattattgctgcagcaccagggggcgtaacctcaaatatactaacgtcctttgctagaggagatgtggctctttcaatttcattaacggcagtcataagtcttttaagtgttttaacagttccgtttattattattacatctttgtctttactaggctcagaaactgtttctcaaaacatttctctaacaagtatggctataagtatgtttttgattgtaacagttcctgtaatactaggtatgatatttagaagatttgcatcaaatgcagcaataaaatttgaaccaatagctaaaaaaatttcaataggattatttataattgtcttggttggtgctattttagcagaaaaagacaatatagtttcttattttgctgatgctggacttattacattggctttaaacgttattatgatgattgttgctttttatgttgctcagttattagcaactggaaatgctcaaaaaaaatgtattgct

SEQ ID NO: 224797 - DNA, 523 bp, Unknown
  Bacterial polypeptide expressing nucleotide sequence isolated from the Sargasso Sea
tatgacattatcaattgatccacaaaaaactaataatgaaagtcttcaacctaaaggatggcttagatactttagttttagccttgatcataaagtaattgggatacaatacttggtttgtggttttctcttctatttaattggaggaaccttagcgagcgctataagaattgaactagccagtccaatgtctgattttatgccaagagatgtttataaccaagttttaactttacacggaacaataatgatattcctttggatagtgcctgtagttaacggtgcttttggaaattatttggttccattttatgtgggtgcgagagatatggcattcccaagattaaatgccgtagctttttggttaattcctccttcaggtttgatgcttgtagcaagctattttgttgagggtgctgctcaggctggatggaccgcttatccacctttgagcataactactcctcaatcgggacaaattatttggattctgagtgttctattacttggaggcagttctata

SEQ ID NO: 224798 - DNA, 172 bp, Unknown
  Bacterial polypeptide expressing nucleotide sequence isolated from the Sargasso Sea
catgggtttccacgtcactattggtgcgattacgctggccgtaattctcgtgagatgtctgcgcgggcatttcaagcctgatgagcactttggctttgaaggtgccgcttggtattggcacttcgtggataccgtctgggtcgggctgtttatttttgtctacatcctgtag

SEQ ID NO: 224799 - DNA, 466 bp, Unknown
  Bacterial polypeptide expressing nucleotide sequence isolated from the Sargasso Sea
atgagcacactgactcaagatcaaattgccgcccatgatgatcaccatcacggtgcacctaaaggcatcatgcgctggttactcaccaccaaccacaaggacataggcaccctgtacctatggtttagtttcataatgtttttaaccggtggtgcaatggccatggtgatccgcgccgaactctttcagcccggattacaactcgttgaacctaacttcttcaaccaaatgaccacagtgcatgggttaatcatggtattcggcgccgtgatgccggcctttacagggctggctaactggctgatcccgatgatgattggtgcgcccgatatggcgcttccacggatgaataactggagtttttggatcctccccttcgcctttgctattttactaagctcactgtttatggaaggtggcggccctaacttcggttggaccttctacgcaccactctccactactt

SEQ ID NO: 224800 - DNA, 558 bp, Unknown
  Bacterial polypeptide expressing nucleotide sequence isolated from the Sargasso Sea
ggtcacctacatgacgaccatgaacaccacgatcatattcctaaagggataacgcgttggttgtttaccactaaccataaagacataggcacactttacctgtggtttgcctttattatgtttttagttggtggtgcgatggccatggtgatccgcgctgagctattccaacccggtctacaaattgtagagccaaacttctttaaccaaatgactacggtacacgggcttatcatggtatttggtgcagtaatgccagcctttactgggctagcaaactggcttattccaatgatgatcggcgcccctgacatggcgttaccgcgcatgaataactggagcttctggattttaccaggtgcctttctcattctattgagctcgctctttatggaaggcggcggccctgcttttggatggactttctacgcgcccctttcaacaacttacagtggcgattcgacagcattgtttgtgttctctgttcacattatgggtatttcatccattatgggtgcgattaacgtgattgtgaccatctttaatatgcgtgcgcca

SEQ ID NO: 224801 - DNA, 370 bp, Unknown
  Bacterial polypeptide expressing nucleotide sequence isolated from the Sargasso Sea
aaaagcgaataaaaaaattgaaattatctgggacagtgtggttgatgaagtgcttggtacaaatgaaccaaaaagtgttaatggaataaaaataaaaaacacaaaagataataaaataaaagaattaaaaatagatgggttattcatcgctataggtcatgacccggccacttctttatttaaaaatcaattaaaaatggacaaagatggatatctaattacaaagccagattctactgagacaagcatcccgggagtttttgcagctggagatgtaaaagataaaatttttagacaagcagtaactgcagcaggtatgggatgtatgtctgctttagaggctgaaaaatatctttctcattctaagtaa

SEQ ID NO: 224802 - DNA, 409 bp, Unknown
  Bacterial polypeptide expressing nucleotide sequence isolated from the Sargasso Sea
aatgactacgacagtcgctgatcatcaccacgacgaagtgcccaagggcattacccgctggctgtttacgaccaaccacaaggacatcggcacgctgtacctgtggttctcgttcatcatgtttctggtcggcggcgccatggcgctggttatccgggcggaactcttccagcccggcctacaggtagtagacccgcatttttataaccagatggtcacggtacatgccctgatcatgattttcggtgcgatcatgccggggtttgtaggctttgccaactggatgattccgatgatgattggtgcgcccgatatggcgctgccgagaatgaacaactggagtttttggctgatgcctttcgcaacctctttgctgattctttcgctgtttgtgcccggcggcggcccg

SEQ ID NO: 224803 - DNA, 768 bp, Unknown
  Bacterial polypeptide expressing nucleotide sequence isolated from the Sargasso Sea
tatgagtgcagtaattgaatcacatggtcatgatgaccatcatcatggtccagcaaaagggctgactagatggctttacacaactaatcataaagatataggaagcttatatttatggtttagttttgctatgttccttattggtggagcgatggctatggtcattagagcagagctatttcaaccgggaatgcaaattgtagagcctgagttttataatcagatgcttacacttcatggattgataatggtgtttggtgcagttatgcctgcatttgttggtctggcaaactggcttgtaccaatgatggtaggagcacctgacatggctcttccaagaatgaataaccttagtttttggattctgcctttcgcattttttattctattatcgtcattatttatggagggcggagcacctaattttggatggacattttatgccccactatccacaacctatgcaccaccaagtgtgaccttctttatatttgcagtgcatattatgggcgcatcatcaatcatgggatcaattaatgtgattgtaactattatgaatatgagagcgcctggtatgacattgatgaaaatgccactttttgtttggtcatggttaataacagcatatctgttaatagcagtcatgccagttcttgcaggggcagtaaccatgatgctaatggatatccatttcggaacaagtttctttaacgctgcgggcggtggagatcctgttttatttcaacacatcttctggttttttggcca

SEQ ID NO: 224804 - DNA, 787 bp, Unknown
  Bacterial polypeptide expressing nucleotide sequence isolated from the Sargasso Sea
agctatagacataattttaatgaacatgtgtatatttttaggtccaaatattggcatgctattttacaaaataatagacttcaatcaaatatatttttatctaggcatagtaaccttacttaacttactaataataagaaaaaatccaaatttatcaatgcttaaaaataaaaaggaggagtattcaggttttgctaaaggcgtaggatttgctataaaaaacaagttaatactttcaactctattaattttagcgtttggaaattttttcgcattttcttttgaatccatggccccctatgtcggaaaaaacatactaaattcatctcctcaagaattctcattcttactttccatgcaaggcttaggagctttatccggtgcaatactattttttccattaatagtaaaaattaatcgacctggtcttgtttttggaatctcaagtatttcattatgtattttctcttttttattttcgtttgaaaattcttattttatgacctgcttaatcatattttttggaggtttatcagtcgcaatttttggcaacatgcatgccagaatattaatttctcaaaccccgaatccattacgtggaagaattcagggattgaggcaattatcgataggttttttcccattaggaagcttatttttaggcttgtctggagattattttggtatttctgacagtattagattattttcatttacaggtgtattaattacaattttaatactaatattatttagagaattaagagtaaaaattttcaacaaataa

SEQ ID NO: 224805 - DNA, 342 bp, Unknown
  Bacterial polypeptide expressing nucleotide sequence isolated from the Sargasso Sea
cagttgataacgcagtttacgtacctgtaaacaaagttgtgaaagttatgataacagctaacgatgttttacatgcatgggccttaccttcatttggggtaaaaagagatgccataccaggaagaataaatgaaacatggtttaaagctgatcgaaccggaaccttttacggacaatgctccgaattatgtggaattaagcatgctttcatgccaatcactgtgcatgttgtgtcagaggatgaatataataagtggttagaagaggctaaggtaaaatttgctaaagaggaaatagataacaattttaaaatagtaaaaaaaattaaggagatacaataat

SEQ ID NO: 224806 - DNA, 301 bp, Unknown
  Bacterial polypeptide expressing nucleotide sequence isolated from the Sargasso Sea
gttgcatttgttggaatgcagatgtttgagtggagcaaacttatttttgaagagggtattcggccatggggcaatccgtttggcgctgctcagtttggtggtttctttttcatgatcactggctttcatgggcttcacgtatcgattggtgttgtttacctaaccattgttgcaaagagggtttgggaaggacgttacgacaagcttaacgattaccaaatggttgaggtagcaggtttatattggcactttgtcgatttggtttggatatttattttcgcattcttttatttgtggtagg

SEQ ID NO: 224807 - DNA, 667 bp, Unknown
  Bacterial polypeptide expressing nucleotide sequence isolated from the Sargasso Sea
aatgaatttaaccgctgattcagttgacgggcacggctcagaacataaacacccttggcacctcgtcgatccgagcccttggcctattgttggggcacttagtgctggtttacttgctattggcaccgtcatttacatgcatggtggaggctcttggttattagcgctgggatttcttggcgttgctcttactatgtttttctggtttcgagacgttaccttggaagctacgtttcaggggcaccattccataccagtacaaattggtatgcgttatgggatggcattgttcattgcttcagaggtgatgttctttgttgcttggttctgggccttctttaatgcaagtttgtttccaccagaaactatcaatggaatatggcctccccctggaattattgtctttgatccttggagcctaccttttcttaatactcttattcttttgacttcgggagtgacacttacctgggctcatcacgctttaattgaaggcaataaagagcatgttttgcagggtttaggtctgactattttcctaggacttatttttaccggtgttcagggttatgagtattctcatgctgcttttagtttcgcttttgaggagggcagtccgggtaaggggggaatttacccaacggttttctttatggctactggtttt

SEQ ID NO: 224808 - DNA, 439 bp, Unknown
  Bacterial polypeptide expressing nucleotide sequence isolated from the Sargasso Sea
atattttaatgataagaataaaattctttgtttgaattctttgtcgtcaatacttggtgccatactgcctgaacagcaaccccatgaaaaaatttataattctttggattatctattaaaaaattttaatgataagaactggttatttttatatttgaattgggaaattaatttaattagtaatttaggttttggctttagtttagatccaaaaaaattttcaaacacaaatgaaaaaaaaatatttaaccttagattggacaatgttgattataaagttccaagctttttagtacttaaaaatttcgataacctaaatttaaatgatatttatacaggtttaaatttttctagaaatttgatggaaaataaattttttatacccaataatatacgttttccttattcaaggaaattattggaaaaaaaatttttataa

SEQ ID NO: 224809 - DNA, 956 bp, Unknown
  Bacterial polypeptide expressing nucleotide sequence isolated from the Sargasso Sea
gttttggtttttgggtcatcccgaagtatatatcgtggccttgccagcttttggaatagtttcggatctaatctcagtgcactctagaaaaaatatttttggatatagaatgatggtttgggctattgttggtatcggagcattaagcttttttgtatgggctcaccatatgtatgtaagtggaatgagtccttggtttggttttttctttgctaccactacacttattattgctgtaccaacagcacttaaggtttacaactggatacttactctttggagaggaaacattagattaaatactgtaatgcttttctgtcttggttttatagtaacttttgttaatggaggcattacaggaatctttttaggaaatgttgctgtagatgttcctttatcagacacctattttgtaattgctcactttcatatggtaatgggcatagcaccgctcatggtaatatttggtgctatataccactggtttcctctaattacaggaaggttaatggatgaaactttaggaaagtggcacttttgggtaacttttttaggcgcttattcaatttattttcctatgcactatttaggttttataggcgttccaagaagatattttgaaatgtatgacagtccatatataacttcggcagtagggatgaatgaatttataagtgtagcagcttttatagtaggtgctgctcaatttattttcttttacaaccttgtaaaaagcataaggctaggcaagccagcaggaaaaaatccatggaaagcaaactctttagagtggcttacacctgacgttcctcctgtgcatgggaattggggagataagttaccagtagttcatagatgggcatatgactatagcgttccaggagcaaaagaagattatatcacacaaacaactcctccaagcgaagttagagaagcagaagtagaaaaaacttaaa

SEQ ID NO: 224810 - DNA, 817 bp, Unknown
  Bacterial polypeptide expressing nucleotide sequence isolated from the Sargasso Sea
atgaaaaaatttttttatatatttctaacattttttgttacttcaagcgcattcgctaatcaaccagttgattggcagctaggctttcaaaaggccgcttctgagaccatgagagatatagttaatttccatgataaattgttgttaccaattataatagcaattagcgtttttgttttatttttgatgatttatgcttgtataagatttagagcttcagcaaatccagttccatcaaaaagaactcataatgttgctgttgaagttttatggactttaatcccatgtttaattctgatcgtgatggcggttccatcattcaaaattttatacaaacaagatgcaattccaaaggcagacataactgttaaagctataggatatcaatggtactggggatatgagtatccagacgaaaatattttcttcgactcttacatgatcgaaactaaagacttaaaaaaaaacgagccaagacttttagctgtagataatgaactagttgttccagtaaataaagttgttaaggtaatgatcactgctaatgatgttttgcatgcatgggcactcccttcgtttggagtaaaacgagacgctgtgcctggaagaataaatgaaacttggtttaaagcagaaaaagttggaacttattatggtcaatgttctgaactgtgcggaattaaacacgcgtttatgccaattgaagttagagttgttactgaagaagaatatcaagagtggttgttagatgctaaagttaaatttgcgaaagaaattaatgatgaagatcaatttaaaaaactagcgagtaaataat

SEQ ID NO: 224811 - DNA, 763 bp, Unknown
  Bacterial polypeptide expressing nucleotide sequence isolated from the Sargasso Sea
aatgaaaaaatttttatatatatttctaacattctttatcacttcaagcgcgttcgctaatcaaccagtcgattggcaactaggctttcaaaaggctgcttccgagactatgagagatatagttaattttcatgataaattgttgttaccaattataatagcaatcagtgtttttgttctatttctgatagtttatgcttgtataagatttagagcttcagcaaatccagttccatcaaaaagaactcataatgttgctgttgaggttttatggactttaattccatgtttaattctaatcgtgatggcggttccatcatttaaaattttatataaacaagatgcaattcctaaggcggatataactgttaaagctataggatatcaatggtactggggatacgagtatccagatgaaaatattttctttgactcttacatgatcgaaacaaaagacttaaaagaaaacgagccaagattgttagctgtagataatgaattagttgttccggtaaataaagttgttaaggtaatgattaccgccaatgatgttttgcatgcatgggcactcccttcatttggagtaaaacgagatgctgtacctggaagaataaatgaaacatggttcaaagcagaaaaagttggaacttattatggtcaatgttctgaactatgtggaattaaacatgcttttatgcctattgaagtaagagttgttactgaagaagaatatcaagagtggctgttagacgctaaagttaga

SEQ ID NO: 224812 - DNA, 1321 bp, Unknown
  Bacterial polypeptide expressing nucleotide sequence isolated from the Sargasso Sea
atgtctgaattttctaaagagctacttgttactgctgaattttgccaatcacaggatattgatgtattcgccaaacatgttcccatggattgggtggctgaggctgtgcaacaaactggcagggcatcacttcgaacccgtcgtttccctgcagagcaagctgtttggttggttctaggcattggtttgatgcgtaaccgctcgattcagcaagtctgtgatacgctctcactggcctttcccgatgccaagggggagctcccgccactggcgactagtagcatcatcaaagccaaagaaaagttgggttcagagcccatgcgttatctgttcaaaacaaccgctgcacagtgggaaacacagtgtgaatttgatgagatagcgggattgaaattgctcagtgttgatgggacgtattttaagacgcataacactgaagaaaaccatcactttggctttgcacaaagcacggcttcttttccctctgtgctggcggtcaccttaatgtctactcgtagccacttactttctgatgcggctttcgggcctgttacccacagtgaaattcactacgcacagcaattggttggctcagctcccgagcattcgctcacgttgtttgaccgtgggtttatgtctgccgaattgctcatcagctggcaaggaagcggtgtaaacacccattggttaaccccgataaagtctaagacccgctatagcattatcgagtcattctcagagtatgaccatctggttgagatgccggtatccccccaagctaaacaacaagcgccttatctgggcgagagctggcaagcccgccttatccttattccatcacccaaaggtgatatcaaagggtttatcacgtcatgtctatgtccagacacttatccagtgaacgatttgctcaaggtgtattggcagcgatgggagatagagaggggttatggtgagctgaagcaatatcaactggaaaataaacctgtcctgcgcagtaagaagaaggatggggtgtatcaagaattatgggggatcttgacgacctacaatattgttcggctagagatggcagccatggcagtgcagcataaagttgagccacagagaataagtttcattaatgccctgtttttaatccaagatgagtttggttggagcgacagagggagtccaggagcgatcccactgcacttaaaacgactgagggaaaatggcaagcggttgattttacctccaaagaggaagcggcccagctacccgcgtttggtactcaagaaaacaatcaaatatccaagtaaaaatgccacccgctcttaag

SEQ ID NO: 224813 - DNA, 570 bp, Unknown
  Bacterial polypeptide expressing nucleotide sequence isolated from the Sargasso Sea
tttatttgggagcaagcgctcttgatgtttattttcatgattcatactttgtactagctcattttcattacacattcttcccaattactataattggaatgtttgcagccattacctactggtttcctaaaatgtttggaagaatgatgaatgaaactttaagcaagattcacttctggggaacattcattccttttaactgtattttcctgcctcttttcttccttggactagctggacagcatcgtagaatatataacttcagtcattacccagatttggcaactgaaaacctacaggatataagggtttttgctactacaagtttagttatcatgttgcttttccaagcaatttttctttacaattttttctacagtatgtttaaaggggaaaaggctccagacaatccatggaaagccaatactcttgaatggacagtaccgtctcccccacagcatggtaatttcaagaaattgcctactgtttatcgaggggcttacgaatatagtgttccagggcgagattcagattactggccacaaaacatgccacctgataaaagttgaa

SEQ ID NO: 224814 - DNA, 763 bp, Unknown
  Bacterial polypeptide expressing nucleotide sequence isolated from the Sargasso Sea
tttgccagtacttgcaaacggtataaccgattggcaacttggttttcaagaaccagctagtggtcatatgcaaaatatatttgatcttcataattttgtattaatcatgatgactgcaataactatttttgtgctcatattgctaatatacgttgctattcgatttagaaaaagcgcaaacccaaatccttccaaaagaagtcataatgcaatcttggaaacactttggacagcaattcctgttctaattcttattgttatggccgtaccttcatttaaattagtgtacgagcaagatgtcataccagaagtagatatgactattaaagtgataggccaccaatggtactgggaataccagtatcctgagcatgatgatttgtcttttgagagttacttggttcctgataaagatttaaaagaaggagagccaagattattaaccgtcgataatagactggtcttacctgttaataaaaatattcatgttcttgtaactgcaggagatgtgttgcacagctttgcaatgccctcacttggagttaaaaaggatgcagttccaggaagacttaatgaaacttggatgagaatagatagaccaggaatttacagaggtcaatgctctgagatttgtggaaccggtcatggctatatgccaatagttattgaggcagtaagtgaaaatgatttttatgcttggcttaatgaagccaaaaatgaattcgctacattaaataatagaacaattgcattatcaaaatag

SEQ ID NO: 224815 - DNA, 757 bp, Unknown
  Bacterial polypeptide expressing nucleotide sequence isolated from the Sargasso Sea
aatgaaaaaatttttatatatatttctaacattctttatcacttcaagcgcattcgctaatcaaccagtcgattggcaactaggttttcaaaaggctgcttccgagactatgagagatatcgttaatttccacgataaattgttgttaccaattataatagcaatcagtgtttttgttctatttttgatggtttatgcttgtataagatttagagcttcagcaaatccagttccatcaaaaagaactcataatgttgctgttgaagttttatggactttaataccgtgtttaattctgatcgtgatggcggttccatcatttaaaattttatataaacaagatgcaattccaaaggcagacataactgtaaaagctataggataccaatggtactggggatacgagtatccagatgaaaatattttcttcgattcttacatgattgaaactaaagacttaaaagaaaacgagccaagacttttagctgtagataatgaactggttgttccagtaaataaagttgttaaggtaatgatcactgctaatgatgttttgcatgcatgggcacttccttcatttggagtaaaacgagacgctgtacctggaagaataaatgaaacatggtttaaagcagaaaaagttggaacttattatggtcaatgttctgaattgtgtggaattaaacatgcgtttatgccaattgaagttagagttgttaccgaagaaggaataccaagagtggttgttagacgctaa

SEQ ID NO: 224816 - DNA, 439 bp, Unknown
  Bacterial polypeptide expressing nucleotide sequence isolated from the Sargasso Sea
aggataccaatggtactggggatacgagtatccagatgaaaatattttcttcgactcttacatgatcgaaactaaagacttaaaagaaaacgagccaagactgttagctgtagataatgaactggttgttccagtaaataaagttgttaaggtaatgatcactgctaatgatgttctacatgcttgggcactcccttcatttggagtaaaacgagacgctgtgcctggaagaataaatgaaacttggtttaaagcagaaaaagttggaacttattatggtcaatgttctgaactgtgtggaattaaacacgcgtttatgccaattgaagttagagttgttactgaagaggaatatcaagactggttgttagacgctaaagtcaaatttgcaaaagaaattaatgaagaagatcaatttaaaaaactagcgagtaaataa

SEQ ID NO: 224817 - DNA, 349 bp, Unknown
  Bacterial polypeptide expressing nucleotide sequence isolated from the Sargasso Sea
tatgagcgcagtaatagattcgcattcagatgatcatcatcacggcccagcaaaaggtataaccagatggttatacactaccaatcacaaagacattggtacgctttacctatggtttagctttttgatgttatttttaggtggtgccatggcaatggttatcagagctgagctatttgagcctggaagccaaatagtctctccagaattttataatcaaatgctgaccaatcacggtctgattatggtttttggagcggtcatgccagctttcgttggtttggctaactggattattcctatgcaaatcggtgctccagatatggctttaccaagaatgaataactta

SEQ ID NO: 224818 - DNA, 817 bp, Unknown
  Bacterial polypeptide expressing nucleotide sequence isolated from the Sargasso Sea
atgaaaaaatttttactaataatctcatctctttttgtaacctcaactgtgtcagctgatcagccgaaagattggcaattaggttttcaaaacgcagcatccgagtctatgagagatattgttaactttcatgataatcttcttttaccaattataattgcaataagcgtatttgttttatttttaatgatttatgcatgtataagatttagagcatcagcaaatccagttccttccaagagaacacacaatgttgctgttgaagttttatggacattaattccgtgcttaattttaattgtgatggcagtgccttcatttaaaattttatacaaacaagacaccattccaaaagcagaggttacagtgaaggcagttgggtatcagtggtactggggttatgaatatccagatgaaaatataatttttgattcttacatgattgaagataaagatctaaaagaaaatcaaccaagattattagccgtagataatgagcttgtagtaccagtagataaagtagttaaagtattaattactgcaaacgatgtattgcacgcgtgggcattaccatcattcggagttaaaagagatgctgtgccaggtagaattaatgaaacttggtttaaagctgaaaaagttggaacttattatggtcaatgttctgaactttgtggaattaaacatgcgttcatgccaataacagtcagagttgtttctgaagaagaatataatgagtggcttatggatgctaaagtaaaatttgcaaaagaagtaattgaagaggatcaatttaaaagactagcgagtaaataat

SEQ ID NO: 224819 - DNA, 526 bp, Unknown
  Bacterial polypeptide expressing nucleotide sequence isolated from the Sargasso Sea
catgcgatggttctttttcaaagaaaaagaagttgctgttgttggaggtggaaatgctgccgtagaagaagcaatgtttttgacgaagtttgcctcaaaagttaaactaatccatagaagaaatgaattaagggcagaaaaaatgctccaagcaaaactaaaagcaaataaaaaaattgaaattatctgggatagcgtcgttgaagatgttgtcggggacactaatccaaaatcagtcaaggctattaaaattaaaaatgtaaaaactaataagactaccgaattaaaagttgatggactttttatagcaataggtcatgacccagctacttcacttttcaagggtcaattaaatatggataaagaaggatatattgtaaccaatcctgactctacaataactaatgttccaggagtctttgcggctggcgatgttaaagataaaatattcaggcaggcagttactgcagctggaatgggttgtatggctgcacttgaggctgaaaaacatttgtcttcaaaatga

SEQ ID NO: 224820 - DNA, 1498 bp, Unknown
  Bacterial polypeptide expressing nucleotide sequence isolated from the Sargasso Sea
tatggcaaagcaaaaaaatcttacagcagaagatacatggttttttggtcatccgaaaggcatggttacattatttttcacagaaatgtgggaaagaatgtcttactacggaatgagagcattacttgttctttatatgactggcgcgatgacaggattcaatcctggtttgggttggtctcaaattgatgcgcaagcaatctatggtatttatgtcggaatggtatatttcatggttattcctggcggttggcttgctgacaatgtgcttggccatcaaaaagctgtattaataggagcaataataattgctcttggccactttacacttgcattgcctctcactgaaacctttttccttggtctaattcttgttgtccttggcactggattattgaaaggcaatatttcaactattgttggacaactatataaagatggcgattcaagggttcaggctggctataccattttctatatgtcaataaatattggttcaaccttaggctttttaatttgttcttatttaggagaaaagattggttggcactggggttttggagctgctggagtaggaatgttctttggagttttgcaatatattaacttcaaacatttattaggagatgcagggaaaaatcctaattccatgccgcaagctcaaagagattcttatattaaatggtcaaaaataactgctggattaatggtaataactatcgctttaggtctattaggatttctaaattttgatccaagagcatttgctgaaaactttgctgtattcctagggttagtagctttagcatattttgtttatttattcttttttgctggattaacagatcaagagaaaagaaatttaggattacttgtagttctgtttatcggtgcagcagccttttggtcaggttttgatcaatctgctggctcactaaatatttttgcaagagattacacagatctttcagtcgctggatacattattccaataggatggcttcaatttgccaacccaatatttgttgtaatattcgcaccaatttttgcaggtatctggatgcatcttggaaggatgaacttagatccatctttgccagttaaatttgcaattggcttattcttcatggcaataagttttatagttatgctttatgctgttcagcttgcaatggaagtaagtcctgtaggcatgcaatggcttatattaacttatttgctccaaacgtggggtgaacttgcgttgtctccgatcggtctatcagcattttcaacatatgctccaaaaagatatgtaggacaaatgtttggtctgtggttcttagcttcatctataggcggggtacttgcaggactcttgggcggcgaggcattaggtgaaggtctggagagcatttcaccagtatttgaatttatgattcaatactatattgtcataggagtagcacttgttttggttgctgtagttggaacctatctaagaaaaaagtctagttag

SEQ ID NO: 224821 - DNA, 808 bp, Unknown
  Bacterial polypeptide expressing nucleotide sequence isolated from the Sargasso Sea
tatgcgtattttatcctttattactgctacttttacgacttttgcgtcttcagcaaatggtatttctgattggcagttaggttttcaaacacctgcaagtgacgttatgagaaatgtttacgatcttcataactttgtattaattatgatgactgcaataacgatatttgttctttttctaatcttctatgttgtatttagatttagaagaaaagcaaatccagttgcttctaaaactactcataacacatttatagaaatactctggactgggattccagtaataatattaatttttatggctatcccatcattcaagttagtatatcagcaagatgtaatacctgaaacagatatgacaattaaagtcataggccatcagtggtactgggagtatcaatacccagaacatgatgacatttcttttgagagttatatgacacctgatgatgaattagaacctggtgacataagattattaacagtagataaccacctagttttaccagcaaataaaaatattcacgtattagttactgctggtgatgtgcttcatagttttgcaatgccttcattaggagtaaaaaaagacgcggttcctggaagacttaatgaaacatggttcaatatagatgagccaggaatatatagaggtcaatgttccgaattatgtggaacaggtcatgggtacatgcccattgttatagaagcacttaatgaaaaagattttaataattggataattgaacaaaaaagtaagttagcattagcaaacgaaataaccactaaagagaatacaatagaatag

SEQ ID NO: 224822 - DNA, 697 bp, Unknown
  Bacterial polypeptide expressing nucleotide sequence isolated from the Sargasso Sea
cataacattaaccgtgccaatgttattttgtatatctttcattataacttttttgaatggtggcctcacaggtctatttcttggaaatgttatagtggatgtacctctttcagacacatattttgtagtagctcattttcatatggtaatgggtattgctccggttcaggtcgtttttgcagccatttatcattggttccctctaatgactggtcgtatgtataacgaaacgctgggaagattacatttttggtttacttttttaggatcttatttgatttatttcccaatgcattatcttggattaattggagttccaagaaggtattacgagatgggtcaaacagaagctttgtatacacaatccgcagctgatttgaatattttcataactttgacagctcttgttacaggttttgcacaaatcttcttctttattaatatgttctggagcagaaaatatggtgttcctgcagaaaaaaacccatggcaagcaaattcacttgaatggagaacaccttcaatgcctccaggacatggaaattttggtaaagagctcccagttgtttatcgatggccttatgactttaatgttccgggcgcaaaagatgattttgtccctcaggatgttcctaattcagaggttgagttagctgagggttatgaagggacagagattaaggctgaaaaaacatga

SEQ ID NO: 224823 - DNA, 844 bp, Unknown
  Bacterial polypeptide expressing nucleotide sequence isolated from the Sargasso Sea
gatggtatgggctattgttgttataggggctctaagtttctttgtttgggcccaccatatgtatgttagtggaatgaatccatggtttggatttttctttgcaactacaacacttattattgcagttccaacagccatgaaagtatataattggattttaacactatggagaggaaatattagaattaatactgtgatgttatggtgccttggttttatagttacttttgtaaatggtggaataacaggaatttttttaggaaatgttactgttgacgttccattatcagatacttattttgttattgcacactttcacatggttatgggtatagcaccgcttatggtgattatgggagcagtttatcattggtttccattagtagctggaagaatgttgagtgaaaaattaggcaagtggcatttttggataacttttttaggagcttattcgatttattttccgatgcactatttaggttttataggagtgcctagaagatatttcgaaatgtatgatagcccttatatgacatctgctgttggaatgaatgaatttataagtttagcagccttcgtagtaggagcagctcaatttatattaatttataacatcattgtaagtttaagaatgggtaaaccagcaggtaaaaatccttggaaagcaaattcactagaatggcacacatctacagttccaccagaacacggaaactttggaaaagatcttccagtagttcacagatggccttatgatttcagtgttcctggtgctaaagaagattttattccccaaacaacaccaccaagcgaagttgctgatactaaggtagaaaaaacttaa

SEQ ID NO: 224824 - DNA, 814 bp, Unknown
  Bacterial polypeptide expressing nucleotide sequence isolated from the Sargasso Sea
catggactatgtaaggcctgcagaaaatcctgaacaagatttgtatcatgctcatagttttattgagaagtgggtattttgccaggatgcaaaagttataggagtacaatattttttaacagcagtcttcacaggtgttgtaggtttaattttatcatggctgatgagattgcaactaggttttccaggtttagcaggttttataactgctgaacattattatcaattcgttactatgcacggaatgataatggtagtttactttttaactgcattattcctaggtggatttggaaattatttaataccattaatggttggtgcaagagacatggtttttccatatgtaaacatgttaagtttttggatgttctttgtagcagtagcagttttgatggctagtttttttgttccaggaggaccgactggtgcgggttggacattgtatcctcctcaaactattttagagggaacccctgggcatggttggggaattttattgatgttaatttctttatctcttttcgtcataggttttacgatgggaggcttgaattatatgattactattcttcaggcaagaacgaggggaatgacactaatgagaatgccattaactgtatggggtatatttactgcaacagtcttagcaatgctagcatttccagcacttttagtcagctctataatgatgacactagataagcttttaggaacaagtttctttatgccaactattttaaaagcaggtgaagttttagagtatggtggtgggagccctattttgtttcaacacttattctggttctttggg

SEQ ID NO: 224825 - DNA, 604 bp, Unknown
  Bacterial polypeptide expressing nucleotide sequence isolated from the Sargasso Sea
tatgacaacactagatagctctaaagaaattcaaaaaaataattctgaagttaatgaaacacatgaagacttcagaatgtttggtcttataactttcctaattgcggacggaatgacttttgctggattctttgctgcttatttaacttataaagcagtaaatccattaccagatggtgctatttatgaattagaactaccaatacctactctcaatacaattttgttacttgttagtagtgcaactttccataaagcaggcaaagcacttttaaaagataaaaactcagattcccaaaaatggttattttttactgcttttcttggaattatatttttaatatgtcaattatttgaatattttcatttaccttttggattaaccgataatttatttgcaagtactttttatgctcttactggttttcatggattacatgtcactttaggcactttaatgattttaattattgcttggcaatcgagaatcaatggcggaagattaaccagtcaaaatatgtttccattggaagctgttgaattgtactggcattttgtagatggaatatgggttgttttatttattattttgtatcttttataa

SEQ ID NO: 224826 - DNA, 509 bp, Unknown
  Bacterial polypeptide expressing nucleotide sequence isolated from the Sargasso Sea
tatgagcgcagttatagaaaatcatcatgacgatcatcatcatggtccggccaaaggcataactagatggctatacacaaccaaccataaggatataggaactttatatttgtggtttagttttgctatgttcttaattggcggagctatggcaatgataataagagcagagcttttttcaccaggtatgcaaattgtagaaccagaattttataatcaaatgattaccttgcatggcttaataatgatttttggcggtgtcatgcctgcttttgttggattggcaaattggctagtaccaatgatgattggagcaccagatatggctcttccaaggatgaataatctaagtttctggatactgccatttgcattctttatattactatcatctttgttcatggaaggaggcgctccaaattttggatggactttttatgctcctctttcaacaacttatgcacctccaagcgttacattttttatattttcagttcatataaatgggg

SEQ ID NO: 224827 - DNA, 586 bp, Unknown
  Bacterial polypeptide expressing nucleotide sequence isolated from the Sargasso Sea
ttcaaaagaaattaaaaaaaatgatagtgaagcgagtgaacatcatgaagactttaggatgtttggattaataacttttttaattgcagatgggatgacttttgctggcttctttgctgcctacctcacatataaagcagttaatcctttaccagatggggctatttatgaattagaacttcctatacctacattaaatacaattttattgcttgtaagtagcgcgacttttcataaagcagggaaagctcttcttaaaaataaaaattctgatagtcaaaaatggttactagtcactgctctacttgggattacttttttaatatgtcaactatttgaatattttaatttgccgttcggactaacagataatttatttgcaagtactttttatgccttaactggctttcatggtttacatgtaactttagggacattaatgatattaattatttcttggcaaacaagaccaaaggaaggaagaattactaatcaaaatatgttcccactagaagctgttgaattatattggcatttcgtagatggaatttgggtgattttatttataattttgtatcttttatag

SEQ ID NO: 224828 - DNA, 691 bp, Unknown
  Bacterial polypeptide expressing nucleotide sequence isolated from the Sargasso Sea
tatgtctaacaaccaaagcgtatcttttgaacactccattcctgacaatttaaagggcttggttgccgattggtcatcagatgttcaaacctttagagtaaggtggagcaaggccatgatgtggatttttttggtcagcgatacttttatatttggctcctttctatgtgcttacatggcagtgaggttaaccacaatagagccttggccacccacgagtgaagtctttgctcttcacgttggtggagcagatgttcccttattgctaattgcaatcatgacattcatattgatcagtagcagcggaaccatggcgatggcagtgacctctgggtacaagaaacagaggaagaaaacagctttcttgattctcttgacagcacttggaggtgttgcatttgttggaatgcagatgtttgagtggagcaaacttatttttgaagagggtattcggccatggggcaatccgtttggcgctgctcagtttggtggtttctttttcatgatcactggctttcatgggcttcacgtatcgattggtgttgtttacctaaccattgttgcaaagagggtttgggaaggacgttacgacaagcttaacgattaccaaatggttgaggtagcaggtttatattggcactttgtcgatttggtttggatatttattttcgcattcttttatttgtggtag

SEQ ID NO: 224829 - DNA, 745 bp, Unknown
  Bacterial polypeptide expressing nucleotide sequence isolated from the Sargasso Sea
attggcaactaggctttcaaaggctgcttccgagactatgagagatatagttaattttcacgataaattgttgttaccaattataatagcaatcagcgtttttgtactatttttgatggtttatgcttgtataagatttagagcatcagcaaatccggttccatcaaaaagaactcataatgttgctgttgaagttttatggactttaattccttgtttaattctaatcgtgatggcagttccatcatttaaaattttatataaacaagattcaattccaaaggcggacataactgttaaagctataggatatcaatggtactggggatacgagtatccagatgaaaatatcttcttcgactcttacatgattgaaactaaagatttaaaagaaaacgagccaagacttttagctgtagataatgagctagttgtaccagtaaataaagttgttaaagtaatgatcactgctaatgatgttctacacgcttgggcactcccttcatttggagtaaaacgagacgctgtacctggtagaataaatgaaacttggtttaaagcagaaaaagttggaacttattatggtcaatgttctgaactttgtggaattaaacacgcgtttatgccaattgaagttagagttgttactgaggaagaatatcaagagtggttgttagacgctaaagtcaaatttgcaaaagaaattaatgaagatgatcaattcaaaaaactagcgagtaaataa

SEQ ID NO: 224830 - DNA, 807 bp, Unknown
  Bacterial polypeptide expressing nucleotide sequence isolated from the Sargasso Sea
tttttgtatgggcacaccatatgtatgttagtggaatgaatccttggtttggattcttttttgcaaccaccactcttataatagccgttcctacagcaatgaaagtctataactggattttaactctttggagaggaaatattcgacttaatactgttatgttatggtgtttaggttttattgttacttttgtaaacggcggaattacaggaattttcttaggaaatgttagcgtagatgttccgttatcagatacttattttgttattgcacactttcatatggtaatgggtattgcaccacttatggtaattatgggagctgtttaccactggtttcctttagtagctggaagattcttagatgaaaaattaggaaaatggcatttctggttaacttttttaggcgcttattcaatttatttcccaatgcactacttaggatttattggggtaccaagaagatattttgaaatgtatgacagtccatatgtaacatcggctgtcggaatgaatgaatttattagtttagcagcctttatagttggagctgcgcaatttattttaatttacaatattgttaaaactttaaaaacagggaagcctgcaggacataatccttggcaagcttgctcactagaatggctaactccaacagttccgcctgaacatggtaattggggggatagacttccaacagttcatagatgggcttatgattatagcgttcctggggcaaaagaagattttataacacaaactacaccaccaagtgaagtggcgcatacgaaagtagagaaaacataaa

SEQ ID NO: 224831 - DNA, 502 bp, Unknown
  Bacterial polypeptide expressing nucleotide sequence isolated from the Sargasso Sea
catgacgattgcctcacccccgagccccagtccttcgccattgcggctgcaacccacaggctggctgcgctacttcagcttcagccttgatcacaaggtgatcgggctgcagtacatcgtttgcggattcctcttttatttcgtcggtggtgccctcgctggcgtcatccgtactgaactcgccacaccgatctctgacttcgtcagccgtgacacctacaaccaggtgctgacgttgcatggaaccgtcatgatctttttgtggatcgtgccagtggtgaatggtggttttggcaactacttaattcccttctatgtcggcgcccgggacatggccttcccgcgcctgaatgcggtggcgttttggatgattcccccttcagggctgctgctgatcagcagctatttcatcgggggtgcggctcaatcgggctggacggcctacccaccgttaagcctcaccactccagcgatggggcaaatcctctggattgtgagcgtg

SEQ ID NO: 224832 - DNA, 744 bp, Unknown
  Bacterial polypeptide expressing nucleotide sequence isolated from the Sargasso Sea
ggcaactaggctttcaaaaggctgcttccgagactatgagagatatagttaatttccacgataaattgttgttaccaattataattgcaatcagcgtttttgtactatttttgatggtttatgcttgtataagatttagagcttcagcaaatccagttccatcaaaaagaactcataatgttgctgttgaagttttatggactttaattccatgtttaattctaatcgtgatggcagttccatcatttaaaattttatataaacaagatgcaattccaaaggcggatataacagttaaagctataggatatcaatggtactggggatacgagtatccagatgaaaatattttcttcgactcatacatgatcgaaactaaagatttaaaagaaaacgagccaagacttttagctgtagataacgaattagttgttccagtaaataaagttgttaaggtaatgatcactgctaatgatgttctacatgcgtgggcactcccttcatttggagtaaaacgagacgctgtacctggaagaataaatgaaacgtggtttaaagcagaaaaagttggaacttattatggtcaatgttctgagctatgtggaattaaacatgcatttatgcctattgaagtaagagttgttactgaagaagaatatcaagagtggttgttagacgctaaagtcaaatttgcaaaagaagttaatgaagaagatcaatttaaaaaactagcgagtaaataat

SEQ ID NO: 224833 - DNA, 691 bp, Unknown
  Bacterial polypeptide expressing nucleotide sequence isolated from the Sargasso Sea
tatgtctaacaaccaaaccgtatcttttgaacactcaattcctgacaatttaaaggggttggttgctgattggtcttcagatgttcaaaccttcagggtgagatggagtaaggccatgatgtggatcttcttggtcagtgatacttttatatttggctccttcctatgtgcttacatggcagtaaggttgaccaccatcgagccttggccacctaccagtgaagtttttgctcttcatgtaggtggagcagatgttcctttattgctgattgcaatcatgacattcatattgatcagtagtagcggaaccatggcgatggcagtgacctctggctataagaaagagaggaagaaaacagctttcttgattctcttaacagcacttggtggtgttgcatttgttgggatgcaaatgtttgagtggagtaagcttatttttgaagagggcattcgaccatggggcaatccgtttggtgccgctcaattcggtggcttcttttttatgatcacaggctttcacggactgcatgtatcgataggtgttgtttacttgtgtattgttgcaaaaagagtttgggaaggccgttatgacaggcttaacgattaccaaatggttgaggtcgcgggattatattggcactttgtcgatttagtctggatattcattttcgcattcttttatttatggtag

SEQ ID NO: 224834 - DNA, 1060 bp, Unknown
  Bacterial polypeptide expressing nucleotide sequence isolated from the Sargasso Sea
tatgaatgtgcttaatcttaccgagggcgttacaccaacaagtaaaatggtctacggacttcacatgcaaattttgtatattgttactgcaattggtgtagttgttttttctgttatgtgttggtcgatatatcaccatagaaaatctaaaggcgcggtcgctgaacagtttcatcatagcactacagccgaaattacgtggacaataattccaattattatacttgttgttatggcaatccctgcaacaaaagctttagtttttatggaacaaacgggcgatgctgaaatgacaatcaaggttacgggttaccagtggaagtggaaatatgattatctcgatgacgatattagtttctttagttctttgtctaaggatagcaatgatgcaagacagctaggttcaggcatcgatccgaaaactatcgaaaactatttattggacgttgataaccgtgttgtacttcctataaacacaaaaatacgaatacttacaaccgcagcagatgtaattcatgattggtgggtacctgctttaggttggaagcgtgatgcaattccagggtttataaacgacaattggacttatattgaggagccaggagtttaccgcggcaagtgtgcggagctttgtggtagagatcatgcatttatgccaattgttgtcgaggcggttcccaaagccgaatatgctgtatgggttgaagaacaaaaaacaatgcaacttgcagcagcagaaggcgcagagagggagtggactaaagacgaattattagagaaaggcaaagatgtgtatgctgcaaattgtactgcctgtcatatggcagaaggacaaggtgttgaaggcttgtttccagctttaagcgggagtgctattgtgaataacacagatgcgtctgaaatgattatgttaattcttaacggaaaaaatatgatgccggcttttaaagacatattgaacgatgcagatatagcagcggcaatgactcatgaaagaaattcttggggcaacactgttaaagatgttattcagccatccgatgtaaaagcaatgagatag

SEQ ID NO: 224835 - DNA, 814 bp, Unknown
  Bacterial polypeptide expressing nucleotide sequence isolated from the Sargasso Sea
aatgaaaaaaattttattaataatttcaagcatttttatttcaggaaatacatttgctgatcaacctaaagactggcaattaggttttcaaaatcccgcatcagatggaatgagagatatagtcaattttcataacaatcttttacttccaattataattgcaattagcgtttttgttttatttttgatgttatatgcatgtgtaagatttagagcttcagcaaatccaaccccttcaaaaagaactcacaacgttactgtagaaattctatggactttaattccatgtttaattttaatagtaatggcagttccatcatttaagattttatataaacaagatacaattccaaaagctgatttaactattaaagctgttggatatcagtggtattggggatacgaatatcctgatgaaaatataatatttgactcatatatgattgaagaaaaagatctgaaatcagaccaacctagactactttcagtagataatgaagttgttgttccagtaaataaagttgtaaaagttttaatcacagctaatgatgttctacacgcatgggcattaccagcatttggtgttaaaagagatgcagtccccggtagaattaatgagacatggtttaaagcagaaaaagaaggaacttactatggccagtgttctgaactatgtggaattaaacatgcttttatgccaattactgttaaggtagtaagtgatgaagaataccaagaatggttatcagaggcacgagtaaaatttgcaaaagaagaaattggaaatgataaattaaaaatagcgagtaaataa

SEQ ID NO: 224836 - DNA, 742 bp, Unknown
  Bacterial polypeptide expressing nucleotide sequence isolated from the Sargasso Sea
tatgacaatatcaattgatccacaaaaaactaataatgaaagtcttcaacctaaaggctggcttagatactttagttttagccttgatcataaagtaattgggatacaatacttagtctgcggttttcttttctatttaataggcggaacgttagctagcgctataagaattgaactggctagtccgatgtctgactttatgccgagagatgtatataaccaagttttaaccctacacggaacaataatgatttttctatggatagtgcctgtagttaacggtgcttttgggaattatttaattccattttatgtaggtgctagagatatggcattcccaagattaaatgctgtggctttttggttaattcctccttcaggtttgatgctggtagcaagctattttgttgagggtgctgctcaggctggatggacggcttatcctcctttgagcataactactcctcaatcaggacaaattatttggattctgagcgttctattacttggaggcagttctatttttggtggaataaactttatcgcgaccattatcaaattaagaaggccaggattaaaacttatgcaattgccaatgtattgttgggcaatgctagggacaagtctattagttgttttgtcaactcctgttttagcaggcactttaattctacttagcttcgatatcattgctaatacaggttttttcaatcctgttttaggcggcaatgtcgtagtttat

SEQ ID NO: 224837 - DNA, 1981 bp, Unknown
  Bacterial polypeptide expressing nucleotide sequence isolated from the Sargasso Sea
catgtcttttctcggtaaattaagcttagatgcgatcccgtatcatgagcctatcatcatggtgacccttgcggttgttgccgtgataggcctgtacgtcgcagccttgatcactaaacacaaaaaatggggtgtgctttggcacgactggttaacctcggttgaccataaacgcctcggtatcatgtacatagtgcttgcctttatcatgctgatccgcggtttttccgacgccatcatgatgcgtacccagcaggcactggccaccaatggcgccgcaggttatctgccgccagaacattacgaccaaatcttcaccgcccacggcgtgatcatgattatctttatggcgatgccatttatgatcggtctaatgaacttagtgctgccactgcaaatcggtgcccgcgacgtagccttccccttcttgaacaacctcagcttctggctaaccgcgtctggtgccgtgctgatcaatatttcattaggtttaggtgaattcgcccgtaccggttgggtagcttacccgccgttgtctgaactagcttacagtccgggcgttggggtcgattactatatctgggcgctgcagatttcggggatagggacaaccttaaccggggtcaactttatcgcgactgtgcttaagatgcgtgctccaggcatgaagctgatgcaaatgcccatcttcacttggacttgtacttgggccaacatcctgatcgtggcgtcgttcccgatcctgactgcggttttagcgctgttaacactcgatcgctacatgggtttccacttcttcaccaatgatggtggtggtaacgccatgatgtatatcaacctgttctgggcttggggtcaccctgaagtgtacatcctgattttacctgcgttcggtatcttctcggatgtgatttcaacctttacctctaagcgtctgttcggctattcctcaatggtatgggccagtggcgcgatttcgatcctcggttttatcgtgtggttacaccacttcttcaccatgggctcgagtgccaacgtcaacgccttcttcggcgtgatgaccatggtgattgcggtcccgactggggtaaaactgtttaactggttgttcaccatttaccgcggccgcctgcgcttaactgtgccagtgctgtggaccttaggctttatggtgactttcaccattggtggtatgacgggcgtgttattggccgtacctggcgccgactacgtactgcacaacagcttgttcctgatcgctcacttccataacaccattatcggtggtgccgtgtttggttacttagccggttttgcttactggttcccgaaagcgacgggtttccacttaaatgagcgtttaggtaaagcgtcattctggtgctggcagattggtttctatgtggcctttatgccgctgtatgtactcggttttatgggtatgactcgccgtatcaaccacattgataacccagcatggaacctgtggatctatatcgctgccgtgggtgcttgcatcatcatggtcggtatcattctgcaattcgtgcaactgtacgtgagtatccgtgactgcgaccaaaaccgtgacaccacgggcgacccatggaatggccacacgctggaatggtcaaccgcctcaccaccacagttctacaactttgctaagttgccacaagtgtctgatatcgacgcctttaccgatgcgaaagaaaaaggcaccgcctatcaacgccaaaaacactatcagccaatccatatgccgaaaaataccccaagcgggatcttaatggcgctgggtattaccgccgcgggctttgctgcgatttggcacattctgtggctcgcgattgtgggcatggtgggcgcgtttatcgtgttcttattccgtgcttataacaacgatgttgactattacgttcaacccgatgaagtggcacgcattgaaaatgctcacttaaacaatgtagtaaggggctga

SEQ ID NO: 224838 - DNA, 817 bp, Unknown
  Bacterial polypeptide expressing nucleotide sequence isolated from the Sargasso Sea
aatgaaaaaatttttatttataattctatcatatttcgttgcatcaagtgcttttgctaaccaaccaaaggattggcaactcggctttcaagaagcagcatcttcttcaatgagagagatcgttaactttcatgacaaattattattaccaatcattattgctatcagcgtttttgttttatttttgatggtttatgcatgtattagatttagagcttcaagaaatccaaatccatctaccactacacacaatgttgcagttgaagttttatggacattaataccatgtttgattttaattgtaatggctgttccatcttttaaaattttatataaacaagatgcaattccaaaagcagatgttacggttaaggcaataggttaccaatggtactggggttatgaatatccagatgaaaatattatttttgattcttacatgattgaaacaaaagaccttaaaaaagatcaaccaagactacttgcggtagacaatgaagttgttgttccagttaataaggtagttaaagttttaattactgcaaacgatgtattacatgcttgggcacttccttcgtttggcgttaaaagagatgctgtgcctggaagaataaatgaaacttggtttaaagctgaaaaagtaggaacatattatggtcaatgttcagaactttgtggaattaaacatgcatttatgcctattactgtaagagtagtttctgacaaagaatatcaagaatggttaacaagtgctaaaataaaatttgcaaaagaaattatggaagaagatcaatttaaaaaactagcgagtaaataa

SEQ ID NO: 224839 - DNA, 428 bp, Unknown
  Bacterial polypeptide expressing nucleotide sequence isolated from the Sargasso Sea
aatgtcagctgaaaaaaaacatgattatcatttagtagacccaagtccttggcctatttacgtctcgttttcttgcttagtattagctataggtgctgtgtattatatgcattcagatgtttcatggggaatgtatcttggattagctcttctaatttatggcgcatatatgtggttcagagatgtagtgattgaagcagaacataaaggtcatcatacaccggtagtccaaattcaccatcgttatggaatgactttatttattgcatctgaggtgatgtttttcgttgcttggttttgggcttactttgacgtaagtctttttccaaatgattttgtaggaaatgtgtggccacctaaagatattgtgacttttgatccttgggatatacctttaattaatacattagttttactgttatcaggta

SEQ ID NO: 224840 - DNA, 394 bp, Unknown
  Bacterial polypeptide expressing nucleotide sequence isolated from the Sargasso Sea
tggagcaatattctctatcatggccgctgtttattactggattccaaaatggtctggaaatatgtatgacgaaagacttggtaaacttcatttttggctttcatttataggtgtaaacgtaacattctttccacaacattttattggtttagctggaatgccaagaagatatcctgattatgctctaatatttgctgactggaacatggtttctagtattggagcatttttatttgggttctctcaattactatttttatttattgttatcaagactgtgatgggtggcaaaaaggcaacagatcaagtttgggaaggcgctaaagggcttgagtggacagttgcttcaccagctccatatcatacattttcaacaccaccaaaggttgattga

SEQ ID NO: 224841 - DNA, 1981 bp, Unknown
  Bacterial polypeptide expressing nucleotide sequence isolated from the Sargasso Sea
atgtcttttctcggtaaattaagcttagatgcgatcccgtatcatgagcctatcatcatggtgacccttgcggttgttgccgtgataggcctgtacgtcgcagccttgatcactaaacacaaaaaatggggcgtgctttggcacgactggttaacctcggttgaccataaacgcctcggtatcatgtacatagtgcttgccttcatcatgttgatccgcggtttctccgacgccatcatgatgcgtacccaacaggcactggccaccaatggcgccgcaggttatctgccgcctgaacattacgaccaaatcttcactgcccacggcgtgatcatgattatctttatggcgatgccatttatgatcggtctaatgaacttagtgctgccactgcaaatcggtgcccgcgacgttgccttccccttcttgaacaacctcagcttctggttaaccgcatctggtgccgtgctgatcaatatttcattaggtttaggtgaattcgcccgtaccggttgggtggcttacccgccgttgtctgagctggcttacagtccgggcgtcggggtcgattactatatctgggcgctacagatttcggggatagggacaaccttaaccggggtcaactttatcgcgactgtgcttaagatgcgcgctccaggcatgaagctgatgcaaatgccaatcttcacttggacttgtacttgggccaacatcctgatcgtggcttcgttcccgatcctgaccgcggttttagcgctgttaacactcgatcgctacatgggtttccacttcttcaccaatgacggtggtggtaacgccatgatgtatatcaacctattctgggcttggggtcaccctgaagtgtacatcctgattttacctgcgttcggtatcttctcggatgtgatttcaacctttacctctaagcgtctgttcggctattcctccatggtatgggccagcggcgcgatttcgatcctcggcttcatcgtgtggttacaccacttctttaccatgggctcgagcgccaacgtcaacgccttcttcggtgtgatgaccatggtgattgcggtcccgacaggggtaaaactgtttaactggttgttcactatttaccgcggccgcctgcgcttaactgtgccagtgctgtggaccttaggctttatggtgactttcaccattggtggtatgacgggcgtgttattggccgtacctggcgccgactacgtactgcacaacagcttgttcctgatcgctcacttccataacaccattatcggtggtgccgtgttcggttacttagccggttttgcttactggttcccgaaagcgacgggtttccacttaaatgagcgtttaggtaaagcctcattctggtgctggcaaattggtttctatgtggcctttatgccgctgtatgtactcggttttatgggtatgactcgccgtatcaaccacatcgataacccagcatggaacatgtggatctatatcgctgctgtgggtgcttgcatcatcatggtcggtatcattctgcaattcgtgcaactgtacgtgagtatccgtgaccgcgaccaaaaccgtgacaccacgggcgacccatggaatggccacacgctggaatggtcaaccgcctcaccaccacagttctacaactttgctaagttgccacaagtgtctgatatcgatgcctttaccgatgccaaagaaaaaggcaccgcgtatcaacgcctcaaacactatcagccaatccatatgccgaaaaataccccgagcgggatcttaatggcgctgggcattactgccgctggttttgctgcgatttggcacattctgtggctcgcgattgtgggcatggtgggcgcgtttatcgtgttcttattccgtgcttataacaacgatgtcgactattacgttcaacccgatgaagtggcacgcattgaaaatgctcacttaaacaatgtagtaaggggctgat

SEQ ID NO: 224842 - DNA, 580 bp, Unknown
  Bacterial polypeptide expressing nucleotide sequence isolated from the Sargasso Sea
cttggactgtgatacccatagttatactgtattcatcggtgcgttttctttaccagtgctttttgaccagcagaaaattcctgagggtgaagtaaatataaaggtgactggatatcagtggtattggggttatgaatatgtagatgaaggtttcgagtttgaaagttttctaattggcgaaggaaaagttttaacgccggaggttgagcttgaattacaagaagcaggctacactcgtgatcaatttttacttgctactgacaccgccgtagtcgttcctgtcgataaaacagttgtaatgcaagttactggagctgacgttatacatagctggactattcccgcctttggcgtaaaacaggatgcagtgcccggtaggctaggacaattgtggtttaaagctgagaaagagggaatatattttggtcagtgctctgaactatgtggaaaagatcatgccttcatgcctatcacagtaaaggttgtgagccaggatgcttacaacgcttggttatctgcagctaaatcggaatatgctggaatcgctcaatcttataacatagcagaggtttccaaataa

SEQ ID NO: 224843 - DNA, 109 bp, Unknown
  Bacterial polypeptide expressing nucleotide sequence isolated from the Sargasso Sea
atgtatcttggtttagctttattaatttatggtgcatatatgtggtttagagacgttgtaattgaagctgaacatcaaggtcatcacactcctgttgttcaaattcatc

SEQ ID NO: 224844 - DNA, 754 bp, Unknown
  Bacterial polypeptide expressing nucleotide sequence isolated from the Sargasso Sea
tcagccagttgattggcaactaggttttcaaaaggcggcctctgagtctatgagagatatagtggcatttcatgataatcttttattgccaataataattgcaataagtgtatttgtactatttttaatgctttacgcttgtgtgagatttagagcttcggctaatcctaacccttcaaaaagaacacataatgtaactgtcgaagttttatggactttaattccatgtttaattctgattgtaatggcagttccatcattcaaaattttatacaaacaagacgcaataccaaaagcagatttgacaattaaagctgtcggataccaatggtattggggatatgaatatccagatgaaaatttaatttttgactcttatatgattgaggaaaaagatttgaaagctgatcaaccacgattacttacagtagataacgaagttgttgttccggtaggaaaagtagtaaaagttttaattacggcaaatgatgttttacatgcatgggctttaccttcatttggagtcaaaagagatgcagtgccaggaagaattaacgaaacatggtttaaagcagaaaaagttggtacttactatggtcaatgttcagaactttgtggaattaaacacgctttcatgccaattgctgtaaaagttgtaagtgaggaagaataccaagaatggttatctgaggcgcgagtaaaatttgcaaaagaagaaattgaaaatgataaacttaaattagcgagtaaataa

SEQ ID NO: 224845 - DNA, 814 bp, Unknown
  Bacterial polypeptide expressing nucleotide sequence isolated from the Sargasso Sea
aatgaaaaaattcataacaaccttattaacctcattaatttcattacctgcttttgccaatcaaccggagaagtggcaattgagttttcaagagcctgcatctcagacaatgagagatattgtgtggttccacgactatatgttgcttccaattattgttgcaataagtgcgtttgtgttgtttctgatgttatatgtgatggtgagatttagagagtctagaaatcctaatccgtcaaaaagaactcataatgttgcagtggaaataatttggacattggttccatgtttaattctaatagtaatggctgttccatcatttaaggttttgtattctcaagatacaattccaaaagcggatgtaactattaaagcaattggatatcagtggtactggggctatgaatatccagatgaaaatataatttttgactcatacatgattgaagaagaggatttaaaagagggtcaaccaagactactagcagttgataacgttgtagtggtgccagtaaataaagttgtaaaagtattaattacagcaaatgatgtattgcatgcatgggcattaccttcatttggagttaaaagagatgcaatgccaggaagaattaatgaaacatggtttaaagcagaaaaagttggaacatactatggtcaatgttcagaattatgtggaataaagcacgcatttatgccaattgaagtaagagtagtttctgatgaggactatcaagcatggttgtcagatgcgaaaataaagtttgcaaaagacgaaagtttaattaataaaaatttaatagcgagtaattaa

SEQ ID NO: 224846 - DNA, 691 bp, Unknown
  Bacterial polypeptide expressing nucleotide sequence isolated from the Sargasso Sea
tatgtctaacaaccaaagcgtatcttttgaacactcgattcctgataatttaaagggattggttgctgattggtcatcagatgttcaaacctttagagtaaggtggagcaaggccatgatgtggatttttttggtcagcgatacttttatatttggctccttcctatgtgcttacatggcagtgaggttaaccacaatagagccttggccacccaccagtgaagtctttgctcttcacgttggtggagcagatgttcccttattgctaattgcaatcatgacattcatattgatcagtagcagtggaaccatggcgatggcagtgacctctgggtataagaaacagaggaagaaaacagctttcttgattcttttaacagcgcttggaggtcttgcatttgttggaatgcagatgtttgagtggagcaaacttatttttgaagagggtattcggccatggggcaatccgtttggggctgctcagtttggtggtttctttttcatgatcactggctttcacgggcttcacgtatcgattggtgttgtttacctaaccattgttgcaaaaagggtttgggaaggacgttacgacaagcttaacgattaccaaatggttgaggtagcaggtttatattggcactttgtcgatttggtttggatatttattttcgcattcttttatttgtggtag

SEQ ID NO: 224847 - DNA, 310 bp, Unknown
  Bacterial polypeptide expressing nucleotide sequence isolated from the Sargasso Sea
attgcatttttggctttcatttgtaggcgtaaatgtaaccttttttccccaacactggattggcctagctggaatgccaagaagatatccggactatgctcttcagtttgcagactggaatatggtttcaactgctggagcatttttgtttggcgcttctcaaattttatttttatttatcgttcttaaaacagtaatgggtggaaagaaagccactcgtcaagtttgggaaggagcaaaaggcttagagtggtcagttgaatcaccagccccatatcatacgttctcaacaccgccaaaagtagactaa

SEQ ID NO: 224848 - DNA, 1045 bp, Unknown
  Bacterial polypeptide expressing nucleotide sequence isolated from the Sargasso Sea
aatgaacacatacaaagaaattcaggaaaaattatgtaaatgtcaaaatacttggttaattacaggtgctgctggttttattggctctaatttagttgaaaaactattaattctgaatcagaaagttgttggtcttgataattttgatacaggccatcagcataatattgatcaagcaatacatgatgcatctacctcaattggtaaagatttaagcaataattttgtatttaaaaatggagatattagagactttaaggactgtaatagtgcatgtgaaggcgttgattatgtgcttcatcaagcagcgcttggatctgtacctcgatcaattaaagatcctataaactctaacaaagcaaatattgatggttttctaaatatgttagtagctagtaaagacgcagatgtaaagaggtttgtgtatgctgcatccagctcaacttatggcgatcatcctgatcttcccaaagtggaagataagactggtaatccgttgagtccttatgccgtgacaaagctagcaaatgaattatatgccaaagtatttgcaaagacttatgaatttaagacaatcggtttaaggtattttaatatttttggcaagagacaagatccgaatggtgcatatgcagctgttattcctaaatgggttgctgcaataataaatggtgatgacgtttatattaatggtgatggaaagacaagcagagacttttgttacgttgataatgctgtccaaatcaatatccttgctgccatgactgaggatgatgaggctgtagaccaaatttataatgttgctctcaacgataatactagtttaaatgaactttatcgtattattgaatcagggcttatcagaagaattgatggattaaaaaataagaaaccaatatacagagattttagaccaggagatgtaagacactctcaggcaaatattgacaaggcgaaaacattgctaagttatcagcctaagtacaaaatatctgaaggattagatgaagcaatggattggtatatacaaaatttgtcaaaataa

SEQ ID NO: 224849 - DNA, 604 bp, Unknown
  Bacterial polypeptide expressing nucleotide sequence isolated from the Sargasso Sea
catgacaactctagatagctcaaaagaaattcaaaaaaataattctgaagtcaacgaaacacatgaagacttcagaatgtttggtcttataactttcctaattgcggacggaatgacttttgctggattctttgctgcttatttaacatacaaagcagtaaatccattacctgatggtgctatttatgaattagaactcccaatacctacactcaatacaattttgttacttgttagtagtgcaactttccataaagcaggcaaagcacttctaaaagataaaaactctgaatcccaaaaatggttattttttactgcttttcttggaattatatttttaatatgtcaattatttgaatattttcatttaccttttggattaaccgataatttatttgcaagtactttttatgctcttactggttttcatggattacatgtcactttaggcactttaatgattttaattattgcttggcaatctagagtaaatgacggaagagtgacgagtagcaatatatttccattagaagctgttgaattgtactggcactttgttgatggaatatggattatattatttattattttgtatcttttataa

SEQ ID NO: 224850 - DNA, 571 bp, Unknown
  Bacterial polypeptide expressing nucleotide sequence isolated from the Sargasso Sea
atgaaaggtttgttagatgaaggaaataatgtctgggtatctaaaaacgatgatcctaaaagaaaattaaagtttactttagaaatgatcgaagcaaataatatgtttattggtgttaacacacatagagcaaataaaattgttcaccatgcattaaaaaataaactcattaatgagtttaaatcaatagataaaatccaaagtgaatttaaatactcaaatgatacgagatttgattttctttgtgataataaattattggaagttaaaaatgtaacattgttaagagactcaaaaatagcagaattcccagatgcagttacttcaagaggtacaaaacaccttaaaaatttaataaattcgattaaaaaaggctacaaacccttcgtcttatttttaactcaaatacaaggtataaataattttaaaatagctaaagatatagatgaggaatattataaaaactatcttattgctaaaaaagctggtgtaaactttatagcttatagatgtaaattaagttctaaagaaataaaaattgaaaaaaaaattaaaataattgatgaataat

SEQ ID NO: 224851 - DNA, 511 bp, Unknown
  Bacterial polypeptide expressing nucleotide sequence isolated from the Sargasso Sea
atgacaaaaataattgagccaaataaacaaagtaatatctttaaaaggccttcttccgagacaggtatatggagttggataacaactgtagatcacaaaagaatcggaattatgtatggctatgccgcattcttctttttattgattggtggacttgaagcattgatcctgagaattcagctttcacaaccagataataatttcttaacggctgcagagtacaatgcgatgtttaccatgcacggaacaacaatgatctttttggcaataatgcctattagcgctgcattctttaattatttacttccattacaaattggggctagagatgttgcttttccaagacttaatgctttgtctttctggatatttatatttggaggagctttcctttactctacttttatttttggaactgcaggtgctccggaaggtggataccttgccgaagaagttggttggctaggttctgctcctaatggtggctggtttggatatcaaccaaatgctg

SEQ ID NO: 224852 - DNA, 586 bp, Unknown
  Bacterial polypeptide expressing nucleotide sequence isolated from the Sargasso Sea
tatgagtgatgcccacgcttatcctcatgaaccaactggagttgaaacaagaaaattagggttttgggtatttttatcaaccgaaatcttattttttggaaccttaatcactacttttttaatctttaaaggtagagattttccaggtatcaaattaactgatgtttacgatattccatttacatctgtcagttctttcgtcttgttaatgagctcattaacaatggtcctcgcgcacaacgcccttgagactaatgatcaagaaaaaactagggtttggttacttgcaacagctatgcttggtgctgtttttttagctggccaaatttatgagtttacagagttttatcataaggggtttgaactatcaaccaacatctttagttcaactttttatgttttgactggctttcatggacttcatgtatttattggtgttgttttgttactagctttatggggcattggacaaagacaaaaaggcctgtctttaaatgaaggtatgaatcttgaatttattgcactttattggcactttgttgacattgtttggattgtgttgtttacggtagtctatcttatctaa

SEQ ID NO: 224853 - DNA, 829 bp, Unknown
  Bacterial polypeptide expressing nucleotide sequence isolated from the Sargasso Sea
tatgaaaaatattattaagatattattttttcttcttattccttctttttctcatgcaaatgaaggcatttctgaaaattggcagctgagctttcaacagcctgcaactgatttaatgtctgacattatatcatttcatagttatatcttaatgcctatcattacaggcatatcacttttagtacttggtcttctgctatatatcatgttcagatttaatagcagccgtaatcacgttgcttccacgacaacacataacacaacaattgaaatattgtggactgtaataccagtaatattgttaattattattgctattccatctttcagattactttacgtttctgaaacaataccgaaggcagatataacaattaaggctattggcaatcaatggtattggacctacgagtaccctgatttcgatgatatctcttttgatgctaacatgcttgctgatcatgagctatcagatccaaagttaagattgttagagactgatactcaaattgttgtaccagtagataaagtggtcaagcttcagctaacttcagcagatgtactgcacgcttggacaattccagcatttggcgtcaagatggatgctgtaccgggaagattaaatgaaacatggtttaaggctaataaagaaggaatttattatggccaatgctcagagctttgtggtccaaaacatgcatttatgcccattaatgtaaaagttgtttcaaataaggaatttgaagagtggatcgaatttgctaaatctgagtatgcatcctcagggattaattacagtgacgatacatttgaaatggctaaaaaataa

SEQ ID NO: 224854 - DNA, 586 bp, Unknown
  Bacterial polypeptide expressing nucleotide sequence isolated from the Sargasso Sea
tatgagtgatgctcatgcctatcctcatgagccaactggtgttgaaacacgaaaactaggcttttggatatttttatcaactgaaatcctattttttggaactttaataacaacttttcttatctttaagggaagagattttcctggaattaaattaacagatgtttacgacattccatttacctcggtgagttcttttgttttgttaatgagttctctgacaatggtgcttgctcataatgctcttgaaacagacgatcaagaaaaaacaagagtgtggcttcttgcgacggccatgcttggggcagtttttttagcaggacaaatatatgaatttactgagttttatcataaaggctttgaactatctacaaatatttttagctcaacattttatgtgttaactggttttcatggactacatgtctttataggtgtagttttgttgttagctttatggggtgtcggacagagacaacgtggattatctcttaatgaaggaatgaatttagagttcattgccctttattggcactttgttgatatcgtttggattgttttatttacagtggtttatcttatctaa

SEQ ID NO: 224855 - DNA, 367 bp, Unknown
  Bacterial polypeptide expressing nucleotide sequence isolated from the Sargasso Sea
gtagtgcactttcctaaagcaggtaaagcacttttaaaagataaaaactctgattcccaaaaatggttatcttttactgcttttcttggagttatatttttaatatgtcaattatttgaatattttcatttaccttttggattaaccgataatttatttgcaagtactttttatgctcttactggttttcatggattacatgtcactttaggcactttaatgattttaattattgcttggcaatcgagaattaatggcggaagattaactagtcaaaatatgttcccattggaagctgttgaattgtactggcattttgtagatggaatatgggttattttatttattattttgtatcttttataaa

SEQ ID NO: 224856 - DNA, 556 bp, Unknown
  Bacterial polypeptide expressing nucleotide sequence isolated from the Sargasso Sea
tttgtataatgggaaattaggaatatggctttttctagcatcggaagtgatgttatttggcgggttattttctgcttatatatttttaaggaccggagtagataattggcccgcaggcacagaatatcttgatgtgcgattagccactttaaatacattatttttaatttcatcttccgtaacaatggtcatgagttgggcctcattaaaattaaatgattttaagaaatttaaattttattccggaactacattgctttttgcgtttgggtttttggtaatcaagtattttgagtattctgctaagttcagccatgttccaccatatttacctagcacaaataattttctaggaatttattttacaatgacaggattacatgttttgcatgtaattggtggaattgtagtaattggttattattttgggcctggatcaaagatgtggaaagcagaccctgaaagatttacgaatagaatagaaatagttggcctgtattggcattttgttgatttggtctggatttttctctttccagttttatatttgttatga

SEQ ID NO: 224857 - DNA, 592 bp, Unknown
  Bacterial polypeptide expressing nucleotide sequence isolated from the Sargasso Sea
tatggacattccttttaccgttaaaaatcgaccagacacaggattatataatgggaagttaggtgtttggctatttttagcatcggaagttatgttatttggtggattattttctgcctacgtctttcttagaactggagttgataattggcctgttggagcagaaattttgaacgtacctcttgccacacttaatacaatgtttctaattacatcgtcagttactatggttatgagttgggcttctttgaaattaaatgattttaaaaaattcaaattatatgctggtttaacattattattggcatgtttcttccttgtagttaaatattttgaatataccgctaagtttgatcaccatctttatccaagcaccaataattttctaggaatttactttacaatgacaggtttgcatgttttgcatgttataggtggtattatagttatctttttctattggatgccaggcgctaaaatgtgggaaagtgatcccgaacgttttgttaatcgaattgagatcgtaggactatattggcatttcgttgatttagtgtggatctttttattccctgttctttatctattgtga

SEQ ID NO: 224858 - DNA, 376 bp, Unknown
  Bacterial polypeptide expressing nucleotide sequence isolated from the Sargasso Sea
gctgcatactattggctgcctaagtggacaggaaatatttacgacgagactcttggaaaattacatttttggttaacatttatatccgtaaacgttactttcttcccaatgcattttgtcggattagctggaatgcctagacgatatcctgattatgcactgcagtttgcagacttcaatgctttaataagcgttggtgcctttatgtttggcttaactcagcttttattcttatttattgttattaaaacaattagatcaggcaaacaagctaagccggaggtttgggaaggtgcaggagatttaggtctggagtggacgttaacttcacctcctccttatcactcatttacagttcaaccgcaagtaaaatagt

SEQ ID NO: 224859 - DNA, 688 bp, Unknown
  Bacterial polypeptide expressing nucleotide sequence isolated from the Sargasso Sea
tttcacgattatatgttggttccgattattgtggctatcagtgcttttgttttatttttgatgttatatgcaatggttagatttagggcttcaagaaaccctaatccatctagaagaactcacaatgttttggttgaagttgtatggacattaataccatgcttgattttaattgtgatggcagttccgtcatttaaagttttatactcgcaagatgaaattccaaaagctgaagttacaattaaagcaatagggtatcagtggtattggggatatgaatatccagacgaaaatataattttcgattcttatatgatagaggatgaggacttaaaagagggtcaacctagattattagccgtagataatgaagtagttgtgccagttaacaaagtagtaaaggttttaataacagcaaatgatgtattgcatgcatgggcccttcctgcctttggagtcaaaagagatgcaatgcctggaagagtaaatgaaacttggtttaaagctgagagaacaggaaccttttatggacaatgttcagagctttgcggaataaaacacgcatttatgccaataactgttagagtggtatccgaagaagaatatattgaatggttaaatgaagcaaaaattaagtttgcgaaagagccaattgaggataaaaataaattaattgccagtaaataat

SEQ ID NO: 224860 - DNA, 583 bp, Unknown
  Bacterial polypeptide expressing nucleotide sequence isolated from the Sargasso Sea
ctgccggtcggcagtgccggcgagcgctccggcggctggtgggggtgtctcacgttgatcgtcaccgagggggcactgttcggttatctgatcttttcgtatctgtaccttgcgtcgcaaaccggtcagcaatggccgccggaggggctgcccaagcttggtctcggcattctcaacaccggtatcctgctgtcgagcagcggctttgtctggttctgcgagcgctgcgtgcggcggcgacgcttacgctggggcgttgcgtcgatggcggtggcagttgtactcggcgtgacgttcatgggcatccagttgcgcgaatggcataaccacccatacggaccgactgcgcagctatacagctcgctttactttacgatcactggctttcatatgatgcacgtcgcggtgggcatcgtcgtgctcttcctgctgttgttgtggacggcgtttggctacttcgacgagcggcgttgcgtcgcgctgacgatcggcggcctgtactggcatttcgtcgatgtggtgtggctgtttatcttcaccaccttgtacctgacgccctatctgttgcggggcgcatcgtgag

SEQ ID NO: 224861 - DNA, 796 bp, Unknown
  Bacterial polypeptide expressing nucleotide sequence isolated from the Sargasso Sea
aatgacaaaaattattgagcctgataaacaaacaaatatttttagaagaccttcttcagagtatggaatctggagttggataactacagtagatcataagaaaattgggattatgtatgggtatgctgcatttttctttttattaattggagggttagaagctttagttcttagaatacaacttgcccaaccagataataattttttaagtgcggctgaatacaatgcaatgttcaccatgcatgggactacgatggtcttcctagcaataatgccaattagtgctgcgttcttcaattatctcctccctcttcaaataggagctagggatgttgctttcccaagattgaatgctcttagtttttggatttgggtttttggaggacttttcttatactcaacattcgtatttggaacagcaggagcgcctgaaggaggttacctagctgaggaagtcggatggcttggcaatgctccaaatggtggttggtttggatatcaacctaatgcaggttttaaatattcgccaggaactgcaatggactattgggcaataggcttacaaatactaggaatttcttctctcgtttcagcatttaacttcatcgtaacaatactaaatatgaggactcaaggaatgagattgatgagaatgcctgtctttacttggatgacttttgctgtagcttttcttcttgccttttcattaccaataattgcaattgctctcttttacgtaacttttgatagacaatttggcactactttctttttgactgaaggtggaggagatcct

SEQ ID NO: 224862 - DNA, 619 bp, Unknown
  Bacterial polypeptide expressing nucleotide sequence isolated from the Sargasso Sea
ttgactgaaacagcaactgaccaaacatctactgatcacagtgaggatcatgtatctacgcttggggtatcgaatgacaagttaggaatgtgggtctttctgggttccgattgcttgctttttggcgggcttatctctacctacatgctctacaaggaccgaataggccctgatgatttaggccctgaagagatgtttgatattcctttcacctccgtgagctcatttgtcctattaatgagctcactaacagttgttctagcgattaccgcacttcggcgaaacgacatccgccgttctagaatttggttactttcaacagcgattcttggagccattttcgtcggtggtcaagtttatgaattcactgttttctaccgcgagggacttggttatacgaccaacttgttcggtacagcattcttcacccttacaggtttccatggagtacacgtttcggtaggagttattatgctcatgtccatgtacatccaatcgatgcgaggaaagttgacttcagataatgaagaaaaacttgaaatcattggcctctattggcacttcgtggacgttgtatggatcgtgatatttacaattgtctaccttttcccacaatagg

SEQ ID NO: 224863 - DNA, 526 bp, Unknown
  Bacterial polypeptide expressing nucleotide sequence isolated from the Sargasso Sea
catgtgggtttttctttcaaccgaaatattattttttggtactttaataactacattcatgatttttaaaggtcgtgattttcctggaatgaaattaactgatgtctatgatatccctttcacctctgtaagctcatttgttttattaatgagctcactaactatggtcttagctcataatgcattggaaaataaggatcaagaaaaaacaagagtttggcttctcgcaacagcaatgcttggttcagtatttcttgccggacaaatctatgaatttactgagttttaccataagggatttgagctatctacgaatatttttagttcaacattttacgttttaactggatttcatggtcttcatgtttttattggtgtagtttttcttatcggtctttggttaattggtcaaagacaaaaaggattatctctagatagtggatttaatcttgaatttgttgcactatattggcattttgttgatatcgtatggatagttttatttacggtggtgtacttaatctaa

SEQ ID NO: 224864 - DNA, 1324 bp, Unknown
  Bacterial polypeptide expressing nucleotide sequence isolated from the Sargasso Sea
atggcgcaggacatacatcatcataaagaaagttttataactaaatatatttttagccaagatcataaaatgattgctaaacagtatttattgacagcaattttcatgggagcaatcggtatagctttatcagcattatttagattaaagttaggatggcctgatgagaaattttcaattttagaaactatattaggttctgatgcagctcccgatggtcttttggatagtaattggtacttaggtttagttacacttcatggaactattatggtattctttgttttaactggaggtctttccggaacattttcaaacttgctgattcctttgcaggtcggtgctagagacatggcttctgggttattaaatatgattgcatattggcttttttttctatctagtttgctaatggcggtatcactttttattgagacaggccctgcaatgggtgggtggacagtttatcctcccttaagtgttttagaagaatttcaaccaggatcgggacttggtatgactctttggcttttatctatgacagtttttattgcgtcttctttgatcggaggaattaattatatagtaactattttaaatcttagaacaaaagggatgactatgaccagattacctttaaccatatgggcattttttattacagctattttaggtgttctttcattcccagtattactttctgcagctgttttacttttaatggatcgagggttaggaactagtttttatatgagtgatatagtaacttcttctggagctttagacgctacagggggaagtcctattttatacgaacatttgttttggtttttgggtcatcctgaagtttatattattttgttacctgctttaggaatgacttccgaaattatatcaacctgctctagaaaaccaatttttggatatagagcaatgattggatctatgcttgctatagggtttctttcatttatagtttggggtcaccatatgtttttaacgggaatgaatcccttcttaggtggagtatttacatttactaccttattaattgctataccctcagctgttaaagcatttaattatataactaccatatggaaaggaaatgttattatgacacctgctatgcttttttgtatagggtcagtatccacatttatttctggtggagttacaggaattattttagctgattctgctttggatatctctcaacatgacacttattttgttgttggccattttcacattgttatgggaatgacagcaattcttggaatgtttgctggtatttatcattggttccctaaaatgtatggta

SEQ ID NO: 224865 - DNA, 526 bp, Unknown
  Bacterial polypeptide expressing nucleotide sequence isolated from the Sargasso Sea
atgtgggtttttctttcaactgaaatattattttttggtactttaataactacattcatgatctttaaaggtcgtgattttcctggtatgaaattaactgatgtttatgacattccttttacatctgtaagctcttttgttttattaatgagctcactaactatggtgcttgcccacaatgcattagaaaatgaagatcaagaaaaaacaagggtttggcttttagcaacagcaatgcttggctctgtctttcttgctggacaaatttatgaatttactgagttttaccataagggatttgagctttctacaaatatttttagctcaacattttatgttttaactgggtttcacggactacatgtttttattggtgtagtttttctaattggactttggataattggtcaaagacaaaaagggttgtctttagatagtggatttaatcttgaattcattgcattatattggcactttgtcgatattgtatggattgttttatttactgtggtgtatttaatctaat

SEQ ID NO: 224866 - DNA, 808 bp, Unknown
  Bacterial polypeptide expressing nucleotide sequence isolated from the Sargasso Sea
gatgcgcattttatcctttataatcgttacatttatagcattagcctcttcagcaaatggtatttctgattggcagttaggttttcaaaaacctgcaagtgacgtgatgagaaacgtttacgatcttcataactttgtattaattatgatgactgcaataacaattttcgttctatttctaattttttatgttgtatttagatttagaagaaaagcaaatccagttgcttctaaaactactcataacacatttatagaaatactctggactggggttccagtaataatattaatatttatggcaataccttcttttaagttagtctatcagcaagatgtcatacctgaaacagatatgacaattaaagtcataggacatcagtggtattgggaataccagtatccagaacatggtgacctatcatttgaaagttacatggttccagatgatgaactagaagagggagatattagacttctaaccgttgataatcatctggttttgccagcaaacaaaaatattcatgtcctggtgacaggtggagatgttctacatagttttgcaatgccatcacttggggtaaaaaaagatgctgttccaggaagattaaatgaaacatggtttaacattgatgaaccaggtatttataggggtcagtgttctgagatatgcggcaccggacatggttacatgcctattgtaattgaagcattaaatgagactgattttaacaactggattattgagcaaaaaaataagttagcaatgtctaacaatattaataataatgaactaattatagagtag

SEQ ID NO: 224867 - DNA, 529 bp, Unknown
  Bacterial polypeptide expressing nucleotide sequence isolated from the Sargasso Sea
atgacctcgacacttcctgtgcagcctgaaagctcacctgccatcgacccccacgggcacgaggagcacgctgaccaccgcatgttcggcctggccacctttctcgttgctgatgcgatgaccttcgccggctttttcgcggcctacctcaccttcaaggccgtcaaccccttgccggagggagccatctacgagctcgagctgccgctgcccatcctcaacacggtgttgttgctggtgagcagtgccacatttcacaaggctgggcaggccatccgccagaaccttcaaagccgttgccgcaactggttgctggtcaccgcagggttgggactggcctttctggtcagtcagatggtcgaatacttcaccctccccttcggtctgaccgacaacctgttcgcgagcaccttttttgccgccacaggattccatggattgcacgtcacccttggtgctctgatgatcctgatcgtctggtggcaagcacgtaccgacggtggacgcgtgacggcagacaatcactttc

SEQ ID NO: 224868 - DNA, 1267 bp, Unknown
  Bacterial polypeptide expressing nucleotide sequence isolated from the Sargasso Sea
atgactgttgccatcccacctcagaccagctcatccagcccaaggcttcaacccaccggctggcttcgctacttcagcttcagcgtcgatcacaaggtgatcggcctgcagtacctggtctgcggctttcttttctatctgatcggaggagctctcgccggggcgatccgtacggaactggccagtccggtctcggacttcatggccagggatgtttacaaccaggtgctcaccctgcacggcacggtgatgatctttctgtggattgtgccggtggtgaatggcgccttcggtaattatctgattcccttctatgtgggcgcgcgggacatggcattcccgcgactgaacgccgtggccttctggctgatccctcccgcagggctgatgctgatcaccagctatttcctcacgggagcggctcagtcgggctggaccgcctatccacccttgagcatcaccacgcctgccacaggtcagatcatctggatcctcagtgttcttctcctgggggggagttccattttcggtggcatcaatttcatcgcgacgattctcaagctccgccgccccggactgaagttgatgcaactgccgatgtactgctgggcaatgctgggcaccagcattctggtggttctgtccacgccggttttggccggaaccctggtgttgctgagttttgacatcgtggctcacactggattcttcaaacccagctctcggaggcaatgtcgttgtttatcaacatctcttctggttttattcccacccagcggtttacatcatggtgctgccggccttcggcctggtgagcgaaattctgccagtacacgcgcgcaaaccgctgttcggctacgtgacgatggtctattcgatcatggccattgtggtgctcggcctggtcgtctgggcgcaccacatgttcaccagtggcacgccgccctggatgcgcttgttcttcacgatcgccaccgccttcattgccgttccgacaggaatcaaattcttcaactggctggccaccctctggggagggcgcatcaccctgaacagcgcgatgctgttttcctgcggcttcatcgtcaatttcgtgctggggggcatcaccggtgtggccctcgcccaggttcccttcgacattcatgtgcacgacacctacttcgtggtggctcacttccactacatcgtctttggtgggtcggtgttcgtgatcttcgcctcggtgtaccactggtatccgaagttcacgggacggatgcttaat

SEQ ID NO: 224869 - DNA, 1006 bp, Unknown
  Bacterial polypeptide expressing nucleotide sequence isolated from the Sargasso Sea
acatcctgatttaccattaagtaaaatgccacttttggcttgggcttaccttacatcttcacttatcactctagttgcagttccaacatttgctgcagcattgttaatgttacttacagatagattaggtgcatcaggattcttcaatcctgcaatgggcggagatcctattgcttatcagcatttgttctggtttacattccatcctgaagtatacatcttggtaattcctgctattggtttcatgtatgaaatattcccacgtttctcaagaaagccaatttttagtcatggctctggagtggccgcatttactttactaactattgtcggatttgcatcatgggcacatcacatgtatgcaacaggaatgtcatttacagaaaagacagtatttatggtcggaactctagcagcagttccagcatctgcaatgcacacattcaacttccttgcaactatgtggggtggaagaatcaagtttgcaaccccaatcatgtgggctgtaggcggaatcgcactattcttctctgctggagcaggtggtgtcgtaaacagtgcaatgccattagactttatcactcacgactcttactgggtagttggacacttccacctatttgtaatgggtacaatcctctttggtacagttggattcgtttactacttcttcccatacgtaactggaagaatgtacagcgaggttttgggcaaagtccactttatcttatctttcgtaggaacagttctagtattctttacacaacatatcttgggactctttggaatgccaagaagaatttatgattatccagcaattccggaatgggttcaaatgaatattataatttcaattggcgcattcatcatcggtatcggtatggcaatcttcctttggaacctaatttggagttccgcaaaaggaaaaccagcagatatggacgatccattcggcttaggcggaaaatattacttcccatatcaggcaaagaacccatcacattag

SEQ ID NO: 224870 - DNA, 602 bp, Unknown
  Bacterial polypeptide expressing nucleotide sequence isolated from the Sargasso Sea
tatgacaatatcaattgatccacaaaaaactaataatgaaagccttcaacctaaaggatggcttagatactttagttttagccttgatcataaagtaattgggatacaatacttggtttgtggttttctcttttatttaataggaggaagcttagcgagcgctataagaattgaactagccagtccaatgtctgatttcatgccaagagatgtttataaccaagttttaactttacacggaacaataatgatattcctttggatagtgccagtagtaaacggtgcttttggaaattatttaattccattttatgtaggcgcgagagatatggcattcccaagattaaatgccgtagctttttggttaattcctccttcaggtttgatgttggtagcaagctattttgttgagggtgctgctcaggctggatggacggcttatccacctttaagcataactactcctcaatctggacaaattatttggatcctgagcgttctattacttggaggcagttccatatttggtggaataaactttatagccaccattatcaaattaagaaggccaggattaaaactaatgcaattgccaatgtatt

SEQ ID NO: 224871 - DNA, 478 bp, Unknown
  Bacterial polypeptide expressing nucleotide sequence isolated from the Sargasso Sea
atgtttaaacttgtactatatataactctttcaattataccgattaatcttttagcggagcaaccaaaagattggcaacttggatttcagaaagcagcatcaggacatatggaagatttagtgtggtttcacgattacatgttgttaccaataattactgcaataacagcttttgtattatttttagttatttatgcgtgtattagatatagagcagctagaaatcctgttgcatctcaaactagtcacaacacttttattgaaataatttggacattagttccttgtttaattttaattgtgatggcagtaccatcattcaaaattttgtatgagcaagatgaaattcctcctgcagatgtaacaattaaagctgtgggatatcagtggtactggggttatgaatatcctgatgaaaatataatttttgactcttacatgattgaggaacaggacttaaaaccaggccaacccagac

SEQ ID NO: 224872 - DNA, 379 bp, Unknown
  Bacterial polypeptide expressing nucleotide sequence isolated from the Sargasso Sea
aatgagctcactaactatggtgcttgcccacaatgcactagaaaatgaagatcaagaaaaaacaagggtttggcttctagcaacagcaatgcttggctctgtttttcttgctgggcaaatttatgaatttactgagttttaccataagggatttgagctttctacaaatatttttagttcaacattttatgttttaactgggtttcacggactacatgtttttattggtgtagtttttctaattggactttggataattggtcaaagacaaaaaggattgtctctagatagtggatttaaccttgaattcattgcattatattggcactttgttgacattgtatggattgttttatttactgtggtgtatttaatctaa

SEQ ID NO: 224873 - DNA, 850 bp, Unknown
  Bacterial polypeptide expressing nucleotide sequence isolated from the Sargasso Sea
atgagcatagtaacagatatatttttacccatagctttagcatttattatgtttgctttaggtctaggattaacaggagcagattttttaagagttttaaaacaaccaaaagatttttttgttggagcaatcagtcaaattattttacttccaattattgcatttattttagttaaagtttggccaatttcacctgaacttgcaattggtgtaatgataattgctgcagcaccagggggcgtaacctcaaatatactaacgtcctttgccagaggggatgtggctctttcaatttcattaacggcagttataagtctcttaagcgtcttaacagttccttttatcattgtaacttctttagggttgttgggatcagaaaatgtagctcaaaatatttctttaactagtatggcgattagtatgtttttgatcgtaacagttcctgtaatactaggtatgatatttagaagatttgcatcaaatgcagcaataaaatttgaaccaatagctaaaaaaatttcaataggattatttataattgtcttgcttggagctattttaagcaaaaaagaggatatcgttccttattttgttgatgctgggcttattacattgacactaaatgttataatgatgattgtcgctttctatgtcgcaaaattactggcaactggaaatgctcaaaaaaaatgtattgctatagagtgcggtctacagaacggtacacttgccatttttgttggtaaaacattattcggtggcggagcatttgtaattccggctgctacttatagcttaataatgttcgccacctctttaatttttgtatacctcgtaaaaaataattaaa

SEQ ID NO: 224874 - DNA, 451 bp, Unknown
  Bacterial polypeptide expressing nucleotide sequence isolated from the Sargasso Sea
gatgagtactgttactacagatccacatgctcatgctgagcatgagcatcatcatgggccagccaaaggcttaaaacgctggctttataccaccaaccacaaagacatagggactttgtacctgctgtttgcgctgacgatgttttttatcggcggagctatggcgatggtgatccgggctgagttattccagccaggtttgcaaatagtgcaacccgactttttcaaccaaatgaccacagtacatggcctgattatggtatttggtgctgtgatgccggcctttaccggtctggccaactggctggtgcctatgatgataggcgcaccagacatggccttgccacggatgaacaactggagcttctggatcttaccttttgcttttagcatcctgctgctgtctttatttatggaaggcggtggacccctggttttggctggactttct

SEQ ID NO: 224875 - DNA, 763 bp, Unknown
  Bacterial polypeptide expressing nucleotide sequence isolated from the Sargasso Sea
tttgccagtacttgcaaacggtataaccgattggcaacttggttttcaagaaccagctagtggtcatatgcaaaatatatttgatcttcataattttgtattaatcatgatgactgcaataactatttttgtgctcatattactaatatatgttgctattcgatttagaaaaagtgcaaatcctaatccttctaaaagaagtcataacgctattttggaaacactttggacggcaattcctgttttaattcttattgttatggctgtaccttcatttaaattagtgtacgagcaagatgtcataccagaagtggatatgactattaaagtgataggccaccaatggtactgggaataccagtatcctgagcatgatgatttgtcttttgagagttacttggttcctgataaagatttaaaagaaggagagccaagattattaaccgtcgataatagactggtcttacctgttaataaaaacattcatgttcttataacagcaggagatgtgttgcacagttttgctatgccctcacttggagttaaaaaggatgcagttccaggaagacttaatgagacctggatgagaatagacagaccaggaatttacagaggtcaatgttcagagatttgtggaacgggtcatggctatatgccaatagttattgaggcagtaagtgaaaatgaattttatgcttggattaatgaggccaaaaatgaatttgctacattaaataatagtacaattgcattatcgaaatag

SEQ ID NO: 224876 - DNA, 431 bp, Unknown
  Bacterial polypeptide expressing nucleotide sequence isolated from the Sargasso Sea
atcaaaggttcaattaattcacagaagagactcgcttagggcagaaaaaatgcttcaaaaaaaattaatggataatcaaaaaattgaaataatttgggacagcgtagttgaagaggtggttggagacaacgaacccaagaatgtaaagggtttaaaaattaaaaatataaaaactaataaagtagaagaattaaaaatagatggacttttcattgcaatcgggcacgatcctgcaactcatttatttaaagatcaattagatatggataaagaaggttatttaacaacaaaaccagactctacagaaacaaacgtacctggtgtatttgctgcaggagatgtaaaagataaaatttttagacaagctgttactgcagcaggtatggggtgtatggcagcacttgaagctgaaaaatttttatctcattagc

SEQ ID NO: 224877 - DNA, 688 bp, Unknown
  Bacterial polypeptide expressing nucleotide sequence isolated from the Sargasso Sea
atgagcgcagtaattgaatcccacgaccatgatcatcatcatggtcctgctaaaggactgactaggtggctatacaccacaaaccataaagatatagggtcgttatatctatggtttagttttgcaatgttcttaattggcggcgcaatggcgctggttataagagcagagctttttcagcccggtatgcaaattgttgaaccagaattttacaaccagatgcttacactgcatggattaataatggtttttggggctgttatgccagcctttgtaggtttagcaaattggcttgtaccaatgatggtgggcgctccggatatggcgctcccacgaatgaataatctaagcttttggatactcccatttgcatttttagttttattatcatctttgtttatggagggtggagcccctaatttcggatggacattttatgccccactatctacaacttacgcacctccgagtgttaccttttttatattttctgtccatattatgggagcatcatcgatcatgggatccatcaatgtgatcgtaaccattatgaatatgagagcgccaggcatgactttgatgaaaatgccactttttgtatggtcatggttaattacagcatacctactaatagcagttatgcctgttcttgcaggagctgtaacaatgatgctcatggacattcatt

SEQ ID NO: 224878 - DNA, 1231 bp, Unknown
  Bacterial polypeptide expressing nucleotide sequence isolated from the Sargasso Sea
atgaaaataattagaaattatttaaataatgttaaaccaaattttgttggagagggtaaatatacaacttggtttccattatttgatgcaatagagaatttagtattttcatatggaaagaaaacaaaaaatccaatacatgtaagagatgctgttgatatacaaaaagtaatggttacagtatggcttgctacttttccagctatgttttttgggatgtataatcttggagccaattcattagaatatttagaatctattggtcaacaaaatactggtgactggcatcattattttgtaaacatggtggggtatgatgctaatagctttattgcaaaactatggtttggtgcatgttattttttaccaatatattttgttgtatttactgttggtatagcttgggaggccttatttgctattgtaagaaaacatgaaattaatgaaggtgcatttgtttcaactgttttattttctctaagctgtccaccagacatacctttgtggcaagctgcaatgggtatatcgtttggtcttgttattggaaaagaaattttcggtggaacaggaaaaaactttttaaatccagcacttacaggtagagcatttttatactttgcatatccagctcaaatctccggtgacaaagtttgggttgcaggtatatcagattacaatattatccctgagggttatagcggtgcaacagctttaggcatggctgctgagagtggtatggcaggtattacaaattcttatacttggatggatgcattcttaggaaatatcccaggctcagttggtgagacatctataattgcaatattaattggtatggttattttattaatgactaaagttgcttcataccgaataattctaggaacgattattggaatgattcttatgtcatcaattttaaatattgttggttctgagactaatcaaatgttttatattccttggtactggcatgcggttataggtagttttgcatttggcttagtatttatggcaactgaacctgtttcaggctcaggtaccaatactggtagatggatatacggtattgttattggtgttacagtaattttgataagggttataaatccagccttcccagagggtatgatgttagctatattatttgcaaatttattagcacctgtaatagatcatctggtggtaatgtctaatattaaaaaaagaaaagctttatataatgaatgaa

SEQ ID NO: 224879 - DNA, 259 bp, Unknown
  Bacterial polypeptide expressing nucleotide sequence isolated from the Sargasso Sea
aatgatagatcttaatagtattatcttagttattattgtagtagcaattacactatcaattataaggctcattacaacacaagatacgtatacgaaagtgctaatggttaatttgattggtacaaaaattatttttcttttattaattgtttcagttttatttatgaaaagagattttactgatgttgcttttgtatatgcattaattaattttatcacaacgattgcattatcaaattttttggagaaggaagaataa

SEQ ID NO: 224880 - DNA, 130 bp, Unknown
  Bacterial polypeptide expressing nucleotide sequence isolated from the Sargasso Sea
tatgagttacggagaatcagttagtcacgatcaccacgatcataagcctggctttataaaacgctggtttttctcaactaatcataaagatattggaactttatacataatatttgctttaattgcaggg

SEQ ID NO: 224881 - DNA, 250 bp, Unknown
  Bacterial polypeptide expressing nucleotide sequence isolated from the Sargasso Sea
atgtcagcaggaaaaccaaaacacgattatcatttagttgatccaagtccttggccaatctatgtttcattcgccactttagttttagcttttggagcagtttattactttcactcaaaagccctttggttgttattaattggttttgctttggtagtttatggtgcatttatgtggtggagggatgttatagaagaggcagaacatcaaggtcatgatactcctgtagttcaaatcggacataggtacg

SEQ ID NO: 224882 - DNA, 364 bp, Unknown
  Bacterial polypeptide expressing nucleotide sequence isolated from the Sargasso Sea
atgagtacaaatgtagaaaatttacatgaccacgaacatactccctcaggtataatgagatggattacaaccaccaatcataaagacataggaactttatatctatggtttagtttacttatgttttttgttgggggttttatggctttgattatcagagctgaactcttcgagcccggtttacagttggtagttccaggattttttaaccagatgactactatgcatgcgttaataatgattttcggtgcagttatgcctgcttttgtaggactagcaaactggcaaattcctcttatgattggtgctcctgatatggcgctgccaagattaaataattggagtttttggatacttccatttg

SEQ ID NO: 224883 - DNA, 419 bp, Unknown
  Bacterial polypeptide expressing nucleotide sequence isolated from the Sargasso Sea
atatgagtatccagacgaaaatatttttttcgactcatacatgatcgaaactaaagatttaaaagaaaacgagccaaggttattggctgtagataatgaattggttgttccagtagataaagttgttaaagtgatgatcactgctaatgatgttctacatgcgtgggcactcccttcatttggagtgaaacgagacgctgtacctggaagaataaatgaaacatggtttaaagcagaaaaagttggaacttattatggtcaatgttctgaactgtgtggaattaaacacgcgtttatgcctattgaagttagagttgttactgaagaagaatatcaaaagtggctgttagacgctaaagtgaaatttgcaaaagaaattacagatgaagatcaattaaaaaaactagcgagtaaataat

SEQ ID NO: 224884 - DNA, 163 bp, Unknown
  Bacterial polypeptide expressing nucleotide sequence isolated from the Sargasso Sea
gggccatggcctgggccgccgggtgatcaaagaactgctccatgccccgccggtggtgggcgtggaacgggtgtatctgatgaccaccaacagtgccgggttctaccgccaactgggcttccaggacgcctcgccacaacagctgatggtgctgcgccgctga

SEQ ID NO: 224885 - DNA, 637 bp, Unknown
  Bacterial polypeptide expressing nucleotide sequence isolated from the Sargasso Sea
tggtcttacaggtctatttcttggaaatgttatagtggatgtacctctttctgatacatattttgtagtagctcattttcatatggtaatgggtattgctcctgttcaggttgtttttgcagctatttatcattggttccctctaatgactggtcgtatgtataacgaaacgctgggaaggttacatttttggtttacttttttaggatcttatttgatttatttcccaatgcattatcttggattaattggagttccaagaaggtattacgagatgggccaaacagaagctttgtatacccaatccgcagctgatttgaatattttcataactttgacagctcttgttacaggttttgcacaaatcttcttcttcattaatatgttctggagtagaaaatatggtgttcctgcagaaaaaaatccatggcaagcaaattcacttgaatggagaacaccttcaatgcctccaggacatggaaattttggtaaagagcttccagttgtttatcgatggccttatgactttaatgttccaggcgcaaaagatgattttgttcctcaggatgttcccaattcagaggttgagttagctgaaggttatgaagggacagagattaaggctgaaaaaacatga

SEQ ID NO: 224886 - DNA, 207 bp, Unknown
  Bacterial polypeptide expressing nucleotide sequence isolated from the Sargasso Sea
cgagtactttttatgcattaactggctttcatgggcttcacgtaacacttggttcaataatgataatgattatttggtggcaaacacgtgtcccatctggccgagtgaataatcaaaacaagtttccatttgaggctgtagagctctattggcacttcgtagatgggatttgggtcgttttattcatcatcctttacctgctttaag

SEQ ID NO: 224887 - DNA, 679 bp, Unknown
  Bacterial polypeptide expressing nucleotide sequence isolated from the Sargasso Sea
atgagcgaagcagaagcaatgaatgacactcctgaaggaatgacggggttagtagacgactggtcagctgacaggcaggcttatcaggtgccttggggaaaggccatgatgtggattttccttgtcagtgacacgtttattttttcttgttttttggtgggctacttaaatgttagattaacaactacagcgccctggccccctcaaagcgaaatctttgccctgtctttcggtggtgccccgataccgcttatcctgatagctatcatgacgttcatactgatcacgagctcaggaacgatggcgctggcggttaacatggggtatcggaaagataaagtaaaggcattctggctaatctgcataactgcagccttcggtgcttcgtttgttggtatgcagatgttcgagtggtctaagttaatcctagatgagggtgttaggccatggggtaatccattcggagcccctcagtttggatctatattttttatggtgactggttttcatgggcttcatgtaaccggcggtgtaatttacttactctgggtcgccttcagagttaaacgcggatactacgacaacaagggttttgaaataattgaaattgccggtttatactggcacttcgttgacttggtgtgggtattcatatttgcatttttctatctactttaga

SEQ ID NO: 224888 - DNA, 1111 bp, Unknown
  Bacterial polypeptide expressing nucleotide sequence isolated from the Sargasso Sea
catgaaaattttaagaaattatcttgataatataaaaccaaattttgtaagcgatggtaaacacgttaagtggtttccattattcgatgctattgaaaatttatttttttcttatggtaaaaaaacaaaaaatccaatacatgtaagagatgctgttgatattcaaaaagtaatggttactgtttggttagcaacttttccagctatgttttttggtatgtataatcttggtgcgaactctcttgaatatttagaatcaattaatcaacaaaatactggtgattggcatcattattttgtgagtatagttggatatgattcaagcagttttctaagcaagctttggtttggcgcatgttattttctgccaatatactttgttgtttttacagtaggtattgcttgggaagctttatttgcaattgttagaaaacatgaaatcaacgaaggagcttttgtttcaacagttctatttgctctaagttgtccacctgatattcctctttggcaagctgctatgggtatttcatttggtcttgtaataggtaaagaaatatttggtggaactggtaaaaatttcttaaatcctgcacttaccggtcgagcttttttatactttgcatatcctgctcagatatcaggagataaagtatgggtagcaggtatttctgattacaatataattcctgagggttacagtggagccacagccttaggtgtagctgctgaaagcggtatggctggaataactaattcctatacatggatggatgcatttctaggtaatattcctggttcagttggtgaaacatctattattgctatattaattggattggcagttctattaattactaaagttgcttcatatagaattgttttaggaacttttgttggaatgatattaatgtcatctctattaaatatagtgggatcagattcaaatccaatgtttgctattccttggtattggcatgctgttattggaagttttgcttttggtttggtgtttatggcaacagagccagtttcaggttcaggaactaacactggaagatggatatacggaattgtaattggagttacagttatattaatacgtgttattaat

SEQ ID NO: 224889 - DNA, 604 bp, Unknown
  Bacterial polypeptide expressing nucleotide sequence isolated from the Sargasso Sea
tatgacaactctagatagctcaaaagaaattcaaaaaaataactctgaagttaaagaaacacatgaagacttcagaatgtttggtcttataactttcctaattgcggacggaatgacttttgctggattctttgctgcttatttaacttataaagcagtaaatccattacctgatggtgctatttatgaattagaactaccaatacctacactcaatacaattttgttacttgttagtagtgcaactttccataaagcaggcaaagcacttttaaaagataaaaactctgaatcccaaaaatggttatcttttactgcttttcttggaattatatttttaatatgtcaattatttgaatattttcatttaccttttggattaaccgataatttatttgcaagtactttttatgctcttactggttttcatggattacatgtcactttaggcactttaatgattttaattattgcttggcaagcgagaatcaagggcggaagattaactagtcaaaatatgttccctttggaagctgttgaattgtactggcattttgtagatggaatatgggttattttatttattattttgtatcttttataa

SEQ ID NO: 224890 - DNA, 979 bp, Unknown
  Bacterial polypeptide expressing nucleotide sequence isolated from the Sargasso Sea
aatgagttcgacagtttcctctactgaaattcaaccagaattaacacaggaaccacgcccacttaatgccagctacggaaaactaatgatgtggttttttatagtatctgatgcattaacttttactggttttttaattgcatacggattctcaaggtttaaaaatattgattcttggccaatagccgatgaagtttttactcactttcccggattgcacggcgttgatgctccgatgtactatgttgctttaatgacatttatattaattttctcatctgtaactatggtattagctgttgatgctggtcataagatgcagaaagataaggtgatcttttacatgtttttaactattataggtggagctgtttttgtaggatcacaagcgtgggaatggaaaaactttataaagggagaatatggagcattagaaacaagaggaggaatgattattcaatttgttgacagtaataataataaaagattatcaattgaagattttgctgtttataaaccgcaatacagggaacaacataaaaagaacaatgggttatggtttcaaagtgaacccgctcttgatgaatattcagtagctgaagtaacagaaggatttatggctgatccctcaattgttgttagaatggaaaaaattgatgaaaaaggccacaagattgtattaaatcgtcagcaatctatcgaaaaagttaaacaagctgtttatgtagtaagaggtgctaatttaattcataatgaatatggtaataggttatttgctgattttttcttttttataacaggctttcacggttttcatgttttctctggtgtcattattaatattattattttcatcaatgttctactaggaacctatgaaaaaagaggacattatgaaatggttgaaaaagttggtttatattggcactttgttgatctagtttgggtttttgtatttacattcttctacttagtataa

SEQ ID NO: 224891 - DNA, 568 bp, Unknown
  Bacterial polypeptide expressing nucleotide sequence isolated from the Sargasso Sea
catgactatttcactcaaaccaaacaactcttctccagaaaaacttcaaccaactggatggctcaaatatctgagttttagtcttgatcacaaagtcataggacttcaatatttaatttgtggtttcttgttttatttaattggaggatctttagctggagcaataagagtagaactcatcagtcccctctcagattttatgcctagagaggtttacaaccaggttttaactctccacggcacaatcatgattttcttatggattgtgcctgtagtaaatggtgcttttggaaactatttaatacccttttatgttggggctagggacatggcttttccaaggctgaatgcagttgctttttggctaataccgccttctggcttaatgttgataacaagttatttcataaacggagccgcacaatcaggttggacagcttacccacctttaagcattacgactccagccgctgggcaaatcatttggatattaagtgtcttgcttttgggtggaagctcaatttttggtggcattaatttcatcgccaccatcctcaagctaaggaga

SEQ ID NO: 224892 - DNA, 694 bp, Unknown
  Bacterial polypeptide expressing nucleotide sequence isolated from the Sargasso Sea
gcaaagagaggaaagattttttctgtattaatcagagagcttacagttgcagcaaagcttggtggaggtgtaacagatgataatccaagattgcgcactgcagttgataaggccttagctgcaaatatgactaaagatactattgaaagagccattcaaagaggagcaggtggcttagaaggtgaaaacttggaggaagtaagttttgaaggatatggaccaggtggaatagcgataattgtagaatcaatgacagataataataatcgcacagtagctgaagtaagacatgcatttacaaaatcaggtggcaatcttggaactaacgggtccgtatcttacctgtttgaaaaaaaaggtttaataaatattactcctgatcaagatgcagaccaggtaatggagatttcaattgaagctggagctgaagatattgaagtaaacgaagacgatagtataacagtgagctcttcaccagaagattttgaaaacataaaaaaagctcttttagagaaggaaattgctcttatcgactctgatgtagccttaataccagagacaactattaaagctgatttagatacctctttaaaggtttttaagctgcttgaaatgcttgaagacctggatgatactcaaaatgttacctccaatatagagtttgctgaaggcatgctggatcaattggattaat

SEQ ID NO: 224893 - DNA, 691 bp, Unknown
  Bacterial polypeptide expressing nucleotide sequence isolated from the Sargasso Sea
atgagcggtcaaaacgagagcccgtactatttcgtaccgcatccgtcgcggcatccgatcagcgccgctgccgggttgctggtcatgctcggatcgcttgcggcctggatcaacgaccatgagctggcaccgctcggcgtcgtcgtcggtctgctgtggctgctgtatacgttgtggcactggttcggcgacgcgatcgcggaatccgaaggcggcatgtacggcaagaacgtcgacaagtcgtaccgctggagcatgagctggttcattttctccgaagtgatgttcttcggtgctttctttggcgctctcttctacgcacgcgaaatcgcgctgcatcaactcggcagtctcgactacaagctgatctggccggatttctcggcggtatggccgaacaacggtccggcagcgctggtttcgaccttcaagtcgatgcagccgtggccggtgccgaccatcaacaccgcgctgctgctgtcgtccggcgctacgttgacggtttcgcaccacgcactgcgtgaagatcatcgcaagaaagcgattatctggctggcggctacgctggtgctcggcgtctgcttcctgttcctgcagggcttcgagtatttccacgcgtataacgaactgaacctgacgctgtcctcgggtgtgtacggttcgacgttcttcctgctgacgggcttccacg

SEQ ID NO: 224894 - DNA, 486 bp, Unknown
  Bacterial polypeptide expressing nucleotide sequence isolated from the Sargasso Sea
aatgtcagttgaaaaaaaacatgattaccacctagtagacccaagtccatggcctatttatacctcatttgcatgtttagttttggctataggatcagtatattattttcataacgatgtttcatggggaatgtatcttggattagctttgttaatttatggagcatacatgtggtttagagatgttgttatagaggctgagcatcaaggacatcacactccagtagttcaaattcatcatcgttatggaatgactttgtttattgcgtctgaggtaatgttttttgtagcttggttttgggcatattttgatgtaagtcttttcccgaatgagtttacaggtaatgtttggccaccaaaagatattgagacttttgatccttgggacattccattaatcaatactttagtattattattatctggaactacagtaacttggtcacatcatgctcttctagaagatgatcgaaaaagttttataca

SEQ ID NO: 224895 - DNA, 205 bp, Unknown
  Bacterial polypeptide expressing nucleotide sequence isolated from the Sargasso Sea
atgggtcaactttttatatgctcacaggttttcatggttttcatgttacttttgggagcaataatgctaacagtgattttgttcagatgtatgaaagggcatttcgcaggtgataaccattttggttttgaagcagtagcttggtattggcatttcgtagatgttgtatggcttggcttgttcgtttttgtgtattggctctagt

SEQ ID NO: 224896 - DNA, 454 bp, Unknown
  Bacterial polypeptide expressing nucleotide sequence isolated from the Sargasso Sea
atgtcagctgaaaaaaaacacgattatcacctagtagacccaagtccttggcctatctatgtatctttctcatgcttagtattagcaataggaacaattttttacatgcacaacgatgtttcgtggggaatgtatcttgggttagcgctagttgtttatggagcctatatgtggttcagagatgttgtgattgaagcagaacatcaaggtcatcatactcctgttgtgcaaattcatcatcgatacggaatgacactgtttatcgcatcagaagtgatgttctttgtagcttggttctgggcatattttgatgcaagtttattcccaaacgagtttgttggaaatgtttggcctccaaaagatattgaaactttcgatccatgggacattcctctaattaacactttagtgctgttgttatctggaactacagttacttggtcccatcattcat

SEQ ID NO: 224897 - DNA, 984 bp, Unknown
  Bacterial polypeptide expressing nucleotide sequence isolated from the Sargasso Sea
ggtcagacagaccatgctaatgatggtgatgatgtaatacttacaatcacatcaaatgaggctatcgctgcaccgtcatgcgtattccaaagtggtggtcaaaatgttgccactgttaacggatccgatacaagtagtggtgccggaacaggttggacctgcactacgactatggatgctgatatccatacggatggcctcgtgacattcacaattgatgcttctgatcttgcagggaatgctttatcaacagttagtgctacaaatgatcagagttctgtgacattcgatacgacttcaccaaccctaacggctgtatccatagcttctaatgttattggtcagacagaccatgctaatgatggtgatgatgtaatacttacaatcacatcaaatgaggctatcgctgcaccgtcatgcgtattccaaagtggtggtcaaaatgttgccactgttaacggatccgatacaagtagtggtgccggaacaggttggacctgcactacgactatggatgctgatatccatacggatggcctcgtgacattcacaattgatgcttctgatcttgcagggaatgctttatcaacagttagtgctacaaatgatcagagttctgtgacattcgatacgacttcaccaaccctaacggctgtatccatagcttctaatgttattggtcagacagaccatgctaatgatggtgatgatgtaatacttacaatcacatcaaatgaggctatcgctgcaccgtcatgcgtattccaaagtggtggtcaaaatgttgccactgttaacggatccgatacaagtagtggtgccggaacaggttggacctgcactacgactatggatgctgatatccatacggatggcctcgtgacattcacaattgatgcttctgatcttgcagggaatgctttatcaacagttagtgctacaaatgatcagagttctgtgacattcgatacgacttcaccaacc

SEQ ID NO: 224898 - DNA, 965 bp, Unknown
  Bacterial polypeptide expressing nucleotide sequence isolated from the Sargasso Sea
cctgaagtatacatttgttgctcttccagcattcggtatagtctcagatctaatttcagtacatgcaagaaaaaatatttttggttatagaatgatggtatgggcaatagttggtattggtgcattaagtttcttcgtatgggctcaccatatgtatgtaagtggaatgaacccatggtttggattcttttttgcatccacaactttaattattgctgttccaacagccatgaaagtttacaactggatacttaccttgtggagaggtaatataagaattaatacagttatgttatggtgtttaggttttattgtaacgtttgttaacggcggtataactggaatatttttaggtaacgtttctgttgacgttcctttgtctgatacatatttcgtggttgctcacttccacatggttatgggaattgctcctttaatggtaattatgggagcgatctatcactggtttccgctagtcgctggaaaaatgttagatgaaaaattaggtaaatggcatttttggacaactttccttggtgcatactcaatttacttcccgatgcactatcttggatttataggagtgcctagaagatattatgaaatgtatgatagtccttatatgacttcaggagttggtcttaatgaatttataagcactgctgcgtttatagttggtgcagctcaattaatcttggtgtttaatatagttaaaacaatgaagactggtaaaaaagcggagaaaaatccatggaaagctaattcgttagagtggtacacttcaactgttccaccggaacatggaaattttggagaaagacttccagttgttcacagatggccatatgactataacgtacctggagcagaagaagattatttacctcaaactgcagcaccaagtgaagttgcacatacagaggtagaaaaacataatttaataaaatgtctgacccaaaaattga

SEQ ID NO: 224899 - DNA, 295 bp, Unknown
  Bacterial polypeptide expressing nucleotide sequence isolated from the Sargasso Sea
acaacattttttaggccttgcgggaatgccaagaagatatgctgactatccagatgcttttgcaggatggaattacatttcttcaattggttcttatatttctgtaattggattggtagtattttttataaatcttgcttatgcgttttataagaaaaaggctgcagcacaaaacccttggggagaaggcgctacaactttagaatggactgtaccatctccacctaattttcatacttttgaagaattaccaaagtttgaggatgaagagggtgttgaaaaatctactagctaa

SEQ ID NO: 224900 - DNA, 760 bp, Unknown
  Bacterial polypeptide expressing nucleotide sequence isolated from the Sargasso Sea
atgagtgcagtaatagaaaatcatcatgacgaccaccatcatggtccagctaagggcttaacaagatggttgtatacaacaaatcataaggatataggaacactatatctgtggtttagttttgctatgttcttagtcggtggtgctatggcaatgattataagagcagagcttttccagccaggaatgcagatcgtagaaccagaattttataatcagatgatcaccttgcatggacttataatgatctttggaggggtaatgccggcattcgttggattggctaattggttaattccaatgcagataggtgctcctgatatggcattgccaagaatgaataatttaagtttctggatccttccatttgctttctttatattgctctcttctttatttatggaaggaggagcaccaaatttcggatggactttttacgcacccttatcaactgagtatgcgccaccaagcacaacattctttattttttcagtacatataatgggagcttcctcaataatgggttcgattaatgtagttgtaacaattatgaatatgagggctcctggtattagcttaatgaagatgcctctattcgtgtggtcatggctaattactgcttacctcctaattgcggttatgcctgttctagctggtgccgtaaccatgatgttaatggatatccatttcggaacaagtttctttaatgcagcaggtggaggagatccagtattatttcagcatattttttggttttttg

SEQ ID NO: 224901 - DNA, 910 bp, Unknown
  Bacterial polypeptide expressing nucleotide sequence isolated from the Sargasso Sea
aatggtagtttattttttaactgcactctttctaggtggatttggaaattatttaataccgttgatggtaggagcaagagacatggtctttccgtatcttaatatggtaagcttttggagtttttttgtagcagttgcagttttgctagcaagctttttcgttccaggaggaccaacaggttccggttggacgctttatcctcctcaagcaattttagaaggaacccctggttcaggttacggaataatgttgatgtgtatatctctaattttattcgtagcaggatttactatgggtggtttaaattacttgattaccgttcttcaagctagaacaagaggaatgacattaatgagaatgcccctaacagtttggggaatttttactgcaacagtattagcaatgttagctttcccagcattattggtaggtgcattaatgatgagtttagacaatgttcttggaacaagctttttcatgccaactatattaaaagcaggagaagttttagaatatggtggaggaagtcctattctttttcaacatttattctggttcttcggacacccagaagtttatatagttgcactacctgcatttggaataatttcagatttaatttctgttcacgcaagaaaaaatatatttggatacagaatgatggtttgggcaatagttggtataggtgcactaagcttttttgtatgggcacatcacatgtatgttagtggaatgaatccttggtttggattcttctttgcaactaccactcttataatagctgttcctacagcaatgaaagtttataattggatcctaacgctttggagaggaaatattcgacttaatactgttatgttatggtgtttaggttttatagtgacttttgtgaatgggggaattacagga

SEQ ID NO: 224902 - DNA, 883 bp, Unknown
  Bacterial polypeptide expressing nucleotide sequence isolated from the Sargasso Sea
cagaaaaaatatatttggatacaggatgatggtttgggcaatccttgctattggtggcctcagctttattgtttgggcgcatcacatgtatgtcagtggaatgaacccatacttcggtttcttcttcgctacaacaactcttattattgccgtacctactgcactgaaagtttataattgggtgttgacattatggcagggtaatcttcatctcagaacaccaatgttatttgcgattggttttatatttacctttattcatggggggctaacaggtttatttttgggtaatgtaaccatagatttacctctatcagatacttattttgtagtagcacattttcatatggttatgggtgtgtcacctgtattggtagtattcgcttctatctatcattggttcccattaatgtctggcaagatgtacaatgaaacacttggaaagtggcacttttggctcacgtttttaggtgcctatgccgtatatttaccaatgcattatcttggttttcaaggtgtacctagaagatacttttctttaggtaatactgacttccttccagaatcagcacacgcgctaaacacgagcattacaatttcagccatcattcttgcactggctcaaatacttttctttgtgaatatatttatgagcttgagaaatggcaaaaaagcaaaacctaattgctggggcgctacttctttagaatggttgacccctgatcaacctccaaaacacggaaactggggacatgatctgcctgaagtgcatcgttgggcttacgattacagtgtgccagggcaagagcaagactatacccctcaaactgttccagcaattgaggtacctgtgggtcgtgaacatggggttgagcacaattag

SEQ ID NO: 224903 - DNA, 532 bp, Unknown
  Bacterial polypeptide expressing nucleotide sequence isolated from the Sargasso Sea
cgtgtgcacatgtgatgggtttttctttaaagataaaacagttgcggttgttggtggtggaaatgctgcagttgaagaagcaatgtttcttacaaaatttgcttcaaaagtacaattaattcacagaagaaattctttgagagctgaaaaaatgctccaaagcaaattaatggctaacaaaaaaattgaaattatttgggatagtgttgtcgaagaagtaattggaaacaatgaccctaaaaatgttaagggattaaaaattaaaaatgtaaaaacaaataaaattaatgagttaaaaattgatggcttattcattgcaattgggcacgatccagctactcaactctttaaagatcaattggatatggataaagaaggttatttaacaacaaaaccagactcaacagagacaaatatacctggtgtttttgctgcaggagatgttaaagataaaatatttagacaagcagttactgctgcgggaatgggctgtatggctgctctagaagctgaaaaatttttgtctaaataa

SEQ ID NO: 224904 - DNA, 868 bp, Unknown
  Bacterial polypeptide expressing nucleotide sequence isolated from the Sargasso Sea
gtggaaaaatcaaactcaacacccttatgttttttctttaggttctattgggatgtttgttattggtggattaagtggtgtaacacattctgtagtgcctgcggacactcaacaaactgatacttattacattgttgctcattttcattatgtactttttggaggggcattgtttggcatcttttcaggactttactactggtttccaaaggtttggggcaaaatgtacaatgagactttaggaaaaattcatttttggctaatgttaatcggctttaatcttacttttggtcctatgcattggttagggctgcaaggccaagttagaagaacctgggtctatgctgaagaaactaatcttcaattttggaatattattgtgaccattggtgcatttataattgctgtctcaataattgtttttatgattaattggattttctcaaagagaaatggagagaaagctccatttgacccttgggatgctagaacaattgagtggactatcccatcaccaactcctgtatggaacttttcaaaagctccagaagtgaaatcattagatgatttttggcatgcgaaatatgaagaagacgaggaaggaagagcagtaagaaaagagtcagctgatcaaatgctattagatcttgaagaagagggtcttaatccaacagaaaatatagtattgcctaacccttcgtattttccaattgtacttgctgcaggattaccatttttgggttacgcagttatttataagtctattccacttgctttggttggtgctttgcttcttttaattggaggttttggctggggaacagaaccattagaagaagaggttgaagaaaatttagagcatgagtag

SEQ ID NO: 224905 - DNA, 625 bp, Unknown
  Bacterial polypeptide expressing nucleotide sequence isolated from the Sargasso Sea
aatgagcgcagtagttgaaaataacgatcatcatgatgaccatcaccacggcccaagaaaaggcatctggagatggatgacaacaacgaaccataaagatataggaacactttatctatggtttagttttttagcattcttggttggcggtgcttttgctatgggtatcagagcagagctatttgagcccggtcttcagcttatggaccctattaggtataaccagttagtcacaatgcatggactaataatgatttttggaggagttatgccagcatttgttgggttagcaaattggttgattccaatgcaaataggcgcaccagatatggctttaccaaggatgaataacttaagtttttggttgttgccaaccgcttttgccattttaatgtcaacagcatttatggaaggcggcatgccaggttttggttggactttctatgcaccactatcaacaaattatcctaacgttgcattctttgtgtttgctgtacacataatgggagtctcttcgatcatgggatcaattaatgtgatagtaactatcatgaacatgagagcaccaggcatgacacttatgcaaatgccattatttacatggtcatggttaattacagcttat

SEQ ID NO: 224906 - DNA, 550 bp, Unknown
  Bacterial polypeptide expressing nucleotide sequence isolated from the Sargasso Sea
tatgagctcaaaagatcaaaaacatgattaccacttggttgatccaagtccttggccaatctatacatcttttgctaccttaattactgctgtgggatcagtttattattttcactcaaaagtaatgtgggctatgctacttggtttcgctcttttaatttatggggcatacatgtggttcagagatgttgttaatgaggccgaacatcaaggtcaccacacaccagttgttcagatacatcatcgttatggaatgacattgtttatagcatctgaagtaatgttttttgttgcttggttttgggcttactttgatgctagtttgtatccaagcgcttttgttggtggagtttggccgcctaaagatattgaagtttttaacccgtgggatattcctttaatcaacactctagttttattattatcaggaacaactgttacctgcgctcaccactctttgttagaagatgatagaaaaggttttattcaaggcttatgggcaacagttctactaggtttcttttttacccttcttcaaatatatgagtat

SEQ ID NO: 224907 - DNA, 972 bp, Unknown
  Bacterial polypeptide expressing nucleotide sequence isolated from the Sargasso Sea
aacggcctctacacgatgcacggaacagtgatgctgttcctcttcttgtttccagttctaaatggcctgaacaacttgctgatccccaccatgattggcgcaccagacatggcattcccgaggctgaacgctgctgcgttctggcttgtgcctgtgtttgccgtgttgttgatggctagcttttttgtcccagggggaccagcacaagccggttggtggtcctatcccccaatcagcattcagaacccactgggtcatttcgttaatggtcagcagctgtggcttttggccgtggctttatcgggaatttcatcgatctttggtgccatcaatttcgtcaccacgatcattcgcatgcgcgccccgggcatgggctttttcaagatgcccctctattgctggacggcgtggggggctcaaacgttgcagctggttggcctgccagccctaactggtggcgccatcatgctgctttttgatctgagtttcggcaccagctttttcaagcccgaaggtggtggtgatccagttctctatcaacacttcttttggttctattcgcacccggctgtttatgtgatggtgctgccagtgtttggtattttttcggaggtgttcacctgctatgcgcgcaaacctctattcggctataagttcgtcgctcttgcctcatttgggattgtctttctggctctgattgtctgggtgcatcatatgttctatacgggaactccgaattggatgcgtatccttttcatgttcaccaccatgttgattgcaataccaacaggtgtgaaagtttttgcctgggtcgccactctgtggcgaggcaaattgcgtttgacgacaccgatgttgttctgccttggtggcctggttaattttatctttgctgggatcactggaatcatgctgggaactgttcccatcgatattcatgtaggtaacacgtacttcgtagtggcgcatttc

SEQ ID NO: 224908 - DNA, 676 bp, Unknown
  Bacterial polypeptide expressing nucleotide sequence isolated from the Sargasso Sea
atgtcagctgaaaaaaaacacgattatcaccttgtagatccaagtccttggccaatctatacttctttctcatgcttagttttagctttgggtgcagtttattatatgcatgcagatgtatcatggggaatgtatttaggtttagctctgttaatttacggagcctacatgtggtttagagatgttgtaattgaagctgagcatcaaggacaccatactccggttgttcaaatacatcatcgttatggaatgacgttatttattgcttcagaggttatgttttttgttgcatggttttgggcttattttgatgtgagtctttttccaaatgaatttgtaggtaatgtttggccaccaaaagatattgaaacttttgatccttgggatattccattaatcaatacattaatattattgttatcaggtactactgttacttggtctcaccatgctttactagaagatgacagaaagggctttatcaacggtttaatcttaacagtaatactaggtgtttgttttactgctttacaagcatatgaatatcatcatgcaacatttgctttttcagatcatatttatggatcagtgttttatatggcaacaggatttcatggttttcacgtaatagtaggaactatatttttagctgtatgtttatggcgtggaaattagg

SEQ ID NO: 224909 - DNA, 291 bp, Unknown
  Bacterial polypeptide expressing nucleotide sequence isolated from the Sargasso Sea
ctgccgggctgggcttgcccttcctggtgagtcagatggtggagtacttcaccctgccgttcggcctcaccgacaacctctacgcgagcaccttctttgccgcgacaggatttcacggcctgcacgtgactcttggagctctgatgactctgatcgtgtggtggcaagcacgtgcgaacggtggacgaatcagcccggaaaatcatttccccctggaggctgctgagctgtactggcacttcgtggacgggatctgggtgatcctgtttgtgatcctgtatctgctctgat

SEQ ID NO: 224910 - DNA, 933 bp, Unknown
  Bacterial polypeptide expressing nucleotide sequence isolated from the Sargasso Sea
gttactaatcacggaacgatcatgatcttctgggttgccatgccggtcctgatagcggcattcggtaactggatgattccgttgatgatcggttgtgatgatatggtttttccaagactcaaccgtctgtcttaccagatatttctggtaagtgctttggttttgatcctttccttttttgttgaaggggggggcttcggaggtgcgtggacctcttatcctccattgtctgcagctgcagagtataacctgaccaactggggggcatctttgtggcttcttgctgtttttcttgaaatcgtggcttttttacttggtgggattaatttcatcaccaccaccatgaatgcgcgtgctcctggaatgggaatgatggacattccgatcgtcatttggatgatcaacattgctgtcatcctatttatggcttccgtaggcccgttggtagcaggagcagtgatgctcttttttgaccagcgtctaggcacatctttttttctaccctcaggtggcggagatccattactttgggaacatctgttctggtttttcggacatcctgaagtttatgtggttctattaccgaccatgggtatcgtagctgaaatcataaccgtgttttccaggaaaaaactgtttggttatcgcactattctttatacagcatttggaaccggagggctctcttttatcgtatgggcccatcatcagtttgttgccgggatcgatcccagaatggcgaatgtgtttgtagtgacaaccattttgatctcaattccaattgcagagatgcttttctcgttcattgcaactctttatgggggttcgattgaattctccactcccatgttgtgggcccttggattcctggtttcctttctgataggcggggtcacaggaatttatttgggtgctagtgctttggatgtttat

SEQ ID NO: 224911 - DNA, 850 bp, Unknown
  Bacterial polypeptide expressing nucleotide sequence isolated from the Sargasso Sea
ccagaaatctataattctttaggagcaatgcatgggaccattatgatattccttggagtagtgcctcttgcagttggagcatttggaaattatttagttccattacaaataggtgctcctgatatggcttttcctaaacttaatgcagcaagttactggagctattttgccggtggtgttgtaatgatgagtagttttttctctgaagagggagctgctagatctggatggacttcttatccaccattagcagatattgaagtagggcaaaccatttggcttattggaatgatatttttaattacatcaagtttattaggatcaatgaatattattactacaatagtccaattacgtgctcctgggctaacttggagtagattgcctttctttgtttggacacagttagtaacatcttttttactagtattagcatttcctccattagaagctgcagctgtactacagcttatggatagagtcgccggtacgagtttctttttgccgagtggtttagttatatcgggagaagctttagcggtaagtggaggagggagtcctttactttggcaacatttattttggtttttggctcacccggaagtatatgtacttatattaccagctatgggtattatatcagaagttattgctaacaatactagaaaacctctttgggggtataattcattagtatattcagttatctttcttgggtttatgtcctttgttgtgtgggcacatcatatgtttttaactggaatggggactgctatgagttcgtttttccagattaccactatgattatttctatcccttcagtcattattttatcagcattgtttattc

SEQ ID NO: 224912 - DNA, 361 bp, Unknown
  Bacterial polypeptide expressing nucleotide sequence isolated from the Sargasso Sea
catgaccgataccgcgaaacatccttatcatttagtggacccaagtccttggccggcccttggtgccttggctgccctttgtttggcaggtggcttagttctttatatgcacgagatagctggtggcgtggcactcacttctataggtggggttttgaccctcttgactatggtggtgtggtggcgagatgtcattagggaggctacatatgaggggcatcatacccctatagtacagttgggaatgcggtatgggatggtgctgtttattgcatctgaggtaatgttttttgttgcgtggttttgggctttctttgatgcgagcctctttgcgggagaagcaaagttagtgatcgcgttg

SEQ ID NO: 224913 - DNA, 957 bp, Unknown
  Bacterial polypeptide expressing nucleotide sequence isolated from the Sargasso Sea
gccaaacccgagaccgacgtcaccacacccgttgccaacgcttgacatgactgttgcaaccccttcggacaccctcgtctcacccccacggctgcagccaaccggctggctccgctacctgagcttcagcgtcgaccacaaggtgatcggcctgcagtatctggtgtgcggattccttttctatttggtcggtggagccctcgctggtgccatccgaaccgagctggccagccctgtctccgacttcatggcacgggatgtctacaaccaggtgctgaccttgcacggaacggtgatgatctttctgtggatcgttcccgtggtgaacggtgccttcggtaactacctgattcccttctatgtgggggcccgtgacatggccttccctcggctgaatgctgtggccttctggctcatccctccagccggactgttgctgatcaccagttacttcctcaccggagcagcccagtcgggctggaccgcctaccccccgctgagcatcacaaccccggcaacaggccagatcatctggatcctcagcgttctgcttctgggaggcagttcaatcttcggaggaatcaacttcatcgccacgattctgaagctgcggcgaccggggctgaaactgatgcagctaccgatgtactgctgggccatgcttggaaccagcatcctggtcgtcctctcaacgccggttctggcaggaactctggtgctcctgagcttcgacatcgttgctcatacgggattcttcaatccaacgctgggggggaatgttgtggtttatcagcatctgttctggttctattcacatcccgccgtttacatcatggtcctgccggctttcggcctcgtgagtgagatcctgccggttcacgccagaaagcctttgttcggctacgtcacgatggtttactccatcatggcgattgtgattcttgggctggtcgtctg

SEQ ID NO: 224914 - DNA, 703 bp, Unknown
  Bacterial polypeptide expressing nucleotide sequence isolated from the Sargasso Sea
ctcgtattgtcggacctgatgcggctgcagctcggctttccgggcaagtttgcgttcatcgacgcgaaccactactaccagttcgtcacgatgcacgggatgatcatggtgatctacctgctgacggcactgttcctcggcggcttcggcaactacctgatcccgctgatgctcggcgcgcgcgacatggtgtttccgtttctcaacatgctgagctactgggtctacctgctggccgtgctggtgctggtggcgagcttcttcgtgccgggcgggccgaccggcgcgggctggacgctgtatccgccgcaggcgattctgccgggcacgccgggcgtggaatggggcatcgtgctgatgctcgtgtcgctggcgatcttcatcgtcgcggccacgatgggcggcctgaactacgtgaccaccacgctgcaggcgcgcacgcgcggcatgacgctgatgcgcatgccgctcacggtgtggggcatcttcatcgcgaccatcatggcgctgctggcgtttccggcgctgttcgtgtcggcggtgatgatgctgttcgaccggacgctcggcaccagcttcttcatcccggccgtggtgtcgatggggcagacgctcaagcacgccggcggcagcccgttgctgttccagcacctgttctggttcttcgggcatccggaggtctatatcgtcgcgctgccggcct

SEQ ID NO: 224915 - DNA, 719 bp, Unknown
  Bacterial polypeptide expressing nucleotide sequence isolated from the Sargasso Sea
gatcgctattccatctgcagttaaggcgtttaactatattactactctatggaaaggtaacttgcaattgaatcctgcgatgttgttttcaattggtttggtatctacctttatcactggaggtttaactggaattattttaggagatagtactttggatattaacgttcacgatacatatttcgtagtggcacactttcacttagtaatgggtatttctgctttatatggtatgtttgctggtatttatcactggtttccaagaatgtttgggcgcatgttgaataaaaatcttggttatgtacacttttgggtaactgcaatttgtgcttatggtgttttctttccgatgcattttattggattagctggtttgccaagacgttactatacaaacacaaacttcccattgtttgatgacttacaaaatgtgaatgttttgatcactatgtttgcacttgttggaggtgctttccaattggttttcttatacaacttctttagtagtattttttacggtaagaaagctgtaatgaatccatggaaatctaataccctagagtggacagctcctgtagaacatattcatggtaactggccaggagcaatccctgaggttcaccgttggccttatgactacagtaacccaaatcacgaagaagattttgtaccgcaaaacgttccgatgaaagaaggtgaagaagttttacaccactaaa

SEQ ID NO: 224916 - DNA, 119 bp, Unknown
  Bacterial polypeptide expressing nucleotide sequence isolated from the Sargasso Sea
taatggacactttacaccagaaaagcatataggatttgaagctgctgcttggtattggcactttgtcgatgttgtatggctatttttatttttggttgtgtatgtttggggtcgttaga

SEQ ID NO: 224917 - DNA, 598 bp, Unknown
  Bacterial polypeptide expressing nucleotide sequence isolated from the Sargasso Sea
atgagcggtgatcaaaagcatcaatatcatttagttgaaccaagtccatggcctgcactagggtcagctgctggttttactttgttcttgggtcttactctgtttatgcatgaatatccatattcaatttatgtactaggagctggcttgtttatggtaatagcaaccatgttttattggtggagagatgtggttagagaggctgaatatcaaggacatcacacaccaattgtacaaataggtatgagatatggtatgatattttttatctgttctgaggtaatgttctttgtagcatttttctgggctttctttgattctagtttatatcctgatacaggtgtttggccaccggctgacatagtagctctagatccttttgatttaccactaataaatactttaattcttcttctatcaggttgtactgtaacctggtctcatcatgctttacagcataacaatagaaaagattttattaggggtcttgttcttacgataatcctaggtgcaattttcacagccgttcaagcttatgaatatcaacacgctacatttgcgtttactgatggaatttatgcatcaactttttatatgg

SEQ ID NO: 224918 - DNA, 841 bp, Unknown
  Bacterial polypeptide expressing nucleotide sequence isolated from the Sargasso Sea
ttgccggctatgggtcttgtttcagaaataattgctaatcaagcaagaaagccgatttttggatataaagctatggtgttgtcaatacttgctattgctattttgtcttttgttgtttgggcacaccatatgtttcttacaggaatgaacccatttgttggagcaatatttgtatttctaaccttgcttatagctataccatcggcaattaaatcctttaattggatatcaactatatttagaggtaatattcagtttaatccacaaatgctttttgcattaggttttgtttcaacttttatatctggtggtcttacaggaatttggttgggtaattcagcaatggatattgcgctacatgatacttattttgttgtagctcactttcatatagttatgggtgtatctgcattttttggaatgatagccggtgtctatcattggtttcctaagatgtttggccgctttatgaatcgtcagttaggatattttcatttctttttgacatttgcagctgcctatggagtattttggccaatgcactatatgggtatggctggtgttccaagaaggtattatatgtttactaagtttgagacatttaatcagtttgatgacttaaatgtaatgattactatttttgcattcttaggatttattgctcaggtaatttttgtggtaaacttctttatgagtatttggcatggaaagaaaatgaccaataaaaacccatggaaatcaagtacacttgaatggacgactggagttgagccattacatggtaattggcctggaaaaataccaacagtttatcgttggccttatgactatagtaagcctg

SEQ ID NO: 224919 - DNA, 934 bp, Unknown
  Bacterial polypeptide expressing nucleotide sequence isolated from the Sargasso Sea
gcatttattggtaggtgcattaatgatgagcttggacaatgtgctcggaacaagtttctttatgccaacgatttaaaagcaggtgaagttttagaatatggagggggaagtcctattctttttcaacatttattctggttttttgggcatcctgaagtttatatagttgcactacctgcatttggaataatctcagatttaatctctgttcacgcaagaaaaaatatatttggatatagaatgatggtctgggccatagttggtattggtgcactaagcttttttgtatgggcacaccacatgtatgttagcggaatgaatccttggtttggtttcttttttgcaactactactcttataatagcagtacctacagctatgaaagtttataactggatcctaacactatggagaggaaatattagacttaacactgttatgctatggtgtttaggctttattgtaacttttgtgaatgggggaattacaggaatttttttaggaaacgttagtgtggatgttccattatcagatacatacttcgttattgcacactttcatatggttatgggtattgcaccacttatggtaattatgggagcagtttaccattggttccctttagtagcaggaagattcttagatgaaaaattaggtaagtggcatttctggttaactttcttaggtgcttattcaatttattttcctatgcactacctagggtttattggagtaccgagaagatattttgaaatgtatgatagtccatatgtaacatcagctgttggaatgaacgaatttattagtttagctgcatttatagttggtgccgcacaatttattttgatttataatattataaaaactttaaaaacaggaaaacctgcgggtaaaaatccttggcaagcttgttctttggaatggttaacaccgt

SEQ ID NO: 224920 - DNA, 547 bp, Unknown
  Bacterial polypeptide expressing nucleotide sequence isolated from the Sargasso Sea
gctgtggtaatgtctctttttgtttctgaaaatattagactgtttggatggtctttgactttgatgaaaggcggtcttctggaaggccatctgcgagcctggactggaattgctctaccaagccttttgtacaatacggggatcataatttttggcctagtttatgtttaccttcccttcatgctttttccattggcgcaaggtatagcaatggtacctgaggatgcaagacaagctgcagcggatctaggtgcaaaccggtggcaaatccttctctatgttgacttaccattgtcttcacctggtataatggttggctcactcttatgttttgttctcggtgctggtgccatgtccgaatctaagcttttaggtgggcaatctgttattgtgatagccgatgatatagagactgcttttacatttggacaaaattggcctcttggagcctccttatcgatgattttgataataataataggagcactcgcaatatatgggataaacaagattgatttagatacagtcatggggcggaagcgctaat

SEQ ID NO: 224921 - DNA, 920 bp, Unknown
  Bacterial polypeptide expressing nucleotide sequence isolated from the Sargasso Sea
ttccttaagccttgagttaactactacagaccacaaatatgttggaattctttacttcttattcggtttcttcttcttccttgttggaggattgttggcactgattttcagaatacaattggcattgcctgaaaatgatttcttaacattcgatgaatacaattcattcttcagtctgcacggaactacaatgattttccttgctgctatgcctatgattgctggatttatgaattatattttaccgcttcagataggagctaaagatcttgcattcccgagaatcaatgcattcggattttggattctagtagccgcagcaccactaatcttcactggaatatggagtggggaatctgcggatattacatgggttatgtatccaccttactctagtcttgccggattaggtacggctcaaggaccgaatgcgggaacgatttctttcattgcaggagttgcattactgggggcctcctcaacccttgcaggtgttaacttcgtaacaacgacatttacaatgcgtgcgccaggtgtaacatggatgaaaatgccactattcacttggtcagttctaatcagtgtattcatgttgtatctctctctaccaccattcataatcggtgtattcttcttattgtttgatagtaccttaggaaccgtgttctttacttcaggcggtgatccattgctgttccagcacctattctggttcttcggccatccagaggtatacgtggtgattgtgcctgcattcggtatcgtttctgaagtattagcaacttcagcacgccgttcaattttcggttacaagtcaatggtttatgcgatggtaggaatcggtgtcgtaggatttattgtatggggtcaccatatgttgacttcgggaatggatccattctggcgcgctctattcatgc

SEQ ID NO: 224922 - DNA, 559 bp, Unknown
  Bacterial polypeptide expressing nucleotide sequence isolated from the Sargasso Sea
tcttgcgattccatcatttaaattattataccaacaagaaaaaagtgaaaactatgatatgactgttaaagttattggtcaccagtggtattgggagtatgaataccctgatcacggtgatttttattttgagagctatatggttcaagaacaagatcttgaagaaggcgacctaagattattgacagtcgataaccctttagtaattccagcaaataaaaacattcaaattttaattacggctggtgatgttctccatagttgggcggttccttcaatgggtttgaagacagatgctgttccaggaagattaaatgaaacatgggtaaatgtaaaagaaccagggatatatagaggtcagtgttccgagatttgtggaagtggtcatggttttatgcctgtggttgttaaagtattaccagagagagaatttatggcatgggctaatgaagctaaaaataattatgccatcaacgaagatattgaaattaacaaaccagaagaggaaattgttatttcacaaaataacataattcaattagaggagaataatttatga

SEQ ID NO: 224923 - DNA, 868 bp, Unknown
  Bacterial polypeptide expressing nucleotide sequence isolated from the Sargasso Sea
ctattccataatttttgcagtttctgttttttttgcaggatttggcgctgctaacgcaatcactggcaatggttccacaatgcttcttcttggtatgttagctgtagttattactatgtctttctggttttccgttgttatgaaagagtcaaaagccggacttgatacaccgcaattaaataattcttatgtatttggaatgggatggtttattttttcagaggtaatgtttttcttcgctttttttggtgcattattctacataagacagtttgcagtaccatggcttggtggtgaaggagaaaaaggccttgctggagaattattgtggccagaatttgaggcaacatggccacctatgataactcctgagcaaagcattatgggcgatcaggcagttacaaaaggacctgatgaatctatgtatctacatggtataagtggaataattaagtggcttcctttatggaatacaatcgttcttcttacttcaagtggaacagttcactttgcacatattgcacttaaagaaaataatagaaaaagatttaacttttggttaggaattactgtgtgcttagcatttatttttgtaattcttcaagcggcagaatactatgaggcctatgctcatctgggattaactctaaattctggagtatatgggacaactttttttatgctaactggatttcacggaatgcatgtcttgattggtgggatctttcttttaactcagctgttaaggtcaacagggttcaaacattttacagaaaaagaacattttggctttgaagcagcttcttggtattggcattttgttgatgttgtatgggtttgcctatttttatttgtttatattatttaa

SEQ ID NO: 224924 - DNA, 266 bp, Unknown
  Bacterial polypeptide expressing nucleotide sequence isolated from the Sargasso Sea
aatgtttagaggctcaattacctttgagactccaatgttattctcaattgcttttgtggctttatttacaattggcggattctcaggattaatgcttgcaatagtacctgcagacttccaatatcatgatacttactttgtagtagcacactttcactatgttctagtgccgggagcactatttggaataatagctgctgcatattattggctgcctaagtggacaggaaatatgtacgacgaaactcttggaaaattacattttt

SEQ ID NO: 224925 - DNA, 546 bp, Unknown
  Bacterial polypeptide expressing nucleotide sequence isolated from the Sargasso Sea
aatgtcagcagaaaaaaaacacgattaccacttagttgatccaagcccttggccaatctacacatcctttgcatgcctagtattagcaataggtgcaattttttatatgcataacggtatttcctggggaatgtatcttggtttagctttattaatttatggtgcatatatgtggtttagagatgtagtgatcgaagctgaacaccaaggtcatcatactcctgttgttcaaattcatcatagatatggaatgactttatttattgcttctgaggtaatgttctttgttgcatggttctgggcttactttgatataagtttgtttccaaatgaatttgttggaaatgtatggccaccaaaagatattgaaacatttgatccttgggacattcctttaataaacactctagtattattattatcaggaacaactgttacttgggctcaccacgctttattagaagacgatagaaaaggatttatacaaggtttaacactaactgttattcttggtttcttttttactttattgcaagcatacgaata

SEQ ID NO: 224926 - DNA, 904 bp, Unknown
  Bacterial polypeptide expressing nucleotide sequence isolated from the Sargasso Sea
aatgagttccgaatcttcttattacgttccggccagtagcaagctgccaatatttatggctatatcgcttttactttttgtttatggcgctggctacaccataaatgatctaggcaaagaagacacttattcacactggattttaatttcaagttttctattgatgtgggggaccatgtttttttggttttctgaagtaataaaagaaaacgatgccgggatgtatagcaaccaactcaatacatcttttgtgcatggtatgtcttggtttatcttttctgaggtcatgtttttctttgcttttttcttagccctcggttacgtaagaatttttgcggtcccatggttgggtggtgaaggtgagaaaggaatttctaacattttatggcctggctttgaagcctcttggcctttaatggagacaccagataatgaaagatttcccggggcgcatcacaacatgtcaattcctccaataactaagattcatacctggctacctttttggaatacgctttgcttggttacttcaagtgggacgattgcgctagctgaagccgctttaaaaaaaggcaaccgtaaatctttcaaagcttggatggtcgccaccatatctttaggttatatttttgtggttctacaaagcgtcgagtattacgaagcatatgctcacatgggtcttactctaggggctggaatttatggaactactttcttcttaatgacagggtttcacggattccatgtttgtttaggagcgattattttgacaataatgactataagaggattccaaggagcttttagcgaacacgatcattttggattggccgcaggatcttggtactggcacttcgtcgatgtggtttggattctgttggttttagttgtttatattttttaa

SEQ ID NO: 224927 - DNA, 833 bp, Unknown
  Bacterial polypeptide expressing nucleotide sequence isolated from the Sargasso Sea
tatgacgatgttccgtttgcctatgacgatttgggcgatgttcatcacagccgtcctgcaggcctttgcccttcctgtccttaccgcggctggctttatgcagttagctgacagatctctcgggacaggttttttcacgcctgagggcaacatcgtaaacaatgctgttgcaactgctggtggagggcagcccctgctttggcagcatttgttctggttttatagccacccggctgtttacatcatgatcctgccggcaatgggcatggtctcagatatcctaacgtgcttcgcacgcaaaccgttgttcgggtaccgcccgatggtttattcggtggcgggtattgccgggttgggtttcattgtgtggggacatcacatgtttatgtccggcatgaatccagcccttggaactacttttatggtttcaaccatgatgatcgcattgccaagcgccgtgaagacattcaattggcttggaacaatctgggctggtcgaattcagtttacaacatcaatgttatttgcactgtcgtttgtctctatgtttatcatcggcggactgtctgggattttcatggcggcgactcccgttgatattttcattcatgacacgtatttcattgtggctcatttccattacgttctttttgcgggaacggcgatgggtgtttgggctgccatttacttctggtttccaaaaatgttcggaagaacaatgaatgagttctggggaaagatacacttcttcctgacatttatttttctgaacggcaccttctttacgatgcatattttgggggcggttggatttcctcgaaggcttgcagatg

SEQ ID NO: 224928 - DNA, 915 bp, Unknown
  Bacterial polypeptide expressing nucleotide sequence isolated from the Sargasso Sea
atcgcattccccggacacctttgctttcatcgatcctacgaactaccttcagtttgtcacgatgcacggcatgatcatggtgatttacttgctaacggcgctattcctaggtgggttcggtaattatatgataccgctgatgctgggtgcccgagacatggtctttccctatgtaaatatggtgagtttctgggtctactttgcggccgtcttgattttggttgccagcttcttcgttcctggcggagcgtctggagcgggttggacgctttatcccccgcaagcgattatgcctgggacgcccgggacggacgggggcatcattttgatgttgttgtctttggccctgtttattgttggatttacgatgggcggccttaactacgttaccactgtgctgcagcagcgtactcgtggtatgtcattgatgcgtatgccacttacgatttgggctatcttcatagcaacgatactcgctttattggcgtttccagcactgttagtaagcgcgatcatgatgttgttggaccgacttcttgagactagtttctttatgcctgcgatcatctctgctggcggccagaccgattacgatggtggtagcccggtgctattccaacacctattttggttcttcggacaccctgaggtgtatatcgtagctcttcctgctttcggccttgtctctgaaatattgagtgttcatgcacgaaaggcgatatttggataccgaatgatggtttgggcgatcgtagcgattggcgcattgagcttcatagtatgggcgcaccacatgtatgtgagtgggatgaatccttattttggattcttttttgcgacgaccacgctgattattgcggtgcctactgcgattaaagtttataactgggtattgacgttatggcggggcaacat

SEQ ID NO: 224929 - DNA, 832 bp, Unknown
  Bacterial polypeptide expressing nucleotide sequence isolated from the Sargasso Sea
actgcattatttcttggaggatttggaaatttattaataccgttgatgtgtggagctagagacatggcatttccatatgttaacatgctcagctactgggcattcgtggttgcagtcgtagttttattagcaagcttttttgtacccggaggtcccaccggagcagggtggacgctttatccaccacaagcaatcacagctggaacaccgggttataacggtggaataattttaatgttaatttcactcatattatttgtggctggtttcacaatgggtggattaaattatatcataactgttttacaattaagagctagaggcatgactttgatgagaatgcctttaacaatttgggggatttttaccgcaactgttcttgcgatgtttgcatttccagctttattagttggatgtttaatgatgacgctcgatagtttgcttggaacaagtttcttcatgccagcaatggtttctttaggtgaaacactaactcatgagggtggtagcccaattttgttccagcatttattttggttttttggtcacccagaagtttatattgttgcattacctgcttttggaattgtttcagatttgctttcagtacattcaagaaaaactatttttggatacagaatgatggtttgggcaattgttggaattggtgctttaagcttttttgtatgggcacatcacatgtatgtaagcggaatgaacccttggtttggcttcttttttgcaacaacaactttaattatcgcagttccaacggctataaaagtctataattggattttaactctttggagagggaacattcaattatctc

SEQ ID NO: 224930 - DNA, 589 bp, Unknown
  Bacterial polypeptide expressing nucleotide sequence isolated from the Sargasso Sea
ttgggtggtgaagggcctacagctaaaggacttgcaggtgagctgctttggcctgactttgaagctacttggcctccaatgattacccctgaagaaagcttacttggggaaaatgcaattactaaaggaccagatgaaagcatgtatttaaaaagttttaccagcgttttaacctggctcccactttggaatacaattgttttgctctcatcaagcggaactgtacattttgctcacgttgctttgaaacaaaacaatagaaaaagattcaatttttggttagcaatcacagtatttcttgcgtttgtatttgttatattacaggccctagaatactacgaggcgtatgcgcatctagggttaacactaaattcaggtgtttatggcacaacattttttatgcttactggtttccatggaatgcatgttttaataggcggtatatttttactcactcagctagtaagatcatcaggctttaaacatttttcggaaaaagaacattttggttttgaggctgcgtcctggtattggcatttcgttgatgttgtttgggtttgtttattcttgttcgtatatattctttagc

SEQ ID NO: 224931 - DNA, 595 bp, Unknown
  Bacterial polypeptide expressing nucleotide sequence isolated from the Sargasso Sea
atgtcagcagaaaaaaaacacgattaccacttagttgatccaagcccttggccaatttatacatcatttgcatgcttagtgttagccataggtgcaattttttatatgcataacgatgtttcctggggaatgtatctaggtttagcgttattaatttatggtgcttatatgtggtttagagatgtagtcattgaagctgaacatcaaggtcaccatactccagttgttcaaattcatcatagatatggaatgacattatttattgcttctgaagttatgttttttgttgcatggttctgggcttattttgatattagtttgtttccaaatgagtttgttggaaatgtttggcctccacaagatatagaaacttttgatccatgggatattccgttaataaatacattagttttattattatcaggcaccacagtaacttgggcccatcattcattattagaagacgatagaaaaggatttattcaaggattaactgcaactgttgcgttaggtttctttttcactttattgcaagcttacgaatatcatcatgctacatttgattattcgggacatatttatggtgcagtatttt

SEQ ID NO: 224932 - DNA, 535 bp, Unknown
  Bacterial polypeptide expressing nucleotide sequence isolated from the Sargasso Sea
atcccagttataattttaattgcgatggccataccttcctttaagcttgtatatcaacaagacataattccagaggcagatatgacagtaaaagttatagggcaccagtggtattgggaatatcaatatccagaacattttgatattacttttgagagttatatgattcctgatgaagagttagaagaaggtgatgttcgtcttttaagtgttgataataaactagtattgccagttaataaaaacatacatgttttagttactgcaggagatgttttgcatagctttgctatgccttcattgggtgtaaaaaaagatgctgttccaggtagactgaatgaaacatggatgaatattgaaaaacctggcatatatagaggtcagtgttcagagctttgtggaacaggtcatggatatatgccgatagtaatagaagcagttactgaggaagaattccttgcttgggcaatggatacaaaaattaaatatgctatgaatgaaaaaaatacatttgctaaactaaaatctaaatagg

SEQ ID NO: 224933 - DNA, 304 bp, Unknown
  Bacterial polypeptide expressing nucleotide sequence isolated from the Sargasso Sea
catgagttacgatacgtccgctgaaagtcatttagatcatcatgatcataaacctggatttataagacgttggtttttttcaacaaatcacaaagacataggaactctttatattatatttgccctattagctggattaattggtggttttttctcactcttaatgagagctgaattagctgctcctggtttggatgttgttgccgatggacaagtttggaatgtaataattaccgctcatggactgttaatggttttttttgttgttatgccagcattaataggaggatttggaaactggttt

SEQ ID NO: 224934 - DNA, 788 bp, Unknown
  Bacterial polypeptide expressing nucleotide sequence isolated from the Sargasso Sea
gtagagcctgagttttataatcagatgcttacacttcatggactgataatggtgttcggcgcagttatgcctgcatttgttggtctggcaaactggcttgtaccaatgatggtaggagcacctgacatggctcttcctagaatgaataaccttagtttttggattctgcctttcgcattctttattctattatcgtcattatttatggagggcggagcccctaattttgggtggacattttatgctccactatctacaacctatgcaccaccaagtgtaaccttctttatatttgcagtgcatattatgggcgcatcatcaatcatggggtcaattaatgtgattgtaactattatgaacatgagagcacctggtatgacattaatgaaaatgccactttttgtttggtcatggttaataacagcatacctgttaatagcagtcatgccagtccttgcaggagcagtaaccatgatgctaatggatatccatttcggaacaagtttttttaacgctgcgggcggtggagatcctgttttatttcaacacatcttctggtttttcggccatcctgaagtttatattatgattcttccagcttttggtattgcatctcatatcattgaaacgttctcaagaaaacagctatttggctatgcttctatggtttgggcgatggcctccattgccattttgtcatttgttgtgtgggcgcatcacatgtttactgtagggcttccattagccgcagaattattttttatgtgggcaactatgttaatcgctgt

SEQ ID NO: 224935 - DNA, 867 bp, Unknown
  Bacterial polypeptide expressing nucleotide sequence isolated from the Sargasso Sea
cagcttcaaccaacacctgagatgactgtcactctccttccagacacaggaaccgaacgtcctccgagacttcagccaacgggttggctgaggtatttcagcttcagcgtcgatcacaaagtgattggcctgcagtatctggtctgtggctttctcttttatttgatcggcggagccttggcaggtgcaatccgaacggagctagccagccctgtcgcggacttcatggcgcgtgatgtttacaaccaggtgctcaccctgcatggcacggtgatgatttttctctggatcgttcctgttgtgaacggcgctttcgggaattacctgattcccttctatgtgggagccagggacatggcattccctcggttgaacgcggttgcattttggttgattcctccggcaggactgctgttgatcagcagttatttcattactggagctgctcaatcaggctggacggcctatcccccattgagcattacaacgccagcgacagggcaggttctctggattctgagtgttttgcttctgggtggaagttccatcttcggcggcatcaatttcatcgcaacgatcctgaaactgcgacgtccaggtttaaagctgatgcaactgccgatgtattgctgggccatgcttggcaccagcattttggtggtgctgtcgacgccggttctggcgggcacactcgttctgctcagcttcgacatcgttgcgcacacaggctttttcaatcccactctcggcggcaatgtcgttgtttatcagcatctgttctggttctattcgcacccagccgtttacatcatggttctgccggctttcgggctggtcagtgaaatcctgcccattcacgccaggaag

SEQ ID NO: 224936 - DNA, 794 bp, Unknown
  Bacterial polypeptide expressing nucleotide sequence isolated from the Sargasso Sea
ccacaaaaaaataggaataatgtatggctttactgctatatttttctttctattaggtgggcttgaagcagtagtcattagaagtcaacttgcatttgcaggcaatgaaatagtttcgcctgatatctataatcagctgtttaccatgcatgcactgactatgatatttttagcaattatgcctttagctgtcacattctttaatctcattgtacctttacaaattggtgctcgtgacgtggcatttccacgtttaaatgcattaagctactggatttatctttctggaggattgttactaaatgctggatggatactcggtggcgcagcagactctggctggtttgcttatgctccattaactctagatcaatatggtagcggaggaagaggaatggacttctactcacttgggttactagtcctcggtgtttcatctgttgcaggtggtttaaacttcctagtaactataataaacatgagagctcctggtatgactttaatgagaatgccagtatttacttggatggcatttatcacatccatactacttgttacagcaatgccagttataactatagctttaattgagcttgctttagatagaattttaggcacacaattctttgcacctggcgcaggtggagatcctctattatggcaacatttattttgggtttttggccatccagaggtttatattttaattttacctgctatgggaattgtttctgaagtactaccaacattttctaagaaaccattatttggatatccgtttattatattttcag

SEQ ID NO: 224937 - DNA, 921 bp, Unknown
  Bacterial polypeptide expressing nucleotide sequence isolated from the Sargasso Sea
gctggtggtagtcctattttatttcaacacttattttggttttttggtcatcccgaagtatatatagtagctctaccagcatttggaatagtatcagatttaatttcagtgcatgctagaaaaaatgtatttggttacagaatgatggtttgggccatagtaattattggagccttaagttttatagtttgggcacatcacatgtatgttagtggaatgaatccttggttcggattcttttttgcaacaaccacattaatcattgcggttcctacggctataaaagtttataattgggtgttaactctttggagagggaatattcaccttacaattcctatgttattttctctaggatttattgttacttttgttaatggaggaattacaggattatttttaggaaatgttattattgatgtaccactttccgatacttattttgtagtagcacatttccacatggtaatggggatagcacctttaatggtagtattcggcgcaatttatcattggtaccctttaattactggcagacatctaaatttaactttaggcaaaattcatttttgggtgacctttgttggagcatatgcaatatattttccaatgcactatcttggatttattggtgtacctagaagatatttcgaaatgtatgatagtccatatatgacttctggagtaggtttgaatcaatttataacaatagctgctttgatagtgggttttacacaatttatatttttatataatattttcacaagttggtataaaggtgaaaaatcagagagaaacccatggaaggcaaattctttagaatggcatactcctgattttcctccaacgcatggaaactttggaaaagaatttccagtcgtatatcgttggccatatgattttagcgtactcaggatctga

SEQ ID NO: 224938 - DNA, 157 bp, Unknown
  Bacterial polypeptide expressing nucleotide sequence isolated from the Sargasso Sea
tggcctcggccgccgggtgatcgaagaactgctccacaccccaccggtggtgggggtggaacgggtttatctaatgaccaccaacagtgccggcttctaccgccaactgggcttccaggatgctgatccccaacagttgatggtgctgcgtcgctga

SEQ ID NO: 224939 - DNA, 616 bp, Unknown
  Bacterial polypeptide expressing nucleotide sequence isolated from the Sargasso Sea
tttttctttgctttctttttagctcttggatacgtgagagtttttgcagttccctggttgggcggtgagggcgaaaaagccattgctaatatgttgtggcctgaatttgaagcaacttggccagtaatgcagactccagatcagtctttatttcaaggcccaaaagaaaatatgaatttccctgggtttgctaacgtaggacattggcttcccttttggaacacgctttgtctaataacctcaagcggaacaatcactattgcagaacatgctcttaaaaaaggcaacagaacttcatttaagttttggatggtaatgactctaattcttggatttacttttgtctatttgcaaggactcgagtattacgaagcttacgatcatatgggtcttactcttggagctggaatatacggaacaacattttttcttttaactggtttccacggtttccacgtttgcatgggggcgattatcctaacaattatgactataagaggtttcagaggagcatttactaaagaagatcactttggcctagcagcaggatcctggtattggcactttgttgatgttgtatggatattattggtattagtagtttacgtattctaac

SEQ ID NO: 224940 - DNA, 796 bp, Unknown
  Bacterial polypeptide expressing nucleotide sequence isolated from the Sargasso Sea
gtagcagttttaatggcaagtttttttgttccggggggtccaactggagcaggctggacactatatcctccacaaactattttagaaggtacaccaggttcaggaatgggtattttactaatgctaatttctttagctctatttgtaatcggtttcacaatgggtggattaaactacatgatcacagttttacaggccagaacaagaggtatgactttaatgagaatgccgctaacagtatggggaatttttacagcaacggttttagcaatgttagcatttccagctttactcgtaagcgcaatcatgatgacgctagataaagttattggaacaagtttctttatgcctacaattctaaaagcgggagaagtgctagagtatggtggaggaagcccaattttatttcaacacttattttggtttttcggtcatccagaagtttatattgtagctcttcctgcatttggaatagtttcagatttgatatcagttcatgctagaaaaaatatttttggctacagaatgatggtatgggcaattgttggaattggtgctttaagctttttcgtttgggctcaccatatgtatgttagcggaatgaatccatggtttggtttcttttttgctactacaacattaattatagcagtaccgaccgctatgaaagtttacaactggattttgacattgtggagaggaaacatcagaattaatacagtaatgctttggtgtttaggatttattgttacatttgttaacggtgggtattactggtatttttttaggaaacgtt

SEQ ID NO: 224941 - DNA, 622 bp, Unknown
  Bacterial polypeptide expressing nucleotide sequence isolated from the Sargasso Sea
aatgtcagctgaaaaaaaacatgattatcatttagtagacccaagcccttggccaatttatacatcatttgcatgtttagttttggctataggatcagtttattatcttcatacagatgtttcatggggaatgtatcttggatttgctctattaatttatggagcgtatatgtggttcagagatgttgtaattgaagctgaacaccaaggacatcatactccagtagttcaaattcatcatcgttatgggatgactttatttatagcatctgaagtaatgttttttgttgcatggttttgggcatattttgatgcaagtcttttcccaaatgaatttgttggaaatgtttggcctccaaaggatatagaaacatttgatccttgggatattccattaattaacacattaatcttattattatcaggaactacagtgacttggtcccatcatgctcttttagaaaatgatagaaaaggattcattcaaggtttatggttgaccgttattttagggttttgtttcactcttctgcaaatttatgaatatcaacatgcatcattttctttttcagatcatatttatgggtcagtattttatatggcaacggggtttcatggcttt

SEQ ID NO: 224942 - DNA, 454 bp, Unknown
  Bacterial polypeptide expressing nucleotide sequence isolated from the Sargasso Sea
aatgtcggctggtgaaaaaaaacatgattatcatctagtagatccaagcccttggccaatttatacttcatttgcaactttagtattagcaattggctcaatttattattttcattcaaaagtaatgtgggcaatgatccttggtctggctctcgtttgttatggagcattcatgtggtttagggatgttgttatagaggctgaacatcagggtcatcatacgcctgttgttcaaattcatcatagatatggaatgactctattcattgcgtccgaggtaatgttttttgttgcttggttctgggcgtactttgatgcaagtttgtttccaagtgaattcgttggaaatgtttggcctccaaaagatatagaagtttttgatccttgggatattccgttaatcaatacgttagtattattattatcaggaactacagtaacttgggcccatcat

SEQ ID NO: 224943 - DNA, 496 bp, Unknown
  Bacterial polypeptide expressing nucleotide sequence isolated from the Sargasso Sea
atattcgcaagatgaaatccctaaagcagatgttactattaaagctatagggtatcagtggtattggggttatgaatacccagatgaaaatatcattttcgattcttatatgattgatgaaaaggatttaaaagaaaatcaaccaagattattagctgttgacaatgcagtttacgtaccggttaataaagttgtaaaagttatgataacagctaacgacgttttacatgcatgggctctaccgtcttttggagtaaaaagagatgcaattccaggaagaataaacgaaacatggtttaaagctgaccgaactggaactttctatggtcagtgctctgaattatgtggaattaaacacgcctttatgccaattacagtaaatgttgtgtctgaagatgaatataataaatggctagaagaggctaaagtaaaatttgccaaagaggagataaatactaaaattaaagtagcaaaaaaaattaaggatttaaattaa

SEQ ID NO: 224944 - DNA, 847 bp, Unknown
  Bacterial polypeptide expressing nucleotide sequence isolated from the Sargasso Sea
ttcgatttcatcgatcccagttcttatcttcagtttgtgactatgcacggtatgatcatggtggtatacctgctgacagcacttctgcttggtgggttcggaaattatatgattcccctcatgtgtggcgcacgagatatggtctttccctatctcaatatgctcagcttttggttttactttgtctccgtacttattcttttggccagcttcttcgttcctggtggtccgaccggagcgggatggactctttatcctcctcaagcaatcttgaatggaacgcctggctatgactggggaattattttgatgctggtttcgttggcagtctttgtggtcgcttttacgatgggtggtcttaattatgtcactacggttcttcaggccagaaccagcggtatgactttaatgagaatgccgctcacagtttgggctattttcgttgccaccatactgggacttcttgctttccccgcgttactagtaagcgcaataatgatgttgcttgataagcttattggaaccagttttttcatgccagcactggtttcccttggagaaactttagattataccggcggtagccccgtcctatttcaacatctgttttggttttttggtcaccccgaagtatatattgtcgccctcccagctttcggcatggtctctgacgtgatttcggttcacgcgagaaaaaatatttttggataccgcatgatggtttgggcgattgttgctattggagcgctaagctttgttgtttgggctcaccacatgtatgttagcggaatgcatccggcttttggatttttctttgctaccaccacattgattattgctgtaccta

SEQ ID NO: 224945 - DNA, 565 bp, Unknown
  Bacterial polypeptide expressing nucleotide sequence isolated from the Sargasso Sea
ttggttgacccaagtcctcttccattcttatcatcaatagctggtcttgcaatggctgctgggcttgtattttatatgcattatggaacttcttggcttttaattcttggaactattggtttgttaactattatgttcctttggtggagagatgtaattaaagaatcaactttccaaaaagttcacacacctgttgtggaactaggactaagatatggaatggcactttttattgcatcagaagtaatgttttttgttgctttcttttgggctttctttgatgcaagtttaacacctaaattacctatagaggaattctcagaaacttttgacagcaatggtgctgttggaatttggccaccagagggtattaaaacttttgatccacttgatgttccttttttaaatacattaatattattaatgtcaggtactacctgcacatgggctcaccatgctgttagagaaggtcatagagatcaagccattcaggcattatggtgtactgttggtcttggaattttcttctcatttatgcagggtgtagaatactacgaagcagctc

SEQ ID NO: 224946 - DNA, 652 bp, Unknown
  Bacterial polypeptide expressing nucleotide sequence isolated from the Sargasso Sea
attggcgctttaagctttatagtatgggcacatcatatgtacgtgagtgggatgaacccttattttggcttcttttttgcaacaacaacattaattattgcagttccaacagcaattaaagtttacaattgggttctgactctgtggagaggaaatatccatcttacaattccaatgcttttttctttaggttttattgtaacttttgttaatggaggtattacgggcctgtttcttgggaatgtaatcatagacatacctttatccgatacttactttgttgttgctcattttcatatggttatgggaatagctccgctcatggtaatttttggtgcaatctatcactggttccctttaatttcaggaagacatttaaatcaaaccttaggaaaaattcatttctggatttcttttatcggagcttatgcaatttattttccaatgcactatttaggttttataggtgtgccacgaagatattacgaaatgtatgatagtccgtacatgacgacaggagtaggtttaaatcaatttataacaatagctgctttaatagttggctttactcaaattttatttttatacaatattattcacagtacatttaaaggtgagaaatcagaaaaaaatccgtggaaagcaaattcac

SEQ ID NO: 224947 - DNA, 448 bp, Unknown
  Bacterial polypeptide expressing nucleotide sequence isolated from the Sargasso Sea
gtaaaagttataggacatcaatggtattgggaatatcaatatcctgagcaagatgacatctcatttgaaagttacatgattcctgataaagatttagaagaaggagatatccgactattaactgttgataataaattagtacttcctatcaataaaaatattcatgttttagtaactgcaggggacgttctccacagttttgcaatgccgtctttaggtgtaaaaaaagatgccgttcctggtaggctcaatgaaacatggatgaatattgaaaaaactggcatatatagaggtcagtgttcagagttatgtggtacaggccatggatatatgccaattgtaatagaagcagtttcccaagaggattttgctgcatgggttaatgataccaaaaccagacttgctatgaacgaaaaaaatacttttgctaaagctaatactgaatagg

SEQ ID NO: 224948 - DNA, 805 bp, Unknown
  Bacterial polypeptide expressing nucleotide sequence isolated from the Sargasso Sea
gcttttccagcattattagttagcgcaattatgatgactttagataaaattcttggaacaagtttctttatgccaactattttaaaggcaggtgaagtattggaatatggtggaggaagtcctatactttttcaacatttattctggttttttggtcatcccgaagtttatattgtagcactaccagcttttgggattgtttcagatttaatttctattcattcaagaaaaaatatttttggctatagaatgatggtttgggccatagttgggattggtgctttaagcttttttgtttgggcccaccacatgtatgttagtggaatgaatccgtggtttggatttttctttgcaaccactacacttatcattgcagttccaacagccatgaaagtttacaattggattttaactttatggagaggaaatattagacttaatacagtgatgctttggtgtcttggatttatagtgacttttgtaaatggtggaattactggaatattcttaggaaacgtttcagtagacgttcctctttctgatacatattttgtcatagctcacttccatatggtaatgggtatagcgcctcttatggtgataatgggagctgtatatcattggtttcctcttgtagctggaaagatgttggatgagggacttggtaaatggcatttttggattacctttttaggagcatactcaatatattttcctatgcattatctaggatttattggagtaccaagaagatattttgaaatgtatgacagcccatatatgacctcggcagttggtatgaatg

SEQ ID NO: 224949 - DNA, 631 bp, Unknown
  Bacterial polypeptide expressing nucleotide sequence isolated from the Sargasso Sea
aatgtcagctgaaaaaaaacatgattatcacttagtagacccaagtccttggcctatttatgtttcgttttcttgcttagtattagcaataggtgctgtgtattacatgcattcagatgtttcatggggaatgtatcttggattagctcttctaatatatggtgcgtatatgtggttcagagacgtagtcattgaagcagaacatcaaggtcatcatactcctgtagtccaaattcatcaccgttatggaatgactttatttattgcatctgaggtaatgttttttgttgcttggttttgggcttactttgacgttagtctttttccaaatgattttgtcggaaacgtatggccacctaaagatattgtaacttttgatccatgggatatacctttaataaacacattagttttactgttatcaggcacaacagttacttggtctcaccattcattattagaaggtgatagaaaaggttttatacaaggattggtgtttacagtaattcttggagcattttttacagcacttcaagcatatgaatatcatcatgctacatttgccttttcagaaacatattatggttctgtttttatatggcgacaggctttcatggttttccatgtatag

SEQ ID NO: 224950 - DNA, 426 bp, Unknown
  Bacterial polypeptide expressing nucleotide sequence isolated from the Sargasso Sea
gatgagcgcatcgacagacgaacataccgaacatggccacgactatcatctcgtcgatccgagcccgtggccggcacttggcgcattcgcggcttttttgctgacctttggcgttgtcctatttcttcacccggatacgctgggcgaaggtcttgagtcaatgatagcctctctaggggcattaatttttgtgccaggatttttactggttctatacaccatgtttgtttggtggcgggacgtcattttggaagcggaagtcgacggacaccattcgccggtggtgcaacttggtttgcgttacggtatggcccttttcatttgttctgaggtaatgttctttgttgctttcttctgggcgttttttgaatccagccttttcccaaaagagtttccatacgaactggctggcggggtctggccacc

SEQ ID NO: 224951 - DNA, 331 bp, Unknown
  Bacterial polypeptide expressing nucleotide sequence isolated from the Sargasso Sea
aatgattcttaggcaactacatttttggttattttttattggtgtaaatgtaacatttttccctcaacatttcttaggacttgctggtatgcctcgaagaattccagattatccagacgcttatgcaggatggaatcttgtatcaacttacggttcttacatttcttttgctgcaacattgatatttcttttcgcgattgtatatgctctattttttggaaagaaagaagttgcaaacccttggggagagggagctgatactcttgaatggacactgtcttcacctccaccattccatcagtttgagaccttacctaaattcaaaggataa

SEQ ID NO: 224952 - DNA, 331 bp, Unknown
  Bacterial polypeptide expressing nucleotide sequence isolated from the Sargasso Sea
aatgtcagcagaaaaaaaacacgattaccacttagttgatccaagtccttggccaatttatacatcatttgcatgcttagtattagcaatagggacaattttttatatgcataacgatgtttcctggggaatgtatctaggtttagcgttattaatttatggtgcttatatgtggttcagagatgtagttattgaagctgagcatcaaggtcatcatactccagttgttcaaattcatcatagatatggaatgactttgttcatcgcttcagaggtaatgttctttgttgcatggttctgggcatactttgatataagttttttccaaatg

SEQ ID NO: 224953 - DNA, 457 bp, Unknown
  Bacterial polypeptide expressing nucleotide sequence isolated from the Sargasso Sea
gttgttgctcctttcctatgttctatcgcttggagctgtttttgctatctttgcaggtttttattattggtttggaaaaatgtcaggttatgagtattcagagtggatgggacaacttcatttttggcttacattcattggtgtgaatatagtatttttcccacaacactttttaggtttagcgggtatgccgagaagatatgcagattatcccgatgcatttgctgactggaattatatttcatccatagggtcatatatatcgatcgtaggattggcagtattttttgcaaatttgatttacgcatttgctaaaaagaaaaaagcagctcagaatccatggggcgaaggtgcaaccaccttagagtggacagttccatcaccgcctaattttcatacttttgatgagcttcctaaattcgaaaacgtcgagggtgcagaaaaatctagtagttag

SEQ ID NO: 224954 - DNA, 928 bp, Unknown
  Bacterial polypeptide expressing nucleotide sequence isolated from the Sargasso Sea
ttgcacccgggcggaccagcctcctctggatggtggtcttatccgccaatgagcctgcagaacccactggggcacttcatcaacggcgagtttctctggatcctggcggtggctctgtcggggatctcctcgatcatgggcgccgtcaatttcgtgacgacgatcatccggatgcgcgctcccggcatgggctttttcaagatgccggtgttcgtctggaccgcctgggccgcccagacgattcagcttgtcggcctgcctgcactcaccggtggtgccgtgatgctgctgtttgacctcagcttcggcaccagctttttccgacctgaaggtggtggtgatccggtgctgtttcagcacttcttctggttctattcccaccctgccgtgtacgtgctggtgctgccggtgttcggcatcttttctgagctgttcccggtgtatgcccgcaagccactcttcggctaccgcttcgtggccgtcgcctccttcggtatcaccttcctcagcctgattgtgtgggcacaccacatgttctacacaggcacaccgaactggatgcgccacatcttcatgttcaccacgatgttgatcgccgttccaacaggagtgaaggtgttcgcctggttgggcaccctgtggcagggaaacctgaggctgaatacaccgatgctgttctgcctcggtggcctgttcaacttcatctttgccggcatcaccggcgtgatgctggcgacagtgcccatcgacatccatgtgggcaacaccgctttcgtcgtggcccatttccactacgtgatcttcaacacgatcggctttggggtgttcgccggcatctaccactggttcccgaaattcaccgggcggatgtattacgaaggcctgggaaaagtgcactttgcgctcaccttcatcggcgccaccctca

SEQ ID NO: 224955 - DNA, 307 bp, Unknown
  Bacterial polypeptide expressing nucleotide sequence isolated from the Sargasso Sea
aattttcttcccacaacattttttagggttggctggaatgccaagaagatatgctgattacccagatgcatttgcagggtggaattatatttcctcaataggttcttatgttgcagtggccggcttggcagtattctttttaaatttaatttacgcatttattaaaaaaaaggctacgactaaaaatccttggggagaaggggcgacaactttagaatggactgtaccatctccaccaaattttcatacttttgaggagctacctaagttcgaggatgatcaagagacacaaaaatcacatagctaa

SEQ ID NO: 224956 - DNA, 817 bp, Unknown
  Bacterial polypeptide expressing nucleotide sequence isolated from the Sargasso Sea
attaataccgctgatgtgtggagcaagagacatggcatttccatacgtgaatatgcttagctactgggcatttgttgttgcagttgtagttttattagcaagcttttttgtacccggagggcccaccggggcaggctggacactttatcctccacaagcaatcacagctggaacacctggttataatggtggaataatactgatgttaatttcgctcatattatttgtggctggtttcacaatgggtggattaaattacatcataactgttttacaattgagagctagaggcatgactttaatgagattgcctttgacaatttggggaatttttactgcaactgttcttgcgatgtttgcatttccagctttattagttgggtgtttaatgatgacactcgatagtttgctaggaacaagtttcttcatgccagctatggtttctttaggagaaacattaactcatgaaggcggaagtccaattctattccagcacttattctggttttttggccatccagaagtttatatagttgcactaccagcttttggtattgtttcagatttgttatcagtccactcaagaaaaactattttcggttatagaatgatggtttgggccatagtagggattggtgctttaagcttttttgtttgggctcatcacatgtacgtaagtggaatgaacccctggtttggattcttttttgccacaacaacattaattattgcagttccaacagctattaaagtttataattggattttaactatatggagaggaaatatagttttatctcttccttatgttattttc

SEQ ID NO: 224957 - DNA, 831 bp, Unknown
  Bacterial polypeptide expressing nucleotide sequence isolated from the Sargasso Sea
cacttgttttggttctttggacaccctgaagtttatattgttgcattacctgcatttggaatagtttcagacctgatatcagttcatgcaagaaaaaacatatttggttacagaatgatggtttgggcaattgttggtattggaggtttaagtttctttgtatgggctcatcacatgtacgttagtggaatgaacccttggtttggatttttctttgcaacaacgacattaattattgccgttccaaccgccatgaaagtttataactggatacttactttgtggagaggaaatattagaattaatactgtaatgttatggtgcctaggatttatagtaacatttgtaaatggtggaattactggaatatttctaggaaatgtttctgttgatgttccattatctgatacatattttgtaatagcccacttccatatggttatgggtattgcaccattaatggtcattatgggagcagtttatcattggttcccattagttgctggaaaaatgttacacgagggtctaggaaaatggcacttctggattactttcttaggagcgtactcaatatacttcccgatgcactacttaggttttattggagttccaagaagatattttgaaatgtatgatagtccgtacatgacgtctgcagttggtatgaacgaatttataagtattgcagcatttatagttggtgcagcacaatttatcttagttttcaatatcattaagacattaaaaacaggaaaaaaagctgaacagaacccatggaaagctaactcattagaatggtatacttcaactgttccaccagaacatggtaac

SEQ ID NO: 224958 - DNA, 280 bp, Unknown
  Bacterial polypeptide expressing nucleotide sequence isolated from the Sargasso Sea
acattttttcctcaacattttttaggattagcaggaatgccaagacgtatccctgattatccagatgcatatgcgggttggaatttaatttcatcttatggatcttacttgtcttttgcttcaactttgatatttttctttgcaatcgtttatgctttgttttttggaaaaaaagcagcttcaaatccttggggagaaggtgcggatactctagagtggactttaagttcaccaccacctttccaccaatttgaaactttaccagaatttaaagaataaa

SEQ ID NO: 224959 - DNA, 763 bp, Unknown
  Bacterial polypeptide expressing nucleotide sequence isolated from the Sargasso Sea
agttttaatggcaagtttctttgtgccaggtggtccaacaggagctggatggactttatatcctcctcaaacaattttagagggtactcctggagcaggtatgggaattttattaatgcttatttctttatctctttttgtaattggatttacaatgggtggacttaattacatgattacaatccttcaagctagaactagaggaatgacattaatgagaatgcctcttacagtctggggtatatttacggcgacagtgcttgcaatgttagcatttccagcattattggtcagtgctataatgatgacgttagataaggttttacaaactagtttcttcatgccaacaatattaaaggctggtgaagttctagaatatggtggtggaagcccgattcttttccaacacttattttggttctttggacaccctgaagtttatattgttgcgcttcctgctttcggaatagtttcagatttaatttctgttcatgctagaaaaaatatttttggatatagaatgatggtgtgggcaattgtaggaattggagcattaagtttctttgtttgggcccaccacatgtatgtaagtggaatgaacccttggtttggtttcttctttgcaacaactacattaattatagcggttccaactgccatgaaggtttataactggatactaactttatggagaggaaatataagaataaacgtagttatgttgtggtgtttaggttttatagtaacatttgttaatggtgga

SEQ ID NO: 224960 - DNA, 523 bp, Unknown
  Bacterial polypeptide expressing nucleotide sequence isolated from the Sargasso Sea
gtgggcaacacctatttcgtggtggcccacttccactacgtgatcttcaacgcgattgtgctgggtgtgttcgccgctgtttatcactggtttcccaagttcaccggccacatgtattacgagggcttgggcaagctgcacttcgccctcaccttcattggttgcacgctgaactggttgcccctgcattgggccggcctgctggggatgccgcggcgggtggcctcctacgaccctgaattcgcgatctggaatgtgatcgccagtgtgggcgccttcctgctgggggtggctgcgatccccttcatcctcaacatggtgagctcctgggcccgtggtcccaaggcgccgcccaatccttggggtgccattggcctggagtggctgctgccctccccgccaccggctgagaacttcgaagacgacgttccaacagtgctcaataacccctatggctacggccttgatcagccccaggtggctgatgaggcgttctatgtccgccgcgctcaggaggcctgat

SEQ ID NO: 224961 - DNA, 915 bp, Unknown
  Bacterial polypeptide expressing nucleotide sequence isolated from the Sargasso Sea
tctttttcacatttattctggttcttcggacaccccgaagtttatatagttgcactacctgcatttggaataatttcggatttaatttctgttcatgcaagaaaaaatatatttggttatagaatgatggtttgggcaatagttgctattggtgcactaagcttttttgtatgggcacaccatatgtatgttagtggaatgaatccttggtttggattcttttttgcaaccaccactcttataatagccgttcctacagcaatgaaagtctataactggattttaactctttggagaggaaatattcgacttaatactgttatgttatggtgtttaggttttattgttacttttgtaaacggcggaattacaggaattttcttaggaaatgttagcgtagatgttccgttatcagatacttattttgttattgcacactttcatatggtaatgggtattgcaccacttatggtaattatgggagctgtttaccactggtttcctttagtagctggaagattcttagatgaaaaattaggaaaatggcatttctggttaacttttttaggcgcttattcaatttatttcccaatgcactacttaggatttattggggtaccaagaagatattttgaaatgtatgacagtccatatgtaacatcggctgtcggaatgaatgaatttattagtttagcagcctttatagttggagctgcgcaatttattttaatttacaatattgttaaaactttaaaaacagggaagcctgcaggacataatccttggcaagcttgctcactagaatggctaactccaacagttccgcctgaacatggtaattggggggatagacttccaacagttcatagatgggcttatgattatagtgtccctggagcaaaagaagattttata

SEQ ID NO: 224962 - DNA, 535 bp, Unknown
  Bacterial polypeptide expressing nucleotide sequence isolated from the Sargasso Sea
ttataccaacaagaaaaaagtgaaaattacgatatgactgttaaagtcattggtcaccagtggtactgggagtacgaataccctgatcacggtgacttttattttgagagctatatggttcaagaacaagatcttgaagagggtgacctaaggttattaactgttgataaccctctagtaattccagcgaataaaaacattcaaattttaattacagctggtgatgttcttcatagttgggcggttccttcaatgggtttgaagacagatgctgtgccaggaagactaaacgaaacatgggtaaatgtgaaagaaccagggatatacagagggcagtgttccgaaatttgtggaagtggtcacggttttatgcctgtggttgttaaagtattaccagaaagagaatttatggcatgggctaatgaagctaaaaataattatgccattaacgaagatattgaaattaacaagccagaagaggagattgttatttcacaaaataatataattcaattagaggagaataatttatgag

SEQ ID NO: 224963 - DNA, 468 bp, Unknown
  Bacterial polypeptide expressing nucleotide sequence isolated from the Sargasso Sea
aatgtcagcagaaaaaaaacacgattaccacttagttgatccaagtccctggccaatttatacatcttttgcatgcttagtattagctataggtgcaattttttatatgcataatggtatttcttggggaatgtatcttggtttagcattattgatttatggtgcttacatgtggtttagagatgttgtaattgaggctgaacatcaaggccatcacactcctgttgttcaaattcatcatagatatggaatgactttatttattgcttcagaggtaatgttctttgttgcatggttttgggcttattttgatataagtttatttccaaatgaatttgttggaaatgtgtggccaccaaaagatattgaaacatttgatccttgggacattcctttgataaatactttagttttattactgtcgggaacaactgtcacatgggcccatcatgctttactagaagatga

SEQ ID NO: 224964 - DNA, 654 bp, Unknown
  Bacterial polypeptide expressing nucleotide sequence isolated from the Sargasso Sea
aatgtcagctgaaaaaaaacacgattatcatttagtagatccaagtccttggccaatttatacatctttttcttgcttagtattggctctagggtcagtttactatctacatacagatatatcctggggaatgtacctcggctttgctcttttaatttatggagcttatatgtggttcagagatgttgttattgaggctgaacatcaaggacatcacacacccgtcgttcaaattcatcaccgttatggaatgacactatttatcgcttctgaggtgatgttttttgttgcgtggttttgggcatattttgatgtaagtttgtttcctaatgagtttgtaggaaatgtttggccaccaaaagatattgagacgttcgatccttgggatattccgttgataaatactttaattttattgttatcaggaactacagttacatggtctcatcatgctcttttagaagatgatagaaaaagttttattcagggtttatggttgactgttattttagggttttgttttactctattacaaatttatgagtatcaacacgcatcattttctttttcagaacatatttatggatcagtattttatatggcaacaggatttcatgggattcacgtacttgttggaaccatatttttagctgt

SEQ ID NO: 224965 - DNA, 718 bp, Unknown
  Bacterial polypeptide expressing nucleotide sequence isolated from the Sargasso Sea
tggaattgatttttggataattggattgcaggtttttggagtagcctcattagctgcgtcgtttaattttattgtaactataataaatatgagagctccgggattgtcatttatgagattaccactatttacttggatgacgtttatcactgctattttattaattttagcttttcctgttattacggttgcattaattgaactcatgttagatagaacatttgattttaatttttttaacactaaagcaggggcaaatcctcttttgtggcaacatttgttttggatatttgggcatcctgaagtgtatatattgatattacctgctatgggaatagtatctgaaattttaccaactttttccaaaaaaccagtatttggatatgctgccatggtacttgcagcagcatttattgcttttatgggttggttagtttggagtcaccatatgtttacaactggacttggtcctatagcaaatagcgttttcaccattacaactatgttgattgctattcctactggggtgaaaatgtttaattggctaggaacaatgtggggtggagatattgaattcaatacacctgttctgttttctgttggatttttatctatgtttttaattggaggtattagtggagtaatgcactctttctcagcgtctgattaccaacaacaagatacatattttatagttgctcatattcattatgtatga

SEQ ID NO: 224966 - DNA, 82 bp, Unknown
  Bacterial polypeptide expressing nucleotide sequence isolated from the Sargasso Sea
tgaggcagctgcttggtactggcactttgttgatgttgtttggttatttttgtttgcagctatctacgtttggggaagttaa

SEQ ID NO: 224967 - DNA, 732 bp, Unknown
  Bacterial polypeptide expressing nucleotide sequence isolated from the Sargasso Sea
aagcaatattacctggcacacccggatcagagatgggaattgttcttatgcttgtttctttatcattatttgtaattggttttacaatgggtgggttaaactatgtgattacagttttacaagccagaacacgtggaatgactttgatgcgaatgcccctaacaatttggggaatttttacagcaacagttcttgctctattagcttttcctgctcttttcgtagcttgtataatgatgacactagataatttacttggaacaagtttttttatgccagaaatatttagtatgggcgaaaaattagagtatggaggcggtagcccaattttgtttcaacatttattttggttttttggtcatccagaagtttatatagttgcacttccggcatttggaattgtttctgatttaatatcagttcatgcaagaaagaatatttttggatatcgaatgatggtctgggcaattgtaattataggagctctaagttttattgtgtgggctcaccacatgtatgtaagtggaatgaatccttggtttggtttcttttttgcaactaccacattaattattgcagttcctaccgcaattaaagtttataattgggtgttgactctttggagaggaaatattcatttaactattccaatgttatttagtctaggttttattgtaacttttgttaatgggggaattacaggactatttttaggcaatggtaattattgat

SEQ ID NO: 224968 - DNA, 901 bp, Unknown
  Bacterial polypeptide expressing nucleotide sequence isolated from the Sargasso Sea
ttcctaggagggtttggtaattacctaatacctttaatggttggagcaagggacatggtttttccttacgtgaacatgttaagtttttggatgttctttgttgcggtagcagttttgatggctagtttttttgttcctggggggccaacaggagccggatggacattatatcctccacaaacaatcttagaaggaactcctggagctggtatgggaatacttttgatgcttgtatctctatctttatttgtaattggatttactatgggtggattaaattatctaattacaattttacaagctcgtactagaggaatgaccttaatgagaatgccattaacagtttggggtatatttacagcaactgtattagcgatgttagcttttccagcacttctagttagtgcaattatgatgactttagacaaaattttaggaacaagcttttttatgccaaccattattcaagctggggaagtgcttgattatggtggaggaagccctattctttttcaacacctgttttggttttttggccatccagaggtttatattgttgctttacctgcctttggaatagtttctgatttgatatcagttcattctagaaaaaatatatttggttacagaatgatggtttgggctattgttggaataggaggtttaagcttttttgtatgggcacaccacatgtatgttagcggaatgaatccatggtttggatttttctttgcaacaacaacacttattatcgcggttcccaccgctatgaaagtatacaattggattttaactctgtggagaggtaacattagactaaatactgtaatgttatggtgtttaggttttatcgtaaatttcgtgaatggagggattacaggaattttccttggaaacgttt

SEQ ID NO: 224969 - DNA, 848 bp, Unknown
  Bacterial polypeptide expressing nucleotide sequence isolated from the Sargasso Sea
gatgtttgcatttccagctttattagttggatgtttaatgatgacactcgacagtttactaggaacaagttttttcatgccagcaatggtatctttaggggaaactttaacccatgaaggcggtagcccaatattgttccaacatttattttggttttttgggcacccagaagtttatattgttgcattacctgcttttggaattgtttcagatttactttccgtgcattcaagaaaaactatttttgggtacagaatgatggtttgggcaattgtaggaattggtgctctaagcttttttgtatgggctcaccacatgtatgtaagtggaatgaacccttggtttggattcttttttgcgacaacaactctaattattgcagttccaacagctataaaagtttataattggattttaactctatggagagggaacatacaattatctcttccaatgttattttctcttggatttatagttacctttttaaatggtgggttgactggtttatttttaggaaacgttactgtggatgtgcctttatctgatacttattttgttgtagctcatttccatatggtcatgggtatcgcacctattcttgttgtctttggtgcgatttatcattggtatccacttatcactggtcgtatgatgaacgaaactttaggaaaagttcatttttggattacatttataggttcatacgcaatttattttccgatgcattatcaaggttttgttggtgtaccgagaagatactacgaaatctatgacagtccgtatattgatgtatcaacattgcttttaaataaattcattactattgcagttttaatagttgggg

SEQ ID NO: 224970 - DNA, 838 bp, Unknown
  Bacterial polypeptide expressing nucleotide sequence isolated from the Sargasso Sea
gctttattagctttcccagctttgctcgttagttcaattatgatgacattagataaagttttagaaacaagtttttttatgcctactattattaaagcaggggaggcactttcttacgatggtggtagccctatacttttccaacacttgttttggttttttggtcatcctgaagtttacatcgttgcattacctgcttttggaatagtctctgacctgatttcagtacactctagaaaaaatatttttggatacaggatgatggtttgggcaattgtaggaattggtgcgctaagcttttttgtatgggctcaccatatgtatgtaagcggtatgagtccatggttcggtttcttttttgcaactactacacttattatagctgtacccacggctttgaaggtctacaactggatacttacactttggaggggaaatataagaataaatactgtgatgcttttctgtctaggttttatagtcacttttgtaaatgggggtataacgggtattttcttaggaaatgttgctgtagacgttccattgtctgacacctatttcgtaatcgctcactttcatatggtaatgggaatagctcctcttatggtaattttcggagccatttatcattggttccctttagttactggaagactaatggatgaaaagttgggcaaatggcatttttgggtaacctttttaggcgcttactctatttattttccaatgcactatttaggtttcattggtgtaccaagaagatactttgaaatgtatgacagtccatacatgacttcagctgtaggaatgaatgaatttataagtgttgcagctttta

SEQ ID NO: 224971 - DNA, 861 bp, Unknown
  Bacterial polypeptide expressing nucleotide sequence isolated from the Sargasso Sea
cttgtcgatagcgatgagattgcaaatcgcattccccgacacctttgctttcatcgatcctactaactaccttcagtttgtgacgatgcacggcatgattatggtgatttacttgctaaccgcgcttttcttaggtgggtttggtaattatatgataccgctgatgctgggtgcccgagacatggtctttccctatgtaaatatggtgagtttctgggtctactttgcggccgtcttgattctggtcgcgagcttctttgtgccgggtggggcgaccggagcgggttggacgctttatcccccgcaagcgattatgcctggtacgcctggaactgacgggggcatcattttaatgttgttgtctttggccctgtttattgttggatttacgatgggcggccttaactacgttaccactgtgcttcagcagcgtactcgtggtatgtcattgatgcgtatgccgcttacgatttgggctatcttcatagcaacgatactcgctttattggcgtttccagcactgttagtaagtgcaatcatgatgttgttggaccgacttcttgagactagtttctttatgcctgcgatcatctctgctggcggccagaccgattacgatggtggtagcccggtgctattccaacacctattttggttcttcggacaccctgaggtgtatatcgtagctcttcctgcttttggtcttgtctctgaaatattgagtgtacatgcacgaaaggcgatatttggttatcgaatgatggtttgggctattgtagcgattggtgcattgagcttcatagtatgggcgcaccacatgtatgtgagtgggatgaatccttattttggattcttttttgc

SEQ ID NO: 224972 - DNA, 907 bp, Unknown
  Bacterial polypeptide expressing nucleotide sequence isolated from the Sargasso Sea
atggatggttcgactagttctgttaatccagatatagattatgtaagaccagcagaagttggtgagcaagatttatatcacggacatagttttattgaaaaatgggttttttgccaggacgcaaaagttatcggagtacaatatttcttaacagcagtatttactggaattgtaggtttaattttatcttggttaatgagacttcaattaggttttccagaattagcaggtttcatgacagcagaacattattatcaatttgtaactatgcatggaatgatcatggtagtttattttttaactgcactatttctcggaggctttggaaattatctaattccactcatggtaggagcaagagatatggttttcccatatgtcaatatgcttagcttctggatgttctttgttgcagttgcagttttaatggcaagtttctttgttccaggtggaccaacaggagctggatggaccttgtatcctccacaaactattttggagggaactccaggatctggcatgggaatacttctaatgcttatatctttatctttattcgtaattggtttcacaatgggcggattaaattatatgattactattcttcaagctagaactagaggaatgactttaatgagaatgcctttaactgtttggggtatttttacagctaccgtccttgcgatgttagcattcccagcactactagttagcgcaataatgatgacgttagataaagtattacaaaccagtttctttatgccaacaatattaaaagcaggagaggttcttgagtatggtggcggaagtccaattcttttccaacacttattttggttctttggacaccctgaagtttacattgttacattacctgcatttggaatagtttcagacttgatatcag

SEQ ID NO: 224973 - DNA, 468 bp, Unknown
  Bacterial polypeptide expressing nucleotide sequence isolated from the Sargasso Sea
tttggtagatccaagcccacttccttttctttcatcaatagcaggattggcaatggctgtaggtttggtattttacatgcattatgaaactaagtggctcttaatacttggcacaattggattgttaactgtcatgttcttatggtggagagatgttattaaagaatcaaccttccagcaagtacacaccccagttgttgagcttggattacgttatgggatggctttatttatagcctcagaagttatgttttttgttgcctttttttgggctttttttgatgcaagcttaacaccaaaactaccaattgaggaattttctcaaacatatgaatccaatggagcttttggaatttggcctcctgaaggtataaaaacttttgatccattagatgttccattcttgaatacattagttttgcttatgtctggaacaacttgtacatgggcacaccatgctgttagaga

SEQ ID NO: 224974 - DNA, 889 bp, Unknown
  Bacterial polypeptide expressing nucleotide sequence isolated from the Sargasso Sea
gctgggtttatgcagttggctgataggtcgctcggcaccgggtttttcactcctgagggcaacatagtgaataatgctgttgcgaccgctggtggagggcaaccgttactctggcagcatctattctggttttacagtcatcccgccgtgtacatcatgatcctgccagctatggggatggtttcagacatcctcacttgcttcgctagaaagcccttgttcggttaccgcccaatggtttattcagttgccgggattgccgggctgggcttcattgtctgggggcaccacatgtttatgtcgggtatgaacccagcccttgggactacttttatggtttcgacgatgatgattgcgctaccgagtgccgtcaaaacatttaattggctcgggacaatctgggctggccgaattcagtttacgacatcaatgctatttgctctctcgtttgtttccatgtttatcattgggggactatctgggatttttatggcagcgacgccggttgacatttttattcatgacacatatttcatcgttgctcatttccactatgtcctctttgctggaacggcaatgggcgtttgggctgctatttacttctggttccctaaaatgttcggaaggacgatgaatgagttttggggaaaagtgcatttcttcctgacgtttatctttttgaacggtacgttcttcaccatgcatattctgggtgccgtcggcttcccccgcaggctcgcagatgcgtaccattatgaaacatttcatcatttgcaaccattgaatgcattcatgacatactgtgccatcggcatggtcgcgtcccagattatcttcgcggtcaatttcttttggagcatgttttatggtcctgtagctggccgaaatc

SEQ ID NO: 224975 - DNA, 763 bp, Unknown
  Bacterial polypeptide expressing nucleotide sequence isolated from the Sargasso Sea
catggcccacagtggattatggtattggcttgcaacagtagaccataaaaaaattggtactatgtatggaatagtttctttcttctggttcattatggggggaatagaagctcttctaatcagagttcaattatcacatgctgaagcttctataattagccccgaagtttataatcaattgtttactatgcatggcacaactatggttttcttggtggtaatgccactgtcagctgcattttttaactggcttgttcctcttcaaattggagctagagatgtagctttccctagattaaatgctctaagcttatgggtttttatttttggatctatattaatgaatattagctggttcacaggagaggctcctaatggtggatggtttggttacccacctaactcaacagtacagtttaatcctggtaatggaatgacatattgggtattaggattaaacgttttaggagttgcttctattgctgctggactaaatttcatagttactatcattaacatgagggcacctgggatgtcattgatgaagatgcctgtattcacctggatgacatttataacttcaatattgattgtacttgctctaccagttttaggtgttgcaggaatacaaatgactgctgacagagtttatggaacaaactttttcaactctgaagcaggtggagatccaattttttggcaacatatcttttggctttttgggcatccagaagtatatattttaattttgccagctatgggt

SEQ ID NO: 224976 - DNA, 448 bp, Unknown
  Bacterial polypeptide expressing nucleotide sequence isolated from the Sargasso Sea
cttggttgacccgagtccttggccaattgtaacttcttttgcaaccttaattactgcagttggttctgtttattattttcacagcgagacaatgtggttaatggttcttggttttgtttttttaatttattgttccttcatgtggtttagggatgtggtaattgaagcagaacatcaaggtcaccatactccagttgttcaaatacatcatagatatggaatgacactatttatagcatctgaagtgatgttttttgttgcttggttttgggcatattttgatgcaagtttgttcccaaatgaatttgttggaaatgtttggcctccagcagatataaaaacatttgatccttgggatattcctttaataaatactttagtccttcttttatctggaacaacagtaacttggtctcatcatgctcttctagaagatgatagaaaagga

SEQ ID NO: 224977 - DNA, 773 bp, Unknown
  Bacterial polypeptide expressing nucleotide sequence isolated from the Sargasso Sea
tatggcattcccaagattaaatgcagttgctttttggttaattcctccttcaggattgatgctggtagcaagctattttgttgagggtgctgctcaagctggatggacggcttatcctcctttgagcataactactcctcaatcaggacaaattatttggattcttagcgttctattacttggaggcagttctatatttggtggaataaactttatcgcgaccattatcaaactaagaaggccaggattaaaacttatgcaattgccaatgtattgttgggcaatgcttggaacaagtctattagttgttttgtcaacgcctgttttagcaggcactttaattctacttagcttcgatatcatcgctaatacaggttttttcaatcctgttttaggtggcaatgtcgtagtttatcagcatttattttggttttattctcacccagctgtatacattatggtccttcctgcctttggtttagttagtgaaattcttcctgtacatgctagaaaaccactttttggatatacaacaatggttttttcaataatggggatagtagttttaggtttagttgtttgggcgcatcacatgtttacgagtggaacgcccccttggatgagattattctttactatcgccacagcatttattgctgttccgacaggtataaaatttttcaattgggttgcaacattatggggaggtaaaatttccattaatagtgcaatgttattctcttgcggatttattataaattttgtttttggag

SEQ ID NO: 224978 - DNA, 688 bp, Unknown
  Bacterial polypeptide expressing nucleotide sequence isolated from the Sargasso Sea
catgattaaaaaaattgcttacatacttttcttaatatggccttcagcgcttttagctaatgagcctatggattggcaactaggctttcagaagtcagcttcaaaaagcatggacgatattgtttggtttcatgactatatgttagtacctataattacggctattacagcatttgttttatttttacttttatatgtgtgtgtaagatacagggcttctaaaaataaaataccttctactacaagtcacaatacaattattgaagttatatggactttagttccatgcttgattttgatagttatggcagttccttcatttaaagttttatactctcaagacgaaattccaaaagcagatgtaactattaaagctgtaggatatcagtggtattgggggtatgagtatccggatgaaaatatcatttttgattcttacatgattgatgaaaaagatttaaaagaaaatcaaccaaggctattggcagtggataacgcagtatatgttccagtaaataaagttgtaaaagttatgattacagcaaatgatgttttgcatgcgtgggctctcccatcatttggtgttaaaagagacgcaattcccggaagaataaatgagacttggtttaaagcagacagaactggaacgttttacggtcagtgctctgaattatgtggtattaaacac

SEQ ID NO: 224979 - DNA, 583 bp, Unknown
  Bacterial polypeptide expressing nucleotide sequence isolated from the Sargasso Sea
aatgtcagccgaaaaaaaacatgattatcaccttgtagacccaagtccttggccaatctacgtttctttttcatgtttagttctagcattaggtgcagtttattacatgcactcagatgtatcatggggaatgtatttaggatttgctctacttatttatggagcttacatgtggtttagagatgtagtcattgaagctgaacatcaaggtcatcatactccagttgtgcaaatacatcatcgttatggtatgacattgtttatagcttcagaagtaatgttctttgtagcatggttttgggcttactttgatataagtcttttccccaacgaatttgttggtaatgtatggccaccaaaagatattgaaacttttgatccttgggatattccattgataaatactttagtcttattgttatctggaactacagtaacttggtcacatcatgcacttttagaagatgatagaaaaagttttattcagggtctagttttaacagtcatattgggagtttgttttactgcccttcaagcatatgagtatcatcatgctacattctcattttctgatcatatctat

SEQ ID NO: 224980 - DNA, 229 bp, Unknown
  Bacterial polypeptide expressing nucleotide sequence isolated from the Sargasso Sea
atgtcagctgaaaaaaaacatgattatcatttagtagatccaagtccctggccaatttatacttctttttcttgtttggtactggctttagggtcagtttactatcttcatacagatgtatcatggggaatgtaccttggctttgcgttgttaatttatggagcttacatgtggttcagagatgttgtgattgaggctgaacaccaaggacatcatacacctgtcgtca

SEQ ID NO: 224981 - DNA, 466 bp, Unknown
  Bacterial polypeptide expressing nucleotide sequence isolated from the Sargasso Sea
aatgtcagcagaaaaaaaacacgattaccacttagttgatccaagtccttggccaatctacacatcttttgcatgtttagtattagcaataggtgcaattttttatatgcataatggaatttcttggggaatgtatcttggtttggctttactaatttatggtgcttacatgtggtttagagatgttgtgattgaagctgaacatcaaggacatcatacaccagtggttcaaattcatcatagatatggaatgactttatttattgcatcagaggtaatgttctttgttgcatggttctgggcttattttgatataagtttatttccaaatgaatttgttggaaatgtatggccaccaaaggatatagaaacatttgatccttgggatatacctttgataaacactttagttttattattatcagggacaactgttacttgggctcaccactctttattagaggat

SEQ ID NO: 224982 - DNA, 844 bp, Unknown
  Bacterial polypeptide expressing nucleotide sequence isolated from the Sargasso Sea
atggcatccgttggtcctttggtagcaggagcagtgatgctattttttgatcaacgtctaggaacgtcatttttcattccttcgggtggtggagatccattactttgggagcacctgttctggttcttcggacaccctgaagtttatgtagttctattaccgactatgggtatcgtagctgagataataactgttttttccaggaagaaactttttggctatcgcactattctctatacagcttttggaaccggaggactttccttcatcgtctgggcccatcatcagtttgttgccgggatcgatcccagaatggcgaatgtgtttgttgtaacaaccatattgatctcaattccaattgcagagatgcttttctcattcattgcaactctttatggaggttcgattgaattctccactcccatgttgtgggcccttggattcctggtttcatttttgataggtggagtcacaggaatttatttgggcgccagtgctttggatgtttattttcatgatagttattttgtgattgcacactttcactatacctttttcccgattaccattatcggaatgtttgctgcgataacttattggtttccaaaaatgtttgggaggatgatggatgaaaccttgaacaagattcatttctggggaaccttcattccttttaacggccttttccttccgctttttctagtgggaatggccggccaacatagaaggatcgctgacttcacccaatatcctgacctcgcttctcctgatcttcagagtatcaggatatttgcaacagtatccttagtgatattattactgttccaaatttgtttttatttat

SEQ ID NO: 224983 - DNA, 730 bp, Unknown
  Bacterial polypeptide expressing nucleotide sequence isolated from the Sargasso Sea
aatggttgatttagtattcaaagactcagaaaagaaacacaaattccaccttgtcaatccaagtccttggcctatcgttggtgccttttcagctctttttttagtttctggtgctattttatacatgcactatgagatgatatggccaatgctaggtggtctttttttaatactctttactatgttcatgtggtggagagatatcattaaagaaagcactttcctaaaagttcataattcaattacggagattggtctaaggtgggggatggctctatttatcacttcagaagttatgttttttgtcgcttttttttgggctttttttgatgctagtcttttgcctaaaacatttttagctgaatacaaagaagtttttacaggcacccttggaataggagtttggcctccaaaaggaattgaaacttttgatccattagacatcccatatttaaatactttaattttacttctatcaggcactacatgtacatgggctcaccatgaattaagagagggcaataataaagaggcacttaaaggtttatattttacagtttttttgggtttcatattttctcttttacaaatatatgaataccaacatgcaacttttggttttactgaaggtatatatccttcaactttttacatggcaaccggttttcatggatttcatgttttaattggtactttatttttattagtttgtttattgagaataagaaaa

SEQ ID NO: 224984 - DNA, 424 bp, Unknown
  Bacterial polypeptide expressing nucleotide sequence isolated from the Sargasso Sea
agcatttattgctgttccaacaggtataaaatttttcaattgggttgcgacattatggggaggtaaaatttccatcaatagtgcaatgttattctcttgcggatttattataaattttgtttttggaggtattacgggagttgcgttggcacaggtacctttcgatattcacgtacatgatacctattttgtagtggcccattttcattacatagtttatggaggaactgtttttattattttctcttcaatttatcattggttccccaaagtaactggaaaaatgctcaatgaaaaattaggaattttacactttatcattacctttattggatttaacttgtgctttgctcctcaacattggcttggtttaaatggaatgccaagaatagttgcagaatatgatcctcaattccagttcgtt

SEQ ID NO: 224985 - DNA, 871 bp, Unknown
  Bacterial polypeptide expressing nucleotide sequence isolated from the Sargasso Sea
ttctgggtagccatgcctgtcctgatagcggcattcggcaactggatgattcccttgatgatcggttgtgatgatatggtttttccaagactcaaccgtctgtcctaccaggtatttctggtaagtgctttggttttgatcctttccttttttgttgaagggggtggcttcggaggtgcgtggacctcttatcctccattgtctgcagctgcagagtataacctgaccaactggggggcatctttgtggcttcttgcagtttttcttgaaatcgtggctttcttacttggtggaattaatttcattaccaccaccatgaatgctcgtgctcctggaatggggatgatggatattccgatcgtcatttggatgatcaacattgctgtcatcctttttatggcctcagtaggaccgttggtagcaggagcagtgatgctcttttttgaccagcgtctaggaacatctttttttctgccctcaggtggcggagatccattactttgggagcatctgttctggttttttggacatcctgaagtttatgtggttctattaccaactatgggtatcgtagctgagatcataacggttttttccaggaagaaactgtttggttatcgcaccattctctacacagcattcggaaccggaggactttctttcatcgtctgggcccatcatcagtttgttgccgggatcgatcccagaatggcgaacgtgtttgtggtaaccaccattttgatctcaattccaattgcagagatgcttttttcattcattgccactctttatggaggttccattgaattctccactcccatgttgtgggcccttggatttctggtttcatttctgataggcggagtcacag

SEQ ID NO: 224986 - DNA, 814 bp, Unknown
  Bacterial polypeptide expressing nucleotide sequence isolated from the Sargasso Sea
gcaacaagtttttggactaaatgggttttctgccaagatgcaaaagtaattggtgttcaatatgctttgactgctacagcaattggttttattggtttagtgttatcatggggaatgagattgcaattaggttttccagaaactttttcttttctaggccctgcaacatattaccagtcagtaactatgcacgggatgattatggtcatctaccttcttaccgcattatttttaggtggttttggaaattatcttattccattaatggtgggagcaagagatatggtgttcccatatgtaaatatggttagtttctggatgtttttagtagcggtcttggtattaattgccagcttttttgtaccaggaggaccaactggagcaggttggactttatatcctcctcaagcaatattgccaggaacacccggatctgaaatgggaattgtgttaatgctcgtttctttatcattatttgttattggtttcactatgggtgggttgaactatgtgattacaattcttcaagcaagaacaagaggaatgactttaatgcgtatgcctctaactatttggggtatatttacagctacaattcttgctcttttagctttccccgctcttttagttgcctgcataatgatgacactcgataatctattaggaacaagttttttcatgcctgaaatattttcaatgggagaaaaattagagtatggaggaggcagtccaattttatttcaacatttattttggttttttggtcatccagaaagtttatatagtggcattaccagcattggaattgtatctg

SEQ ID NO: 224987 - DNA, 512 bp, Unknown
  Bacterial polypeptide expressing nucleotide sequence isolated from the Sargasso Sea
gatggttgatttagtatttaaagactctgaaaagaaacataaatttcatcttgtcaatcccagtccttggccattagttggtgctttttcagctctttttctagtttcaggagctattttgtatatgcactatgagttgctatggcctatgttggcaggtcttgtcctaatactttttactatgtttatgtggtggcgagacataattaaagagagtacttttttgaaagtacataattcaataactgagattggtcttaggtggggtatggctctgttcatcacatcagaagttatgttttttgtcgctttcttttgggcattttttgatgcaagtttattacctaaaacatttttagccgagtacaaagaagttttcacaggtacttttgggataggagtttggcctccaaaaggaatagaaacttttgacccactagatatcccatatttaaataccttaattttacttttgtcaggtactacctgcacatgggcacaccacgaattaa

SEQ ID NO: 224988 - DNA, 634 bp, Unknown
  Bacterial polypeptide expressing nucleotide sequence isolated from the Sargasso Sea
atgacaaaaattatacagccaaaaaaacaaaggaatattttttcaagaccgacagctgaggagggtgtttggagctggatcacaactgtagatcataaaagaataggaataatgtatggctatgctgcatttttctttttattagttgggggacttgaagctcttttattgagaatccaattatcacaaccagacaacaattttttgagtgctgctgaatacaatgcaatgtttacaatgcatggcacaacaatgatatttttagcaattatgccaatcagtgcagcattctttaattatcttctacccctacagatcggagcaagagatgttgcattccccagacttaatgctctttctttctggatattcattgccggtggattgttcctttactcaacgtttctttttggaacagctggtgctccagaggggggctatctagctgaggaagttagtagattagcttcagctcctaatggaggatggtttggatatcaaccaaatgcaggtcttaagtactccccaggtaccgcaatggactattgggcaatcggacttcagattctaggcattgcctcactagtttcagctttcaattttattacaacaattctcaatatgagaacaaaag

SEQ ID NO: 224989 - DNA, 683 bp, Unknown
  Bacterial polypeptide expressing nucleotide sequence isolated from the Sargasso Sea
ttattatcaatttgtaacgatgcacggaatgataatggtagtttattttttaactgcactgtttttaggtggatttggaaattatttaataccattgatggttggtgcaagagatatggtttttccttatcttaacatggtaagtttttggagtttttttgttgcggtaggagttttattagcaagtttttttgttccaggtgggccaacaggttcaggctggacactttatcctcctcaagcaattttagaaggtactccgggatcgggatggggaataatgttgatgtgtatatcccttattttatttgtagccggatttaccatgggtggtttaaactatttaattacggtacttcaagctagaacaagaggaatgacattgatgagaatgcccctaactgtttggggaatttttactgctacagtattagcaatgctagcttttccagcattattggtaggtgcattaatgatgagcttagacaatgtacttggaacaagctttttcatgccaaccatattaaaagcaggagaagttttagaatacggtggcggaagccctattctttttcaacatctattctggttctttggacaccccgaagtttatatagttgcactacctgcatttggaataatttcagatttaatttccgttcacgctagaaaaaatatttttg

SEQ ID NO: 224990 - DNA, 913 bp, Unknown
  Bacterial polypeptide expressing nucleotide sequence isolated from the Sargasso Sea
tttttttagtgcggctgatacaaatgcaatgttcaccatgcatggacccacaatggttttcctagcaataatgccaattagtgctgcattcttcaattatcttctacctcttcaaataggagctagggatgttgctttcccaagattgaatgctcttagtttctggatttgggtttttggaggacttttcttatattcaacattcgtatttggaacagcaggagcacctgaaggaggatacctagctgaggaagttgggtggcttgggaatgctccaaatggtggttggtttggatatcaacctaatgcaggttttaaatattcaccaggaactgcaatggactattgggcaatcggcctacaaatactaggaatttcttctcttgtatcagcatttaatttcatcgtaacaatattaaatatgagaactcaaggaatgaggttgatgagaatgcctgtctttacctggatgacttttgctgtggcttttcttcttgccttttcattaccaataattgcaattgctctcttttacgtaacttttgatagacaatttggcactactttctttttaactgaaggtggaggagatcctgttttatggcagcatttattctggctatttggtcaccccgaagtatatattcttattcttcctgcttttggaattgtttctgaaatactacctacattttcaaggaagcctctcttcggttatccagcgatagtttttgcaggttttggtattgcatttatcggattcggagtctgggcacaccatatgtttgcttcagcaatcagccccgttgcgcaagctgggtttggtatctcaactatgattattgctgttcccacaggggtaaaaatatttaattggttaggaacgatatggggaggtaagttaaatctaaaa

SEQ ID NO: 224991 - DNA, 819 bp, Unknown
  Bacterial polypeptide expressing nucleotide sequence isolated from the Sargasso Sea
ggtttagtatacgcaggtagtggcgttgaagcatatgggtcagggtctccactgttgtggcaacatttattttggtttttagcgcatcctgaagtttatgtacttattttaccagcaataggtattgttggcgaaatccttgcgaataacacaagaaaacctctatggggttacaaatcattaatttatgcaattggtttcttaggatttatgtcctttatcgtttgggctcatcatatgttcctaactggtatgggacaatcaatgagtgcttttttccaattgacaacaatgattatttcaattccttctgttgttgtgctaacagcatttttcatttcactttggggaggatctatacgttttaatactccgatgctttttgcattatcatttttaccgatgtttggtattggaggtcttacaggtttaccgcttggagtagcagcatcagatattttccttcatgacacgtactatgtaatcggacactttcattatgttgtagcacctggcactttgtttgctctctttgcaggaatctattattggttccctaaagttacgggaaaacaacttagtgagagtttagggaaattacacttctatccatctttcttagcaatgaatggtgtattcatgcctatgtttatacaaggtcttgcggggctatcaagaagaatgtatgatggaggacagcaatatgcccatgcttcagatgttgttcattggaacgagtttatgacaatatctgcatttatcttgggccttgcgcaaataccttttattttaaatatttttataaccttgagtagcaaa

SEQ ID NO: 224992 - DNA, 220 bp, Unknown
  Bacterial polypeptide expressing nucleotide sequence isolated from the Sargasso Sea
tcatctggagtctatggcacaacgttcttcatgctgacagggtttcatgggatgcatgttttgattggaggaatcttccttcttactcagctaacaagatcaacaggctttaaacattttactgataaagaacactttggttttgaagcggcctcatggtattggcattttgttgatgttgtttgggtttgtctcttcttgttcgtttatattctttaaa

SEQ ID NO: 224993 - DNA, 800 bp, Unknown
  Bacterial polypeptide expressing nucleotide sequence isolated from the Sargasso Sea
ctattctggtttttggggcaccctgaggtgtatgtactaatcttacctgccattgggatagtagctgaaatactctgcaacagtgcccgccgccctttatggggttataaagttatggtgggcggtgtgttggtgctagggtttctttcattcatcgtatgggctcaccacatgtatttaaccggcatgagtgctaaggtggccacattcttccaaacaactacgatgattatatccataccgtcggttattttgctcacttgcctctttatgaccctctggaaagggtcaatccgattcacaacagcttcattgttcgcgttggcctttttgccaatgtttggaattggtggactaacggggctaccgcttggattcagcttcaccgatttacacctacatgattcttattacgttatcgcacattttcattatgttgtagcccccgggtctatctttgccctgcttgccggaatttactattggttccctaaaatgaccggccgacgaatgaatgaatattggggtaaagttcatttctggggctcgctactgtttatgaacataatttttatgcccatgttcatccaaggatttgcagggctgagtagaagaatgagcgatggaggggcaacctattcattgctgcaaaatcccgatgtaacttcaggcgccttgtcagacttgataatcaaactaaatgaatacatcacaaccggcgccttcggcatgttcgccatacagatagtttttgttataaatttcttttacagtattaggcatggagaaaaagtagaagg

SEQ ID NO: 224994 - DNA, 427 bp, Unknown
  Bacterial polypeptide expressing nucleotide sequence isolated from the Sargasso Sea
atgtcagcggaaaaaccaaaacacgattatcatttagttgaaccgagtccttggccgatctacgtttcattcgctactttagtcttagcttttggagcagtttattactttcactcaaaagtcctttggttgctattaattggttttgctttagtagtttatggcgcatttatgtggtggagggatgttatagaagaagcagaacatcaaggccatcatactcctgtagttcaaattggacataggtacggtatgacattatttatcgcctctgaagtaatgttttttgttgcatggttctgggctttctttaacgcaagtttatttccatcagattctataggaggtatatggccaccagcagatattaaaacttttgatccttgggatataccattaatcaacactctaattttattgttatcag

SEQ ID NO: 224995 - DNA, 671 bp, Unknown
  Bacterial polypeptide expressing nucleotide sequence isolated from the Sargasso Sea
aatgtcagcagaaaaaaaacatgattatcacttagtagacccaagtccttggccaatatatgtttctttctcatgcttggttttggcgttgggtgcagtttattatatgcactcagatatatcatggggcatgtatcttggatttgctttgttgatttatggagcttatatgtggtttagagatgtgataatagaagctgagcatcaaggacatcatactccagtagtacaaatacatcatcgttatggaatgactttatttattgcatcagaggtgatgttttttgttgcatggttttgggcttattttgatgtaagtctctttccaaatgaatttgttggaaatgtttggccacctaaagatattgaaacatttgatccttgggatattccattaataaacacattagtattattgctatcaggaacaactgttacttggtctcatcacgcacttttagaaggtgatagaaaaagttttattcaaggtttagttttaactgtaatattaggagtttgttttactgcacttcaagcttacgagtatcatcatgcaactttctcattttctgatcatatatatggctcagtattttatatggctacaggatttcatggatttcatgtaattgtaggtacaatatttttagctgtatgtttgtggagaggaa

SEQ ID NO: 224996 - DNA, 856 bp, Unknown
  Bacterial polypeptide expressing nucleotide sequence isolated from the Sargasso Sea
ttgctaacaatactagaaaaccctatttggggttttaaatcaatcatttattccatggtatttcttggtttttgctcgtttatcgtatgggctcatcatatgtttttaacaggtatgggacaggcaatgagtgcattctttcaaaccacgacaatgatcatttcgataccctctgttgtgatattgacttcttactttctttcattatggggcggatcgatacggtttaatacaccaatgttattcgcgcttgcatttcttccaatgtttggaattggaggcctaacggggttaccacttgggctggctgcctcagacatatacctacatgatacctattacgttataggacatttccactatgttgttgcgccaggaactatctttgcactatttgcaggtatctactattggtttcctaaaatgacaggtaaaaagatgaatgaaatgttaggaaaattacatttttggccatctttggtgtttatgaatggaatatttatgcctatgtttattcagggccttgcaggtgtatctagaagacttgcagatggaggtgtctcctacgcacatgcaagtggagttttagagtggaatgagtttatgtccatgtcagcattctttcttggcttggctcaaataccatttattattaatattgttatgtctctgtttgcaggggataaagcaagcagaaacccttgggattcaactaccatagaatgggccgctccctcacctccgcttggtcatgggaattttgataaaccggtaaacgtctaccactcagcatatgaatatagtgtgcctgactcaaagaaagattttacaccacaatttgaaaaaaatggttaat

SEQ ID NO: 224997 - DNA, 656 bp, Unknown
  Bacterial polypeptide expressing nucleotide sequence isolated from the Sargasso Sea
agcatttattgctgttccgacaggtataaaatttttcaattgggttgcaacattatggggaggtaaaatttccattaatagtgcaatgttattctcttgcggatttattataaattttgtttttggaggtattacaggagttgctttggcacaggtcccttttgatattcacgtacatgatacctatttcgttgtagcccattttcattacatagtttatggagggactgtttttattattttctcttccatttatcattggttccctaaagtaactgggaagatgctcaatgaaaaattaggaattttacactttgttattacttttattggatttaacttgtgctttgctcctcaacattggcttggtttaaatggaatgccaagaagagttgcagaatatgatcctcaattccagttagttaatcaaattagtagccttggggctcttttgatggctataagtacaattccttttttaattaacgtattccttagtgtgagaaatggaaaaaattctggagataacccttggaatgctcttacacctgaatggttaacatcttctccacctccagttgaaaattgggaaggagaagctccattagttgaagaaccatatggttatggtaaagaaatttctgagcagaaataaa

SEQ ID NO: 224998 - DNA, 821 bp, Unknown
  Bacterial polypeptide expressing nucleotide sequence isolated from the Sargasso Sea
tccgcatgcgcgcccccggcatgggctttttcagatgccggtgttcgtgtggaccgcctgggccgcccagacgattcagttgatcggcctgcctgccctcaccggcggtgctgtgatgttgctgtttgacctcagcttcggcaccagctttttccggcctgagggcggaggtgatccggtgctgttccaacacttcttctggttctattcgcaccccgccgtgtatgtgctggtgctgccggtgtttggcatcttctctgagctgttccccgtttatgcccgcaagccgctgttcggctaccggttcgtggccatcgcctccttcggcatcaccttcctcagcctgatcgtgtgggcgcaccacatgttctacacaggcacaccgaactggatgcgccatatcttcatgttcaccacgatgttgatcgcggtgcccaccggcgtgaaggtgttcgcctggctgggcacgctgtggcagggaaatttgaggctgaatacaccgatgctgttctgcctcggaggcctgttcaacttcatcttcgctggcatcaccggcgtgatgctggccacggtgccgatcgacattcacgtgggtaacaccgcctttgtggtggcccatttccactacgtgatcttcaacacgatcgcctttggagtgttcgccggcatctatcactggttcccgaaattcaccgggcgcatgtattacgaaggcctcggcaaggtgcactttgtgctcaccttcatcggcgccacactcaactggctgccgattcactgggccggcctgctcggcatgccccgccgtgtggcctcttacg

SEQ ID NO: 224999 - DNA, 286 bp, Unknown
  Bacterial polypeptide expressing nucleotide sequence isolated from the Sargasso Sea
aatgtcagctgaaaaaaaacatgattatcacctagtagacccaagtccttggcctatctatgtatctttctcatgcttagtattagcaataggaacaattttttacatgcacaacgatgtttcgtggggaatgtatcttgggttagcactagttatttatggagcctatatgtggttcagagatgttgtgattgaagcagaacatcaaggtcatcatactcctgttgtgcaaattcatcatcgatacggaatgacactgtttattgcatcagaagtgatgttcttt

SEQ ID NO: 225000 - DNA, 703 bp, Unknown
  Bacterial polypeptide expressing nucleotide sequence isolated from the Sargasso Sea
aagtggtggcatcatgcttccagaaaattataatacttttggagccatgcacggtacgattatgattttcttaggggttgtaccactagctgtaggagcgtttggaaattatcttgtacctttacagataggtgctcccgacatggcattccctcgattgaacgcagctagttattggacatattttgtcggcggtgttgtaatgatggctagcttttttactcctgaaggtgctgcaagatctggttggacttcttaccctccgctttcgatctttgagtccggacaaaccatgtggctactttctatggtcttcttaattacctcttctttattaggatccatgaatattattgttactattgtccaactgcgtgctccaggattgacatggtttaaactacctttttttatttggagtcagcttgtaacatcgttccttctagttttagcatttcctccattggaagctgctgcagtgttacagcttatggacagattagcaggaaccagttttttcttacccagtggacttgtatatgctggagaagccgttgcagcttacggaaatggatcccctcttctttggcagcatttattttggtttctcgctcatcctgaagtatacgtactcattcttcctgcgataggtatagttggtgaaatcttagcgaacaatactagaaaacctttgtggggttac

SEQ ID NO: 225001 - DNA, 817 bp, Unknown
  Bacterial polypeptide expressing nucleotide sequence isolated from the Sargasso Sea
cgtgcagtacgcgctgacggccatcgcgatcggcctggtcggcctcgtattgttggacctgatgcggctgcagctcggctttccgggcaagtttgcgttcatcgacgcgaaccactactaccagttcgtcacgatgcacgggatgatcatggtgatctacctgctgacggcactgttcctcggcggcttcggcaactacctgatcccgctgatgctcggcgcgcgcgacatggtgtttccgtttctcaacatgctgagctactgggtctacctgctggccgtgctggtgctggtggcgagcttcttcgtgccgggcgggccgaccggcgcgggctggacgctgtatccgccgcaggcgattctgccgggcacgccgggcgtggaatggggcatcgtgctgatgctcgtgtcgctggcgatcttcatcgtcgcggccacgatgggcggcctgaactacgtgaccaccacgctgcaggcgcgcacgcgcggcatgacgctgatgcgcatgccgctcacggtgtggggcatcttcatcgcgaccatcatggcgctgctggcgtttccggcgctgttcgtgtcggcggtgatgatgctgttcgaccggacgctcggcaccagcttcttcatcccggccgtggtgtcgatggggcagacgctcaagcacgccggcggcagcccgttgctgttccagcacctgttctggttcttcgggcatccggaggtctatatcgtcgcgctgccggccttcggcatcgcgtcggatctcatcagcacgcacgcgcgcaagagcatcttcggctaccggatgatggtatgg

SEQ ID NO: 225002 - DNA, 841 bp, Unknown
  Bacterial polypeptide expressing nucleotide sequence isolated from the Sargasso Sea
gtttgggcaattgtcggtattggtgcattaagtttctttgtatgggcacaccacatgtatgttagtggcatgaacccttggtttggtttcttctttgcttcaacaactctaattattgcagtgccaacagctatgaaagtctacaactggatattaactctttggagaggtaacattagaattaatacagttatgttatggtgtcttggatttatagttacgtttgttaatggaggaatcacaggaatattcttaggaaacgtgactgtagatgtcccattgtctgatacttactttgtagttgctcactttcacatggtaatgggaatagctccacttatggttatcatgggtgcagtatatcattggttcccattagtatcaggaagaatgttaagtgaaaaattaggtaaatggcatttctggttaactttcttaggagcttattcaatatacttcccaatgcactatttaggatttattggggtgcctagaagatattttgaaatgtatgacagtccatatatgacttcagcggttggtatgaacgagtttataagtttagcagcgtttatagttggtgctgctcaattcattttaatttttaatgtaataaaaactttaaaaaacggaaaaaaagcaggaaaaaatccttggcaggcgaactctttagaatggcatacatcaacagttccacctgaacatggaaactttggtgatagattaccggttgttcacagatgggcgtatgactatagtgtgccaggagcaaaagaggactatatacctcaaactacaccaccaagcgaagtagctcatactgaggttgaaaaaacttaat

SEQ ID NO: 225003 - DNA, 916 bp, Unknown
  Bacterial polypeptide expressing nucleotide sequence isolated from the Sargasso Sea
caagctagaactagaggaatgaccttaatgagaatgcctttaacagtttggggtatttttacagcaactgtactagcaatgttagcatttccagcactactagttagtgcaataatgatgacactagacaaggttctgcaaacaagtttctttatgccaactatattgaaggcaggagaggttcttgaatatggtggaggaagtccaatacttttccaacacttgttctggttctttggacatcctgaagtatacattgttgcattacctgcgtttggaatagtttctgatttaatatctgttcatgccagaaaaaatatttttggatatagaatgatggtttgggcaattgttggtattggaggtttaagtttcttcgtatgggctcaccatatgtacgttagtggaatgaatccttggtttggatttttctttgcaacaacgacattaattatagctgttccgaccgcaatgaaagtttataactggatacttactttatggagaggaaatattagaattaacactgtaatgttatggtgcctaggatttatcgttacatttgtaaatggtggaattactggaatatttctaggaaatgtttcagttgatgttccattatctgacacatatttcgtaatagcccacttccatatggtcatgggtattgcaccattaatggttattatgggtgctgtttatcattggttcccgctagtagctggaaaaatgttacatgaaggtctaggaaaatggcacttttggattactttcttaggagcatactcaatatacttcccaatgcactatttaggttttattggagttccaagaagatattttgaaatgtatgatagtccgtatatgacatctgcagttggtatgaacgaatttataagtattgcagcatttattg

SEQ ID NO: 225004 - DNA, 892 bp, Unknown
  Bacterial polypeptide expressing nucleotide sequence isolated from the Sargasso Sea
aatgttaatttctcttatactttttgttgccggttttactatgggcggtctaaactatattattacagtattacaattaagagccagaggtatgactttgatgaggttgccactaacaatttggggaatatttacggctacagtgcttgccatgtttgctttcccagctttattagttggttgcttgatgatgacattagatagtttacttgggaccagtttttttatgccagcaatggtttctttaggagaaaaattaacccatgaaggtggaagcccaatcttatttcaacacttattctggttttttggccacccagaagtttatattgtagctcttcccgcttttggaattgtatcagacttactctctgttcattcaagaaaaacaatttttggatatagaatgatggtttgggctattgttggaattggagcgttaagcttttttgtatgggcacaccacatgtatgttagtggtatgaacccctggtttggtttctttttcgccacaactacactaatcatagctgtacctacagctataaaagtttataattggattttaactctttggagaggtaatatccagttgtcattgccaatgttattttccctaggttttatagtaacttttttaaacggcggtctcactggacttttcttaggtaatgttacagtcgacgtacctctatcagacacttattttgtagttgcccacttccacatggttatgggaattgctccaatattggtaatttttggtgcaatttatcattggtacccattaataactggtagaatgatgaatgaaacattaggtaaaattcatttttggataacttttattggatcttacgcaatatattttccaatgcattatcaaagcttt

SEQ ID NO: 225005 - DNA, 426 bp, Unknown
  Bacterial polypeptide expressing nucleotide sequence isolated from the Sargasso Sea
gtcttggaacatggctacctctatataatactgttgtcttactaacatcgagtggcaccgtgcatttcgctcacatggcattaaaagacaacaatagaaaaaggtttaatttttggttaggtataacagttttattggcatttatatttgtgattcttcaagctttagaatattacgaggcgtatgctcacttagggctaactattagttctggtgtctatggaacaactttttttatgttgacaggatttcatggtatgcacgttttaataggtggaatatttcttgccactcagcttacaagatcggcaggatacaatcattttactgaaaaagaacactttggtttcgaggctgcatcatggtattggcactttgtagacgttgtttgggtttgtctgttcttattcgtttatattctttaac

SEQ ID NO: 225006 - DNA, 859 bp, Unknown
  Bacterial polypeptide expressing nucleotide sequence isolated from the Sargasso Sea
gtatctgatcttatctcagtacatgcaagaaaaaatatatttggttaccggatgatggtttgggcgattgttattattggagcattaagttttattgtttgggctcatcatatgtatgtagccggaatgaatccttggtttggctttttctttgcaaccacaacattaattattgcagttccaactgcgctaaaggtttataactgggtaataactctatggagaggtaatatacgtttaacaattcctatgctttttgctttaggctttattattacttttgtaaatggtgggatcactggtttatttttaggaaatgtaattgtagatgttcctttgtcagacacatattttgttgtagctcattttcatatggtaatgggtatagctcctgttcttgttgttttcggagccatttatcattggttccctcttataactggccgctatttacacgaaggcatgggtaaatttcatttctgggtaacttttttaggatcttatgcaatttattttccaatgcattatttaggttttgttggagtgccgcgaagatattacgaaatgtatgatagtgaatttatggctgtttctacaaactatttaaatcaatttattacagttttagctttaattgtcggatttactcaattactttttttatataatattatcactagttcaaaatttggtaaaaaagctggcaagaatccatggaaagcatgttctcttgaatggcgtaccccagaagtgcctccgggtcacggtaactttggaaaagaattgcctgtggtatatcgctgggcttacgattttaatgtacctggagcaaaagaagattatttcctcaggacatgga

SEQ ID NO: 225007 - DNA, 837 bp, Unknown
  Bacterial polypeptide expressing nucleotide sequence isolated from the Sargasso Sea
cttctgttggaccttggtcgcaggtgcggtcatgctcttttttgaccagcgtcttgggacttcctttttccttccttcaggtggtggtgatccgttgctttgggagcatctgttctggtttttcggacatcctgaagtttatgtggttctattaccgaccatgggtattgtcgctgaaatcattactgtattctccaggaagaaattatttggttacaggaccatactatacacagcatttggcactggtggactatcattcattgtttgggcacaccaccagtttatcgccgggatcgacccacgaatggcgaatgtgtttgtggtgacaaccattttgatctcgattccgattgcagagatgcttttttctttcattgccacattgtatggaggatccatagaattctcgacgcctatgctttgggcgctaggattcctggtatcatttcttattgggggagtaacaggaatttaccttggcgcaagcgcattggatgtttattttcatgacagctattttgtcatagcacattttcactataccttttttccgataaccattattggaatgtttgctgcgattaccttctggtttccaaaaatgtttggaaggatgatggacgaaaccctgaacaagatacatttttggggaaccttcatcccttttaacggcctttttctaccccttttcctggtgggaatggcaggacaacatagaaggatttcagacttcacccaataccctgaccttgcttcacctgaccttcaggggataagaatttttgcaacggtatccttggtgattttgttactgttccaatttgtcttcatata

SEQ ID NO: 225008 - DNA, 304 bp, Unknown
  Bacterial polypeptide expressing nucleotide sequence isolated from the Sargasso Sea
atgtcagcaggaaaaccaaaacacgattaccatttagttgatccaagtccttggccgatttatgtttcattcgcaactttagtcttagcttttggagcagtttattatttccactccaaagctctttggttattattaattggttttgctttagttgtttacggtgcatttatgtggtggcgagatgttatagaagaagcagaacatcaaggccatcatacgcctgtagttcaaattggacataggtacggtatgacattatttatcgcctctgacagtaatgttttttgttgcatggttctgg

SEQ ID NO: 225009 - DNA, 863 bp, Unknown
  Bacterial polypeptide expressing nucleotide sequence isolated from the Sargasso Sea
taaatgggtttttagccaggatgccaaagttatcggtattcagtatgctttaactgcaactgcaattggttttataggattaattttgtcatggggaatgagactgcaattaggatttcctgaaactttttcttttcttggcccagcaacatattatcagtcagtaacgatgcatggtatgatcatggttatttatcttcttaccgctttgtttttaggtggttttggtaattatcttattccactgatggtgggagctcgagatatggtttttccatatgtaaatatggttagttactggatgtttcttgttgcagttttagttttaattgcaagcttctttgtacctggaggaccaacgggagcaggttggaccctatatcctccgcaagcaatattacctggaacaccaggatctgaaatgggaatagtgcttatgttagtctctttatcattgttcgttattggttttacaatgggtggattaaattacgttataacaatacttcagtctagaactcgtggaatgactttaatgcgtatgccgctaactatttggggtatatttacagctacagttcttgcacttttagcttttcccgcacttcttgtagcctgcataatgatgacgcttgataatttattaggaacaagtttctttatgccagaaatttttacaatgggagaaaaattggattatgtaggcggaagtcccattttgtttcagcacctattctggttttttggtcatccagaagtttatatagtagctctacctgcatttggaatcgtatctgatttaatttcagttcatgcaagaaaaaatgttattggttacagaaatgatggtttgggccaatagt

SEQ ID NO: 225010 - DNA, 358 bp, Unknown
  Bacterial polypeptide expressing nucleotide sequence isolated from the Sargasso Sea
agagtggcttggacaattacatttttggttaacatttgttggagtgaatttgatttttttcccccaacattttttaggtttagctggaatgccgagaaggtatgctgattatccagatgctttcgcgggttggaattatatatcttcaattggatcttatatagctgtagcagggttagtagtattttttgttaatttagtatattcttttttaaagaaaaaagcagctcagcctaatccgtggggcgtaggtgcaactacattagaatggacagtaccatcacctcctaattttcatactttcgaggaattaccaaaatttatagatgaccaggagacagaaaaatctcgaagttaa

SEQ ID NO: 225011 - DNA, 859 bp, Unknown
  Bacterial polypeptide expressing nucleotide sequence isolated from the Sargasso Sea
atgggtttttgccaagatgctaaagtaattggcgtacagtattttctaacagcagtattcactggaattgtaggattaattttgtcttggttgatgagattgcaattaggtttccctgaattagctggttttatgactgcggaacattattatcaattcgtgactatgcacggtatgataatggttgtttattttttaacagcattatttcttggaggctttggtaactatctaataccactaatggttggagcgcgtgatatggtttttccatatgtaaacatgttaagtttctggatgttttttgttgccgttgcagttttaatggcaagcttttttgtacctggtggaccaacaggatcgggctggactttgtatcctcctcaggcaattttagatggaacacctggatcaggtgcaggaatacttctgatgttaatatctttatctctatttgtcattggtttcacgatgggagggctgaactatttgatcacagttcttcaagcgagaactagaggtatgacgcttatgagaatgcctttaacggtttggggtattttcacagcgacagtacttgcgatgctagcatttccagcacttttagtaagctctataatgatgactttagataaagttcttggaacaagtttcttcatgccaactattttaaaagcaggtgaagttttagaatatggaggaggaagtccaattcttttccaacacttattctggttttttggtcaccctgaagtctatattgtagctcttccagcatttgggatagtttcagatttaatatctgtgcacgcaagaaaaaatatttttggctacagaatgatggtatgggcaattgtag

SEQ ID NO: 225012 - DNA, 413 bp, Unknown
  Bacterial polypeptide expressing nucleotide sequence isolated from the Sargasso Sea
gttattattattgacatctagtttaacagtgacaatcgcccaccatgccattctcgaggatgatcggcaaaaggtcatcctttggacagggattactgttattctgggaattttattcttaggagttcagattgcggagtatgcgcacctgacctttggtcttggtgatggcatctacccctctacattttacttagctactggattccatgggtttcatgtatttgtaggaacggtttttctaatagtttgttatttccgtgcccgaaaaggtcattttactcgtgatgcgcatataggttttgaggctgcagcttggtattggcattttgtagatgtggtttggatttttctctatataaatgtttattggtggggttcggcagagttcggacatctattagctggatagt

SEQ ID NO: 225013 - DNA, 121 bp, Unknown
  Bacterial polypeptide expressing nucleotide sequence isolated from the Sargasso Sea
ccattatttgcatggtcaatattagttacagcatttttattattactttcgttaccagtattagcagggagcaattactatgcttctaacagatcgaaattttggtactgcattttttgat

SEQ ID NO: 225014 - DNA, 624 bp, Unknown
  Bacterial polypeptide expressing nucleotide sequence isolated from the Sargasso Sea
cgctgaacacaccgatgctgttctgcctcggtggtctgttcaacttcatcttcgccggcatcaccggcgtgatgctggcgacggttcccatcgatgtgcatgtgggcaacacctacttcgtggttgcacacttccactacgtgattttcaacacgatcggtttcggggtgttcgccggcatctatcactggttcccgaaattcaccgggcggatgtactacgaaggcctgggaaaagttcactttgcgctcaccttcatcggcgccaccttgaactggttgccgttgcactgggccggcctgctgggcatgccccgtcgtgtggcctcttacgacccggaattcgccatctggaatgtgatcgccagcatcggggccttcatgctcggcgtcgcctcgatccccttcattctcaacatggtgagctcctgggcccggggcccgaaggctccacccaatccctggcgggccatcggactggagtggctgctgccctccccaccaccggctgagaacttcgaggacgacatccccaccgtgatcagtgagccctacggctacggcctgggccaccccctcgtcgaggacgaggagttctacgtccgccgttcccaggaggcctgaa

SEQ ID NO: 225015 - DNA, 639 bp, Unknown
  Bacterial polypeptide expressing nucleotide sequence isolated from the Sargasso Sea
ggttggctcactaatgatgacgttagacaaattacttggaacaagtttttttatgcctacaattttaaaagcaggggaagttttagagtatggtggaggaagccctattctttttcaacacttattttggttttttggacatccagaagtttatattgttgcattaccagcctttgggataatttcagatttaatttctgtacactctagaaaaaatatatttggttacagaatgatggtatgggccatagtagggattggagctttaagcttttttgtatgggcacaccacatgtatgttagtggaatgaatccatggtttgggtttttctttgctaccacaacacttattattgcagttccaaccgcaatgaaagtttataattggattttaactctttggagagggaatattagaatgaatactgtaatgttatggtgtcttggctttatagttacatttgtcaacggaggaattacaggtatttttttaggaaatgtttcagttgatgtgccactatcagatacttactttgtaattgcacatttccatatggtgatgggtattgctccattaatggtaattatgggagcggtttatcactggtttcctttagtagctggaaaatttttagatga

SEQ ID NO: 225016 - DNA, 744 bp, Unknown
  Bacterial polypeptide expressing nucleotide sequence isolated from the Sargasso Sea
catgccagaaaaaatatctttggttatcgtatgatggtttgggcaatagtagcaatcggcgctctaagttttattgtatgggctcatcatatgtatgttagtggaatgcatccttattttggatttttctttgctacaacgacattaataatagccgtacccacagctattaaagtatataattgggtactaactctttggaagggtaacataacattaaccgtgccaatgttattttgtatatctttcattataacttttttgaatggtggtcttacaggtctatttcttggaaatgttatagtggatgtacctctttctgatacatattttgtggtagctcattttcatatggtaatgggtattgctccggttcaggttgtttttgcagcaatttatcattggttccctctaatgactggtcgtatgtataacgaaactctgggaagattacatttttggtttacttttttaggatcttatttgatttatttcccaatgcactatcttggattaattggagttccaagaaggtattacgagatgggtcaaacagaagctttgtatacccaatccgcagctgatttgaatattttcataactttgacggcccttgttacaggttttgcacaaatcttctttttcattaatatgttctggagtagaaaatatggtgttcctgcagaaaaaaatccatggcaagcaaattcacttgaatggagaacaccttcaatgcctccagga

SEQ ID NO: 225017 - DNA, 386 bp, Unknown
  Bacterial polypeptide expressing nucleotide sequence isolated from the Sargasso Sea
tggaaaaatgtcaggatatcaatattcagaatggatgggcaaactccacttctggttaacttttattggtgtaaatttaattttcttccctcaacactttttaggtttagcaggaatgccaagaaggtatgcagattatccagatgcatttgctgattggaactacatttcctcaatcggctcatatatatctgtagccggcgtagtagtttttctaataaatttattatactcatttattagtaagaaaacctcatcatctaatccatggggagagggggcaacaacacttgagtggacagtgccatcaccgcctaattttcacacttttgatgaattaccaaaagtggacgtttacgaaggagcagaaaaatctaaatcttgat

SEQ ID NO: 225018 - DNA, 855 bp, Unknown
  Bacterial polypeptide expressing nucleotide sequence isolated from the Sargasso Sea
ttactggaatggtgggttttaattttatcttggttaatgagattacaattaggttttccaggactagcaggatttataactgccgaacactattatcagtttgtaacaatgcatggaatgataatggtagtttattttttaactgccttgtttttaggaggctttggaaattatttaataccgttgatggttggtgcaagagatatggtttttccatatgttaacatgttaagtttttggatgttctttgttgcagtagcaattttaatggcaagcttctttgtaccaggaggtccaactggagcaggctggacactatatcctccacaaactattttagagggtacaccaggttcaggaatgggtattctgctaatgttgatctctttggctctttttgtaattggtttcactatgggtggactaaattatatgatcactgtcttacaagctagaacaagaggtatgactttaatgagaatgcctctaactgtatggggaatttttacagcaactgttttagctatgttagcattcccagctttactagtaagtgcaataatgatgacactagataaagttattggaacaagtttctttatgcctacaattttaaaagctggtgaagttttggaatatggtggaggaagtccaattttatttcaacatttattttggttttttggtcacccagaagtttatattgtggcattgcctgcttttggtatcgtttcagatttaatttcagttcatgcaagaaaaaatatttttggatatagaatgatggtttgggcaattgtcggaattggtgctttgagctttttcgtttgggcgcatcatatgtatgtaagcggg

SEQ ID NO: 225019 - DNA, 880 bp, Unknown
  Bacterial polypeptide expressing nucleotide sequence isolated from the Sargasso Sea
catgattttctgggttgccatgccagtcctgatagcggcattcggtaactggatgattcctttgatgatcggttgtgatgatatggtttttccaagactcaaccgtctgtcttaccagatatttctggtaagtgctttggttttaatcctttccttttttgttgaagggggtggcttcggaggtgcgtggacctcttatcctccattgtctgcagcagcagagtataacctgaccaactggggagcctctttgtggcttcttgctgtatttctcgaaattgtagcttttttacttggtgggattaatttcatcaccaccaccatgaatgcacgtgctcctggaatggggatgatggatattccgatcgtcatttggatgatcaatattgctgtcatcctttttatggcttccgtaggcccgttggtagcaggagcagtgatgctcttttttgaccagcgtctagggacatctttttttctgccctcaggtggcggagatccattgctttgggagcatctgttctggtttttcggacatcctgaagtttatgtggttttattgccaaccatgggtatcgtagctgaaatcataaccgttttttccaggaagaaactgtttggatatcgcaccattctctacacagcttttggaaccggagggctctctttcatagtatgggcccatcatcagtttgttgctgggatcgatcccagaatggcgaatgtgtttgtggtgacaaccattttgatttcaattccaattgcagagatgcttttctcattcattgccactctttatggaggttcgattgaattctccactcccatgttgtgggcccttggcttcctggtttcctttctgataggcggagtcacagga

SEQ ID NO: 225020 - DNA, 184 bp, Unknown
  Bacterial polypeptide expressing nucleotide sequence isolated from the Sargasso Sea
actgggtttcatggtttccatgtaatgatgggcggcattatgctttcaataatgcttgctcgatctgtttttgcagggcattttgaagaacatgatcattttggttttgaagcagcttcttggtattggcattttgttgatgtcgtatgggtaatgttatttttattcgtatatatactttaat

SEQ ID NO: 225021 - DNA, 892 bp, Unknown
  Bacterial polypeptide expressing nucleotide sequence isolated from the Sargasso Sea
agttttaatggcaagtttctttgttccaggcggaccaacaggagcaggatggaccttatatcctccacaaactattttagagggaactcctggatcaggtatgggaatacttctaatgcttatatctttatctttattcgtaattggtttcacaatgggtggactgaattacatgattacaatcctacaagctagaaccagaggaatgactttaatgagaatgcctttaacagtttggggtatttttacagcaactgtactagcaatgttagcatttccagcactactagttagtgcaataatgatgacattagataaggttctacaaacaagtttctttatgccaactatattgaaggcaggagaggttcttgaatatggtggaggaagtccaatacttttccaacacttgttctggttctttggacatcctgaagtttacattgttgcattgcctgcatttggaatagtttctgacttaatttctgttcatgcaagaaaaaacatatttggttacagaatgatggtttgggcaattgttggtattggaggtttaagtttctttgtatgggctcaccacatgtacgttagcggtatgaacccttggttcggatttttctttgcaacaacgacactaattattgccgttccgacagccatgaaagtttacaattggatacttactttatggagaggaaatattagaattaatactgtaatgttatggtgcctaggatttatcgttacatttgtaaatggtggaattacagggatatttttaggaaatgtttcagttgatgttccattatctgatacatatttcgtaatagcccacttccatatggtcatgggtattgcacccattaatggttattatgggagcgggtttatc

SEQ ID NO: 225022 - DNA, 626 bp, Unknown
  Bacterial polypeptide expressing nucleotide sequence isolated from the Sargasso Sea
aatggttgatttagtatttaaagactctgaaaaaaaacataaatttcatcttgtcaatcctagtccttggccattagttggtgctttttcagctctttttctagtttcaggagctattttgtatatgcactatgagatgctatggcctatgttggcaggtctcgttctaatactttttactatgtttatgtggtggcgagacataataaaagagagcacttttttgaaagtacataattcaatcactgagattggccttaggtggggtatggcactattcattacatcagaagtaatgttttttgttgctttcttttgggctttttttgatgcaagtctattacctaaaacatttttagctgagtacaaagaagtttttacaggtactcttggaataggagtttggcccccaaaaggaattgaaacttttgacccactagacatcccatatttaaataccttgattttacttttatcaggcactacctgtacatgggcacaccatgagttaagagagggtaataataaagaggctcttaaaggtttatattatacagtttttttaggtttcatattttcacttttacaaatatatgaataccaacatgcaacttttggttttactg

SEQ ID NO: 225023 - DNA, 856 bp, Unknown
  Bacterial polypeptide expressing nucleotide sequence isolated from the Sargasso Sea
cttttcctgggcggttttggcaactatctgatccctttgatggtgggtgcgcgagacatggtgttcccttggctcaacatgatcagcttctgggtgtacttcacagcggtgctgcttctcgcagccagcttctttgtcggtggtggctcgacgggggcagggtggacactttacccacctcaggccatcttgccggggacgccaggctcagaggcaggcattctactgatgttggcctctttagcggtctttatcatcggattcaccatggggggcttgaactacgtggtgaccatcctgcaggccagaacgcgaggcatgacgctgatgcgaatgccgttgaccgtatggggtatttttgtggcaacagtgttggcgctgtttgccttccccgcgctgtttgtgagcgccatcatgatgtcgctggatgtcctcttgggcaccagctttttcatgccggcgatcatgacgatgggtaacgaggcagatcacgtcggcggcaatccgcttctgttccagcacctcttctggttcttcggccaccccgaggtctacatcgtcgcactacctgcctttggcattgtgtctgaccttatcagcatccacgcgcggaaaaacatttttggttaccgaatgatggtgtgggcaatcgtcattatcggtgcattgagcttcgtggtttgggctcaccatatgtacgtgagcgggatgaacccctactttggtttcttcttcgccacgaccaccctcatcattgctgtgcccacagcactcaaggtctacaactgggtgctcaccctttggcagggcaatattcatctgaccatcccaatgctgttttccattgcattcctgt

SEQ ID NO: 225024 - DNA, 709 bp, Unknown
  Bacterial polypeptide expressing nucleotide sequence isolated from the Sargasso Sea
ctggcaggcatcgccgttatcctgtttatgctggtaggctggtttagaaccgtgatcaaagaatcgatgacgggcctctattcccatcagatggatagatcgtttcgccaaggcatgagctggtttattttctccgaggtgatgttctttgccgccttcttcggcgccttattttacgcccgcatgatcgcagtgccctggctcggcggcgcgtccaacaatgccatgacccacgaagtcctgtggccacacttcgaggccgtttggccactcgtcaccacaccagatggcaccaaaaccgaagccatgccatggaatgggctaccgctaatcaacaccattgtgctgctgacttcctcagtcacgctgcattttgcccatatcagcttagaaaagggtaagcgttcggccatcaccctctggctagggctcacgattttactgggaattagcttccttgctttgcaggcggaggaatatagccatgcctaccatgagatggggctaacgctcacctcgggcgtgtatggcaacacctttttcctgctgacgggtttccacggcatgcatgtaaccttgggcactatctttctattagtcttgtttttcagagtgttaaaaggccactttagtgcggataagcattttgccttccaagcaggcagttggtactggcactttgtcgacgtagtttggctctgcctgttta

SEQ ID NO: 225025 - DNA, 838 bp, Unknown
  Bacterial polypeptide expressing nucleotide sequence isolated from the Sargasso Sea
tttggagcagtgatgccagcatttgtagggctagcaaattggcttgttcctatgatggttggtgcccctgatatggcactacctagaatgaataatctaagtttttggattttgccttttgccttttttatgatgctttcatctttgtttatggagggaggagcccctaattttggttggactttctatgctccattatcgacaacatatgcaccacccagtgttacttttttcattttttctgttcatattctcggagcttcatcaattatgggagctattaacgtgattgtaactatcatgaatatgagagccccaggaatgactttaatgaagatgccattatttgtttggtcatggctcataacagcatatttgttgatagcagttatgcccgtcttggcaggggcagtaaccatgatgcttatggacatccactttggaaccagtttctttaatgctgcaggcggtggagacccagtcctttttcagcatattttctggttctttggtcaccctgaggtttacataatgatattaccagcctttggaattgtttcgcacataatttctactttctccaggaaagagcttttcggatactcgtcaatggtttgggcaatggtttcaattgctattctttcttttgttgtttgggcccaccatatgttcactgttggaatgccattagcagctgaactattttttatgtgggcaactatgctaatcgcagtccctacaggagttaaggtttttaattgggttgcaactatgtttaggggctcaataacttacgaaacaccaatgttatttgccatagcattcgttgttttattca

SEQ ID NO: 225026 - DNA, 508 bp, Unknown
  Bacterial polypeptide expressing nucleotide sequence isolated from the Sargasso Sea
aatgtcagctgaaaaaaaacatgattatcacttagtagatccaagtccttggcctatttacgtttcattctcttgcttagtgttagctataggtgccgtgtattatatgcattcagatgtttcatggggaatgtatcttggattagctcttttaatttatggagcatatatgtggtttagagatgtggtcattgaagcagaacatcaaggtcatcataccccagtggtccaaattcatcaccgttatggaatgactttatttattgcatctgaggtaatgttttttgttgcttggttttgggcttactttgacgttagtcttttcccaaatgattttgtaggaaacgtatggcctcctaaagatattgtgacttttgatccttgggatatacctttaattaatacattagttttattactatcaggtacaacagttacatggtctcaccattcattattagagggtgatagaaaaggttttatacaaggattagtgctaacagtaatt

SEQ ID NO: 225027 - DNA, 861 bp, Unknown
  Bacterial polypeptide expressing nucleotide sequence isolated from the Sargasso Sea
aaaagtgctattccaataatttttgcagtttctgtcttttttgcagggtttggcgctgctaatgcaatcaccggcaatggttccacaatgcttcttcttggtatgttagctgtagttattactatgtctttctggttttctgttgttatgaaagagtcaaaagccggacttgatacaccgcaattaaataattcttatgtatttggaatgggatggtttattttttcagaggtaatgtttttcttcgctttttttggtgcattattctacataagacagtttgcagtaccatggctcggtggtgagggagaaaaaggccttgctggagaattattgtggccagaatttgaggcaacatggccgcctatgataactcctgagcaaagcattatgggcaatcaggcagttacaaaaggacctgatgaatctatgtatctacatggcataagtggaataattaagtggcttcctttatggaatacaatcgttcttcttacttcaagtggaacagttcactttgcacatattgcacttaaagaaaataatagaaaaagatttaacttttggttaggaattactgtgtgcttagcatttatttttgtaattcttcaagcagcagaatactatgaggcctatgctcatctgggattaactctaaattctggagtatatgggacaactttttttatgttaactggatttcatggaatgcatgtcttgattggtgggatctttcttttaactcagctgtttaggtcaacagggttcaaacattttacagaaaaagaacattttggctttgaagcagcttcttggtattggcattttgttgatgttgtctgggttttgctgtttttattt

SEQ ID NO: 225028 - DNA, 406 bp, Unknown
  Bacterial polypeptide expressing nucleotide sequence isolated from the Sargasso Sea
ctttataacactctgattttattggcgtcttctgtcactttgcagtttgctcatatggggttggagcaaaataaaagaggtcagctcaagctgatgttaggacttactatcctgttaggagcaagttttctgtatttgcagggcatagagtacgtacatgcctatcaggatctgggtttaaaactggactcaggtatttatggcaacaccttctttttactaacaggtttccatggattgcatgtgactctgggggccatatttttactggtgatgtttttgcgtatcgtactgaaaaaccactttaccgcccataagcattttgcctttcaggctgcagcctggtactggcattttgttgatgtggtctggttatgtttgtttatttttgtctacgtgctgtaac

SEQ ID NO: 225029 - DNA, 567 bp, Unknown
  Bacterial polypeptide expressing nucleotide sequence isolated from the Sargasso Sea
tgctggccgtgctggtgctggtggcgagcttcttcgtgccgggcgggccgaccggcgcgggctggacgctgtatccgccgcaggcgattctgccgggcacgccgggcgtggaatggggcatcgtgctgatgctcgtgtcgctggcgatcttcatcgtcgcggccacgatgggcggcctgaactacgtgaccaccacgctgcaggcgcgcacgcgcggcatgacgctgatgcgcatgccgctcacggtgtggggcatcttcatcgcgaccatcatggcgctgctggcgtttccggcgctgttcgtgtcggcggtgatgatgctgttcgaccggacgctcggcaccagcttcttcatcccggccgtggtgtcgatggggcagacgctcaagcacgccggcggcagcccgttgctgttccagcacctgttctggttcttcgggcatccggaggtctatatcgtcgcgctgccggccttcggcatcgcgtcggatctcatcagcacgcacgcgcgcaagagcatcttcggctaccggatgatggtatggacaatcttatcaccattataat

SEQ ID NO: 225030 - DNA, 336 bp, Unknown
  Bacterial polypeptide expressing nucleotide sequence isolated from the Sargasso Sea
tttggttaactttcataggtgtaaatttagttttctttccacaacatttcttaggattggctggaatgccaagaagatacgctgattatccggatgcattcgctgattggaattatatttcttcaatcggttcatatatttctgtagttggcttagtggtatttttcgctaatttaatctacgcttttgcaaaaaagaaaaaagcagcacaaaacccatggggagaaggggccacaacattagagtggacagttccatcaccaccgaattttcatacttttgatgaactgccgaagtttgaagattatgaaggcactgaaaaatctagtagttagt

SEQ ID NO: 225031 - DNA, 760 bp, Unknown
  Bacterial polypeptide expressing nucleotide sequence isolated from the Sargasso Sea
ttattcatggaaggaggggcgcctgcttttggctggacgttctacgcgcccctctccacgacctatgctgcgccctcggtcaccttctttattttcgcgatccatatcctcggcgtgtcgtcaatcatggggtcgatcaacattatcgcgacggtgatgaatatgcgtgcgccgggcatgacctacatgaagatgccgatgttcgtctggacctggttgatcaccgcctttttattggttgctgtcatgcccgttttggccggtgcagtaacgatgatgttgatggacatccattttggtaccagctttttcagcgccgcaggtggtggtgaccccgtgttgttccagcacattttttggttctttggtcatccggaggtctacataatcatcctgccggcgtttggtgttgtatcccaaattattccggccttttcgcgtaagccactgtttggctacgcttcgatggtttatgccactgcatcgattgccttcctgtcattcatcgtgtgggcgcatcacatgtacaccgttggaatgccgatcgcgggagagctgttttttatgtacgccaccatgttgattgcagtacccacgggggtaaaggtgttcaactggatctcgaccatgtggcgtggtgcattgagttttgagacacccatgctgttttgcatcggcttcttgatcctgttcacgttgggcggctttacgggtctgatgctgtcgattgcaccggcagactttcagtatcacgacacct

SEQ ID NO: 225032 - DNA, 514 bp, Unknown
  Bacterial polypeptide expressing nucleotide sequence isolated from the Sargasso Sea
aatgtcagcagaaaaaaaacacgattaccacttagttgatccaagcccttggccaatctacacatcctttgcatgcctagtattagccattggtgcaattttttatatgcataacggtatttcatggggcatgtatcttggtttagcactattaatttatggtgcatatatgtggtttagagatgtagtaatcgaagctgaacatcaaggtcatcacactcctgttgttcaaattcatcatagatatggtatgactttatttattgcttcagaggtaatgttctttgttgcatggttctgggcttactttgatataagtttatttccaaatgaatttgttggaaatgtatggccaccaaaagatattgaaacgtttgatccttgggacattcctttaataaatactttagttttattattatcaggaacaactgttacttgggctcatcacgctttattagaagatgatagaaaaggatttatacaaggtttaacactaactgttattcttggt

SEQ ID NO: 225033 - DNA, 643 bp, Unknown
  Bacterial polypeptide expressing nucleotide sequence isolated from the Sargasso Sea
gttattataggtggattaagctttatagtatgggcacaccatatgtatgtagctggtatgaatccatggtttggttttttctttgctacgacaactttaattattgcagtcccaacagcaattaaagtttacaactgggtacttactctttggagaggtaatattcaactaactcttccaatgttattctctatagcttttataattacatttattaatggaggtctaactgggatatttcttggtaacgtggcagtagatattccactttcagacacctattttgtagtagctcattttcatatggttatggggattgctccagttcttgtaatcttaggatctatttatcattggtttcctcttataacgggacgtctattagatgagcgtcttggaaaaatacatttttgggtaacttttataggctcttattcaatatattttccaatgcactatttaggttttatgggagtgaccagaagatattttgaagtatttgaaggagaagcttttacttattcaattactggaattaatcagtttataactattgcagcattaataactggagctgcacagtttgtatttttttataatattattgtaagttcaaagcttggtaaaaaagctggtaaaaatc

SEQ ID NO: 225034 - DNA, 845 bp, Unknown
  Bacterial polypeptide expressing nucleotide sequence isolated from the Sargasso Sea
tatgcagcttgcctttccaggggcgcatgttcctggcttcggcacggtgacctccggcgagtacaacgcactcgtcaccaatcacggcaccatcatgatcttctgggtcgcgatgccggtcctgattgccgcctttggtaactacttgatcccgctgatgatcggctgcgacgacatggtctttccgaggatcaatcgtctctcttatcaggtcttcctgctcagcgcgattgtcctcattgccagcttcttcgtgcctggcggaggatttggtggtgcctggacggcctacccgcccctctcgtctactgctgagtacaacctcacccctctgggctcgaccttatgggtgatagcggtggcccttgaattcgttgccttcctgctaggcggcatcaacttcatcaccacggcgatgaactcacgagcaccaggcatgaaggccttcgacatgcccatcgtggtgtggatgatcgtgatcgcctccatcctctttatgtgctcggtaggcccgctgattgctggcgctgcaatgctcgtctttgaccagcagattggcaccttcttcttcgatcacgcccgcggtggcgaccccattctctggcagcacctcttctggttctttggccaccccgaggtctacgtcgtactccttccggcgctaggtatcgtcgccgagatcatcacagtgttctcgcgcaagaagctgttcggctacaagacggtgctctacacgaccttcgcgacgggcatcctcagcttcttcgtctgggcacaccaccagttcatcgccggtatcgacccgcgcatggccaacatctttaccgtgacaacgctgctcatct

SEQ ID NO: 225035 - DNA, 868 bp, Unknown
  Bacterial polypeptide expressing nucleotide sequence isolated from the Sargasso Sea
tactatcagtttataaccatgcacggaatgataatggttgtctacctcctcacagccctatttttaggtgcttttggaaactacttgatacctctcatggttggtgcaagagatatggtatttccatatttaaatatggttagttattggacatatttagttgcagttttagttcttttcgtaagtttctttacccctggtggccctactggcgctggatggacgctttatccgccacaagcaattcttggcggtactccaggtcaagaaactggtatagttttgatgttagtatcattatgtatttttattgttgggtttactatgggtggacttaattatgtcataactgttctacaagctagaacacgtggcatgacattaatgagaatgccattaacagtttggggaatatttaccgccacagtgttagctttatttgcttttccagctttgtttgttagtgctgtaatgatgctttttgacaagcttttaatgacgagcttctttatgcccgctttagtagaatttggtgaaaatcttagttatggtggtggaagccctattttatttcaacatcttttctggttttttggacatcctgaagtttacattgttgcattgccagcatttgggattgtttctgacttaatttccatacatgcccgaaaaaatatttttggctttagaatgatggtgtgggcaatagtaggtattggagctctaagttttatcgtttgggcgcaccatatgtatgttagcggaatgaatccttattttggtttcttctttgcaacaacaactcttattattgctgtcccaacagccctaaaagtttataattggatcttaaccttatggaaaggta

SEQ ID NO: 225036 - DNA, 619 bp, Unknown
  Bacterial polypeptide expressing nucleotide sequence isolated from the Sargasso Sea
tacagagcttctaagaatcaagttccatctactacaagtcataacacattaatcgaagttatttggacattagttccttgtttaattttaatagtcatggcagttccttcatttaaagttttatattcacaagatgaaattcccaaagcagacgttactatcaaagctataggatatcagtggtattggggttatgagtacccagatgaaaatataatcttcgactcttatatgattgatgaaaaagatttaaaagaaaatcaacctagattattagctgttgacaatgcggtttacgttccagtcaacaaagttgtaaaggttatgataactgcaaatgatgttttacatgcatgggcactaccatcttttggggttaaaagagatgcaattcctggaagaataaatgagacatggtttaaagctgatcgaactggaactttctacggccagtgttctgagctatgtggaattaaacatgctttcatgcctatcacagtaaacgttgtgtctgaggatgagtataataaatggttagaagaagctaaagttaaatttgcaaaagaagaaattaaaaacaatattaaagtagcaaaaaaaattaaggagataaaataat

SEQ ID NO: 225037 - DNA, 835 bp, Unknown
  Bacterial polypeptide expressing nucleotide sequence isolated from the Sargasso Sea
ggactgcaaattgtcgaaccaaacttctttaaccagatgaccacggttcacgggttaatcatggtatttggtgccgtaatgccggcgtttacaggtttggctaactggctaataccaatgatgataggcgcgccagacatggcgcttcccagaatgaacaactggagcttttggatcctgcctggggcgttcttaattctactaagctcgttatttatggaaggtggcggtccggcatttggttggactttctatgctccgctatcaacaacgtacagtggtgattctaccgcgctgtttgtattctctgttcatatcatgggtatctcttcaataatgggagcgataaacgttattgtcaccatattcaatatgcgtgccccaggtatgacgtggatgaaaatgcctttgttcgtttggacatggttaattactgcgttcttgcttattgctgtcatgccggtacttgcaggcgcagtgacaatggttctgacggacaagttttttggtacgagcttcttcgatgccgccggtggcggagacccggtcatgttccagcatatattctggttctttggtcacccagaagtgtacataatgatattgcccgcatttggtattatttctcaaattgtgccaacgttttcccgaaaaccgctgtttggttacgcctctatggtatacgcaacggcttcgattgcgctgctgtctttcgtagtgtgggctcaccatatgtttactacgggtatgccggtgtacatggagatgttctttatgttcgccacccatgcttatctctgtgccgacgggagtgaaagtattcaactgggtcgcc

SEQ ID NO: 225038 - DNA, 313 bp, Unknown
  Bacterial polypeptide expressing nucleotide sequence isolated from the Sargasso Sea
aatatcttgttcttgcccatgcatttcttgggtttggcaggcatgccacgtcgtgtgcccgattatgccctgcagtttaccgacttcaaccagattgttagttggggcggtttcatctttggggcggctcaaatcctttttgtggtggcggtggtgcatgcgattcgcaaggggaaacccgcgaccggtcaggtttgggaaggggccaaggggttggagtggaccattgattctcctgcgccttatcatactttcatggtgccaccgacggcagagactttggcggcggtaggcccgcccaggggtgattgat

SEQ ID NO: 225039 - DNA, 966 bp, Unknown
  Bacterial polypeptide expressing nucleotide sequence isolated from the Sargasso Sea
tgaacaagatttatatcatgcacatagttttattgaaaaatggattttttgtcaggatgctaaggttattggtgttcaatattttttaacggcagtatttactggaattgtaggactgattttatcatggttaatgagacttcaacttggttttcctgagttagcaggtttcatgacagcagaacattattatcaatttgtaactatgcatgggatgatcatggtagtttactttttaactgcattatttctcggaggctttggaaattatctaattccacttatggttggagcaagagatatggttttcccatatgtaaatatgctgagcttctggatgttctttgttgcagtcgcagttttgatggcaagtttctttgttccaggtggaccaacaggagcgggatggaccctgtatcctccacaaactattttggaaggaactcctggatcaggtatgggaatacttctaatgcttatatctttatctttattcgtaattggtttcacaatgggtggattgaattatatgattacaattctacaagctagaactagaggaatgaccttaatgagaatgcctttaactgtttggggtattttcacagcaactgtccttgcaatgttagcatttccagcgctactagttagtgcaataatgatgacattagataaggttctacaaacaagtttctttatgccaactatattgaaggcaggagaggttcttgaatatggtggaggaagcccaatacttttccaacacttattttggttttttggacaccctgaagtttacattgttgcattacctgcatttggaatagtttcagacctgatatcagttcatgcaagaaaaaacatattcggttacagaatgatggtttgggcaattgttggtattggaggtttaagtttctttgtatgggctcaccacatgtacgttagtggaatgaacccttggtt

SEQ ID NO: 225040 - DNA, 883 bp, Unknown
  Bacterial polypeptide expressing nucleotide sequence isolated from the Sargasso Sea
ttttggttctattcgcacccggctgtgtatgtgatggtgctgccggtcttcggcatcttctcggaggtcttcacctgctattcgcgcaagccattgtttggctacaaattcgtggcgttggcgtcgtttgggattgtgttcctgtcgttgatcgtgtgggttcaccacatgttctatacgggcacaccgaactggatgcgcatcctgttcatgttcaccacgatgacgatcgcggtgcccaccggcgtcaaggtgtttgcttgggtggccacgttgtggcgaggcaagttacggctcaccacaccgatgctcttctgcctcggcggtttggtgaacttcatctttgctggcatcactggggtgatgctcggcaccgttccgattgatatccatgtgggcaacacctacttcgtggtggctcacttccactacgtgatcttcaacgcgattgtgctgggggtgtttgccgctgtttatcactggttccccaagttcaccggccacatgtattacgagggcctgggcaagctccacttcgccctcaccttcattggctgcaccttgaactggttgccgctgcattgggccgggctgctggggatgccgcggcgggtggcctcctacgaccctgaattcgcgatctggaatgtgatcgccagtgtgggcgcctttctgctgggggtggccgcgatccccttcatcctcaacatggtgagctcctgggcccgcggccccaaagcaccgcccaacccttggggcgcgatcggcttggagtggctgctgccctctccgccaccggctgagaacttcgaagacgacgtgcccacggtgctcaataacccctatggctatggccttgatcagcctcaagtggctgatgagg

SEQ ID NO: 225041 - DNA, 676 bp, Unknown
  Bacterial polypeptide expressing nucleotide sequence isolated from the Sargasso Sea
gctgagctttctcgtggcggttccgtctgcgatcaaggtgttcaactggacggcaacgctctacaagggatccgtctcgtatctctcaccgatgctttatgccctaggtttcatcgggctgtttacgattggcggattgaccggtctgtttctcgcatcgctggcgacagacatccacttgcacgacacctacttcatcgtggcacacttccactacataatggtcggtggcgccgtaatggcgtatctcggtgcgattcattactggtggccgaaaatcacgggaaggctgtatccggaaggatgggcgaggttcgcggcgttgatggtgttcgtcgggttcaacctgacgttcttccctcagtttctgctcgggtatctcgggatgccaagacggtatcactcgtatccggacgagtttcaggttctgaacgtcctgtctacggcaggcgcatcgactctggccgtcggctacgcgattccgcttgtctacctgctctggtcgctgcgctacgggaaaatagcgggctcaaacccttggggtgcaaaggggttggagtggcaaacgacttcaccgcctccgacgttcaatttcgacgagacacccgctgtggtcgaggaagcctacgcatatggttacgcggacggacccgaggagaaccgtgggcatggctga

SEQ ID NO: 225042 - DNA, 898 bp, Unknown
  Bacterial polypeptide expressing nucleotide sequence isolated from the Sargasso Sea
aatggcgtacgtaccattagcggatcaagaccatgaaatggaaatgcatcatccgcatagttttgtggaaaaatatgtctggagccaagatcacaaggtaatagccatccagtacggcgggttagcagtgttcacaggcattgttggcctagtcctatcattactttttaggatgcaacttggcttcccagataccgcaacattcatagatccaaatttctattaccaagctgtaactatgcacggcatgattatggttgtttacctcttgactgcgcttttcttgggcggattcggtaattacatgattccactcatgtgcggtgcacgagacatggttttcccttttctaaacatgttgtctgtttgggtttttctgctttccgtaattattctcatggctagcttctttgtcagcggtggtccaacgggaggaggttggaccctctatcccccgcaaactaatttagctggtacgcctggtcacgatatgggcattgtcttgatgcttatttcactagcagtattcatcgtagcggcgacgatggggggattaaactacgtcgtaaccgtcttgcaatatcgttgccgcggcctgaccatgatgagactgccactcacggtatggggtatatttgtcgccactctgctggctctcttcgcattccctgcgcttttagtctctgcgattatgatgctttttgatatcctactaggaaccagttttttcatgccagctattattgagtccggcactcccttggaccacaatggcggctccccgattcttttccaacacctattttggtttttcggccaccctgaagtctacatcgttgcactccctgctttcgggctggtatccgatgtattgagcgtgcatgcgcgtaaaaatatt

SEQ ID NO: 225043 - DNA, 846 bp, Unknown
  Bacterial polypeptide expressing nucleotide sequence isolated from the Sargasso Sea
tatgcatggaatgatcatggtagtttattttttaactgctctatttctcggaggctttggaaattatctaattccactcatggtaggagcaagagatatggtttttccatatgtcaatatgcttagcttctggatgttctttgttgcagttacagtcttaatggcaagtttctttgttccaggtggaccaacaggagcgggatggaccttgtatcctccacaaactattttggagggaaccccaggatctggcatgggaatacttctaatgcttgtatctttatctttattcgtaattggtttcacaatgggtggactaaattatatgattacaattctgcaagctagaactagaggaatgactttaatgagaatgcctttaacagtatggggtatattcactgcaactgtactagcaatgttagcatttccagcactactagttagtgcaataatgatgacattagataaggttttacaaacaagtttctttatgccaacaatattgaaggcaggagaggttcttgaatatggtggaggaagcccaatacttttccaacacttgttttggttctttggacaccctgaagtttacattgttgctttacctgcatttggaatagtttcagacctgatatcagttcatgcaagaaaaaacatatttggttacaggatgatggtttgggcaatcgttggtattggaggtttaagtttctttgtatgggctcaccatatgtacgttagtggaatgaacccttggtttggatttttctttgcaacaacgacattaattattgccgttccaaccgctatgaaagtttataactggatacttactttgtggag

SEQ ID NO: 225044 - DNA, 882 bp, Unknown
  Bacterial polypeptide expressing nucleotide sequence isolated from the Sargasso Sea
gtacaatattttttaacagctgtcttcacgggtgttgtgggtttaattttatcctggttgatgagattgcaattaggttttcctggtttggcaggttttattaccgctgaacattattatcaattcgtcaccatgcatgggatgataatggttgtttattttttaacagcattgttcctcggaggttttggaaattacttaatcccattaatggttggtgcaagagatatggtctttccatatgtaaacatgttgagtttttggatgttctttgtagccgtagcagttttgatggctagcttttttgttccaggaggaccaactggtgcaggttggacattgtaccctcctcaaactattttagaaggaaccccaggacatggttggggaattttgttaatgttaatttctctgtcacttttcgtgattggtttcacaatgggtggtttaaattatatgatcactattcttcaagcaagaactagaggaatgacacttatgagaatgccgttaactgtatggggtatatttactgcaacagtcttagcaatgctagcatttccggcccttttagtcagttcaataatgatgacactagataagcttttaggaacaagtttctttatgcctactattttaaaagctggtgaagttctagaatatggtggtggaagtcctattttgtttcagcacttattctggttctttggacacccagaagtatacattgttgctcttccggcatttggtattgtttcggatttaatctcggttcatgcgagaaaaaatatttttggttatagaatgatggtatgggcaatagttggtataggtgccctaagtttttttgtttgggctcatcatatgtacgtaagtggaatg

SEQ ID NO: 225045 - DNA, 299 bp, Unknown
  Bacterial polypeptide expressing nucleotide sequence isolated from the Sargasso Sea
attgataaattgtcgcgaaatcttaagtgtaatttctataaaatcactttatatagttttaaagatgcaaaaaactttttttatattatcaacgttaattttcttaccttcaaaggtatttgcagatcaacctagagattggcaacttggatttcaagacgctgcctcacaatcaatgtatgaaatagtgagttttcataattcgattttacttccaataattatagcaataagtgtttttgtattatttttaatggcttatgcttgttttagatttagagagtctaggaatcctaatc

SEQ ID NO: 225046 - DNA, 127 bp, Unknown
  Bacterial polypeptide expressing nucleotide sequence isolated from the Sargasso Sea
tatgatctttttcatggtgatgcccgctatgataagtgggtttggaaactggtttgtgccaataatgattggtgcacctgacatggcatttccaagaatgaataatatttctttctggttattacca

SEQ ID NO: 225047 - DNA, 790 bp, Unknown
  Bacterial polypeptide expressing nucleotide sequence isolated from the Sargasso Sea
tatctaattccacttatggtaggagcaagagatatggttttcccatatgtcaatatgcttagcttctggatgttctttgttgcagttgcagttttaatggcaagtttctttgttccaggtggaccgacaggagcaggatggaccttgtatcctccacaaactattttagagggaactcctggatcaggtatgggaatacttctaatgcttatatctttgtctttatttgtaattggtttcacaatgggtggactgaactatatgattacaattctacaagctagaactagaggtatgactttaatgagaatgcctttaacagtttggggcatattcacagcaactgtactagcaatgttagcatttccagcactactagttagtgcaataatgatgacattggataaggttttacaaacaagtttctttatgccaacaatattaaaggcaggagaggttcttgaatatggtggaggaagcccaatactttttcaacacttgttttggttctttggacaccctgaagtttacattgttgcattgcctgcatttggaatagtttctgacttaatatctgttcatgcaagaaaaaacatatttggttatagaatgatggtttgggcaattgttggtattggaggtttaagtttcttcgtatgggctcaccatatgtacgttagtggaatgaatccttggtttggatttttctttgcaacaacgacattaattattgctgttccgaccgcaatgaaagtttataactggatacttactttatggagaggaaata

SEQ ID NO: 225048 - DNA, 802 bp, Unknown
  Bacterial polypeptide expressing nucleotide sequence isolated from the Sargasso Sea
gaggcaattggtgtatcaaagccttggcagatgggttttcgtgaagctgcatctcctgtaatggagcggattattatttttcatgattttttaatgattatttcggttgctatagcagtatttgtaaccctacttcttgcctacgtaatgattaaatttagagctagtaaaaatccgaatccaagtaaaagaacacataatacttttatagaagttttgtggacagtaatccctataataatcttagttgttatggttgttccatcttttcgccttctttactacatggataaaacttcagagcctgaaatgacattaaaagcaattggtcatcaatggtactggtcttatgaatatcctgatcatggcgattttgtttttgatgctgttatgattgaggaagatgaccttaaaccaggacaagaaagattactgcatacagataatgaggttgttcttcccattgacacaaatattaaaattttaattactgcagatgatgtgattcataattgggcgcttccaagttttggaataaaaatggatgctgtcccagggcaattaaatgaaacctgggtaaatataactaaaccaggtctttattatggaatgtgttctgaactgtgtggcgtaagacattcctttatgcccataactattcgtgcggtaagtaaagaaaaatttgctaattgggtagagaaagcaaaaattgagtttgctaaaaatgatacctatccaataaacaaagatacagatgatattactgaaattgtgtctttaacatctactatgaataaataag

SEQ ID NO: 225049 - DNA, 883 bp, Unknown
  Bacterial polypeptide expressing nucleotide sequence isolated from the Sargasso Sea
tttttatttgatcggaggaactttagcgagcgctataagaattgaactggctagtccaatgtctgattttatgccaagagatgtttataaccaagttttaaccttacacggaacaataatgatattcctttggatagtgcctgtagttaacggtgcttttggaaattatttaattccattttatgtgggtgcaagagatatggcattcccaagattaaacgccgtagctttttggttaattcctccttcgggtttgatgctagtagcaagctattttgttgagggtgctgctcaggctggatggacggcttatccacctttgagtataacgactcctcaatcgggacaaataatttggattctgagtgttctattgctcggaggcagttctatctttggtgggataaactttattgccaccattatcaaattaagaaggcccggattaaagctcatgaaattgccaatgtattgttgggcaatgcttgggacaagtctattagttgttttatcaactcctgttttagcagggaccttaattctactcagctttgatatcattgctaaaacaggatttttcaatcctgttttaggtggcaatgtcgtagtttatcagcatttattttggttttattctcatccagcagtttacattatggtccttcctgcctttggtttagttagtgaaatacttcccgtacatgctagaaaaccactttttggatatacaacaatggttttttcaataatggggatagtagttttaggtttagttgtttgggcgcatcacatgtttactagtggaacccccccttggatgagattgttctttactatagcgacagcatttattgctgttccaaccaggtataaaatttttcaa

SEQ ID NO: 225050 - DNA, 343 bp, Unknown
  Bacterial polypeptide expressing nucleotide sequence isolated from the Sargasso Sea
cattacatttctggttaactttcattggtgtcatttggtatttttcccacaccactttttaggtcttgctggaatgccaagaagatacgctgactaccctgatgcttttgcaggatggaattatatatcatcaataggatcatatatttcagttctgggattagtggtattttttgctaatttaatttatgcattttcaaagaaaaaagcagcagcccaaaacccttggggtgagggggctacaactttagaatggactgtgccatcaccaccaaatttccatacctttgaggaattaccgaaatttgaagacgatgaaagtattgaaaaatctacaagttaa

SEQ ID NO: 225051 - DNA, 847 bp, Unknown
  Bacterial polypeptide expressing nucleotide sequence isolated from the Sargasso Sea
attactggtaggtgcattaatgatgagtttagacaatgtgcttggaacaagctttttcatgccaactatattgaaagcaggagaagttttagaatatggcggaggtagtccaattcttttccaacatttattttggttttttggacatccagaggtttatatcgttgcactgccagcttttggaatagtttcggatttaatttcagttcatgcaagaaaaaatatttttggatacagaatgatggtttgggccattgttggaataggagctttaagcttctttgtttgggcacaccacatgtacgtgagtggtatgaatccttggtttggattcttttttgcaactacaactctcattattgcagtgccgaccgcaatgaaagtatataactggatactaactttatggagaggaaatattagaattaatactgtgatgttatggtgtcttggatttatagtaacttttgtaaatggaggtataactggaattttcctaggaaatgtttctgttgatgttccactatctgatacatattttgtaattgctcatttccatatggttatgggaattgcacctttaatggtaattatgggagctgtttaccattggtttcctttggtagcaggaagaatgcttgatgaaactttaggtaaatggcatttttggattacatttttaggagcatactcaatttattttccaatgcattacttaggatttatcggagtaccaagaagatatttcgaaatgtacgatagtccatacatgacctctgcagttggaatgaatgaatttataagtttagcagcttttgtagttggagccgcacaatttattttaatt

SEQ ID NO: 225052 - DNA, 683 bp, Unknown
  Bacterial polypeptide expressing nucleotide sequence isolated from the Sargasso Sea
agtaggtgcattaatgatgagtttagacaatgtacttggaacaagttttttcatgccaacaatattaaaagcaggagaagttttagagtatggtggtggaagcccaattctttttcaacatttattttggttctttggacaccctgaagtttatattgttgcactacctgcatttggaataatttcagatttaatttctgttcacgctagaaaaaatatatttggatatagaatgatggtttgggcaatagttggtataggtgcactaagcttttttgtatgggcacatcatatgtatgttagtggaatgaatccttggttcggattcttttttgcaaccaccactcttataatagccgtccctacagcaatgaaagtttataactggatattaacgctttggagaggaaatattagacttaatacagttatgctatggtgtttaggttttattgttacttttgttaacggtggaattacaggaattttcttaggaaatgttagtgtagatgttccattgtcagatacttactttgttatcgcgcactttcatatggtaatgggtattgcaccacttatggtaattatgggagctgtgtatcattggtttcctttggtagcaggaagattcttggatgaaaaattaggcaaatggcatttctggttaacttttttaggtgctt

SEQ ID NO: 225053 - DNA, 532 bp, Unknown
  Bacterial polypeptide expressing nucleotide sequence isolated from the Sargasso Sea
gcaacatgtgatggttttttctttaaagaaaaagaagttgcagtggttggtggtgggaacgctgccgtagaagaagcaatgtttttaactaaatttgcctctaaagtccgtcttatacatagaagaaatgaattaagagctgaaaaattattacaagaaaaacttaaagctaataaaaaaatagaaattatatgggatagtatagtagaggaggtaatgggtacaaatgaacctaaaggtgtaaatggaattaaaataaaaaatgtaaaaactaataaagcttctgagattaaagttgatggtttgtttatagctataggtcatgacccagctacagctttatttaaagatcaattaaaaatggataaagagggttatttgatcactaaaccagactcaactattacaaacgttccaggagtctttgctgctggagatgttaaagataaaatttttagacaagcagtaactgcagcaggtatgggctgtatggcggctttagaagctgaaaaacatttgtcacacaaataaa

SEQ ID NO: 225054 - DNA, 696 bp, Unknown
  Bacterial polypeptide expressing nucleotide sequence isolated from the Sargasso Sea
ccaaccagataataattttctaagtgcggctgaatacaatgcaatgttcaccatgcatgggaccacaatggttttcctagcaataatgccaattagtgctgcgttcttcaattatctcctccctcttcaaataggagctagggatgttgctttcccaagattgaatgctcttagtttctggatttgggtttttggaggacttttcttgtactcaacattcgtatttggaacagcaggagcgcctgaaggaggatacctagctgaggaagttggatggcttggcaatgctccaaatggtggttggtttggatatcaacctaatgcaggttttaaatattcaccaggaactgcaatggactattgggcaatcggcttacaaatacttggaatttcttctcttgtatcagcatttaatttcatcgtaacaatattaaatatgaggactcaaggaatgagattgatgagaatgcctgtatttacctggatgacttttgctgtggcttttcttcttgccttttcattaccaataattgcaattgctctcttttacgtaacttttgatagacaatttggtactactttcttcttgactgaaggtggaggagatcctgttttatggcagcatttattctggctatttggtcaccccgaagtatatattcttattcttcctgcttttggaattgtttctgaaat

SEQ ID NO: 225055 - DNA, 904 bp, Unknown
  Bacterial polypeptide expressing nucleotide sequence isolated from the Sargasso Sea
actttatggttggtttcaatggcattttttattgcatcatctttacttgctgcattaaactatattgttactgttttaaatttaaggacaaagggaatgacaatgacgaggcttcctctaactgtttgggcatttttagttacagcaattattggtgttgtgtcttttccagtacttttatctgcagcattattattaattatggacagaagttttggaacttcttttttcctctcagatatttttatacaaggtgaggtgctccactatcaaggtggttctccagttttatttgagcaccttttttggttccttggacacccagaggtatacattgtacttctacctgctcttggaattgcatctgaagtaattgcaacaaatgctcgtaagccaatttttggatatagagcaatggtaggatcaatccttgctattgcatttttatcaacaatagtttggggtcatcacatgtttgtgactggaatgaatcctttcttaggatcggtattcacattcacaactttattaattgctattccatctgctgttaaggcatttaactacataactacaatatggaaaggtaatattcaattcaaccctgcaatgttatttgctattggactcgtttctacatttataacaggtggtctaactggaattattcttggagatagtgcgctggatataaacttacatgatacatattttgttgtagcacactttcatttagtaatgggtatttctgctctttatggtttgtttgccggtgtataccattggtatccaagaatgtttggtagaatgatgaataagacacttggatatgttcatttttggattacagcaattagtgcctatggagtattcttcccaatgcattttattggtatggctggtc

SEQ ID NO: 225056 - DNA, 820 bp, Unknown
  Bacterial polypeptide expressing nucleotide sequence isolated from the Sargasso Sea
tttggatgttttttgttgcagttggtgttttaatggcaagctttttgttccaggtggaccaacaggttcaggttggacactttatcctccacaagcaattttagaaggaacaccaggatcaggcatgggaataatattaatgcttgtatctttagcactgtttgtaattggatttacaatgggtggactaaattatttaattactgttttacaagcaagaactagaggaatgacattaatgagaatgccgctaacagtttgggggatttttactgcaacggttttggcaatgttagcttttcctgcactgttagtaagtgcaataatgatgactctagacaaaatacttggaacaagtttttttatgccaacaattttacaagcaggagaagtgcttgattatagcgggggaagtcctattctttttcagcatttattctggttttttggccatccagaggtttatatagtagctcttcctgcatttggaatagtttcagatttaatttcagttcattcgagaaaaaacatttttggttatagaatgatggtatgggcgattgttggtataggagccttgagcttcttcgtttgggcacaccatatgtatgttagtggaatgaatccgtggtttggatttttctttgcaacaactacactaataatcgcagttccaacagcaatgaaagtatacaattggattttaactttatggagaggaaacattaggattaacacagtaatgttatggtgcctaggctttatagtaacctttgtaaatggaggtataacaggaattttcttaggaaatgttacagtt

SEQ ID NO: 225057 - DNA, 563 bp, Unknown
  Bacterial polypeptide expressing nucleotide sequence isolated from the Sargasso Sea
aggccttgctggagaattattgtggccagaatttgaggcaacatggccgcctatgataactcctgagcaaagcattatgggcaatcaggcagttacaaaaggacctgatgaatctatgtatctacatggcataagtggaataattaagtggcttcctttatggaatacaattgttcttcttacttcaagtggaacagttcactttgcacatattgcacttaaagaaaataatagaaaaagatttaacttttggttaggaattactgtgtgcttagcatttatttttgtaattcttcaagcagcagaatactatgaggcctatgctcatctgggattaactctaaattctggagtatatgggacaactttttttatgctaactggatttcacggaatgcatgtcttgatcggtgggatctttcttttaactcagctatttaggtcaacagggttcaaacattttacagaaaaagaacattttggctttgaagcagcttcttggtattggcattttgttgatgttgtctgggtttgcttgtttttatttgtttatattatttaac

SEQ ID NO: 225058 - DNA, 911 bp, Unknown
  Bacterial polypeptide expressing nucleotide sequence isolated from the Sargasso Sea
taataaaatagaaactaaagcagcagactcttcttcaggaagttacgttcctccagcagaaacaattccagcaaaagaaagtccagatcaagaattatatcatgctaaaagtttttggaccaaatgggttttttgccaagatgctaaagttattggcattcaatatgctttaactgcaactgcaattggttttatcggtttaattttgtcatggggaatgagattacaactaggttttcctgaaacattttcttttcttggtcccgcaacatattatcaatcagtaactatgcatggtatgattatggttatttatcttcttaccgcattatttttaggaggattcggtaattatcttattccgttaatggtgggagctcgtgatatggtttttccatacgtaaatatggttagtttttggatgtttttaatcgcagttttgattttaattgctagcttctttgtaccagggggacctacaggagcaggttggactttatatcctccacaagcaatattgccaggtacaccaggatctgaaatgggaatagtacttatgttagtatctttatcattgtttgtaatcggctttacaatgggtggattaaattatgtaattacaatacttcaagccagaactcgtggcatgaccctaatgcgtatgccattaactatttggggtatatttacagcaacagttctagcacttttagcttttccagcactttttgttgcttgtataatgatgacgcttgataatttattaggaacaagttttttcatgccagaaatattttcaatgggtgaaaaattagattatgcaggtggaagcccaattttatttcagcatttattttggttttttggacatccagaagtttacatagtagctttgccagcatttggtattg

SEQ ID NO: 225059 - DNA, 765 bp, Unknown
  Bacterial polypeptide expressing nucleotide sequence isolated from the Sargasso Sea
tattttggttctttggccatccagaagtttatattgtggcattaccagcgtttggaatagtttctgatttaatttcagtacattctagaaaaaatatatttggttacagaatgatggtttgggcaattgttgcaattggagctttaagtttctttgtttgggctcaccacatgtatgtaagtggaatgaatccatggtttggattcttttttgcaacaacgactttaattatcgctgtcccaacagcaatgaaagtttacaattggattttaactttgtggagaggaaatattagaattaatacagtaatgctttggtgcttaggatttatagtaacatttgttaacggaggtatcactggtatatttttaggaaatgtttctgttgatgtacctttatcagatacttactttgtagttgcccactttcatatggttatgggaattgctccacttatggttataatgggtgctgtatatcattggtttccattagttgctggaagaatactagatgaaggattgggtaaatggcacttctggataacttttttaggcgcttattcaatttatttcccaatgcactatttaggatttataggagttcctagaagatattttgaaatgtatgatagtccatatatgacttctggagttggtttgaatgagtttataagtaaggcagcgtttattgttggagctgcacagtttatactaatatataatattattaagactttaaaaactggaaaagctcgctggtaaa

SEQ ID NO: 225060 - DNA, 747 bp, Unknown
  Bacterial polypeptide expressing nucleotide sequence isolated from the Sargasso Sea
tcacaagcggcacgccaccgtggatgcgcctcttcttcacaatcgccaccgccttcatcgccgttcccactggcatcaaattcttcaactggctggcaacgctgtgggggggaaggatcaatctcaacagcgccatgcttttctcctgcggcttcatcgtgaacttcgtgttgggcggaatcaccggagtcgccctggcccaggttcccttcgacatccacgtgcacgacacctacttcgtggttgctcacttccactacatcgtcttcggtgggtcggtgttcgtgatctttgcctccgtttaccactggtatccgaaattcaccggacgcctgctcaatgaagaccttgggcgcctgcactgcgcactgaccttcatcggcttcaatctctgcttcggaccgcagcactggctcggactcaacggcatgccgcgtcgtgtcgccgaatatgacccgcaattcaccctgatcaaccagatcagctcggtgggagcgctgttgatggccatcagcacccttcccttcctctggaatgtgatccgcagcgccatcgccggtccggttgccggagacaacccctggaacgctctcacccccgagtggctcaccagttccccgccaccggtcgagaactggatcggggaagcacccctggtggaggagccgtacggctacggagtccccgccgagcaacttgacctggccgccacaaccggccgtgacctctggagcagcggcaaatgac

SEQ ID NO: 225061 - DNA, 313 bp, Unknown
  Bacterial polypeptide expressing nucleotide sequence isolated from the Sargasso Sea
atgagttacggaaaagcagttagtcacgaggatcacgatcacagacctggttttattaagagatggtttttctcaactaatcataaggacataggaactttatatataatttttgctattttagcaggtttagtaggtggttatttctctctaataatgagagccgagctcgcagctccaggtttagatgttgtagcagatggtcaagcttggaatgttatcataaccgctcatggactgctaatggtcttttttgttgtaatgcctgccttgatcggtggatttggcaactggtttgttccattaatgattg

SEQ ID NO: 225062 - DNA, 276 bp, Unknown
  Bacterial polypeptide expressing nucleotide sequence isolated from the Sargasso Sea
tcgtggttgttcaaggtattgagtactacgaggcttatgcacattatggacttacattaaacacaggcatctacggaacaacatttttcatgctgacaggtttccatggtttccatgtttgcttaggggcaattattcttacaataatgctttttagaagcctcaaagggcattttactgctgatgatcatttcggatttgaagccggatcgtggtattggcactttgtagacgttgtttggattctcttagttgcttttgtatacgtaatgtaat

SEQ ID NO: 225063 - DNA, 844 bp, Unknown
  Bacterial polypeptide expressing nucleotide sequence isolated from the Sargasso Sea
atggatagaagttttggaacttcttttttcctttcagatatctttatacaaggagaggtactccattatcaaggtggttctccggttttatttgagcaccttttttggttccttggacacccggaagtttacattgtacttttacctgctctgggaattgcatctgaagtaatcgcaacaaatgctcgtaagccaatttttggatatagagcaatggtaggatcaatccttgctattgcatttttatcaacaatagtttggggtcatcacatgtttgtaaccggaatgaatcctttcctaggatcggtattcacatttacaactttattaattgctatcccatctgccgttaaagcatttaattacataactacgatatggaaaggtaatattcaattcaatcccgcaatgttatttgctattggactcgtttctacattcataacaggtggtttaactggaattattcttggagatagtgctttggatatcaacttacatgatacatattttgttgtagcacactttcatctagtaatgggtatttctgctctttatggtttatttgctggtgtataccattggtatccaagaatgtttggtagaatgatgaataagacacttggatacgttcatttttggattactgcaattagtgcatatggagtattctttccaatgcattttattggtatggctggtcttcctagaagatattatacaaatacgaattttccatattttgatgatgttgcaaacattaatgtcataattacactgttcgcacttttagcaggtgctgcacaaattatttttctatataattttataagccagtatgtat

SEQ ID NO: 225064 - DNA, 387 bp, Unknown
  Bacterial polypeptide expressing nucleotide sequence isolated from the Sargasso Sea
ttggaaaaatgtcagggtatcaatattcagagtggatgggcaaacttcacttctggttaacctttataggtgtgaatttaattttctttcctcaacactttttaggtttagcaggaatgccaagaaggtacgcagattatccagatgcatttgctgactggaactacatttcttcagtcggttcatatatatctgtagctggtgtagtagtttttctaataaatttattatactcatttataactaagaaagcctcatcatctaatccatggggagaaggagcaacaacacttgagtggacagtgccatcacctccaaatttccacacttttgatgaactaccaaaagtagatgtttacgaaggagcagagaaatctaaatcttaat

SEQ ID NO: 225065 - DNA, 925 bp, Unknown
  Bacterial polypeptide expressing nucleotide sequence isolated from the Sargasso Sea
ttgggtggctttggtaatatcttatttccactatgggtaggcgctagagatatggtttttccatatgtaaatatggttagcttctggatgtttcttgttgcagttttagttttgattgcaagtttctttgtacctggaggaccaacaggagcaggttggacgttatatcctccgcaagcaatattacctggaacaccaggatctgaaatgggaatagtacttatgttagtttctttatcattgtttgttattggatttacaatgggtggattaaattacgtaataacaatacttcaatctagaactcgtggcatgactttaatgcgtatgccattaactatttggggtatattcacggctacagttcttgcacttttagcttttccagcactttttgtagcgtgcataatgatgacacttgataatttattaggaacaagtttctttatgccagaaatttttacaatgggagaaaaattggattatgctggcggcagtcccattttgtttcagcatctattttggttctttggccatccagaagtttatatagtagccttacctgcatttggaattgtatctgatttaatttcagtacatgcaaggaaaaatgtttttggttacagaatgatggtctgggccatcgtaataattggagctcttagctttatagtttgggcgcaccacatgtatgttagtggaatgaacccatggtttggtttcttttttgcgacaaccacattgattattgcagtccccacggcaattaaagtttataattgggtactaactctttggagaggaaatatccatcttacgattccaatgttattttctttaggttttatagttacctttgttaacggtggaatcacagggttgtttttaggaaatgttattattgatgttcctctttcagatactt

SEQ ID NO: 225066 - DNA, 838 bp, Unknown
  Bacterial polypeptide expressing nucleotide sequence isolated from the Sargasso Sea
atggatagatcttttggaacaagtttttatttatctgatatttatattgctggagaagcattagcgaatgagggtggtagtgcaattttatttcaacatcttttttggtttctaggtcatcctgaagtttatattgttattcttcctgcacttgggattgcttcagaggttattgctacttgttctagaaaaccaatttttggatataaatttatggtttattcaattcttgctataggagggctttcttttgtagtttgggcgcatcatatgtttatttctggaatgaatccttttcttggttcagtttttacggtattgactctaataattgctgttccatcagcaataaaagcatttaattatattgcaactctttggcgtggtaatataatttttacacctgcaatgttattttccataggtcttgtttctacttttatttcaggtggtgttactggaatatttttaggaaattctgctttagatattaatttgcatgatacatattttgtagtagcacatttccatattgttatgggtgtctctgcattttttggtttgtttgcaggagtatatcattggttcccaaagatgtttggtagaatgatgaacaatggtttaggatatattcatttttggttaacatttattggttcttatttagtctttttcccacttcattatataggaatggcaggttttccaaggagatattactccttttcaacttttcaagctggaaatattgaatcatttgttgacttaaatgtatttgtctcttatgcagcactaattacttttgcggctcaatttattttattatttaattttttct

SEQ ID NO: 225067 - DNA, 168 bp, Unknown
  Bacterial polypeptide expressing nucleotide sequence isolated from the Sargasso Sea
ttttccttgcgatttgtatgctacgagcaatgcgtggacactttaccaaggatcagcaccttggctttgaagctgcagcttggtactggcattttgtggacgtagtatggctattcttgtttgcagctatttatgtctggggaagcgttggcgcgacaattcactaaa

SEQ ID NO: 225068 - DNA, 509 bp, Unknown
  Bacterial polypeptide expressing nucleotide sequence isolated from the Sargasso Sea
aatgtcagcagaaaaaaaacacgattaccacttagttgatccaagtccctggccaatctatacatcttttgcatgcttagtattagctataggtgcaattttttatatgcataacggtatttcatggggaatgtatcttggtttagctttgttaatttatggtgcatatatgtggtttagagatgtagtaatcgaagctgaacatcaaggtcatcacactcctgttgttcaaattcatcatagatatggaatgactttatttattgcttcagaggtaatgttctttgttgcgtggttctgggcttattttgacataagcttgtttccaaatgaatttgttggaaatgtatggccaccaaaagatatcgaaacatttgatccttgggacattcctttaataaatactttagttttattattgtcaggaacaacagttacttgggctcatcacgctttattagaagatgatagaaaaggctttatacaaggtttaacactaactgttattc

SEQ ID NO: 225069 - DNA, 820 bp, Unknown
  Bacterial polypeptide expressing nucleotide sequence isolated from the Sargasso Sea
ggtggtttgaactatttaattacagttttgcaagctagaacaagaggaatgacattgatgagaatgcccttaacagtatggggtattttcacagcaactgttttagctatgttagcattccctgctttattggttggttcgctaatgatgatgttagataaattactaggaacaagttttttcatgcctacaattttaaaagcgggtgaagttttagaatacggcggaggaagtcctattctttttcagcacttattctggttttttggacatcccgaggtttatattgttgctttacctgcatttggaataatttcagatttaatttctgttcactctagaaaaaatatatttggctatagaatgatggtttgggcaatagttggaataggagctttaagcttttttgtttgggcacaccatatgtatgtaagtggaatgaatccttggtttggctttttcttcgcaaccacaacacttatcattgcagtcccaacagcgatgaaagtttataattggattttaacactttggagaggaaacattagaatgaatacagtaatgttatggtgtcttggttttatagtcacttttgtaaatggaggtataacaggtatttttttaggcaacgtttcagttgatgttccattgtctgacacatatttcgtaattgctcactttcatatggtgatgggtatagcaccattgatggtaattatgggcgctgtttatcactggtttcctttagtaactggaaaatttctaagtgaaaaattaggaaaatggcatttctggacaacttttttaggagcttattcaa

SEQ ID NO: 225070 - DNA, 385 bp, Unknown
  Bacterial polypeptide expressing nucleotide sequence isolated from the Sargasso Sea
gctagcgcagatcttggtgttccatgacacctacttcgtagtcgcccactttcactacgttatggcgattgcggcgattctggccatgttcgctggctacttctattggatcggaaagatgagcggccgcaagtatccgcgcggcatggccaagctgcagttctgggtcttctttatcggtgtcaatgtgctgttcttccctcagcatttctccggttttgccggcatgccgcggcgtataccggattatccggcaccttacgaaggctggaattatgtgtcctcattaggagctctgatcacaatgattgggaccatccttttcttcatcgtagtctggcggacgttctatggtgagagggcggaagccaatgagtgggggtga

SEQ ID NO: 225071 - DNA, 350 bp, Unknown
  Bacterial polypeptide expressing nucleotide sequence isolated from the Sargasso Sea
aatgtcagttgaaaaaaaacatgattaccatttagtagacccaagtccttggcctatttatgtttcattttcatgtttagtattggcattaggatctgtttattatcttcatacagatgtttcatggggaatgtatcttggttttgcgctgttaatttatggagcctatatgtggtttagggatgttgtaatagaagcagaacatcagggacatcatacacctgtagttcaaattcatcacagatatggaatgacactttttattgcctcagaggtaatgtttttcgttgcatggttttgggcatattttgatgtaagtttatttcctaatgaatttgttggaaacgttt

SEQ ID NO: 225072 - DNA, 916 bp, Unknown
  Bacterial polypeptide expressing nucleotide sequence isolated from the Sargasso Sea
acagccttatttctaggtggttttggtaattatttaattccattaatggtaggagctagagacatggtctttccttacgttaatatgataagtttttggatgttctttattgcagtagcagttttgatggcaagcttctttgtaccgggaggaccaactggatcaggatggaccttgtatccaccacaagcaattttagagggaactccaggatctggtatgggaatacttttaatgcttatttctttatcactttttgtaattggttttacaatgggaggattaaattatttaattacagttcttcaagcaagaacaagaggaatgactttaatgagaatgccactaactgtttggggtatattcacagcaactgtattagctatgcttgcatttccagcacttttggtaagctcaataatgatgactttagataaagtacttgaaacaagcttctttatgccaacaattataaaagctggtgaagttttaggatacggtggtggaagtccaattctttttcaacacttattttggttttttggtcatccagaggtttatattgttgcgctgccagcatttggaatagtatcggatttaatatcagtacattcaagaaaaaatatatttggatacagaatgatggtttgggcaattgtagcgattggtgctttaagcttcttcgtttgggctcaccacatgtatgtaagtggaatgaatccatggtttggtttcttttttgctacaacaactttaattattgctgttccaacagctatgaaagtttacaattggattttaactttatggagaggaaatattagaattaatactgtaatgctatggtgcttaggatttatagtgacatttgttaacgaaggtatcactggtatatttttaggaaacagtttctgtt

SEQ ID NO: 225073 - DNA, 622 bp, Unknown
  Bacterial polypeptide expressing nucleotide sequence isolated from the Sargasso Sea
tttaatttcatcgtaacaatattaaatatgagaactcaaggaatgaggttgatgagaatgcctgtctttacctggatgacttttgctgtggcttttcttcttgccttttcattaccaataattgcaattgctctcttttacgtaacttttgatagacaatttggcactactttctttttaactgaaggtggaggagatcctgttttatggcaacatttattctggctatttggtcaccccgaagtatatattcttattcttcctgcttttggaattgtttctgaaatactacctacattttcaaggaagcctctcttcggttatccagcgatagtttttgcaggttttggtattgcatttatcggattcggagtctgggcacaccatatgtttgcttcagcaatcagccccgttgcgcaagctgggtttggtatctcaactatgattattgctgttcccacaggggtaaaaatatttaattggttaggaacgatatggggaggtaagttaaatctaaaaacccctatgttgtttgctcttggttttataggaatgtttgttattggtggtttaagtggagtaacccactcggttgttccagctgatacacaacaaactgata

SEQ ID NO: 225074 - DNA, 550 bp, Unknown
  Bacterial polypeptide expressing nucleotide sequence isolated from the Sargasso Sea
tatgagcggtgagcaaaaacatcaatatcatttagttgagcccagcccttggcctgcacttggtgcagctgctgggtttacgttagttttaggactaaccttatttatgcatgaatacccatacagtatttacgtaatgattgcaggtgctttaatggttctgctcacaatgtttttatggtggagagatgttgtaagggaagcagaatatcaaggtcatcacacaccaattgttcaaattggtatgagatatggtatgattttctttatttgttctgaggttatgttttttgttgcatttttctgggctttttttgattctagtttatatcctgacactggtgtatggcctccagaaggtattgaaactttcgatccatttgatttaccacttataaatactttaatattgttattatctggatgtacagttacttggtctcatcatgcacttcaacacaataatagaaaagattttataattggactaatcctaacgattattcttggtgctctttttacagctcttcaagcttacgaatatgatcat

SEQ ID NO: 225075 - DNA, 889 bp, Unknown
  Bacterial polypeptide expressing nucleotide sequence isolated from the Sargasso Sea
ttcccatatgtaaacatggttagtttctgggtatttttcttagccgtaataattttagcctcaagttattttgtaccaggtggtcctactggtgctggatggacattatatcctcctcaggccattacatctggaactccaggtggtgatggtttgggaatagttctaatgttagtttccttagcagtatttgtcattggtttcacaatgggtggtctaaattatgtgattactgtcttgcaggcaagaacacgagggatgacactaatgagactccccttaactgtatggggtatttttacagcaactgttttggctttatttgcttttcccgctttatttgttgccggcataatgatgacacttgataatatgcttggcactagtttttttatgcctgcaattattcaatttggtgaaaaacttactcatgagggaggaagcccaatattattccaacatcttttttggttttttggtcatcctgaagtttatatagttgctctacctgcatttggtattgtttcagatttaatttctgttcatgcaagaaagaatatttttggttaccgtatgatggtatgggcaatagtcattattggaggtctaagttttattgtttgggcacaccatatgtatgtagcaggtatgaatccatggtttggatttttctttgccacaacaactctaattattgccgttccaactgcaataaaagtttataactgggttcttactttatggagaggaaatattaaactgactctcccaatgttattctcaatagcctttattattacttttgttaatggaggtttaactggattgtttttaggaaatgttgctgttgatgtgccattgtcagatacttattttgtagtagctcatt

SEQ ID NO: 225076 - DNA, 472 bp, Unknown
  Bacterial polypeptide expressing nucleotide sequence isolated from the Sargasso Sea
tatgtcaggacaagagcaaaaacacgattatcacttagtggatccaagtccttggccaatttatacttcttttgcaacattagtaactgcaattggtacagtttattattttcatagcaaagtaatgtgggcaatgattgtaggtttcgctttactgatttatggagcatatatgtggtttagagatgtagttatcgaggctgaacatcaaggtcatcacacaccagttgtacaaattcatcatagatatggaatgacattatttattgcttctgaggtaatgttttttgtggcttggttctgggcatattttgatgccagcctatttccttcagaatttgttggaaatgtctggccgcctaaagacatagaaacttttgatccatgggacataccactaattaatactttagttttgcttttatcaggcacaacagttacctgggcacatcatgcattgcttgaagatgat

SEQ ID NO: 225077 - DNA, 848 bp, Unknown
  Bacterial polypeptide expressing nucleotide sequence isolated from the Sargasso Sea
cttgttttggttttttggacatcctgaagtttatattgttgcactgcctgcatttggaataatttcagatttaatctctgtccactctagaaaaaatatttttggttatagaatgatggtttgggctattgttgtaattggtgctttaagcttttttgtttgggcacaccatatgtatgttagtggtatgaacccttggtttgggtttttctttgctacaacgacactaattattgcagtgccaaccgcaatgaaagtttacaattggattttaactctttggaggggaaatatcagaatgaatactgtaatgttatggtgtcttggttttatagtcacttttgtcaatgggggtatcacaggaattttcttaggaaatgttactgtcgatgttccgttatcagatacttattttgttattgctcactttcatatggttatgggaattgctccactgatggtgattatgggcgctgtttatcattggtttcctctagttacaggaaaatttctaagtgagaaactagggaaatggcatttctggttaacttttttaggagcttattcaatctattttccaatgcattatctaggattcattggagttccaagaagatattttgaaatgtatgatagtccatacatgacatcagctgttggaatgaatgagtttataagtacggcagcttttatagttggtgcagcacaatttattttaatatttaatattatcaaaagtttgaaaactggaaaatcagcaggcaaaaatccttggcaaagcaattctttggaatggctcacacctacagttcctcctgaacatggaaattggggagaaagacttcctg

SEQ ID NO: 225078 - DNA, 534 bp, Unknown
  Bacterial polypeptide expressing nucleotide sequence isolated from the Sargasso Sea
cccgttttgaagccaattgcccattgatgattactccggatcaggcagtatttgcaggacctgaaaaagatatgtctttgagtactgcatatgcggctggtggtttaggtggcgttttgggttggttgccgctatggaatacagtcctattattaacttcaagcttaacagttcatatagcccatttaggacttaaaaatggtaacaggaaacaattcaatctttggttgggagctacattagtccttggatatgctttcgtagtagtccagggtgttgagtactatgaggcttacacacattatggcttaacccttcagacaggtatctacggaacaactttctttatgttgacgggttttcatggtttccatgtttgcttgggagccatcattcttacaatcatgctatttagaagtctcaaaggacactttagtgcagatgatcatttcggttttgaagccggatcatggtattggcactttgttgatgttgtttgggtctgtttagtagcttttgtatacgtaatgtaac

SEQ ID NO: 225079 - DNA, 100 bp, Unknown
  Bacterial polypeptide expressing nucleotide sequence isolated from the Sargasso Sea
actgataaagaacactttcggttttgaagcggcctcatggtattggcattttgttgatgttgtttgggtttgtctcttcttgttcgtttatattctttaa

SEQ ID NO: 225080 - DNA, 500 bp, Unknown
  Bacterial polypeptide expressing nucleotide sequence isolated from the Sargasso Sea
ctttttgtttggagttggttaataacagcttatttgctaattgaagtgatgcctgttttagcaggtgttgtaaccatgatgttgatggatataaattttggtacaagtttcttcaatgctgccggcggtggtgatccagttttatttcaacatgtcttttggttctttggtcatccagaagtctatatcatgatcttaccagctttcggtattgtttctcatatcattgagaccttctctagaaagccaatttttggatattcttctatggtttacgctatggcttcaataaccattttatctttcgttgtctgggctcaccatatgtttacagtcggtatgcctctagcaggagagttattcttcatgtactcaacaatgctaattgctattcctaccggtgtgaaagttttcaattgggttgcaacgatgtttagaggctcaattaccttcgagacgccaatgttattctccattgcttttgtggctttatttacaat

SEQ ID NO: 225081 - DNA, 659 bp, Unknown
  Bacterial polypeptide expressing nucleotide sequence isolated from the Sargasso Sea
gaccgcaatacaatttttcgttctaattctcattatttatgttgtcattaggtttagaaaaagtgtaaatccaaatccttcaaaaagaactcacaatgccctaatagaaattttatggacaggtattccagtaattattttaattgtaatggccataccatcttttaaacttttgtatcagcaagatgtgattcctaaagctgacatgacagtaaaagtaatagggcatcaatggtattgggaatatcaatatcctgagcaagatgatatttcatttgaaagctatatgattcctgatgaggatttgcaagaaggagacgttagactattaactgttgataataaattagtgcttccaattaataaaaatattcatgttttagtaactgcaggagacgttctgcatagtttcgctatgccctctttgggtgttaaaaaagatgctgttcctggtagacttaatgaaacatggatgaatattgaaaaacctggcatatatagaggtcagtgttcagagttatgtggaacaggacatggatatatgcccattgtaatagaagctgtttctcaagaggatttcatcgcatgggttactgaaacaaaaacaaaacttgcaatgaatgataaaaatacttttgctaaagctaacacggaatagg

SEQ ID NO: 225082 - DNA, 337 bp, Unknown
  Bacterial polypeptide expressing nucleotide sequence isolated from the Sargasso Sea
atgccaaataaaccttcatccaccggacaaaaacatccttatcatttagttgatccaagccctttaccttttttatcttctatcgctggattaggtatggcagctggtcttgttttctatatgcattatgaaactacttggctgttaatcctaggcactattggattacttacaattatgtttttatggtggagagatgttattaaagagtcaacaattcaaaaagttcacacacccgtagttgagctaggtttgagatatggaatggcattatttattgcatcagaagtaatgttttttgtagcttttttttgggctttttttgatgcaagtttaa

SEQ ID NO: 225083 - DNA, 802 bp, Unknown
  Bacterial polypeptide expressing nucleotide sequence isolated from the Sargasso Sea
tatgcgtatttttattttattttttttaacgtttttcgctttttcatccttagctaacaccccttatgattggcagcttggttttcaggaaccggcaagccctgttatgagaagtgtattagagcttcatgattttgtattgattatgatgacagcaataacaatttttgttttattccttattatatatgttgttataagatttagaaaagctgcaaatccaaatccttcaaaaagaacccataacgctttaatagaaattttatggacaggtattccagtaattattttaatagtaatggcaataccatcatttaagcttttgtatcagcaagatgttattcctgaagccgacatgactgttaaggtgataggacatcaatggtattgggaatatcaatatcccgagcaagataatatttcatttgaaagttatatgatcccagatgaagaattgaatgaggatgacattcgactattaacagtagataataaattagtacttccaattaataaaaatattcatgttttagtaaccgcaggagacgttttacatagttttgctatgccatctttaggagttaaaaaagacgctgtacctggtagactcaatgaaacatggatgaatattgaaaaagtaggcacatacaggggtcagtgttcagagctatgtggaactggacatggatatatgccgattgtaatagaagctgtttcccaagaggattttgtaaaatgggttaatcaaacaaaactagctatgaataataagaatacttttgctaaggcaaatactaaatag

SEQ ID NO: 225084 - DNA, 880 bp, Unknown
  Bacterial polypeptide expressing nucleotide sequence isolated from the Sargasso Sea
actccaggatctggcatgggaatacttctaatgcttatatctttatctttatttgtaattggtttcacaatgggtggactgaattatatgattacaattctacaagctagaactagaggaatgaccttaatgagaatgcctttaactgtttggggtattttcacagcaactgtcctagcaatgttagcatttccagcgctactagttagtgcaataatgatgacattagataaggttttacaaacaagtttctttatgccaacaatattaaaggcaggagaggttcttgaatatggtggaggaagcccaatacttttccaacacttgttttggttctttggacaccctgaagtttatattgttgcattacctgcatttggaatagtttcagacctgatatcagttcatgcgagaaaaaacatatttggttacagaatgatggtttgggcaattgttggtattggaggtttaagtttctttgtatgggctcatcacatgtacgttagtggaatgaacccttggtttggatttttctttgcaacaacgacattaattattgccgttccaaccgccatgaaagtttataactggatacttactttatggagaggaaatattagaattaataccgtaatgttatggtgcctaggatttatagtaacatttgtaaatggtggaattactggaatatttctaggaaatgtttctgttgatgttccattatctgatacatatttcgtaatagcccacttccatatggtcatgggtattgcaccattaatggtcattatgggagcagtttatcattggttcccattagtagctggaaaaaatgtacacgagggtctaggaaaatggcacttctgggatactttcttag

SEQ ID NO: 225085 - DNA, 424 bp, Unknown
  Bacterial polypeptide expressing nucleotide sequence isolated from the Sargasso Sea
tccatcatttaaagttttatactcacaagacgaaataccaaaggcagatgtaacaattaaagccatcggatatcagtggtattggggctatgaatacccagatgaaaatattatttttgattcatacatgattgatgaaaaagatctaaaagaaaatcaaccgagactgttggcagttgataatgaagtttatgttccagtaaataaagttgttaaagtaatgataactgcaaatgatgttttacatgcatgggcacttccatcttttggagttaaaagagatgcaattcctggaagaataaatgagacatggtttaaagctgaccgaactggaactttctacggccagtgttctgagttatgtggaattaaacacgcttttatgccaattacggttaatgtagtgtctgaagatgaagtataa

SEQ ID NO: 225086 - DNA, 928 bp, Unknown
  Bacterial polypeptide expressing nucleotide sequence isolated from the Sargasso Sea
ggtggattaaattatctaattacaattttacaagctcgtactagaggaatgaccttaatgagaatgccattaacagtttggggtatatttacagcaactgtattagcgatgttagcttttccagcacttctagttagtgcaattatgatgactttagacaaaattttaggaacaagcttttttatgccaaccattattcaggctggggaagtgcttgattatggtggaggaagccctattctttttcaacacctattttggttttttggtcatccagaggtttatattgtagcgttacctgcctttggaatagtttctgatctaatttctgttcactcaagaaaaaatatatttggttacagaatgatggtttgggctattgttggaataggtggtttaagcttttttgtgtgggcacaccacatgtatgttagtggaatgaatccttggtttggatttttctttgcaacaacaacacttattatcgcggttcctaccgctatgaaagtatacaattggattttaactctgtggagaggtaatattagattaaatactgtaatgttatggtgtttaggttttatcgtaactttcgtaaatggagggataacaggaattttccttggaaacgtttccgtggatgttcctttatctgatacatactttgttattgcccacttccatatggttatgggtatagctccattaatggttattatgggtgcagtatatcattggtttcctttagtatcaggaaaattcttagatgaaaaattaggcaaatggcacttctggttaacttttttaggtgcttattccatctatttcccaatgcactatttaggatttataggagtaccaagaagatattttgaaatgtatgatagtccttacatgacttctgctgttggaatgatgaattcataag

SEQ ID NO: 225087 - DNA, 905 bp, Unknown
  Bacterial polypeptide expressing nucleotide sequence isolated from the Sargasso Sea
catgagcgcagtactcgacaaccacgggcacgctggcgaccacgcacacgacggccacgaccaccatggccccaccggctggcgccgctgggtgttcgccaccaaccacaaagacatcggtacgctgtacctgctgttctcgttcaccatgctgatggtcggcggcatcctggccctgctgatccgcgccgagctgttccagcccggcctgcaactggtgaaccctgagctgttcaaccagctcaccaccatgcacggcctgatcatggtgttcggcgcgatcatgccggccttcgtgggttttgcgaactggatgatcccgctgcagatcggcgcctccgacatggcctttgcgcgcatgaataacttcagcttctggctgatgattcctgccgcactgatgctggtcagttcgttcttcatgcccggcggcgctcccgctgccggctggacgctgtacgcaccgctgacgctgcaaatgggtccttccatggatgccggcatcttcgcgatgcacatcctgggtgcctcgtccatcatgggctcgatcaacatcatcgtgaccatcctgaacatgcgcgcccccggcatgacgctgatgaagatgcccatgttcgcctggacatggctcatcaccgcctacctgctgatcgctgtgatgcctgtgttggccggcgcgatcaccatgacgctgacggaccgtcacttcggcaccagcttcttcaaccccgccggcggcggtgacccggtgatgtaccagcacatcttctggttcttcggtcaccccgaggtgtacatcatgatcttgccggctttcggcatcatcagccagatcgtgcctgcgttcagccgcaagaagctgttcggctatgcctccatggtgtacgccacctcgtccatcgcca

SEQ ID NO: 225088 - DNA, 296 bp, Unknown
  Bacterial polypeptide expressing nucleotide sequence isolated from the Sargasso Sea
gcaacactttttaggccttgcaggaatgccaagaagatatgctgactatccagatgcttttgcaggatggaattacatttcttcaattggttcttatatttctgtaattggattggtagtattttttataaaccttgcttatgcgttttataagaaaaaggctgcagcacaaaacccatggggagaaggcgctacaactttagaatggacagtaccatctccacctaattttcatacttttgaagaattgccaaagtttgaagatgaagagggtgttgaaaaatctactagctaaa

SEQ ID NO: 225089 - DNA, 643 bp, Unknown
  Bacterial polypeptide expressing nucleotide sequence isolated from the Sargasso Sea
gcatttccaccacttgaagcagctgctgtaatgcagttaatggatcgtgtggcaggaacaagtttttttctacccagcggactggtaatgtccggtgagattgttgatgtagcaggttcagggtcaccactgctttggcaacatctgttttggtttttagctcacccagaggtttacgttttgattttgcctgctctaggtattgttggtgagatactcgctaataacaccagaaaaccaatatggggttttaaatcaataatatattccatggtatttcttggtttttgctcatttatagtctgggctcatcatatgtttttaacaggtatgggacaggcaatgagtgcattctttcaaaccacaacgatgatcatatccataccctctgttgtgatattgacttcttattttctatctctgtggggtggatccataagatttaatactcctatgctatttgctcttgcatttttaccaatgtttgggatagggggacttacaggattacctcttggtctagccgcctcagatatatatttacatgatacttattatgtcattggacattttcactatgttgttgcaccaggcaccatctttgctttattcgcaggtatttactactggtttcccaaatgac

SEQ ID NO: 225090 - DNA, 880 bp, Unknown
  Bacterial polypeptide expressing nucleotide sequence isolated from the Sargasso Sea
ttatcttggttaatgagattgcaattaggatttcctggattggcaggattcatgacagcagaacattattaccaatttgttacaatgcatgggatgataatggtagtttactttctaaccgctttatttcttggtggttttggtaattacttaattccattaatggtaggtgctagagacatggttttcccatatgtaaacatgataagtttttggatgttctttgttgcagttgcagttttaatggcaagtttttttgttccaggagggcccacaggatctggatggacactttatccaccacaagcaatattagaaggaactccaggatcaggagcgggaatacttttaatgcttatttctctatcactttttgtaattggatttactatgggtggattaaattatttaattacagttcttcaagcaagaacaagaggaatgactttgatgagaatgcctctaactgtttggggtattttcacagcgactgtactggcaatgctagcatttccagcacttctagtaagttcaataatgatgacactagataaagttcttgaaacaagttttttcatgccgaccattataaaagcaggtgaagttctaggatacggcggcggaagtccaattctttttcaacatttattttggttttttggtcatccagaagtttatattgttgcgttaccagcatttggaatagtatctgatttaatctcagttcattctagaaaaaatatatttggttacaggatgatggtttgggcaattgtagcaattggagctttaagtttctttgtttgggcccatcacatgtacgtaagtgggatgaatccatggttcggattcttttttgctacaacgactttaattatgc

SEQ ID NO: 225091 - DNA, 847 bp, Unknown
  Bacterial polypeptide expressing nucleotide sequence isolated from the Sargasso Sea
ttgtggaaagtatgtgtggagccaggatcataaagttatagctattcagtatggcggtttggctgtattcaccggtatcgttggcctggtgttgtcattgctcttcaggatgcaacttgggtttccagatactgcgacatttatagaccctaatttctactatcaagccgtaaccatgcacggcatgattatggtcgtgtatctactgactgctctgttccttggtggattcggcaactacatgattccactcatgtgtggcgctagagacatggttttcccatttctgaatatgctgtccgtttgggtttttctattatccgttattattcttatggccagcttcttcgtcagcggaggccctaccggaggaggttggacgctttatcctccgcagaccaacctggccggaacacctggtcatgatatgggtattgttttgatgcttatttcgttggcggtattcatcgtagcagcgacgatggggggattaaactacgtggtaaccgtcttgcagtatcgttgtcgcggtctgactatgatgaggctgccattaacagtatggggcatttttgtcgccactcttctagccctcttcgcattcccagcgcttttggtctctgcaattatgatgctatttgatatcctgctaggaaccagctttttcatgccggccataattgagtctggcacccccttagatcataacggtggatctccgattcttttccaacacttattttggtttttcggtcaccctgaagtttacatcgttgcacttcctgctttcggactggtatcagatgtactaagcgtgcatgcccgcaaaaacatttttggttatcgc

SEQ ID NO: 225092 - DNA, 670 bp, Unknown
  Bacterial polypeptide expressing nucleotide sequence isolated from the Sargasso Sea
cctacaggagcgggttggacgctatatcctccacaagcaatcaccgccggtacaccaggaagtgatatgggtattattttaatgttaatttcactaatacttttcgtagccggttttacaatggggggattaaattacattataactgtactgcaattgagagctagaggaatgacattaatgagattgcccctaacaatttggggaatttttacagcaactgtacttgcaatgtttgcttttcctgcattgttagttggctgtttaatgatgacgctagatagtttacttggaacaagtttttttatgcctgcaatggtatccttaggagaaacattaacccatgagggtggaagtccaattttattccaacacttattttggttttttggccatcccgaggtttatattgttgctttacccgcttttggaattgtttcagatttactttcagttcattcaagaaaaacaatttttggttacagaatgatggtttgggcaattgttggaatcggtgctctaagctttttcgtttgggctcaccacatgtatgttagcggaatgaacccttggtttgggttcttttttgcaaccacaacattaattattgcagttcccacagccattaaagtttacaattggatactaactttatggagaggaaatatcc

SEQ ID NO: 225093 - DNA, 113 bp, Unknown
  Bacterial polypeptide expressing nucleotide sequence isolated from the Sargasso Sea
attcaaacattttactgataaagaacactttggttttgaagcagcctcatggtattggcattttgttgatgttgtttgggtttgtctcttcttgtttgtttatattctttaaa

SEQ ID NO: 225094 - DNA, 870 bp, Unknown
  Bacterial polypeptide expressing nucleotide sequence isolated from the Sargasso Sea
tacagcaactgttttggcaatgttagcatttcctgcattattggttggtgctttaatgatgatgttggataaattgcttggaacaagtttttttatgcccacaattttaaaagcgggcgaagttttagaatatggtggaggaagccctattttatttcagcacttattttggttttttggacacccagaggtctacattgttgctctaccagcatttggaataatttcagacctgatctctgttcactctagaaaaaatatatttggttacagaatgatggtatgggctatagttggaataggagctttaagcttctttgtttgggctcaccatatgtatgttagcggcatgaacccttggtttggatttttctttgcaaccacaacacttattattgcagttccaactgccatgaaagtttataattggattttaactctttggagaggtaatattagaatgaataccgtaatgttatggtgtcttggctttatagttacattcgtaaacggaggtatcacaggtatttttttaggaaatgtttcagttgatgtaccactatcagatacatactttgtaattgcgcatttccacatggtaatgggtattgctccattaatggtaattatgggtgccgtttatcactggtttcctttggttactggaaagtttttaagtgagaaactaggaaaatggcatttctgggcaacttttttaggagcttattcgatatatttcccaatgcattatctaggatttattggagtgccaagaagatattttgaaatgtatgatagtccatacatgacctctgctgttggaatgaacgaatttataagtacagcagcttttttagttggtgcagctca

SEQ ID NO: 225095 - DNA, 928 bp, Unknown
  Bacterial polypeptide expressing nucleotide sequence isolated from the Sargasso Sea
tatgacagcagaacattattatcagttcgttactatgcatggaatgatcatggtggtttattttttaaccgcactttttcttggaggatttgggaattatttaattccattaatgtgtggagcaagagatatggtttttccttatgtcaacatgataagtttttggatgttttttgtagctgttgcagttttaatggcaagtttctttgtacccggtggaccaactggatcagggtggacactttatcctccacaagcaattttagaaggaacaccaggatcaggaatgggcatacttctaatgcttatatctttatcattatttgtaattggttttaccatgggtggattaaattatttaattacagttttacaagctcgtactagaggaatgacattaatgagaatgccattaactgtttggggtatttttacagctacagttttagcaatgttggcttttccagctttactagtcagttcaataatgatgactttagataaaatacttcagacaagtttttttatgccaactatattaaaggcaggagaagtgcttgattacggtggtggaagccctattctttttcaacatttattttggttttttggtcatcctgaagtttatatagtggcactacctgcttttggaatagtttcagatttaatctcagttcattcgagaaaaaatatttttggttacaggatgatggtttgggccattgtaggaataggagctctaagtttttttgtttgggctcaccatatgtatgttagtggaatgaacccgtggtttggttttttctttgcaacaacaacacttattattgcagttccaactgccatgaaagtatataattggattttaacattgtggagaggaaacattagaatcaatactgtgatgctatggtgtcttggttttata

SEQ ID NO: 225096 - DNA, 349 bp, Unknown
  Bacterial polypeptide expressing nucleotide sequence isolated from the Sargasso Sea
cttgattacaggaggaatgcttttattaacattaccaatcttatcaggagctcttctaatggtcttggctgatcttcattctaatacacttttctttgattcaatctttggaggagatcctatattctatcaacacttattttggttttttggacatccagaagtttacatcttaataattccagcatttgggatcattagcataataatttctggaattttacaaaaaataatctttgggaaccaatcaatgatctttgccatgagctgtatttctcttcttggaagtgttgtttggggacatcatatgtatactgtaggtttagaaactgatacaagagcttattac

SEQ ID NO: 225097 - DNA, 835 bp, Unknown
  Bacterial polypeptide expressing nucleotide sequence isolated from the Sargasso Sea
atgcataaacttatacttttaataacactagcaattagcccaattaatctctttgctgagcaacctaaagattggcagcttggatttcaaaaagctgcttcaggacatatggaagatttagtttggtttcacgattacatgttattaccaataattactgcaataacagtttttgttttatttttggttatttacgcttgtataagatttagagcagcaagaaatcctattgcatctcaaactagtcataatacctttattgaaattatatggacattagttccttgtttaattttaattgtaatggcagtgccatcttttaaaattttgtatgagcaagatgaaattcctccagcagatgttacaattaaagctgtaggttatcagtggtactggggttatgaataccctgatgaaaatataatttttgactcctacatgattgaagaaaaagacttaaaacccggacaaccaagacttctaagtgtagataatgaaatagttgttccagtaaataaagtagtaaaagttttaattactgctaatgacgtattgcatgcttgggcgctaccttcttttggggtaaaaagagatgcggtgcctggaagaataaacgaaacttggtttaaagcagacagaaaaggtactttttatggccaatgttctgaattgtgtggaattaaacatgctttcatgccaattactgttaatgtggtttcacaagaggaatatgataaatggttgaatgaagcaaaacaaaaatttgctaaagaagaaattggtttcaataatcaaaaagtagtaaaaagaattttaaaaggagaaattaaataat

SEQ ID NO: 225098 - DNA, 1135 bp, Unknown
  Bacterial polypeptide expressing nucleotide sequence isolated from the Sargasso Sea
cctggatcaggtatgggaatacttttgatgcttatatctttatctttatttgtaattggtttcacaatgggtggactgaattatatgattacaattctacaagctagaactagaggaatgactttaatgagaatgcctttaacagtatggggtatattcacagcaactgtactagcaatgttagcatttccagcactactagttagtgcaataatgatgacattagataaggttttacaaacaagtttctttatgccaacaattttaaaggcaggtgaggttcttgaatatggtggaggaagcccaatacttttccaacacttgttttggttctttggacaccctgaagtttatattgttgcattacctgcatttggaatagtttctgacttgatatcagttcatgcaagaaaaaacatatttggttatagaatgatggtttgggcaattgttggtattggaggtttaagtttctttgtatgggctcaccacatgtacgttagcggtatgaacccttggttcggatttttctttgcaacaacgacattaattattgctgttccgacagccatgaaagtttataattggatacttactttatggagaggaaatattagaattaacactgtaatgttatggtgcctaggatttattgttacatttgtaaatggtggaattactggaatatttttaggaaatgtttcagttgatgttccattatctgatacatattttgtaatagcccacttccatatggtaatgggtattgcaccattaatggttattatgggcgcagtttatcattggttcccattagtagctggaaaaatgttacatgaaggtctaggaaaatggcacttctggattactttcttaggagcttattcaatttatttcccaatgcattacttaggttttattggagttccaagaagatattttgaaatgtatgatagtccgtatatgacatcagcagttggtatgaatgaatttataagtattgcagcatttatagtcggtgcagcacagtttattttagttttcaatatcattaaaacattaaaaacaggtaaaaaggctgaacaaaaccctggaaagcaaattcacttgaatggtatacatctactgtccgcca

SEQ ID NO: 225099 - DNA, 922 bp, Unknown
  Bacterial polypeptide expressing nucleotide sequence isolated from the Sargasso Sea
catgagcactaatacaacaggccatcaaaaatactacgtaccagagagtagttctattccaatagtttttgcaatagctatgcttttttttggtgttggtgctgcagacgcggtgatgggcaaaggcacaactttactatttattggtgttgccacagtaattggaacacttgcatattggtggtcagtggtaataagagaatcacatgctggtcttgataccccacaattaaatacatcttatgtttatggcatggcatggtttattttttcagaagtaatgttttttgctgcattttttggagcactcttttatataagaaccttttcaatttcctggttgggtggagagggcgataaaggtcttgctggagaattactttggccagaatttgaagcaacatggcccccaatgattacacctgaagaaagtcttatgggagatcaggctgttactaaaggtccggacgaaagtatgtacttacgcagcataggaaatcttggaacgtggctaccattatataatacgatagttttacttacctcaagtggaacggtccattttgctcacatggcactcaaagaaaacaatagaaaaagatttaatttctggctgggtattacagttttactagcatttatatttgttattcttcaagctttagaatactacgaagcatatgctcatctaggccttacattaaacacaggagtatatggcacaacattctttatgttaactggatttcatggcatgcatgttttaattggtggaatattcctggcaactcaattaacaagatctgctggatacaaccactttacagataaagagcattttggttttgaagctgcatcatggtattggcactttgtagatgttgtttgggtttgtctgttcttatttgtttatattctttaa

SEQ ID NO: 225100 - DNA, 593 bp, Unknown
  Bacterial polypeptide expressing nucleotide sequence isolated from the Sargasso Sea
tatggcagatgcagccatccacggccatgaacacgaagatcaacaaggtttttttacccgttggtttatgtcaacaaatcacaaagatattggtattttatacctcgtcgtttcagctcttgtcggatttatagccgtatcattcacgatctatatgagactggaactgatgaatccgggcgttcaatacatgtgcatggagggaatgcgcctcacagcagcaggaattggcgaatgtacaccaaacggccatctatggaacgttcttattactggtcatggcatactgatgatgttttttgttgtgatccctgccctatttggtggttttggcaactactttatgcccttacaaatagggtctccagacatggcctttccaagaatgaataatctgtctttttggatgtatgtagctggaacgactttagcgttatgttctgtactatctcctggaggcaacgatcaattggggtctggcgttggctggatactgtatcctccgctgtctgtgaatgagggtggaatgtcaatggatttggcgattttcgccgtccacgtgtcaggagcgtcatctattttaggggctataa

SEQ ID NO: 225101 - DNA, 371 bp, Unknown
  Bacterial polypeptide expressing nucleotide sequence isolated from the Sargasso Sea
cttgaccgttcatattgcccacttgggtttaaagaatggaaacagaagacaattcaatatctggctaggattaactctagttctcggatacttatttgttttcttccaaggattggagtattacgaagcctatgcacacatgggtctgacattgaatacaggtatttatggaacaacctttttcatgctaactggtttccacggattccatgtttgtttgggagcaataatactaaccataatgcttctaagaagcttaaaaggacatttcactgcagacgatcactttggctttgaagccggttcatggtactggcactttgtagatgtggtttgggtttgcttagtagccttcgtctacgtaatgtagt

SEQ ID NO: 225102 - DNA, 1299 bp, Unknown
  Bacterial polypeptide expressing nucleotide sequence isolated from the Sargasso Sea
agacaatattagaaggaacaccaggatcaggtatgggaattcttttaatgcttatatcattatcactatttgtaattggatttactatgggtggtttaaattacttaattacagttcttcaggctagaactagaggaatgactttaatgaggatgccactaactgtatggggtatttttacagcaactgttcttgcaatgttagcttttccagcactgttagtaagtgcaattatgatgactctggataaagttcttcaaactagtttctttatgcctacgatattaaaggcgggagaggtgcttgagtatggcggaggaagtccaattcttttccaacatctattttggttttttggacatccagaagtttatattgttgcactaccagcttttggaatagtctcagatttaatttctgtccattcaagaaaaaatatatttggttatagaatgatggtatgggcaattgttggaattggagctttaagtttcttcgtttgggctcaccacatgtatgttagtggtatgaacccatggtttggtttcttttttgctacaacaactcttataattgcggttccgaccgccatgaaggtctacaactggatattaactttatggagaggaaatataagaattaatacagttatgttgtggtgtttaggatttatagtaaccttcgtgaatggtgggattacaggaattttcttaggaaatgtttctgttgatgtgccattatcagatacttattttgttatagctcacttccatatggttatgggtattgcaccacttatggttataatgggtgcggtttatcactggtttccacttgtagccggaaaaatgttagatgaaggacttggtaaatggcatttttggattacttttttaggtgcttactcgatatattttccaatgcattatttaggatttatcggagttccaagaagatattttgaaatgtatgacagtccttacatgacttcagctgttggtatgaatgaatttataagtttagcagctttcatagtaggcgctgcacagttcatattaatatataatataatcaaaactttgaagacaggaaaaaaagctggtaaaaatccttggaaagcaaactctttagaatggtatacttctacagttccacctgaacatggtaactttggtgatagattacctgttgttcatagatggccgtatgattttagcgtccctggagcaaaagaagattttattgcacaaacaacacctccaagtgaagtaattcatacgaaggtagaaaaaacttaaa

SEQ ID NO: 225103 - DNA, 1495 bp, Unknown
  Bacterial polypeptide expressing nucleotide sequence isolated from the Sargasso Sea
aatgaacttgatagaacactatgttaatggaagcaaatatactggatcttcaaaaagaaaaggtaaagtatttaatcctgcaacaggagatataagttcagaggtattgcttggatctaaggaagatcttaataaaacagtagatttcgcaaaaaaagcatttgaaaactggtcaactaaacccccaatacaaagggctagaattatatttaaatacaaagaattaattgaaaaaaattatgatgagttaacaaaattaattgtatcagaacacggcaaagtttatgaggatgcaaaaggatctctaactagaggacttgaagttatagaatttgcctgtggaatacctcaaatgttaaaaggtgaatttacagaaaatgtaggtacagatattgacagctggtcgcttagacaaccattaggagtttgcgcagggataacaccatttaattttccagcaatggttccaatgtggatgtttccaatggcaatagcttgtggaaatacttttattctaaaaccttctgaaaaagatccatcatgctcaatgaagttggctgagcttttttcagaggcaggattgccagatggtgttttgaatatagtaaatggtgacaaagaggttgttgaatcaattcttgagaataaagatattcaggctgttagttttgtaggatctactccaatagctaagtatatttatgaaaatgcagctaaaaatgaaaaaagagtccaagctttgggaggtgcaaaaaatcattgtgttgtaatgccagattgtgatttagaccaagcagtaaatggtttaatgggtgcagcctatggttctgctggtgagagatgtatggcacaatcagttgctgtagctgttggaagtattggagacgaattagtaagcgaactatcaaagaaagttgaaaaactcaaggttggtccaggaatggataaatcatccgaaatggggccactagttacaaaagagcatctagaaaaagttactggttatgttgatttaggcataaaggagggtgcaaatctcgtagttgatggtagaaaaatgaagcttcaaggttatgaaaatggtttttatattggaggatgtctatttgacaatgttacaaaagatatgagaatttataaagaagaaatttttggtccagttttatcagttgtgagagttgatgattttaacgaagcaacaaaattagtgaataatcatgaatttggaaatggaacttcaatttacacaagagatggagatgttggaaggacttttgcaaataaaattaaagtaggtatggtgggaataaatattccaataccagtgccagtagcacatcatagttttggaggatggaaaagatctttatttggagatcaacatatgcatggacctgaaggagtaagattttatacaaaattaaaaaccattacatcaagatggccttcaggtgttagatctaatccagaatttataatgccaacaatgaagtaa

SEQ ID NO: 225104 - DNA, 1171 bp, Unknown
  Bacterial polypeptide expressing nucleotide sequence isolated from the Sargasso Sea
aaccagagggatgacattaatgagaatgcctcttacagtctggggtatatttacagctacagtccttgcaatgttagcatttccagcattattggtaagtgctataatgatgactttagataaggttttacaaactagtttcttcatgccaacaatattaaaggctggtgaagttctagaatatggtggtggaagcccaattcttttccaacacctgttttggttctttggacaccctgaggtttatattgttgcgcttcccgcttttgggatagtttcagatttaatctctgttcatgctagaaaaaatatttttgggtatagaatgatggtgtgggcaattgttggaattggagcattaagtttctttgtttgggcacaccacatgtatgtaagcggaatgaatccttggttcggtttcttctttgcaacaactacattgattatcgcggttccaacagccatgaaggtttataactggatactaactttatggagaggaaatataagaataaacgtagttatgttgtggtgtttaggttttatagtaacatttgttaatggtggaatcactggaatatttttagggaacgtatcagttgatgttccattatcagatacttatttcgtgatagcacatttccatatggtaatgggtattgcaccattaatggtaattatgggtgcagtttatcactggttcccattagttgcagggaaaatgttagatgaaggtcttggaaaatggcacttctggattacttttttaggagcttactctatttatttcccaatgcactacttaggatttatcggagttccaagaagatattttgaaatgtatgatagtccatatatgacatcagcagtgggaatgaatgaatttattagtattgcagcattcatagtaggagcagcacaatttattttaattttcaatataattaaaacattaaaaacaggcaaaaaggcagagcaaaatccttggaaagctaattcattagaatggtacacttctactgttccaccagaacatggcaacttcggtgaaagacttccagttgtgcacagatggccttatgattttagtgttccaggagctaaggaagattatattccacaaactactgctccgagtgaagtaatacatacagaagtagaaaaaacataa

SEQ ID NO: 225105 - DNA, 829 bp, Unknown
  Bacterial polypeptide expressing nucleotide sequence isolated from the Sargasso Sea
tgtaggaattggagctttaagtttctttgtgtgggcacaccatatgtatgtaagtggaatgaatccttggtttggcttcttctttgcatcaactacactcataattgcagtccccaccgccatgaaggtttataattggattttaactttatggagaggaaatattagaattaatactgtaatgttatggtgccttggttttattgtaacatttgtaaacgggggtataacaggaatatttttaggaaacgtttcagtagatgtgccactatctgatacttattttgtagtggctcacttccatatggtaatgggtattgctccattgatggtaataatgggagctgtttatcactggtttccattggttgcaggtagaatgcttcatgaaggtttagggaaatggcatttttggataactttcttaggtgcttattcaatttatttcccaatgcattatctaggttttattggagttcctagaagatattttgaaatgtacgatagcccttacatgacatcaggagtggggttaaacgagttcataagtttggcagctttcatagttggcgctgcacaatttattttaatttataacattataaaaactttaaaaactggaaaaccagcaggtaagaatccttggaaggcaaactctttagagtggcatacctcaacagttccacctgagcatggtaattttggagaaaggctaccagtagtacatagatgggcatacgactatagtgtacctggagctaaagaagatttcatgcctcaaactactccaccgagtgaagtaacaaacacagaggtagaaaaaacttaa

SEQ ID NO: 225106 - DNA, 1036 bp, Unknown
  Bacterial polypeptide expressing nucleotide sequence isolated from the Sargasso Sea
agtttttttatgccaacaattattaaggcgggcgaggtactttcatatgacggaggaagcccaattctttttcagcatttattttggttttttggtcatcccgaagtttacatagtcgcgctacccgcgtttggtatagtctcagatttaatatcagttcatgcaagaaaaaatatttttggttacagaatgatggtatgggcaatagtaggcataggagctctaagcttttttgtttgggcacaccatatgtacgtaagtggaatgagcccttggttcgggtttttctttgccacaactactttaatcatagcggtgccaaccgccttaaaagtttacaattggatattaaccttgtggagaggaaatataagacttaataccgtgatgcttttttgtttaggttttatagtgacttttgttaatggtggtattacaggtatatttttagggaatgttgcagtagacgtaccattatctgatacatattttgtgatagctcactttcacatggtgatgggcattgcccctttaatggtaatttttggagcaatatatcattggtttcctctagttacaggaagatttttagatgaaacattaggcaagtggcatttttgggtaacatttttaggagcatactcaatttatttcccaatgcattatttaggatttatcggtgttccaagaagatattttgaaatgtatgatagtccgtatatgacatcagcagttggaatgaatgaatttataaccatctccgcatttatagttggagcggcacaatttattttcttctacaatgtcgtaaaaagtataagactaggtaaatctgctggaaaaaatccatggaaagcaaattctttagaatggttaactcctaacgttccgcctgcacacggtaactggggagataaattgccggtagtacatagatgggcttatgattacagcgttccaggagctaaggatgattttattccgcaaacaacacctccaagcgaagttatagaagcagaagtagaaaaaacttaaa

SEQ ID NO: 225107 - DNA, 640 bp, Unknown
  Bacterial polypeptide expressing nucleotide sequence isolated from the Sargasso Sea
aatgctatttgctattgggcttgtctctacatttataacaggtggtctaactggaattattcttggagatagtgcgctggatataaacttacatgatacatattttgttgtagcacactttcatttagtaatgggtatttctgctctttatggtttatttgccggtgtataccattggtatccaagaatgtttggtagaatgatgaacaagacacttggatatgttcatttttggattacagcaattagtgcctatggagtatttttcccaatgcattttattggtatggctggtcttccaagaagatattatacaaacacgaactttccatatttcgatgatgtcgcaaacattaatgtcataattacactgtttgcacttttagcaggtgctgcacaaattattttcttgtataattttattagcagtatgtattatggaaagaaaactgaacaaaatccatggaagtcaacaacattagaatggacagctccaattaaacatattcacggaaactggccaggtaaaattcctcatgtttttagatgggcttatgactattcaaaacctggttccaaagatgattttgtccctcaaaatgttccattaaaaaaaggtgagaaagagcttcagcattag

SEQ ID NO: 225108 - DNA, 766 bp, Unknown
  Bacterial polypeptide expressing nucleotide sequence isolated from the Sargasso Sea
aatggttgtaaaagaccaatcatttgaagatgtaatcaaatattactgggatgctacttatccttggttaacaactactgaccacaaatacattggaactctgtatatcgttactggttttggatttttcttcattggtggaattttaggattactgattcgttggcagttacttgagccgcgtgtagatggcgactttttaacctacgaagaatacaactctacatttactatgcatggaacaaccatgattttcttggctgccatgcctatcatatttggatttgctaattatctaattcctttacaaattggtgcaagggatttagcattccctagacttaatgcacttggatactggcttctaccaactggaggtttagttatatacatgggttactttacaggaggtgctggagatgtgggttggactggatatacaccttactcatctggagatactgcaactaggcctggaactgatttctgggttgctggacagattatgcttggtgcttcttcaacattaactgcaattaatttcctaactactatgttgcgcatgagagcgcctggtgttacattaatgagaatgcctctgtttgcatggtccatattagtaactgtatttttgctattattatcaattcctgtattcactgtagctcttttactactgatggctgatagaacttttggaacgctttattttgatgttactgcaggtggagatcctatattgtggcaacacttgttctggtacttt

SEQ ID NO: 225109 - DNA, 1729 bp, Unknown
  Bacterial polypeptide expressing nucleotide sequence isolated from the Sargasso Sea
ttgagttcagattcgcacagccacgatcatcatgaggaaggatttatacgaaagtatattttctcagttgaccataaaataataggcatacagtatggaataacttcgctactgtttttattattcggattctcattgatggcaattatgagatggcaattagcctaccccgataccgtaattccggttgtaggctttctttttggggaaagtggtaccttagcctctgaacagtacaattctcttggtgcaatgcatggcactatcatgatatttttaggtatagttcctctggcagttggggcatttggtaattatctagttccactccaaataggtgctatagatatggcttttccaaaattaaatgctgcgagttactggacctattttgttggtggtgttattatgatttcaagcttctttatgccagaaggagctgctagatcagggtggacctcttatccgcctctttctatttttgaaaatggacaaacgatttggctcatatccatgatatttttaatcacctcctctctgcttggatccatgaatataatcgtaacaatcgtccagctgagagctcctggactttcttggatgagattaccaatttttgtatgggctcagtttgtaacatctttcctcttagtgttagcatttccaccgcttgaagcagctgctgtaatgcagttaatggatcgtgtggcaggaacaagtttttttctaccaagcggactggtaatgtccggtgaaattgttgatgtagcaggttcaggatcaccactgctttggcaacatctgttttggtttttagctcacccagaagtttacgttttgattttacctgcattaggcattgttggagagatacttgctaataatactagaaaacctatttggggttttaaatcaatcatttattccatggtatttcttggtttttgttcattcattgtctgggcccatcatatgtttttaacaggtatgggacaagcaatgagtgcattctttcaaaccacgacaatgatcatttcgataccctctgttgtgatattgacttcttactttctttcattatggggcggatcaatacggtttaacacaccgatgttatttgctcttgcgttccttcccatgtttgggattggaggtctgacagggttaccacttgggctggctgcatcagatatatatttacatgatacatattatgtcattgggcatttccactatgttgttgcgccaggaactatctttgctctgtttgcaggtatctactactggtttcctaaaatgacgggaaaaaagatgaacgaaatattaggaaaattacatttttggccctctttggtgtttatgaatggaatatttatgcctatgtttattcagggccttgcaggcgtatctagaagacttgcagatggaggggtttcctatgcgcatgcaagcggagttttagagtggaatgagtttatgtccatgtcagcattttttcttggtcttgctcagataccatttatcattaatattgttatgtctcttttcgcaggtgagaaagcaagcagaaacccttgggactctactactgtagaatggtctgctccctcacctcccgttggccatggaaattttgataaaccggtaaacgtctaccactcagcatatgaatatagtgtccccgactcaaagaaagattttacaccacaatttgaaaaaaatggttaat

SEQ ID NO: 225110 - DNA, 523 bp, Unknown
  Bacterial polypeptide expressing nucleotide sequence isolated from the Sargasso Sea
atgtctgcatcaggtcaaaaacatgattatcatttagttgaccctagtccttggcctttagccacatctatagcaacactagttacagctgttggatctgtttattattttcacagtaaagttatgtgggcgatggtcttaggttttttacttataatttattgtgcctttatgtggtttagagatgttgtaattgaagctgaacataaaggtcatcatacacctgttgttcaaattcatcacagatatggaatgacattatttattgcatctgaagtaatgttttttgttgcatggttttgggcatactttgatgcaagtttgtttccaaatgagttcatgggcaatgtatggccaccaaaagatattgaaacttttgatccatgggacattccacttataaatactcttgtcctacttttatctggtacaacagtaacttgggcacaccattctttgttagaggatgatagaaaaggatttataaatggtctaatctgtacagtagttttaggagcattct

SEQ ID NO: 225111 - DNA, 835 bp, Unknown
  Bacterial polypeptide expressing nucleotide sequence isolated from the Sargasso Sea
aatgcataaacttatacttattataactttgatagtttacccaattaatctttttgctgaacaaccaaaagattggcagcttggatttcagaaagctgcatcaggtcatatggaagatttagtttggttccatgattatatgttgttaccaataattactgcaataacagttttcgttttatttctggttatttacgcttgtattagatatagagcagctagaaaccctgttgcatctcaaactagtcataatacttttatagaaattatctggacattagttccttgtttaattttaattgtaatggcagtaccatcatttaaacttttatatgagcaagatgaaattcctcctgctgatattacaattaaagcaataggttatcagtggtattggggttatgaatatcctgacgaaaatataatttttgattcttacatgattgaggatgaagacctgaaacctggccaacctagacttctaactgtggataatgaaatagttgttccagtaaataaagttgtaaaagttttaattacagctaatgacgtacttcacgcttgggcattaccttcgtttggtgttaaaagggatgccgtgcctggaagaataaatgaaacttggtttaaagcagacagaacaggtactttttatggtcaatgttctgaattgtgtggaattaaacatgctttcatgccaattactgtaaatgtggtttctcaagaggaatatgataaatggttggaagaagcaaaacaaaaatttgctaaagaagaacttggtttaaataataaaaaagtagttaaaagaattttagagggagaagttaaataa

SEQ ID NO: 225112 - DNA, 1045 bp, Unknown
  Bacterial polypeptide expressing nucleotide sequence isolated from the Sargasso Sea
atgtcagatgaatacgaacataagatagaagcaaaatcagattacgctaccgatgcgtcttctgtttctactccagatatagatacagttccagatgcagaactgccagatcaggagctctatcattctcacagttggtggactacatatgtattttcacaagacgcaaaatacattggcattcaatacgcattaacagcagtagggacaggtctgttaggtttagttttatcttggttaatgagaattcaattagcttttccaggtttaggctggcttgatcctgcagcttattatcagtttgtaacaatgcatggaatgataatggtagtttatctattaacagcattatttttaggaggctttggaaatttattaataccattaatgtgtggtgctagggacatggcctttccctatgtaaacatgctgagctactgggcgtttgttgtcgctgttttagttttacttgcaagtttctttgtacctggcggaccaacaggagcgggttggacgctttatcctccccaagcaattactgctggaactcctggaagtgatatgggtataattttaatgctgatttcgttaatacttttcgtagcaggttttacaatggggggattaaactacataattacagtactacagttgagagctagaggtatgactcttatgaggcttccactaacgatttggggaatttttacagcaacagtgctagcgatgtttgcttttccggctttattagttggttgtttgatgatgacattggacagtctacttggaacgagcttttttatgcccgccatggtttcgctaggagaaaaattaacccatgaagggggaagtccaatcttatttcagcatctattttggttttttggtcacccagaagtttatattgttgctctaccagcctttggaatagtttctgatttgctttcggtgcactcaagaaaaacaatttttggttacagaatgatggtttgggctatagtgggaattggtgctttgagcttttttgtttgggcacaccatatgt

SEQ ID NO: 225113 - DNA, 418 bp, Unknown
  Bacterial polypeptide expressing nucleotide sequence isolated from the Sargasso Sea
aacacattgcttttaatcacttcaagcctaaccgtaactatagctcaccatgcaattctggagaatgaacgggaaaaggttatattttggacaggaataacggcagttttgggaatcattttcttaggagtacaaatatacgagtatcacgtgctgtctttcggtttaaaagacggggtctacccgtctacattctatttagctacaggttttcatggttttcatgtttttgtgggaacaattttcttgataatttgttattttagggctcgtgctggacactttacaccagaggcgcatataggctacgaggcggcagcatggtactggcacttcgtggacgttgtgtggatatttttgtacgtcaatgtttactggtggggtgcttcttcattcgggcacctagtcgtagaataat

SEQ ID NO: 225114 - DNA, 944 bp, Unknown
  Bacterial polypeptide expressing nucleotide sequence isolated from the Sargasso Sea
tctgttctggttctttggacaccctgaagtttacatcgtggcacttccagcatttggtattgtttcagacttaatttcagttcatgcaagaaaaaatatttttggttatagaatgatggtatgggcaatagttggtatcggtgcacttagtttcttcgtatgggctcaccatatgtatgtaagtggaatgaacccatggtttggtttcttttttgcatctacaactttgattattgctgttccaacagctatgaaagtttataattggatacttactttatggagaggtaacataaggattaatacagttatgttgtggtgtttaggtttcattgtaactttcgttaacggcggtataactggaatatttttaggtaacgtttctgttgatgttcctctatcagatacatatttcgtagtagctcattttcacatggttatgggaattgctccattaatggtgattatgggagcaatctatcattggtttcccctagtagcaggaaaaatgttagatgaaaaattaggtaaatggcatttttggactacttttcttggggcgtactctatttatttcccaatgcattatcttggatttataggagttccgagaagatactatgaaatgtatgatagtccatacatgacctcgggagttggtcttaatgaatttataagcactgcagcatttatagttggtgccgctcaattaattttggtctttaatatagttaaaacaatgaagactggtaaaaaagcggagaaaaatccgtggaaagctaattcgttggagtggtttacttcaactgttccaccagagcatggaaattttggtgaaagacttccagttgttcatagatggccatatgactataatgtacctggagcagaggaagattacttgcctcaaaccgcagcaccgagtgaagttgcacatacagagg

SEQ ID NO: 225115 - DNA, 1008 bp, Unknown
  Bacterial polypeptide expressing nucleotide sequence isolated from the Sargasso Sea
aatgtcagaagattttaacgataataaaacaatacaagctcaatcttcagaagctatttcaggaggaggatcaggaatagcatcagatgcagactatgtaagacctgcagaagttgcagatcaagatttatatcatggacatagcttcataactaaatggattttttgccaagatgcaaaagttatcggagtacaatattttcttttagcaacatttacaggtataattggtttaattctttcttggttaatgcgtttgcaattgggttatcctgaattagttccatttatgacggcagagcattattatcaatttgtaactatgcacggcatgataatggtggtttattttttaaccgcactttttctaggtgggtttggaaactatttaattccattgatggttggagcaagagatatggtttttccttatcttaatatggttagtttttggagtttttttgttgcagttggagttttattagcaagcttttttgttcctggaggaccaacaggatcgggctggacactttatcctccacaagcaattttagaaggtactccaggatcaggatggggaataatgttaatgtgtatatcgttaattttatttgtagctggatttaccatgggtggtctaaactatttgattaccgtacttcaggctagaacaagaggaatgacattaatgagaatgcccctaacagtttggggaatttttacagctacagttttagcaatgttagcattcccagcactattagtaggtgcattaatgatgagtttagataatgtacttggaacaagcttttttatgccaacaatattaaaagcaggagaagttttggaatatggtggtggaagtcctattctttttcaacatttattttggttcttcggacaccctgaagtttatatagttgcactacctgcatttgggataatttcagatttaatttctgttcatgctagaaaaaatatatttggttatagaatgatggtttgggc

SEQ ID NO: 225116 - DNA, 459 bp, Unknown
  Bacterial polypeptide expressing nucleotide sequence isolated from the Sargasso Sea
atgttgtgcctcattttcattacgtaatgtcgctcggtgctgtcttggcaatatttgcaggtatctacttttacttttcaaaaatgacagggcgcgcttaccccgaatgggcgggtaaattacacttttggatgatgtttattgggtctaatttaaccttcttccctcagcacttcttagggcgccaaggtatgccgagaagatacatcgactatcctgaagcatttgcttactggaacgtcatatcttcatacggagcatttcttgctttcgcttcatttctattctttttcgttataatattttattcattgtttttcggcgcccgacaaaatgctgcaaacccatggaatgaatacgctgatactttagaatggactttaccgtcaccaccaccggagcatactttcgaaattttgcctgagcaaaaagattgggataagtcagaagctcactaaa

SEQ ID NO: 225117 - DNA, 501 bp, Unknown
  Bacterial polypeptide expressing nucleotide sequence isolated from the Sargasso Sea
aatgtcagttgaaaaaaaacacgactatcacttagtagacccgagcccgtggcctatatatacagcatttgcttgtctagtgttagcaattggtacaattttttacatgcataacgatgtttcgtggggaatgtatttaggattagcattgcttatctatggagcttacatgtggtttagagatgttgtaattgaagcagaacatcaaggtcatcatacccctgttgtgcaaattcatcaccgatatggaatgacattatttattgcatcagaagtgatgttctttgtagcttggttctgggcatattttgatatcagtttatttccaaatgagtttgttggaaatgtttggcctcctaaagatattgaaacatttgatccatgggatattccattaataaacacattggtattattgttatctgggactacagttacatgggcccatcactcactgttagaaggtgatagaaaagggtttattcaaggactaacagctac

SEQ ID NO: 225118 - DNA, 445 bp, Unknown
  Bacterial polypeptide expressing nucleotide sequence isolated from the Sargasso Sea
aatgagtagtaataaccattcatatcatctagttgaaccaagtccttggcctgcagttggtgctgcagctggttttgtcctcgctctcggtggcgctatgtatatgcatgagtatgagtatggtggcattacttctttggttggatttggactagtttttttgacgatgttctactggtggagagatattgtaagagaaggtgaatttcagggtcaccacagtccaattgttcaaataggtcttagatatggtatgatgttatttattgcttcggaagttatgttttttgttgcatttttttgggctttttttgcttcatctctttttccagttggtggagtatggccgcctgaaggtattaaaacctttgatccttttgatctaccattaataaatactttaattttattattatccggatgcactgttacatgggctcatcat

SEQ ID NO: 225119 - DNA, 979 bp, Unknown
  Bacterial polypeptide expressing nucleotide sequence isolated from the Sargasso Sea
tatgacaatatcaattgatccccaaaaaactaataatgaaagccttcaacctaaaggctggcttagatactttagttttagccttgatcataaagtaattgggatacaatacttagtctgcggttttcttttctatttaataggaggaaccttagcgagcgctataagaattgaactagctagtccaatgtctgactttatgccgagagatgtttataaccaagttttaactctacacggaacaataatgatattcctttggatagtgcctgtagttaatggtgcttttggaaattatttaattccattttatgtaggtgcaagagatatggcattcccaagattaaatgcagttgctttttggttaattcctccttcaggtttgatgctggtagcaagctattttgttgagggtgctgctcaggctggatggacggcttatcctcctttgagcataactactcctcaatcgggacaaattatttggattctgagcgttctattacttggaggcagttctatatttggtggaataaactttatcgcgaccattatcaaactaagaaggccaggattaaaacttatgcaattgccaatgtattgttgggcaatgcttggaacaagtctattagttgttttgtcaactcctgttttagcaggcactttaattctacttagcttcgatatcatcgctaatacaggttttttcaatcctgttttaggaggcaatgtcgtagtttatcagcatttattttggttttattctcatccagctgtatacattatggtgcttcctgcctttggtttagttagtgaaatacttcctgtacatgctagaaaaccactttttggatatacaacaatggttttttcaataatggggatagtagttttaggtttagttgtttgggcgcatcatatgtttacgagtggaacgccaccttggatgagattattctttactatcgccacagccaat

SEQ ID NO: 225120 - DNA, 769 bp, Unknown
  Bacterial polypeptide expressing nucleotide sequence isolated from the Sargasso Sea
aatgagcaaagcaactgaagttatttcgccagatacctctgcgcctcacagtggtcaagtaaatggtggtcacctacatgatgaccatgaacaccacgatcatattcctaaagggataacgcgttggttgtttaccactaaccacaaagacataggcacactttacctgtggtttgcctttattatgtttttagttggtggtgcgatggccatggtgatccgcgctgaactattccaacccggtctacaaattgtagagccaaacttctttaaccaaatgactacggtacacgggcttatcatggtatttggtgcagtaatgccagcctttactgggctcgcaaactggcttattcccatgatgatcggcgcccctgacatggcgttaccgcgcatgaataactggagcttctggattttaccaggtgcctttctcattctattgagctcgctctttatggaaggcggcggccctgcttttggatggactttctacgcgcccctttcaacgacttacagtggcgattcgacagcgttgtttgtgttctctgttcacatcatgggtatttcatccattatgggtgcgattaacgtgattgtgaccatctttaatatgcgtgcgccaggcatgacctggatgaaaatgccgctgtttgtatggacgtggcttatcacggcattcttgctgattgcggtaatgccagtgctcgccggtgcggttaccatggtgttaactgataagttctttggcacgagcttttttgatgct

SEQ ID NO: 225121 - DNA, 862 bp, Unknown
  Bacterial polypeptide expressing nucleotide sequence isolated from the Sargasso Sea
aatgagtggttcaaatggatattatgttccacatcagacaaaatggccatttctcacaactgtttcagtttttattttattcataggcgctgctaattttatgaatggaacgggaggattatatacagttttctttggacttttgctcttatttattatggcttatgtgtggttttcagaggtgatatctgagagcgaagctgggatttataatgcacaagtagatatatcctttagatggggcatggtatggtttattttttccgaggtaatgttttttgcagcattttttggagctctttattatgcaagagagctatcgttgccatggcttggaggagaaggctataaaacaactacaaatatagttctatggccgcaatttgagaccatttggccgtccaacggtccaactaataccggaggagattttacagtaatgagagctgggggtatacctgctatcaatactttattgctactaacaagtggcttaactgttacatacgcacaccatgcgttgaagaaacaagatcgtaagaatcttattattgggcttgctgctaccatagcgcttgggtttatctttgttggttttcaagcatacgaatacatgcatgcttactcagaccttaatcttaaaatgactacaggaatttatgggtcaactttttatatgctcacaggttttcatggttttcatgtcactttgggagcaataatgctaacagtaattttgttcagatgtatgaaaggacacttcgcaggtgataatcattttggctttgaagcagttgcttggtattggcatttcgtagatgttgtatggcttggcttgttcgtttttgtgtattggctgtag

SEQ ID NO: 225122 - DNA, 952 bp, Unknown
  Bacterial polypeptide expressing nucleotide sequence isolated from the Sargasso Sea
catgaatgaatattcaggtgcagcagttggagatatagattatgtaagacctgcagaattaccagaacaagatttgtaccatggacatacatttttaactaaatgggttttttgtcaggatgcaaaagtaataggcgtacaatattttttaacagcagtttttactggtgttgttggattaattttatcatggttaatgagattacaattaggttttccaggattagctgggttcatgacagcagagcattactatcagtttgtaactatgcatggaatgataatggttgtttattttttaactgcattattcctcggaggttttggtaattatttaatacctttaatggttggtgcacgtgatatggtttttccatatgtaaacatgttaagtttttggatgttttttgttgcggtcgcagttttaatggcaagtttctttgtgccaggaggaccgaccggctcaggatggaccttatatcctccacaagctattttagaaggaacacctggctctggggctggaatacttctgatgcttatatctttatctctttttgtaattggttttacaatgggaggattgaactacatgattacgatccttcaagctagaacaagaggtatgactctaatgagaatgcctttaacggtttggggaatatttacagctactgtattagcgatgcttgcgtttcctgcgcttttagtgagttctataatgatgactttagacaaagtattaggaacaagtttttttatgccaacaattctaaaagcaggtgaagtattggaatatggtggtggaagtcctattcttttccaacacttattttggttttttggtcaccctgaagtttacatagttgcacttccagcattcggtattgtatcagatttaatttctgttcatgcaagaaagaatatttttggctatagaatgatggtttgg

SEQ ID NO: 225123 - DNA, 1005 bp, Unknown
  Bacterial polypeptide expressing nucleotide sequence isolated from the Sargasso Sea
gcgaaatgctttcttacgatggaggaagcccaatacttttccaacatttattctggttttttggacatcccgaagtttatatagttgctctccctgctttcggaatagtttctgacttactctctgttcacgctagaaaaaatatttttggctatagaatgatggtttgggcaattgttggaattggagctttaagcttttttgtttgggctcaccatatgtatgttagcggtatgaacccatggtttggttttttctttgcatccacaactttaataatcgcagtcccgacagctctaaaagtatataattggatattaaccttatggagaggaaatatcagattgactactgtgatgctcttttgtttaggatttatagttacttttgttaacggaggaattacaggaattttcttaggaaacgttattgttgatgttccgttatctgatacttattttgtaattgcacactttcatatggttatgggaatagcgcctctgatggttatttttggagcaatctatcactggttccctttaattacaggaagatttttggacgaaactttgggcaaatggcatttttgggtaacatttttgggcgcttattcaatttatttccctatgcactatttaggtttcattggagttcctagacgttactttgaaatgtacgatagtccctatatgacatcagctgttggtatgaatgagtttattagtgttgcagcatttattgttggagcagcgcaattcattttcttttataatcttgttaaaagcatcagattaggtaagcctgcaggaaaaaatccttggaaggcaaactctttggagtggttaactccacaagttccacctgaacatggaaactggggtgaaaaacttccagtggtacatagatgggcttatgatttcaatgtccctggagctaaaaaagattatattactcaaacaactccaccaagtgaagttatagaagcggaagtggaaaaaacctaaa

SEQ ID NO: 225124 - DNA, 1735 bp, Unknown
  Bacterial polypeptide expressing nucleotide sequence isolated from the Sargasso Sea
aatggatcaaaattcagctacttatgaaggtcaaaaaatgtatgacccaaaaggttggtgggatacatacgtattctcacaagaccataaagtaatcgcacttcagtatgtttgtgtcgcgcttgcgattggtctaaccggcatgtttctctcgttgttgatgagaatgcagctcggtttccctgggttgtttgagtcaattgatgctggcagctactatcaagatgtaaccatgcatggaatgattatggttatttatcttcttacagcgctgtttcttggtggtttcggaaactatctaatcccgctaatgctgggatgccgtgacatggcttttccttttgtgaatatgttgagtttctggatgtattttctatctgtaatcattcttgtggcaagcttctttgtagaaagcgggccaacaggggctggttggacgctctatcctcctcaatcaatactcgaaggaacgccaggcggtgatggcgcaggaattattctcatgcttgcctcgttggctgtatttatcattgcctttacaatgggcggcctaaactacatcacaactgttcttcagtccagggccaaaggaatgactttgatgagaatgcccctcattatctggtgcatattcctagctactttcctcggtttgttagcattccctgcattgcttgtgggagctataatgctgatttttgatcgagtattagaaacgagcttctttatgccagaaatttttaaaggcggtgaagtcctagattacggcggtggaagcccagtactttttcaacatttattctggttcttcggacatccagaagtatatatcattgcacttcctgctttcgggattatttccgagctaatcagtgttcatgccagaaagaatatttttggctacaacatgatggtgtgggcgcttattgcaattgctggtattgccttcattgtatgggcgcatcacatgtatgtggctggaatgaacccttatcttggttttttctttgcaacaacaacattaattattgctgttccaactgcaattaaagtttataactgggtccttaccctttggaatgcaaatatcaaaatgactgttcctatgctttattgcctagcattcttggtcactttcttgaatggtggtctcacgggactattcctaggtaatgtggccgtagatgttcctctatccgatacatactttgttgtcggtcatttccacatggtgatggcagtgtcgcctgtgttggctctctatggcggtttatatcattggtatccatctgtaaccggaaggatgttaaatgatacgcttggcaagattcatttttggattacgttcattggaacatatttaatatatttcccaatgcactacattggcttcttaggtgttccaagaaggtattattcgaatgagcagtatgacttcattccacaatccgttgcagacttaaatcagttcattactgtctgtgctctcattgttggggctgctcagtttatcctgctttataacttcgtagtgagtctttacaaaggtgcgattgctcccaaaaacccttggggcgcatgcacgcttgaatggcaaactctagagtcgcctcctgggcatggaaactggggtgagcaattgcctgtagtctacagatggccatatgagtatggtcttcctggtgctacatcggactttgttccacagaacgtgccagatgagcaaataacttag

SEQ ID NO: 225125 - DNA, 922 bp, Unknown
  Bacterial polypeptide expressing nucleotide sequence isolated from the Sargasso Sea
atgagcactgaagcatctggacacgaaaaatactacatacctgaaaaaagctcaatacctattgtttttgcagcagcaactttactagttggctggggggcggcaaatgcagtagtaggcggaggaacctcaatgttgttggtaggaatgatggcgctagtcgcaacaatgggattttggtgggcagttgttattagagaatcacaggcaggcctagatacaccagctttaaatagttcctacgtttatggcatggcatggtttattttttccgaagtaatgttcttctttgctttctttggagcgcttttttatataagaagttttgcagtcccatggcttgggggtgaaggagataaaggtcttgctggcgaacttctatggccagaatttgaagcaacatggccaccaatgataactccggaacaaagtgtaatgggcgatcaagcagttactgttgggccaggcgaaagcatgtacctacatagcatcaacagtatcttcacctggctgccattatggaacacagttgttttattaagttctagtggtactgtgcattttgctcacatggctttaaaagacaacaacagaaaaagatttaatttctggttaggaataacagttgctctagcttttatctttgtaatccttcaggcagttgagtactacgaagcttatgctcacttagggctcacaatatcatctggagtttatggcacaaccttcttcatgctgaccggttttcatggaatgcatgttttgattggagggattttccttcttactcaactcacaagatcaacaggctttaagcattttactgataaagaacactttggttttgaagcagcctcatggtattggcattttgttgacgttgtttgggtttgtctcttcttgtttgtttatattctttaaa

SEQ ID NO: 225126 - DNA, 627 bp, Unknown
  Bacterial polypeptide expressing nucleotide sequence isolated from the Sargasso Sea
tatggcagacgcagccatccacggccatgagcacgaagatcaacgaggttttttcacccgttggtttatgtcaacaaatcataaagatattggtattttatacctagtcgtttctgcgcttgctggctttatagccgtatcgtttacgatctacatgagactggaattgatgaatccaggtgttcaatacatgtgtatggaaggaatgcgcctaacggccgcaggagttggtgaatgtacaccaaatggccatctctggaatgttcttattaccggtcatggcatactgatgatgttttttgtagtaattccagccctatttggcggttttggcaactactttatgcctttgcaaatagggtctccagacatggcctttccaagaatgaataatctatcattttggatgtacgttgctggcacgacgttagctatatgttctgtgctttctcctggtggtaacgaccaattaggatctggcgttggctggatactgtatccacctctgtctgttaatgagggtggcatgtcaatggatttagcgattttcgccgtgcacgtttcaggagcgtcgtctattttaggtgccattaatatgatcacaacatttcttaacatgcgcgcccc

SEQ ID NO: 225127 - DNA, 916 bp, Unknown
  Bacterial polypeptide expressing nucleotide sequence isolated from the Sargasso Sea
atgtcagaccaaccttattacgtaccagaatccagtaaattgccctttgcaatggctatcacaatgctggtctttattgttggagctgccaatacagttatagatttaggcactgactcaaattcgtatttaatacttgtcctttcttttgcaatgatgtggaccaccatgtatttttggtttaaacaagttatccaagaaaatcatgctggattaaataaccccatgttaaaagattcttacgtctacggcatggcatggttcatattttcagaggttatgtttttctttgcttttttctttgctttagcttacataagaaattttgcagttccttggcttggaggtgaaggagaaaaagctatatctaatatattgtggccaggattcgaagccacttggccgttaatggttactcctgatgaggcagtatttgctggccctgagaaagatatgtcttttgccaccgcatacgcagctggaggtttaggcggagttttgggctggttacctttatggaatacagttcttttattaacttctagtttaacagttcatatagcccatttaggactcaaaaatgggaacaggcagcaattcaatctttggctgggcataactttaatccttggctatgctttcgtagtagttcagggtgtcgagtattatgaggcctatacacattacggtttgaccttaaatacaggcatatatggaacaacattttttatgctgacagggtttcatggtttccatgtttgcttaggagcaattattcttacaataatgctttttagaagcctcaaagggcactttactgctgatgaccattttggctttgaggcgggttcttggtattggcactttgtagacgtggtttgggtttgcttagtagctttcgtttacgttatgtaag

SEQ ID NO: 225128 - DNA, 2026 bp, Unknown
  Bacterial polypeptide expressing nucleotide sequence isolated from the Sargasso Sea
atgttcggaaaactctcactagactcgattccgtaccacgagccgatcatcatggtgacggctgccgggatcgccctcggcggtgcgctcgttctgggtctgatcacctatttcggcaagtggcgctacctgtggaccgaatggctcacctcggtcgaccacaagaagctgggcgtgatgtacatcgtggttgcgctcatcatgctgttccgcggctttgcggacgcgatcatgatgcggacccagctagcgctgtcgtataacgcgccaggtttcctgccgccgcatcattacgaccagatctttaccgcgcacggcgtcatcatgattttcttcatggcgatggcgttcatggtcggcctgatgaacatcatcgtgccgttgcagatcggcgcccgcgacgtggcgttcccgttcctcaactcgttgagcttctggatgaccgcgatcagcgcgatcctgatcaacatctcgctggtgatcggtgaattcgcgcaaacgggctggctggcttatccgcccctctccgaactgcagttcagtccgggtgtcggggtcgattattacctgtggagtctgcagctatccggtatcggcacattgctgactggcgtgaacttcttcgtgaccatcgtgaagatgcgcgcgccgggcatgacctggatgaagatgccggtgttcacgtggaccgcgctgtgcacgaacgtgctgatcatggccgcgttcccgatcctgaccgtcacgctcgcgctgctcggtctggaccgctacctcggcatgcacttcttcacgaacgacggcggcggtaacgccatgctgtacctgaacctgatctgggcatggggtcaccctgaggtgtacatcctgatcctgccggcgttcggtatcttctcggaagtcgtggcgacgttcgccaagaagccgctgttcggctacaagacgatggtgtgggcaacctgcgcgatcatggtgctgtcgttcctcgtgtggctgcaccacttcttcacgatgggttcgggcgccgacgtcaatgcgttcttcggtatcgcgaccatggtcattgcgattccgaccggcgtgaaggtgttcaactggctgttcacgatctacaagggccgtctgcaattcacgacgccgatcctgtggaccctcggcttcatggtcactttcacgatcggcggtatgaccggcgtgatgatggcgattccaggcgcggactttgtcctgcacaacagcctgttcctgatcgctcacttccacaacgtgattattggtggcgtgctgttcggctacctcgccggattcaactactggttcccgaaggccttcggcttcaagctgaatgagaaatggggcaaggcgtcgttctggttctggcagatcggtttctgggtcgccttcacgccgttgtacgtgctgggcttcatgggcatgacgcgtcgtctgaatcactatgacaatccggattggcatccgtggctgatgttcgcatgggtcggcgctgtgctgatcgccatcggtatcgcttgccaggtggtgcaactggtcgtcagcatccgcgatcgcaacctggcgaaaaaccgcgacgtgacgggcgatccgtgggacggtcacacgctggaatgggcaacgagctcgccgccggcgtcgtacaacttcgcgatcattccggacgtgcgtgaactggacgccttcgctgaaatgaagtcgcgcaagaatcaaccgaagccggtgtatcgcgacattcacatgccgtcgaacacatccgcgggtctggttgtggcgatgttctcgctggtactgggttttgccgctgtgtggcacatctggtggctcgcgattgtcggtctggtcggttcgatcgctactgtgatcatttacagcttccagaagaacgaaggcttttacatcccggctgccacggtagcggcgattgaacaacaacgctccggcgccggtgcgcaggtcgcgattgaagaaaaacgctccggcgccgatgcgcaggtcgcgttggaggtggattgat

SEQ ID NO: 225129 - DNA, 340 bp, Unknown
  Bacterial polypeptide expressing nucleotide sequence isolated from the Sargasso Sea
atgagttacgcagattcagcaagctacgaccataatgatcacaaaccaggatttataaaaagatggtttttttcaactaatcacaaagatattggaactctttacataatttttgctatacttgctggattagttggaggtttcttctcattattaatgagggctgaattagctgccccaggactagatgttgttgcagatggacaagtctggaatgtaattattactgcacatggtttgttaatggtattctttgtcgtaatgcctgcattaattggtggttttggaaactggtttgttccactaatgattggtgcacctgaatatggcttttcccaga

SEQ ID NO: 225130 - DNA, 610 bp, Unknown
  Bacterial polypeptide expressing nucleotide sequence isolated from the Sargasso Sea
aatgacctcgacactccccgttcagccggagagctcccatgcaatcgactcccacgggcatgaggaacacgccgactaccgcatgttcggcctggccacctttctcgtcgctgatgcgatgaccttcgccggcttctttgcggcctatctcaccttcaaggccgtcaatcctcttcctgagggagccatctatgagctggagctgccactgcccatcctcaacaccgtgttgttgctggtgagcagtgccacatttcacaaggccgggcaggccatccgccagaacctgcaaggccgttgccgcaactggctgctggtgacggcagggttggggctcgcctttttggtgagtcagatggtcgagtacttcaccctcccctttggcctgacagacaacctgtacgcaagcactttcttcgccgccacgggcttccacggattgcacgtcactctgggcgctctgatgatcctgattgtctggtggcaagctcgcgccaatggtggtcgtgtgacggctgaggatcacttccccctcgaagcggccgagctgtactggcacttcgtggatggaatctgggtcattctgttcgtcatcctttatttgctctga

SEQ ID NO: 225131 - DNA, 655 bp, Unknown
  Bacterial polypeptide expressing nucleotide sequence isolated from the Sargasso Sea
aatgacaacaatttcatatccaacatttatacgcagaccaaatgaatatgtatcaggtatttggggatggataactactgttgatcataaaagaataggaaccttatatggggttacagcatttttatggtttttagtgggtgggatagaagctttattaattaggctacagttagcacagccagagtcatctcttctgtctcctgaagtttacaatcaagtatttaccatgcatggcacaacaatgatttttcttgtaataatgccattaagtgctgcgttctttaattggcttgtaccattacaaataggtgctagagatgttgcatttccaaggttaaatgcatttagtttctgggcttttctttttggaggaatacttctaaatttatcttggctgactggagatgctcctaacgcgggatggtttgcttatgcacccaatacagaggttccatacaatcctagaaatggagttacatattggatactgggtcttcaacttttaggtatagcttctttggctgcaggttttaatttccttacaaccataataaatatgagagcacctggcatgtcttttatgaaaatgccggtcttcatatggatgactgcagtagtaaacgttttaatagtattagcttttccaattatc

SEQ ID NO: 225132 - DNA, 916 bp, Unknown
  Bacterial polypeptide expressing nucleotide sequence isolated from the Sargasso Sea
tatgtcagaccaagcttattacgtacccgagtccagtaaattgccctttgcgatggccatcactatgttggtctttatcattggggccgctaatacagttatagatttaggtactgactcaaattcgtatttaatactagttctctcctttgcaatgatgtggaccaccatgtatttttggtttaaaaaagttatccaagaaaatcatgccggattaaataatccaatgctaaaagattcttatgtctatggcatggcatggtttattttttcagaggttatgttcttctttgcatttttctttgcattagcttatataagaaactttgctgtaccctggcttggaggagaaggcgaaaaaggtttagccaacatgctatggccaggattcgaagccacttggcctttgatgattacccctgaccaggcagtatttactggacctgagaaagacatgtctttggccactgcatatgcctctggaggtttgggtggagttttaggctggctgcctttatggaacacagttctcttattaacttctagtttgacagtgcatatagctcatttaggacttaaaaatggaaataggaagcaattcaatctctggctgggcattactttaatccttggctatgctttcgtagtagttcagggtgtcgagtattatgaggcctatactcattacggtttgaccttaaatacaggcatatatggaactacattttttatgctgacagggtttcatggattccatgtttgtttaggagcaattattcttacaataatgctttttagaagcctcaaagggcattttactgctgacgatcattttggttttgaagcaggatcctggtattggcactttgttgatgttgtgtgggtatgtctggtagcgtttgtatacgttatgtga

SEQ ID NO: 225133 - DNA, 419 bp, Unknown
  Bacterial polypeptide expressing nucleotide sequence isolated from the Sargasso Sea
tatgagcgaagcagtcattcatgacgatcaccatgatcataaaccatccggaataggccgatggcttttttctacaaatcataaagatataggcaccatgtatttggtgtttgctttgataatgttttttgttggcggcgctatgtctatggtaattcgagctgagttatttcaacctgggatacaatacgttgatcctcaattttataactctatggtaacagtgcatgccttggtgatgattttcggggccttgatgccagctggtgtaggtctcgccaattggatggtgccacttatgatcggtgctcctgatatggcattgccgcgcatgaataatatgagtttttggatattgccttttgctttcactttattattgtcaactttttttatgcagggtggagcgccggcaggtg

SEQ ID NO: 225134 - DNA, 310 bp, Unknown
  Bacterial polypeptide expressing nucleotide sequence isolated from the Sargasso Sea
ttggttttcttcccacaacactttttaggccttgcgggaatgccgagaagatatgctgactatccagatgcttttacaggatggaactacatttcttcaattggctcttatatttctgtaattggattggtagtattttttataaaccttgcttatgcgttttataagaaaaaggctgcagcacaaaacccatggggagatggtgctacaactttagaatggactgtaccatctccacctaattttcatacttttgaggaattaccaaaatttgaagatgaagagggtgttgaaaaatctactagctaaa

SEQ ID NO: 225135 - DNA, 316 bp, Unknown
  Bacterial polypeptide expressing nucleotide sequence isolated from the Sargasso Sea
ttatatttggcttggtgcaactttagttctaggttatctattcgtatttttccaaggattggagtattacgaggcctatgctcatatggggctaactcttaatgcaggtatttatggaacaaccttctttatgcttacaggttttcatggttttcatgtgtgcttaggcgcaattattttaactattatgtttttgagaagccttaaaggtcattttaaacctgatgatcactttggatttgaagcaggttcttggtactggcactttgtagatgttgtgtggatttgcctagtggcttttgtctacgtaatgtaa

SEQ ID NO: 225136 - DNA, 1147 bp, Unknown
  Bacterial polypeptide expressing nucleotide sequence isolated from the Sargasso Sea
atggatcaaaattcagctacttatgaaggtcaaaaaatgtatgacccaaaaggttggtgggatacatacgtattctctcaagaccataaagtaatagcgcttcagtatgtttgtgtcgcgcttgcgattggcctaaccggcatgtttctctcgctgttgatgagaatgcagcttggtttccctgggttgtttgagtcaattgatgctggcagctactatcaagatgtaaccatgcatggaatgattatggttatttatcttcttacagctctttttcttggtggtttcggaaactatctaatcccgctgatgctgggatgccgtgacatggcttttccttttgtaaatatgttgagtttctggatgtattttctatctgtaatcatccttgtagcaagcttctttgttgaaagcgggccaacgggagctggttggacactctatcctcctcaatcaattctggaaggaacgccaggcggtgatggtgcaggaattattctcatgcttgcctcgctggctgtgtttattattgcctttacaatgggcggcctaaactacatcacaactgtgcttcagtccagggccaaaggaatgactttgatgagaatgcccctcattatctggtgcatattcctagctactttcctcggtttgttagcattccctgcattgcttgtaggggccataatgttgatttttgatcgagtattagaaacaagcttctttatgccagagattttcaaaggcggtgaagtactagattacggcggaggaagcccagtgctttttcaacatttattctggttcttcggacatccagaagtatatatcatcgcacttcctgctttcggtattatttccgagctcatcagtgttcatgccagaaagaatatttttggttacaacatgatggtgtgggcacttattgcaattgctggcatagccttcattgtatgggcgcatcacatgtatgtggctggaatgaacccttatcttggttttttctttgcaacaacaacattaattattgctgttccaactgcaattaaagtttataactgggtccttaccctttggaatgcaaatatcaaaatgaccgttcctatgctttattgcctagcttttcttggtcactttcttgaatggt

SEQ ID NO: 225137 - DNA, 925 bp, Unknown
  Bacterial polypeptide expressing nucleotide sequence isolated from the Sargasso Sea
aatggcaagcgcagcgggaccagaccaatcagtttactatgtcccagcccagggctggtatccggtctggttggcattcggtcttatgctgacggttactggattagcatcggtgctgaatatgcaaaaaaccggtggctcggcagagtggacacagagcttgttcgggtttgcaatagtggcgtttgtcttttttcgatggtttgccaaagtaatccaagaaaatgcggagggttacaacaatgcgcagctaaagaagagctatgtctgggggatgggctggtttattttctctgaggtaatgttttttgcggctttcttcggggccctcttctatgtgcgaatgtgggtagtcccctggcttgggggggaaggttctaagagtattgtgggtgattacctgtggccagagtttgaagctacctggccggtggtttcaaaccctaatccggaaatttttgagaacccaggacagtcaatggctcctccggcactaggcgctgcctggctgacttatttgccgttcttgaacactgttatcctattgtcttccagtgtcaccgtgcacatggcgcacttggctatcaacacccaggagcgaggaaagatagcgggctggttagggttcacggttcttctcggtgttattttcttgggccttcaggtactcgagtattatgaggcatatgctcatatggggcttacattggcctccggaatctacggctcaacttttttcatattaacagggttccatggctttcacgtcacaatggggacggtgatattacttattcaattcttccgtgttttgaaggggcattttaaggaacacgactgctttgggtttgaggcggccagttggtattggcatttcgttgatgtcgtttgggtaggactatttattttcgtatacgttctatag

SEQ ID NO: 225138 - DNA, 1047 bp, Unknown
  Bacterial polypeptide expressing nucleotide sequence isolated from the Sargasso Sea
taggaacaagtttctttatgccggcaatggtatccttaggagaaacattaacacatgagggcggtagtccgatattgttccagcatttattttggttttttggtcacccagaagtttacattgtggcattaccggcctttggtattgtatctgatttgctctcagttcattcaagaaaaacaatttttggatatagaatgatggtatgggcaatagttggaattggcgcgctaagtttcttcgtatgggctcaccacatgtatgtaagtggcatgaacccttggtttggattcttttttgctacaacaacacttattattgctgttccgacagctattaaagtttacaattggattttaaccctttggagaggaaatattcaattatcattgccaatgttattttcattaggttttattgtcacttttttaaatggtggattaacaggactctttctaggaaacgtaacagtcgacgttccgttgtccgatacttattttgtagtagcacactttcatatggttatgggtatcgcacctatacttgtaatttttggagcaatttatcattggtacccattaataacaggcagaatgatgaatgaaacactcggaaaaatccatttttggataacttttattggatcatatgcaatctatttcccaatgcattaccaaggttttgttggagttccaagaagatattttgaaatttatgatagtccatacatagatacatctactttgcttttgaacaaatttattacgatagcagtcttaatagttggcgcagcacaattagtatttttatataatttgattactagtgctagacttggaaaaaaatctgaaaaaaatccttggaaagcaaattcattagaatggcaaactccacaaatgccaccagagcacggaaattggggcaaagaacttcctaaagtttatagatggccttatgattttagcgttcctggtgctgaaaaagattacatccctcaaaatcagccaccaagtgaaattattggagcgaaagttgagaaaacgtgac

SEQ ID NO: 225139 - DNA, 1047 bp, Unknown
  Bacterial polypeptide expressing nucleotide sequence isolated from the Sargasso Sea
ctgcatttgcaaagaagcctttgtttggctatccattcattgtcttctccggaatagcaataggattaatgggctgggccgtctggagccaccatatgtttacagtaggcttaggtccaattgcagtgtctgtgtttactattaccactatgttaatagcagtgcccacaggagttaagatttttaactggattggtactttgtggggtggttccatagagtacaagtcagcaatgctgtttgcggttggttttatagctatgttcattatcggtgggttaagcggagtatcacatgctgttgctcctagtgactaccaacaacaggacacatactacatcattgctcatttgcattatgtgttgtttggaggagctattttaggtatattcgcagggatttatttctggttccctaaagtgacaggcaaacttttgagcgaaaaattagggaagcttcatttttggataactttcgtgggactgaatttgactttctttcctatgcactatcttggtatgaatggaatgcctagacgaatttatacttatgcgactgaatttggttgggataacttaaacgcgctttcctcttttgggtatatagtcttgtttgtttcaatgttgatatttgtatataacataattaaaagttataagtcaggcgaagaagcgggtcacgatccgtgggatgcaccaggcctagaatggactatcacttcacctccgcctgtatataatttctcagaattacctgttgtagaagggagagacccatactggattgttaaaagacgggctgcagcagaagggaaagagataccagggcctcagcctttagtggatccttccactgtgcatcttccagacccgtcatattggccatttttcacatctgtagcgctgttgattttggctatcggttttatgattgaaattcctgtttggttcgttaaatatcctatatccgtggtaggaggcctgctggtattcgtaggtgttctcgcgtggagtaacgaacctccaactaaagaaaaggatcactaga

SEQ ID NO: 225140 - DNA, 2008 bp, Unknown
  Bacterial polypeptide expressing nucleotide sequence isolated from the Sargasso Sea
catgttcggcaaactcacactctcggcgatcccgttcgatcagcccatcatcatgggggccggtgccttcatggggctggtcgtgctgggcatcctcgccgcgctgacgatcaccggccggtggaaatggctgtggacgcaatggctgaccacggtcgaccacaagaaactcggcgtgatgtacatcatcgtcgcgctgatcatgctgctgcgcggcttcgcggacgcgatcatgatgcgcatgcagctcgcgctctcgtacaacgggcccggctacctgccgccgcatcactatgaccaggtcttcacggcacacggcgtgatcatgatcttcttcatggcgatggtgttcatggtcggcctgatgaacctgatcgtgccgctgcagatcggcgcgcgcgacgtcgcattcccgttcatcaactcgctgtcgttctggatgacggccgtcagcgcgatcctgatcaacatctcgctcgtgatcggcgaattcgcccagacgggctggctcgcgtatccgccgctgtcggagctgcagttcagtccgggggtaggggtcgactactacctgtgggcgctgcagatctccggcgtcggcacgctgctgaccggcgtgaacttcttcgtgacgatcatcaagatgcgcgcgccgggcatgacgttgatgaagatgccggtgttcacgtggaccgcgctctgcacgaacgtgctgatcatggcgtcgttcccgatcctgaccgcgacgctcgcgctgctcggcctcgaccgttacctcggcatgcacttcttcacgaacgaagccggcggcaacgcgatgctgtacctgaacctgatctgggcatggggtcaccccgaggtgtacatcctgatcctgccggcgttcggcattttctcggaagtcatctcgacgttcgcgaggaagccgctgttcggctacaagacgatggtgtacgcgacctgcgcgatcatggtgctgtcgttcctcgtgtggctgcaccacttcttcacgatgggctcgggtgcgaacgtgaacgcgttcttcggcatcatgacgatgatcatcgcgatcccgaccggcgtgaaggtgttcaactggctgttcacgatgtaccgcggccggatcgaattcacgacgcccgtgctgtggacgatcggcttcatggtcacgttcacgctcggcggcatgaccggcgtgatgatggcgatccccggcgcggacttcgtgctgcacaacagcctgttcctgatcgcgcacttccacaacgtgatcatcggcggcgtgctgttcggctacctcgcgggcttcaactactggttcccgaaggcgttcggcttcaagctgaacgagaagcttggcaaggcggcgttctggttctggcagatcggtttctacgttgcgttcgtgccgctttacgtgctcggcttcatgggcatgacgcgccggatcaaccattacgacaacccggcctggcatccgtggctgctggtcgccgcgttcggcgccgtgctgatcgcgatcggcattgcatgccagctgctgcaactggtggtcagcatccgcaaccgcaacctgcccgagtaccgcgacacgacgggcgatccgtggggcggccgcacgctggagtgggcgacctcgtcgccgccggccgactacaacttcgccgtgatcccgcaagtgcgcacgcttgacgcatatgcggacatgaaggcgcacggcgaaggccggccgaacccggcagcgattagcgacatccacatgccgtcgaatacctgcgcgggcctcgtcgtcgcgatcttcagcctggtgctcggcttcgcgctggtgtggcacatctggtggatggcgatcggcgggctcgtcgggatcgtcgcgacgctcgtgatctacagctcgcgcgacaacgacggctattacatccccgcgtcgacggtgcggaagatcgaagacaagcagccgacgaagcgcgtggctgcgcgcgtcgacgacgtggaactggaggccaactga

SEQ ID NO: 225141 - DNA, 307 bp, Unknown
  Bacterial polypeptide expressing nucleotide sequence isolated from the Sargasso Sea
gtattttttcctcagcactttttaggattggctggaatgcctagaagatatgctgattatccggatgcttttgcaggctggaattacatatcatcaattggatcgtatatatctgtaattggtcttgtggtgttttttgcaaatctaatttatgctttttctaagaaaaaagctgcggcccaaaacccttggggagaaggtgctacaacattagagtggacagttccatcaccaccaaattttcatacttttgaagaattaccaaagtttgaagatgaagagggtatagaaaaatctactagttaat

SEQ ID NO: 225142 - DNA, 814 bp, Unknown
  Bacterial polypeptide expressing nucleotide sequence isolated from the Sargasso Sea
aatgaaaaaaattttatttataatttctagtatttttatctctcaaaatgcttttgcaaaccaacctgttgattggcaattaggttttcaaaaagctgcatcagaatctatgagagatattgtagcctttcacgataacttgttattaccgataataatagcaataagtgtatttgttttatttttaatgctttatgcttgtgtaagatttagagcttcagcaaaccctaatccttcaaagagaacacacaatgtaactgttgaagttttatggactttaattccttgcttaattttaattgttatggcggttccatcatttaaaattttatataagcaagatacgattccgaaagcagatttaacaatcaaagcaataggctatcagtggtattggggttatgaatatcctgacgaaaatttggaatttgactcgtacatgattgaggaaaaagatttaaaagcaaatcaaccaagattgttagctgttgataatcaagttgttgttccagttggcaaagtcgttaaagttttaatcacagcaaatgatgttttacatgcatgggccctaccttcttttggagtaaaaagggacgcagtacctggaagaattaatgaaacgtggtttaaggctgaaaaagttggtacttattatggtcaatgttcagaactatgtggtataaaacatgcttttatgccgattgcagtaaaagtagttagcgaagatgagtatcaagaatggttatctgaggcacgcgtgaaatttgcaaaagaagaaatagaaaatgaaaaacttaaattagtgagtaaataa

SEQ ID NO: 225143 - DNA, 646 bp, Unknown
  Bacterial polypeptide expressing nucleotide sequence isolated from the Sargasso Sea
gctgttccaacagggtataaaattttttaattgggttgcaacattatggggaggtaaaatttcgatcaatagtgcaatgttattctcttgcggatttattataaattttgtttttggaggtatcacaggagttgctttggcacaggtgcctttcgatattcacgtacatgatacctatttcgttgtagcccattttcattacatagtttatggagggactgtttttattattttctcttcaatttatcattggttccccaaagtaactgggaaaatgctcaatgaaaaattaggaattttacattttatcattacctttattggatttaacttgtgttttgctcctcaacattggcttggtttaaatggaatgccaagaagagttgcagaatatgatcctcaattccagttcgttaatcaaattagtagccttggggctcttttgatggctataagtacaattccttttttaattaatgtattccttagttttagaaatggaaaagatgctggagataacccttggaatgctcttacacctgaatggttaacttcttctccacctccagttgaaaattgggaaggagaagctccattagttgaagaaccatatggttatggtaaagaaatttctgaacaaaaataa

SEQ ID NO: 225144 - DNA, 1144 bp, Unknown
  Bacterial polypeptide expressing nucleotide sequence isolated from the Sargasso Sea
tatgtcagatgaacaagaccataaactagaagctaaatcagactacgtagctgatgcctcatcagtatcaacacccgatatcgatgcagttccagcagctgaacttcctgatcaagaactttatcactcacacagttggtggactacttatgtgttttcccaagacgctaaatatatagggatccaatatgcgttgacagcaattggaacaggacttcttggattagttttatcgtggttaatgagaatccagttagctttcccaggacttggttggcttgaaccatcttcttattaccagttcgttacgatgcatggaatgatcatggtcgtatatcttttgacagcattatttctaggaggttttgggaatttattaatacctttaatgtgtggagctagagacatggcatttccatacgtaaatatgctcagctattgggcattcgttgttgcagttttagttttattagcaagtttctttgtacccggaggtcccaccggagcaggatggactttatatccaccacaagcaattacagctggaacccctggctacaatggggggataatactaatgttgatttcactaatattatttgtggctggcttcacgatgggtgggttaaattatatcatcacagttttacaattaagagctagaggtatgacactaatgagaatgcctttaacaatttggggaatttttaccgcaactgtacttgcaatgtttgcttttccagcgctcttagtcggttgtttgatgatgacacttgatagtttgcttggaacaagtttcttcatgccagcaatggtttcattaggagaaactttaactcacgaaggtggaagcccaatacttttccaacatcttttttggttttttggtcatccagaagtttacattgttgcgctgccagcttttggtattgtttcagatttactttctgttcattcaagaaaaactatttttggttacagaatgatggtttgggcgattgttgggattggtgctttaagcttttttgtgtgggcccaccacatgtatgtaagcggtatgaatccatggtttggtttcttctttgcaacaacaactttaataatcgcagttccaaccgctattaaagtatataattggatttta

SEQ ID NO: 225145 - DNA, 232 bp, Unknown
  Bacterial polypeptide expressing nucleotide sequence isolated from the Sargasso Sea
agggctcacaatatcatctggagtttatggcacaaccttcttcatgctgaccggttttcatggaatgcatgttttgattggagggattttccttcttactcaactcacaagatcaacaggctttaagcattttactgataaagaacactttggttttgaagcagcctcatggtattggcattttgttgacgttgtttgggtttgtctcttcttgtttgtttatattctttaa

SEQ ID NO: 225146 - DNA, 1035 bp, Unknown
  Bacterial polypeptide expressing nucleotide sequence isolated from the Sargasso Sea
gtttctttatgccgactattttaaaagcaggtgaagttttagaatatggcggtggtagtccaatattatttcaacacttattttggttttttggccacccagaagtttacattgtagctttaccagcatttggaattgtatctgatttaatatctgtacacgctaggaaaaatatttttggatacagaatgatggtatgggcaatagtaggaataggtgcgctaagctttttcgtttgggcccaccatatgtatgttagtggtatgaatccatggtttggtttcttctttgcaactacaactctcattatagcggtccccacggcaatgaaagtttataactggatacttacattatggcgtggaaatataagattaaacacggtaatgctttggtgtttaggattcattgttacttttgttaatggtggaattactggtatatttttaggaaatgtatctgtagacgttccattatcagatacttattttgtaattgctcacttccatatggttatgggtatagctccgttaatggtaattatgggagcagtatatcactggtttccacttgtggctggtaaatttttagatgaaaaattaggaaaatggcatttttggataacttttctaggcgcttattctatttatttccctatgcactatcttggctttataggagttccaagaagatattttgaaatgtatgacagcccttatatgacatctgcagtaggcatgaatgaatttattagtttagcagcatttatagtaggagccgcgcaatttattttgatctataatattatcaagactttaaaaactggcaaaccagctccaaaaaatccttggaaagcaaattctctagagtggcatacttcaactgtaccaccagagcatggtaactttggtgatagattaccagttgttcatagatggccgtacgattttagtgtacctggcgcaaaagatgattatattccacaaacaactccacctagtgaagttgttcatacgaaggtagaaaaaacttaaa

SEQ ID NO: 225147 - DNA, 1727 bp, Unknown
  Bacterial polypeptide expressing nucleotide sequence isolated from the Sargasso Sea
gatgtcaaacgatcacagtcaccacgaagaatcttttttccgaaagtatatttggtctacagatcataaaattattggaatacaatatgggtttactgccttattctttcttctagttggtttttcattaatgatggttatgcgctggcaattagcatatcctgaaacgcctattccttttgtaggatctatctttggcgatgatggtatactgcttcctgaaatctataattctttaggagcaatgcatggaacaattatgattttcttaggtattgttccgcttgctgtaggtgcttttggtaattatttagttccacttcaaattggtgctcctgacatggctttcccgaaacttaatgctgctagttattggagttatttagtaggtggccttgtaatgatgagcagtttttttactgaagagggtgctgctagatcggggtggacctcttatccacctttagctgatatagaagtaggacaaactatttggctaattggaatgatatttttaattacttctagcttgctaggttcgatgaatattattactactatagtgcaattacgtgctccaggattaacctggatgcgtttacctttttttgtttgggctcagcttgtaacatcctttttactagttttggcatttcctccattagaagctgctgctgtgcttcaattgatggatcgtgtcgtaggaactagtttcttcttaccaagcggtttagttgtatcaggtgaattaatggaggtcagcggagggggaagcccattgctgtggcaacatttattttggtttttagcgcatcctgaagtgtatgttcttattctacctgctatgggtattgtttcagaagtcattgcaaataattctagaaagccattgtgggggtataattcattagtttttgctacaatatttcttggattcatgtcatttattgtttgggctcatcatatgtttttaacaggcatgggcacggctatgagtgcgttttttcaaacaaccacaatgattatatcgataccatctgtaattatcttgtctgctttatttatttctttatggggagcctctatacgatttaatactccaatgttatttgccttagcttttttacccatgtttgggattggtggtcttactgggctacccttagggcttgcagctgcagatatatatcttcatgatacgtattatgtaattggtcattttcattatgttgttgctcctggaacaatttttggtttgtttgctggtatttattattggtatcctaaaattactggaagaaaaatgagcgaactgctaggcaaaatgcatttttggccatcattattatttatgaatggtgtttttatgccaatgtttatacaaggattagctggggtttctagaagactttgggatggtggtcttgaatatgctcatgctagtggagtttttcattggaatgaatttatgtcgatttctgcgtggttgcttggtttagcacagatcccatttattataaatgtcttttatagtatttttcgaggtgaaaaggttgataataatccttggcaagccacaacgttagaatgggctgcgccatcacctccattacctcatgtcaattttgatacacttcctactgttcatcgtgatccatatgaatatagccttcctggtagaaatagagattttactcctcaaactgaacctaaaaaaataaataata

SEQ ID NO: 225148 - DNA, 826 bp, Unknown
  Bacterial polypeptide expressing nucleotide sequence isolated from the Sargasso Sea
atgattaaaaaaattgcttatacacttttattggcttggccaacagcgcttattgctaatgagcctaaggattggcaactaggtttccaaaaatcagcttcaaaaagtatggatgatattgtttggtttcacgactacatgcttgttccaataattaccgctatcactgcttttgttttatttttacttttatatgtctgtgtaagatatagggcttctaagaatcaagttccatcaacaacaagtcataacacattaatcgaggttatttggacattagtcccttgtttaattttgatcgtaatggcagtaccttcatttaaagttttatactcacaagatgaaattcctaaagcagatgttactattaaagctatagggtatcagtggtattggggatatgaatacccagatgaaaatatcatttttgattcttacatgattgatgagaaagatttaaaagaaaatcaaccaagattattagcggttgacaacgcggtttacgtgccagtgaataaagttgtaaaagttatgataactgcaaatgatgttttacatgcatgggcactcccatcctttggagttaaaagagatgcaattccaggaagaataaacgagacatggtttaaagcagaccgcactggaactttctatggtcagtgttccgaattgtgtggaattaaacatgcttttatgccaatcacagttaatgttgtatctgaagatgaatataaaaaatggttagaagaggctaaagtaaaatttgctaaagaagatattaataacactattaaagtagcaaaaaaaattaaggagataaattaat

SEQ ID NO: 225149 - DNA, 1018 bp, Unknown
  Bacterial polypeptide expressing nucleotide sequence isolated from the Sargasso Sea
tataattcaagcaggagaagttctagattatggtggcggaagtcctattctctttcaacatttattttggttttttgggcaccctgaagtttatattgtagcattacctgcttttggaatagtatctgacttaatatctgttcatgctagaaaaaatatatttggttacagaatgatggtttgggcaattgtaggtatcggaggtttaagtttcttcgtttgggctcaccacatgtatgtaagtggaatgaacccttggtttggatttttctttgcaacaactacactaattattgctgttcctaccgccatgaaggtttataactggatattaactttatggagaggtaatattagaataaatacagtaatgttatggtgcttaggatttatcgttacattcgttaatggaggaattactggaatatttttaggaaatgtatcagttgacgttccattatcagatacgtatttcgtaattgcacacttccatatggtaatgggtattgcgcctttgatggttattatgggtgctgtttatcactggttccctctagtagctggtaagttgttagacgagggactgggtaaatggcatttctggattactttcttaggagcatattcaatatattttccaatgcactatttaggatttattggagtaccaagaagatatttcgaaatgtatgatagtccatatatgacatctgctgttggaatgaatgagtttattagtattgcagcattcatagtgggcgcagcacagtttattttaatttttaatattatcaaaacattaaaaacaggtaaaaagtctgaacagaatccatggaaagctaactcgcttgaatggtatacttctactgtcccaccagaacacggtaactttggtgaaagacttccagttgttcataggtggccatacgattttagtgttccaggagctaaggaagattttattccacaaacaactgctcctagtgaagtagtacatacaaaagtagagaaaacttaa

SEQ ID NO: 225150 - DNA, 1069 bp, Unknown
  Bacterial polypeptide expressing nucleotide sequence isolated from the Sargasso Sea
gatgagtactgttactacagatccacatgctcatgctgagcatgaacatcatcacggaccagccaaaggcttaaaacgctggctttataccaccaaccataaagatataggcactttgtacctgctgtttgcactgacgatgttttttatcggcggtgctatggctatggtgatccgggccgaattatttcagccaggactgcaaattgttgagccgaacttttttaatcagatgaccacagtgcatggtctgattatggtgtttggtgctgtgatgcctgcctttactggccttgccaactggctcattcctatgatgataggtgcgcctgatatggcgttgccccggatgaataactggagcttctggattttaccttttgcatttagcatcctgctgttgtctttatttatggaaggtggcggccccagttttggctggactttttatgcaccgctatccaccacttacagcaatgacagcactgcactttttgtgttctctgttcatatcatgggtatttcatccattatgggcgctatcaacgtgatagtgaccattatgaatctgcgcgctccaggcatgacttatatgaaaatgccattgtttgtctggacctggtttattacggcttatttgctgattgctgtaatgcctgtgttggctggcgctgtgactatggtgctgactgataaatattttggtaccagcttttttgatgccgccggcggcggtgatcctgtgttgttccagcatattttctggttcttcggtcaccctgaagtgtacatcatgatattacctgcttttggcatcatttcagccatagtgccaacttttgcccgtaagccgctgtttggttacgcctccatggtgtacgccactgccagtatcgccttactatcttttttagtctgggcgcatcatatgttcaccacagggatgcccgtctttgcagaactgttttttatgtactgcactatgctgattgcggtgccgaccggggtgaaagtctttaactgggtcgctactatgtggcggggggctatgacctttgaagtgccgatg

SEQ ID NO: 225151 - DNA, 790 bp, Unknown
  Bacterial polypeptide expressing nucleotide sequence isolated from the Sargasso Sea
catgaccatcgccactcctccgagccaagctcctgaggccagcctcagcctgcaacccaccggttggctcaagtacttcagcttcagcctggatcacaaggtgatcggcctgcagtacatcgtctgcggcttccttttctatctcgttggcggcgccctcgctggtgtgatccgcaccgagctggccacgccgatttccgacttcgtcagccgtgacacctacaaccaggtgctgaccctgcacggcacggtgatgatctttctgtggatcgtgccggtggtgaacggtggcttcggcaattacctgatccccttctatgtgggcgccagggacatggcctttccgcgcctcaacgcggtcgccttctggatgattcccccctctggcctgttgctgatcagcagttacttcattggtggtgccgcccagtccggttggaccgcctacccaccgctcagcatcaccaccccggccatgggccagatcctctggatcgtcagcgtgctgctgctggggggcagctccatctttggtggaatcaacttcatcgccacaatcttgaagttccgccagccgggactcaagctgatgcagctgccgatgtactgctgggcgatgctcggcaccagcatcttggtggtgctggccaccccagtgctggcgggaaccttgatcctgctgagcatggacatcgtcgcccacaccggcttcttcaatccagccagcggtggcaacgtcgttgtctaccagcacctgttctggttctattcccacccggcggtgtacatc

SEQ ID NO: 225152 - DNA, 1069 bp, Unknown
  Bacterial polypeptide expressing nucleotide sequence isolated from the Sargasso Sea
ttggaaaatggagaaggttttgcatcgtggttttttactgttgaccacaaaagaataggtgtgatgtatttatgggccatcgctgtattctttattatcgcagctatcgcatcctttttggtcagatttgaacacttgacgcctggacaaacgattgtcagcgctgatacttataatgttttatttactttgcatggctctatgatggtatttttatttattgttccaggggttgccgcaagttttggaaattttttaataccattaatgataggcgctaaggatgttatttttccaaaactaaatttgtatagtttttggatttatttagcgggagcagcaatttttatgattgcattggctggacctgcagatacaggatggactttttatacaccatattcaattgagacgggtgcaaatgttatattgattacacttggtatatttgttttaggtttttcatctatcctaacaggtattaattttattgtgacgatgcataaacttcgtgcccctggtatgacttgggataggctacctcttttttgttgggctgcttatgctacatcattgcttcaagttttagctactcctgtagttggaattactcttttattattgattggtgaaagatacttcggtttgggattttttgatccagctcgtggaggagatcctgtaatgtttcaacatttcttttggttctattcacatcctgcagtttatattatgattcttcctgcaatgggcattatttcggaaattatgccggtcttttcacgtaagcctatttttggttataaggcaatagcgtatgcaagtttagcaatagcattgattagcttcttagtctggggacaccatatgtttgttagtggtcagtctaaactagttaacataatattctcagttataacttatgcagtcgcagtccctactgctataaaagtttttaattggttatggaccatgcataaaggttcaattgagctcagtactgctatgttgtactcactagcttttatttttctatttaccataggtggtttaacaggctattcttggg

SEQ ID NO: 225153 - DNA, 133 bp, Unknown
  Bacterial polypeptide expressing nucleotide sequence isolated from the Sargasso Sea
tttgtatcgtgtttacaaaaatcattttactccagataggcattttggattagaggccgcggcatggtactggcactttgttgatgtagtttggctgttcttgtttgtctgcgtttatgtttggggtgcataa

SEQ ID NO: 225154 - DNA, 808 bp, Unknown
  Bacterial polypeptide expressing nucleotide sequence isolated from the Sargasso Sea
atgcgcattttgatcttatttatagcaactgtatttagctttcctggtttagctaatactccttatgattggcaacttggttttcaggaacctgcgagtcctgttatgagaagtgttttagagcttcatgattttgtattaattatgatgacagcaataacaatttttgttctattacttataatttacgttgttattagatttagaaaaagtgcaaatccaactccttcaaaaagaacccacaatgccttaatagaaattttatggacaggtattccagttattattttaatagccatggcaataccatcttttaaacttttgtatcagcaagatgtaatccctgaagctgatatgacagtaaaagtaataggtcatcagtggtattgggaatatcaatatcctgagcaagacgatatttcatttgaaagttacatgattcctgatgatgaattggaagaaggagacatacgattattaactgttgataataaattagtacttccaattaataaaaatattcatgttttagtaactgcaggagacgttcttcatagttttgcaatgccctcgttaggtgttaaaaaagatgccgttcctggaagactgaatgaaacatggatgaatattgaaaaaactggcatatatagaggacagtgttcagaattatgcggaacaggacatggatatatgccaattgtaattgaggctgtttcccaggaagatttcatcgcatgggttactgaaacaaaaacaaaacttgctatgaatgaaaaaaatacttttgctaaagttaacacggaatagg

SEQ ID NO: 225155 - DNA, 895 bp, Unknown
  Bacterial polypeptide expressing nucleotide sequence isolated from the Sargasso Sea
aatgcaacccgaagtacagaatcacgaataccaaaaatattatgtacccgcacaaagtccatggcccatcgtaggggccgttgctctatttcttatcgccgtaggtgcgggcaattatgtggtgcaagcaaccaaaggtgaaacaggctatggcggtcatatccttttagcggggatagcagtattgctcgttatgcttgtaggttggtttaaaaatcaaatagacgaatctatggcagggctttacagcgatcagctggggcgttcatatcgacaaggtatgagctggtttatcttttcagaggtgatgtttttcgctgcgtttttcggcgccctctactacgcgagatttatttccgttccgtggctgggcggcgcatcgaataacgctatgaccaatgaggtcttatggccgacctttgaggccatgtggccgctggtgtcaacgccaggcggcactaccacacaggaaatgagtgctgcgggtttgcccacaatcaacacggttatcttgcttatctcatctattacactgcacttcgctcatgtgggactagagcaaaacaaacgcaaacagctaaccctaatgctgggtatcactatcttacttggatgtgggttcttgttcctacaggtagaagagtacatacatgcgtatcgcgacttggggcttacgcttcagtcaggcatttacggcaataccttctttatgctcacagggtttcacggcatgcatgtgacccttggcaccatcattctaattgtattgttttttagggtcttgaaaggccatttcacgcctgaaaaccacttcgcgtttcaggcggggagctggtactggcactttgtagatgtagtgtgggtcatgctctacatctttgtttacgtactttaa

SEQ ID NO: 225156 - DNA, 1714 bp, Unknown
  Bacterial polypeptide expressing nucleotide sequence isolated from the Sargasso Sea
aatgagcgaaggaaatcataagcaaagtttttggacaaagtatatttggtcaacagatcataagataataggtattcaatatggtatcacttctcttgcttggcttctatttggctttgttcttatatcaataatgcgataccagctggcttatcctggaacccctatccctttaatcggaagcctactgggccccgatggagcccttcctcctgaaacttataattccatgggtgcgatgcatggaacaataatgatattcttaggcgttgttccacttgcctttggtgcctttggaaattatttagtcccgcttcaaattggagcaatcgatatggctttcccaaagctaaatgctgcgtcctactggatttattttttagggtcagttattatggttgttggattttttgttcctggtggggcagcaaattccggatggacatcataccctcccttatcaaatattgcgactacgggtcaaactgtctggctatggggaatggttatgttaataacctcatcattattaggctcagttaatattctagttactgttattcagctacgcaccaaaggtatgacatggatgaagctacctatttttgtatggacacaatttatcacagcatttttattgcttttagcattccctcctttggaggctgcaggtatcctacaattgatggatcgtcttgttggaacaagcttttttatgccaagcggattagtcgttagtggaggaggtccttatgcgggtggtggaagccctttactatggcagcacttgttttggtttttagcgcatcctgaagtatacgttttaattctcccggcttttggtattgttactgaagtaattgcaaataatactagaaaaccaatcaaagggtataaatctttagtatacgcaatgatatttttaggctttatgtcttttattgtttgggcgcaccatatgtatctcactggaatgggtactacgattggagcttttttccaaacaacaacaatgattatttcaataccctcagttgtgattttgactgctttactgctatcgctctggggaggatcgattagatttaatacccctatgttatttgccttagggtttttaccaatgtttggaattggtggattaactggtctccctcttggtttggcggcagctgatatacatctccatgacacatattatgttattggtcatttccattatgttgtagctcccggaacaatttttgctttatttgcaggtatatattattggtttccaaagctcacaggtaaaagaaccaatgaaatgcttggaaagcttcacttttattcatcatttatatttatgaatggcgtatttatgcccatgttcattcaagggctagcaggtctttctaggcgaatgaatgatgggggcgaaacctatgcgcatgctgcaggagtgatacatttaaatgagtttatgacgatctcagcttggctccttggtgttgctcaactgttttttattgtaaatatgattattagtcttcgctctgaaaaaaccggtgaatccaatccatggaatgcaacgacaatagattggacggatacaacatcaccgcccctagggcatggtaattttgaaacagtcccaacggtctacagagggccttatgaatatagcgtccctaatgaaaaaaatgatttctcaccacaaagtcaaaaaggttaa

SEQ ID NO: 225157 - DNA, 1015 bp, Unknown
  Bacterial polypeptide expressing nucleotide sequence isolated from the Sargasso Sea
tttaaaagcaggagaagttttagaatatggtggcggaagtcctattctttttcaacatttattttggttctttggacaccctgaagtttatatagttgcactacctgcatttgggataatttcagatctaatttctgttcacgctagaaaaaatatatttggttatagaatgatggtttgggcaatagttggtataggtgcactgagcttttttgtatgggcacaccacatgtatgttagtggaatgaatccttggtttggattcttttttgccactaccactctcataatagccgtccctacagcaatgaaagtctataactggattttaactctttggagaggaaatattagacttaatacagttatgttatggtgcttaggttttattgttacttttgtaaacggtggaattacaggaattttcttaggaaatgttagtgtagatgttccattgtcagatacttactttgttattgcgcactttcacatggttatgggtattgcaccacttatggtaattatgggagctgtttatcactggtttcctttagtagctggaagattcttagatgaaaaattaggaaaatggcatttctggttaacttttttaggtgcttattcaatttatttcccaatgcactatttaggatttattggagtaccaagaagatatttcgaaatgtatgatagcccatatgtaacatcggctgtcggaatgaatgaatttattagtatagcagcctttatagttggcgctgcgcaatttattttaatttacaatattattaagactttaaagacagggaaacctgcaggacataatccttggcaagcttgttctttggaatggctaacaccaacagttccacctgaacatggtaattggggtgatagacttccaacagttcatagatgggcatatgattacagcgttcctggagctaaagaagattttataactcaaactactccaccaagtgaagtggcgcatacgaaagtagaaaaaacataa

SEQ ID NO: 225158 - DNA, 916 bp, Unknown
  Bacterial polypeptide expressing nucleotide sequence isolated from the Sargasso Sea
tatgtcacaacaagcttattacgtacctgaatctagcaagttaccttttgcgatggctataagcctgcttgtattcatcattggtgcagcgaagacagttatagatgccggaactgaatccaactcctacatgatactgcttctttcattcgcgatgatatgggtaacgatgtatttttggtttaaacagacgattattgaaaatcaagctgggttaaataatcctatgctcaaggattcatatgtatatggaatggcttggtttattttttcagaggtaatgttcttctttgctttcttctttgctttggcttacataagaaattttgccgttccatggttgggaggcgaaggagaaaagggtcttgcgaacatgttatggccaggatttgaagcaagttggcctttgatgataacccctgatcaggcagtatttgctgggcctgagaaggatatgtctctcgctactgcatacgcctcaggcggtttagggggtgttttaggatggttaccattatggaatacagtacttttattaacttcaagtctgacagttcatatagcccatttaggacttaaaaacggaaataggaaacaatttaatctttggctcggtgcaactttagttcttggctatgctttcgtagtagtacaaggcattgagtattatgaggcatatacccattacggattaacactcaacactggtatttatggcaccacgttcttcatgctcacaggctttcatggttttcacgtatgtcttggcgctataattttgaccataatgcttttcaggagtttgaaaggacacttttcctctgatgatcatttcggttttgaggccggatcatggtactggcactttgtagacgttgtttgggtttgcctagtcgcttttgtatacgtaatgtaa

SEQ ID NO: 225159 - DNA, 904 bp, Unknown
  Bacterial polypeptide expressing nucleotide sequence isolated from the Sargasso Sea
atgtccgaccaatcttcatatttcgttccagcaagcagtagattaccaatctggatggcctttggtttaatgctttttgtcttaggtgcgggttacactattaatgatttagacaaacctgactcaaattcgtattggattttaattgctgcttttgcggttatcttttctgtgtttttcttttggtttggtgaagtaataaaagaaaacgataaaggaatgtacagcgatcagttgaacagatctttcgttatgggcatgcagtggttcatattcagtgaagttatgtttttcttcgctttctttttggctcttggatacgtaaggatatttgcagttccttggttgggcggcgagggcgaaaaggctatctcgaatatgttgtggcctggatttgaagcaacttggccagttatgcagactccggatccgtctctattccaaggcccaaaagaaaatatgaatttccctggttttactaacgtaggacattggcttcctttttggaatacgctttgtttaataacctcaagcggaaccattactattgcagaacatgctcttaaaaaaggcaacagatcttcatttaagttttggatggttatgactttaatccttggatttacctttgtttatttacaaggactcgagtattacgaagcctacgatcatatgggccttactcttggtgcaggaatatacggaacaacgttttttcttttaactgggttccacggtttccacgtttgtatgggggcgattatcctaacaattatgactataagaggcttcagaggagcatttactaaggatgatcactttggcctagcagcaggatcttggtattggcacttcgtggatgttgtatggatattattggtattggtggtttatgttttctaac

SEQ ID NO: 225160 - DNA, 1717 bp, Unknown
  Bacterial polypeptide expressing nucleotide sequence isolated from the Sargasso Sea
attgagtaacgaccatcaccacgaagagaattttatacagaaatatgtattctctgtcgatcataaaatcatcggcttacagtacggtataacctcccttttattccttttatttggctttatgcttatgatgttgatgcgttaccaaattgcatacccagaaacggttataccttattttggtgaatggctatttgcaggaagtgggggtgttatgcttcctgaaaactataatactctcggagctatgcatggtacgatcatgatattccttggggtagttccacttgctgttggagcatttggtaactacctagtacctcttcagatcggtgctcctgacatggcatttccaaaacttaatgcagctagttactggtcgtactttgttggtggtgtagttatgatggcaagttttttcacacccgaaggagctgcccgctctggctggacatcatacccacccctctcaatttttgagtcaggtcagacaatgtggcttctgggtatggtatttttaattacctcatctctattaggttcaatgaatattattgtcaccattgttcagctgagggctccaggtctcacatggtttagattgccattttttatctgggcacagttggtcacttcatttctacttattctggcattccctccactagagtctgccgcaatattgcagttaatggatcggctagtaggcactagcttcttcttaccttctggccttgtgtatgcaggaagtccagtagaggcatatggttctggatctccacttttatggcagcaccttttctggtttcttgctcatccagaagtatacgtactcattcttccagcaataggtattgttggagagataattgcaaataatacaaggaagccgctctggggatataagtcactagtgtacgccattggattcttaggttttatgtcctttattgtatgggctcaccatatgttcttaactggtatgggacaatcaatgagtgcatttttccaattaaccaccatgatcatctctattccttctgtcgtggtcttaacagcattctttatatcgctctggggtgggtctatcaggtttaataccccaatgttatttgcactttcttttcttccaatgtttggcataggtggcctaaccggtctgccgttaggtgtagctgcttctgatatttttctgcatgatacttactatgttattggccattttcattacgtagtggcaccaggtacgatctttgctctttttgcaggaatctattactggtttccaaaagtgactggcaaaagaatgagtgaaacattaggaaaactgcatttttggccatctttgttgttcatgaatggagtatttatgccaatgttcatacaaggtctagccggactatcaagaagaatgtatgatggaggccaacagtatgcgcatgcatctgatgtacttcattggaatgaatttatgaccatttcagcattttgtttaggagctgcccagatcccattcatagttaatttaataatttccttagctggacaaaaatcagatgataggaatccttggaaatcaactaccattgaatggtctgcgccttctcctccactccctcatgtcaattttgattcatctgttgaagtgaatcatgggccctatgaatatagtgttcctggtcaagatgaggactactgcccacaaacatcaccatga

SEQ ID NO: 225161 - DNA, 679 bp, Unknown
  Bacterial polypeptide expressing nucleotide sequence isolated from the Sargasso Sea
atggcatcaacagaaaaaaaacatgattatcatttagtagagccgagcccatggcctatcttttgctcgattgcttctttaattttagcagttggggcggtttattattttagaacaaaaaatatgtggatgatgatcgttggtttagcaataacgacttatggtgcttacatgtggtttagggatgtaattatagaagcgcatgaaaaaggtgatcacacacctattgttcaaattggaatgagatatggaatgactttatttatagcatcagaagtaatgttttttgttgcttggttttgggcttatttcgatgcaagtttatttccagaccagattatcggaggaatttggccaccaaaaggaattcaaactttagatccatggcacattcctttaattaatactttaattttgttgttatcaggaacaacagtgacctgggcacatcatgccttacttgaaaatgacagacaaggactaaagcaaggacttattttgactgttattttaggagcgatttttacaatgtttcaagcatacgagtatatggcagcttcattcaaaatcacttctggaatttacggctccacattttatatggctacaggatttcatgggtttcatgttttggtcggtactatatttttatttgtttgttggtttagggctagggcaa

SEQ ID NO: 225162 - DNA, 796 bp, Unknown
  Bacterial polypeptide expressing nucleotide sequence isolated from the Sargasso Sea
tatgtttactattgaggggctttcgggagtaactcatgcagtatcaccttcagatgctcaacagcaagacacctattatgtagttgctcattttcactatgtcttatttggtggagcaatctttgcaatattctctggtatttatttctggtggcctaaatttactggttggttcttgaatgaaagaattggagtggtaaattttatattgatgatagttggatttaatttacaatttgcacctatgcattgggttggattagatggaatgcctagaaggatttacacatatgctgaaaatatgggatgggaactttctaatgcagcggctactgcaggtggctttttgattgctttgtcagtattggtattcctagcaaatgtttatttatcaagtagaaaaaaagttatggctggtggagatccttgggacggaagaacattagaatggtcaatttcttcccctcctcctcattataattttgttgaaattccagaagtagaacatatagatcattggtggtataaaaaatatccaggattattagaaggaagccctaagaataattctgagccttcagttgaagttgaggacacgaccaatgttgatgaatcaaagatacacttacctgatttatcttattatccattatttattggaattggattatccatagctgcgcttggagttttatattcttatgcacttgtaaccattgggctaatattagttttctggggaagcattggatggagtactgaacctgtaaacgaacctcacgagggagatcattag

SEQ ID NO: 225163 - DNA, 826 bp, Unknown
  Bacterial polypeptide expressing nucleotide sequence isolated from the Sargasso Sea
atgattaaaaaaattgcttatacacttttcttagcttggccaatagcactttttgctaatgagcctagggattggcaactaggtttccaaaaatcagcttcaaaaagtatggatgatattgtttggtttcatgactacatgcttgtgccaataattacagctatcactgcttttgttttatttctacttttatatgtctgtgtgagatacagggcctctaagaatcaagttccatcaacaacaagtcataacactttaatcgaggttatttggacattggttccttgtttaattttgattgtaatggcagtaccttcatttaaagttctatactcacaagatgaaatccctaaagcagatgttaccattaaagctataggttatcagtggtattggggatatgaatacccagatgaaaatatcatttttgactcttatatgattgatgagaaagatttaaaagaaaatcaaccaagattactagccgttgataatgaagtttacgtaccagtgaataaagttgtaaaagttatgataactgcaaatgatgtgttacatgcttgggcgctcccatcttttggagttaaaagagatgcaattcctggaagaataaatgagacatggtttaaagctgaccgaactggaactttttatggccagtgttctgagctttgtggaataaaacatgctttcatgccaatcacagtaaatgttgtgtccgaagaagagtataataaatggttagaagaggctaaagttaaatttgccaaagaagaaatcaataataatattaaagtagcaaaaaaaattaaggagataaagtaat

SEQ ID NO: 225164 - DNA, 843 bp, Unknown
  Bacterial polypeptide expressing nucleotide sequence isolated from the Sargasso Sea
tgtgggcaatcgttattattggtgctttaagttttgtagtttgggcacatcacatgtatgtagcaggtatgaatccatggtttggatttttctttgctacaaccactttaataattgccattccaacagcaattaaagtctataactgggttcttactctttggagaggaaatattaaattgactattccaatgctattttcgatagcatttattattacttttgttaatgggggattaacgggattgtttttaggaaatgtggctgttgatgttccattatcagatacttattttgttgtagcccattttcatatggtaatgggtatagctcctgttttggttattcttggatcaatttatcattggttcccactgattactggccgttttttgaatgaaagacttggaagaattcatttctgggtaacatttattggttcttactccatatacttccctatgcattacttaggttttatgggagtaactagaagatattttgaagtttttgaaggtgataattttacttattctataactggcatcaatcaatttataactgttgcagccttaataactggtgcagcacaatttgtgtttttttataatataattgtaagttctaaatttggaaaaaaggctggaaaaaatccatggaaagcttgttccttagaatggcaaactgaagatgttccacctacgcatggaaattttggtaaagaacttcctgttgtttatagatgggcttatgattacagtgtgccaggagcagatcaagattatattacacaagacacacctccaagtgctgttgctaatgcgagagcagagcaaacatgag

SEQ ID NO: 225165 - DNA, 916 bp, Unknown
  Bacterial polypeptide expressing nucleotide sequence isolated from the Sargasso Sea
atgtcagaccaaccttattacgtacccgagtctagtaaattaccattcgcaatggccctcaccatgttggtttttatcattggagccgctaatacagttatagatttaggtactgactcaaattcgtatttaatacttgttctctcttttgccatgatgtggaccactatgtatttttggtttaaacaagttatccaagaaaatcacgctggattaaataatccaatgctaaaagattcttatgtctatggcatggcatggttcattttttcagaagtcatgttcttctttgcatttttcttcgctttagcttacataagaaacttcgctgttccttggctgggaggagaaggggaaaaagctatatctaatatactatggccaggttttgaagccagctggcctctaatgataacccctgatcaggcagtattttctggacctgagaaagacatgtctttggctactgcatatgccgctggaggtataggtggagttttgggttggctgcctttgtggaatacagttctcttattaacttctagcttgacagttcatatagcccatttaggacttaaaaatggaaacaggaagcaattcaatctctggctgggcgttactttaatccttggctatgctttcgtagttgttcaggctgttgagtattatgaggcctatacacattacggtttgaccttaaatacaggcatatatggaactacattttttatgctgacagggtttcatggtttccacgtatgccttggagcaattattcttacaataatgctttttagaagcctcagtgggcattttactgctgacgatcatttcggctttgaagccggatcctggtattggcactttgttgatgttgtgtgggtttgccttgtagcgtttgtatacgttatgtaat

SEQ ID NO: 225166 - DNA, 469 bp, Unknown
  Bacterial polypeptide expressing nucleotide sequence isolated from the Sargasso Sea
aatgtcagctgaaaaaaaacatgattatcatttagtagacccaagtccttggcctatttacgtttcattttcatgtttagtattggcattaggatctgtttattaccttcatacagatgtttcatggggaatgtatcttggttttgctcttttaatttatggagcttatatgtggtttagagatgttgttattgaagctgaacatcaaggtcatcacacacctgtagttcaaattcaccacagatatggaatgaccttgtttattgcatctgaagtaatgttctttgttgcatggttttgggcatattttgatgtgagtttatttccaaatgaatttgttggaaatgtttggccaccaaaggatattgaaacttttgatccttgggatattccattaatcaatacactaattttattattatcaggtacgacggttacttggtctcacccatgctcttttagaagatga

SEQ ID NO: 225167 - DNA, 814 bp, Unknown
  Bacterial polypeptide expressing nucleotide sequence isolated from the Sargasso Sea
aatgaaaaaaattttatttatattttcaagtatttttatttctcaaaatgcttttgcaaaccaacctgttgattggcaattaggtttccaaaaagcggcgtcagaatcaatgagagacattgtagcctttcacgataatttgttattaccgataataatagcaataagtgtatttgttttatttttaatgctttatgcgtgtgtaagatttagagcctcggcaaaccctaatccctcaaagagaacacacaatgtaactgttgaagttttatggactttaattccttgcttaattttaattgttatggcggttccatcatttaaaattttatataagcaagacacaattccaaaagcagatttaacaatcaaagcaataggctatcaatggtattggggttatgaatatccagacgaaaatttggaatttgattcatacatgattgaggaaaaagatttaaaagcaaatcaaccaagattattagctgttgataatcaagttgttgttccagttggcaaagtagttaaagttttaattacagcaaatgatgttttacatgcatgggccctaccttcgtttggagtaaaaagggatgcggtgcctggaagaattaatgaaacgtggtttaaggctgaaaaagttggtacttattatggtcaatgttcagaactttgtggtataaaacatgcatttatgcctattgcagtaaaagtagttagtgaagatgaatatcaagaatggttatctgaggcgcgcgtgaaatttgcaaaagaagaaattgaaaatgataaacttaaattagcgagtaaataa

SEQ ID NO: 225168 - DNA, 1182 bp, Unknown
  Bacterial polypeptide expressing nucleotide sequence isolated from the Sargasso Sea
tttgcagctcgtacaagaggatgacattgatgagaatgccattaaccgtttggggtcttttcacagcaacagttttagctatgttagctttccctgcgcttttagtaagctcaataatgatgacattagacaaggttttgggaacaagtttctttatgcctacaatattaaaagcaggagaagtattagaatatgggggaggaagtcctattcttttccaacacttattctggttttttggacacccagaagtttatatcgttgcattgcctgcttttggaatagtatctgatttaatatctgttcattctagaaaaaatatatttggttacagaatgatggtctgggctattgttgtaattggagctttaagcttttttgtttgggctcaccacatgtatgttagtggaatgaatccttggtttggatttttctttgctactacaaccttaatcatcgctgttccaactgctatgaaagtttataattggatacttactctttggagagggaatattaggctgaacactgttatgttatggtgtctgggttttatagtaacttttgtaaatggcggtataacaggaatttttttaggcaatgtaacagtagatgttccattgtcagacacatattttgtaattgctcactttcatatggtgatgggtattgctccacttatggtaataatgggagctgtttatcactggtttccattagtaactggaagaatgttaagtgaaaaattgggtaaatggcatttttgggcaacttttttaggcgcatactcaatttattttccaatgcactatttaggattcataggagtgcccagaaggtattttgaaatgtatgatagcccgtacatgacatctgcggttggcatgaacgaatttataagtttagcagctttcctagtaggcgctgctcaatttatattaatttataatattgtaaaaagtttaaaaacaggagagccagcaggaaaaaatccatggaaagctaattcattagaatggtttacatcaactgttccacctgaacatggaaattttggtgatagacttccagtagtacacagatggccttatgattttagtgttcctggatcaaaagaagattttatacctcaaacaacagcaccaagtgcagttgtagataccgaagttgaaaaaacataaa

SEQ ID NO: 225169 - DNA, 81 bp, Unknown
  Bacterial polypeptide expressing nucleotide sequence isolated from the Sargasso Sea
gtttcgaggcggtcgcttggtattggcactttgtagatgtggtttggataggactgtttatattcgtttattggttatgat

SEQ ID NO: 225170 - DNA, 908 bp, Unknown
  Bacterial polypeptide expressing nucleotide sequence isolated from the Sargasso Sea
gtttggaattatttcagatctaatttctgttcacgcaagaaaaaatatttttggttatagaatgatggtatgggcgattgtaggaattggtgctttaagcttttttgtatgggctcaccacatgtatgttagtggaatgaatccttggtttggtttcttttttgcaacaacaacactaatcattgctgttccaacagccatgaaagtctataactggattttaactttgtggagaggtaacataagaatgaacactgttatgttatggtgtttaggttttatagtaaccttcgttaatggtggaattacaggtatttttttaggaaacgtttcagttgatgtacctttatctgatacttatttcgttgtagctcattttcatatggtaatgggaatagctccacttatggttattatgggtgcaatttatcactggtttccgttagtggcaggaagatttttaagtgaaaaattaggtaaatggcacttttggttaacttttttaggagcatactcgatttatttcccaatgcattatctgggatttattggagttccaagaagatattatgaaatgtatgacagcccatatgttacatctgctgtagggatgaatgaatttattagtttagctgcgttcttggtaggagctgcgcaatttattttaatatacaatattataaaaactttaaaaacaggtaagcctgcaggaaaaaatccatggaaggcaaactcattagaatggttaactcctacagttccacctgagcatggtaactggggtgatagactaccagtagttcatagatggccttatgattttagcgttcctggagcaaaagatgattatataactcaaactacgcctccaagtgaggtttctaatactggagtagaaaaaacttaga

SEQ ID NO: 225171 - DNA, 373 bp, Unknown
  Bacterial polypeptide expressing nucleotide sequence isolated from the Sargasso Sea
atgagcggtgcgaataaacacccctatcacctagttgaagctagtccatggcctgctgttggcgcggctgcggcctttacagctgctgttggcggcgtcatgtatatgcatgaagtagcctacggtgtggctgtgcttgggctgggctttgcgctggtgcttgcaaccatgtttatgtggtggcgcgatattgtccgggaggcggagtatcaagggcaccacacatccattgttcagatcggtatgcgctatggcatgatgctttttattgcgtcggaagtgatgttttttgtggcattcttctgggcattttttgacagggcgctatatcccaatgatggggtgtggccgccagaaggcatcacaaccttga

SEQ ID NO: 225172 - DNA, 655 bp, Unknown
  Bacterial polypeptide expressing nucleotide sequence isolated from the Sargasso Sea
atgagcgcagttatagaaaatcaccacgacgatcatcatcatggtcctgcaaaaggaataacaagatggctttatacaacaaatcataaagacataggaaccctatatctttggtttagctttgccatgttcttaataggcggcgcgatggctatggttattagagctgaattatttcaacctggtatgcaaatagttgagccagagttttataaccagatgataactcttcatggactgataatgatatttggtggagtaatgcctgcattcgttggtcttgccaactggctagttccaatgatgattggtgcacctgatatggccttaccaaggatgaataatttaagtttttggattttgcctttcgcgttttttgttttactttcttctttattcatggaaggtggagcacctaactttggttggactttctatgctcctttatcaacaacatacgcaccgccaagtgtaactttctttatattttctgttcacataatgggagcctcatccatcatgggatcaataaacgttgtggttaccataatgaatatgagagctccgggtataactttaatgaaaatgcctttgtttgtttggtcttggttgataacagcatatttattgatagcagttatgcctgttttagctg

SEQ ID NO: 225173 - DNA, 550 bp, Unknown
  Bacterial polypeptide expressing nucleotide sequence isolated from the Sargasso Sea
actagtcccttgtttaattttgatcgttatggcagttccttcatttaaagttttatattcgcaagatgaaatccctaaagcagatgttactattaaagctatagggtatcagtggtattggggttatgaatacccagatgaaaatatcattttcgattcttatatgattgatgaaaaggatttaaaagaaaatcaaccaagattattagctgttgacaatgcagtttacgtaccggttaataaagttgtaaaagttatgataacagctaacgacgttttacatgcatgggctctaccgtcttttggagtaaaaagagatgcaattccaggaagaataaacgaaacatggtttaaagctgaccgaactggaactttctatggtcagtgctctgaattatgtggaattaaacacgcctttatgccaattacagtaaatgttgtgtctgaagatgaatataataaatggctagaagaggctaaagtaaaatttgccaaagaggagataaatactaaaattaaagtagcaaaaaaaattaaggatttaaattaa

SEQ ID NO: 225174 - DNA, 763 bp, Unknown
  Bacterial polypeptide expressing nucleotide sequence isolated from the Sargasso Sea
tatgagctcagttattgaaagccaccatgatgatcatcatcacggccctgcaaaaggcttgatgagatggcttcttacaactaaccacaaagatataggtacattatatctatggtttagttttgcaatgttcttaattggtggagcaatggcaatggttattagagccgagctttttcagccgggaatgcagatagtagaacctgaattctataatcagatgcttacactgcatggacttattatggtttttggtgcggtaatgccagcctttgttgggttggctaactggcttgtacctatgatggttggtgctccagacatggccctaccacgactaaacaatttaagtttttggctacttccatttgcctttggtatcttactctcctcattatttatggaagggggagcaccaaattttggatggacattctatgctcctctctctacaacgtatgcgcctccgagtgtaaccttttttattttctcggttcacattatgggagcgtcatcaattatgggatctattaatgtaatcgtaaccataatgaatatgagagctccaggaatggatttaatgaagatgccactctttgtatggtcttggttaattactgcttaccttcttattgctgttatgccagttctagctggtgcagtaaccatgatgttaatggatatccattttggaacaagcttctttaatgcagctggtggcggtgatccggtattattccaacacattttttggttcttcggc

SEQ ID NO: 225175 - DNA, 772 bp, Unknown
  Bacterial polypeptide expressing nucleotide sequence isolated from the Sargasso Sea
tatgagcgcagttatagaaaatcaccacgacgatcatcatcatggccctgcaaaaggaataacaagatggctgtatacaacaaaccataaagacataggaacactttacctttggtttagtttcgccatgttcttaattggtggtgcgatggccatggttataagagctgaattatttcaaccaggcatgcaaatagttgagcctgacttttataaccaaatgataactcttcatggactgataatgatatttggtggagtaatgcctgcattcgttggtcttgccaattggctagttccaatgatgattggtgcacctgacatggccttaccaagaatgaataatttaagtttttggattttgccttttgctttttttgtcttactttcttctttatttatggaaggaggagcacctaactttggctggactttttatgctcctttatcaacaacatatgcaccaccaagtgtaactttctttatattttctgttcatataatgggggcctcatccatcatgggatcaatcaatgttgtagttactataatgaatatgagagcccctggtattactttaatgaagatgcctttgtttgtttggtcatggttgataacagcatatttattgatagcagttatgcctgttttagctggcgctgtaacgatgatgttaatggatatccactttggaaccagcttctttaatgctgctggaggaggagatccagtattatttcaacacatttttttggttttttggtcaccctga

SEQ ID NO: 225176 - DNA, 911 bp, Unknown
  Bacterial polypeptide expressing nucleotide sequence isolated from the Sargasso Sea
tcctgccaaaggaggcgaccctgttttattccaacatttcttctggttctattctcacccagcagtatatataatgattcttcctgcaatgggaataatttcagaggttattccagtattttcaagaaagccaatatttggttacaaagctatcgcatattcaagtttagctatagctctaataagcttcttagtttggggccaccatatgtttgttagtggacagtcaaaattaattaatattattttttctgtaataacttttgcggtggcagtaccaactgctattaaagtatttaattggctgtggaccatgtacaaaggttcaatagaattaagtgcagctatgctttattccttagcttttattttcttatttactatcggaggactaactggtctatttctaggagctcttgctgctgatgttcatcttcatgatacatactttgtagttgcccatatgcattatgttatgattggcgggactgtttttgggctgttttctgccattcacttttggtaccctaaaatgtgggggaaaatgtttgatgagttcaaagctaagattgcatttgtactaatatttattggattcaatgttgtattctttcctcaatttattttaggtacacttggaatgccaaggagatattttaactattcacctgagttcactacactgcatcagatatctacatatggaacatggattttgggcattggatttataattatgctttatgctttactaaaacctatttctgataaagcggaagctaatccatatgaatcagcatcattagaatggagtatgccttctccaccaccaactttaaattttgaaaaaatacctaccttaacagcttcgacatatgattatgggacgaaattggagcaggaggcctaat

SEQ ID NO: 225177 - DNA, 1660 bp, Unknown
  Bacterial polypeptide expressing nucleotide sequence isolated from the Sargasso Sea
actgggctttctttataaatatattctacctgtagatcataaaatgatcgctatgcagtacatgttcacaggattgatcatggctgttataggaggttttttctcatatgtattccgtatgcaactcgcatttccaggagaatctgttcctctttacggtatagtaggacccggtgaatataacatgatggtaactaatcatggcactattatgattttctgggtcgcaatgccggtattaattgctgcgttcggtaattatctaatacccctgatgtgcggatgtgatgatatggtcttcccacgtttaaaccgattgtcttatcagatattcttggttagtgctcttgttttaatcttctcatttttcgtaaaaggaggaggttttggaggggcatggacagcatatccacccctttcttcggtacctgaatacaatctgacagactggggagcatctctatggatattggcagtagctctggagttcgtttcttttctcttaggtggaataaattttgttacaacagcaatgaatgcccgtgctccaggaatgaaaatgttggatattccgatagtagtatggtttatagtaattgcggtaattttattcatggcctctgtaggtcctctgatcgctggagcagtaatgctgttcatggaccaaaggataggtacaacttttttccttccatctgggggtggtgatcctcttctatgggaacatcttttttggttttttggacaccctgaagtatatgttgtactgcttcctacaatgggaatagttgcagaaatcataactgtattttccagaaaaaaattatttgggtaccgaacaattctctataccgcctttgccactggtggactatccttcgtggtttgggcacaccatcagtttgttgcaggaatagatccccgtatggctaatgttttcgtagtaacaacacttttgatatcgatacctattgctgaaatgctatttagctatattgcgaccctttatgggggttctattgagtacaaaacacctatgctatgggcccttagctttttgttcgccttccttatcggaggagttactggaatatatctgggagccagtgcacttgatgtttattttcatgattcatattttgtactagctcattttcattacacattctttccaattactataataggaatgtttgcagccataacttactggttcccgaaaatgtttggcagaatgatgaatgaaactttaggcaaaattcacttctggggaaccttcataccctttaactgtattttcctaccccttttcttcctaggacttgcaggacagcaccgaagaatatataacttcagtcattacccggacttggcaactgaaaacatgcaggatgtaagagtttttgctaccacaagtttagttgttatgttgcttttccaagcgatattcttatacaactttttctacagtatttttaaaggtaaaaaggctccggaaaatccatggaaagccaacacccttgaatggacagtaccgtctcccccaccgcatggtaatttcaaggaactgcctactgtttatcgtggagcctatgagtacagtgtccctggacgtgagtcagattactggccgcaaaacatgccgcctgataaaagctga

SEQ ID NO: 225178 - DNA, 1249 bp, Unknown
  Bacterial polypeptide expressing nucleotide sequence isolated from the Sargasso Sea
tatggtcagattcaaagacatggcatatccaaaattaaatgcagtagcattctggatgattccaccagcaggtgcactcatctggttaggatttgcagactttacttggtatgcatacccaacatattctgtagttagtgcaccgggtcctgctgcagacatgtggatatttggactgaaaattttaggtgtgtcatcaatacttggttcaattaatttcgtagttacaattatgaaatgtaaacatcctgatttaccattaagtaaaatgccgctattagcttgggcatatcttacatcatcattaatcactctagttgcagttccaacatttgctgcagcgctgttaatgttgttaactgatagattaggagcatctggatttttcaatcctgcaatgggcggagacccgattgcgtatcagcatttgttctggtttactttccatcctgaagtatacatcttggtaattcctgctattggtttcatgtatgaaatattcccacgtttctcaagaaaaccaatctttagtcatggctctggagtagccgcatttactttgctaactattgtcggatttgcatcttgggcacatcacatgtatgcaaccggaatgtcatttacagaaaagacagtattcatggtcggaactttagcagcagttccagcatctgcaatgcacacattcaacttcctcgcaaccatgtggggtggaagaatcaagtttgcaaccccaatcatgtgggctgtaggcggaatcgcactattcttctctgctggagcaggtggtgtcgtaaacagtgcaatgccattagactttatcactcacgactcttactgggtagttggacacttccatctatttgtcatgggtacaattctcttcggtacagtcggattcgtatactacttcttcccatacgtaactggcagaatgtacaatgaggcaatgggtaaaatccactttatcttatctttcgtaggaaccgttctagtattctttacacaacatatcttgggactctttggaatgccaagaagaatttatgattatccagcaattccggaatgggtccaaatgaatattataatttcaattggcgcattcatcatcggtatcggtatggcaatcttccttggcaacttagtttggagtgccgcaaaaggaaaaccagcagatatggacgatccattcggcttaggcggaaaatattacttcccatatcaggcaaagaacccatcacattag

SEQ ID NO: 225179 - DNA, 711 bp, Unknown
  Bacterial polypeptide expressing nucleotide sequence isolated from the Sargasso Sea
aatgacaacaatttcatatccaacattaatacctaggccaaaagagtatgtatctggggtttggtcatggcttacaactgttgatcataaaaaaatagggactatgtacggagttatagcttttttctggtttcttgttggaggtattgaagctttactgattaggattcagctatctggcccagaaggcacgtttttaactcctgaagtttataatcaggtttttacaatgcacggaacaacaatgatttttcttgttgtaatgcctttgagcgctgctttttttaattggatggtcccattgatgatcggtgcaagagacgtggcatttccaaggctaaatgcttttagtttatgggcatttttatttgggggaattttacttaacatatcctggtttactggcgaagctccaaatgctggatggtttgcttacgcgccaaatactgaacttccctttaacccaaaaaatggtgttacctactggatattaggtcttcaagtacttggcatagcttctttagcagctggatttaatttcctaacaacaattataaacatgagagcacctggtatgactttcatgaaattacctgtttttatatggatgactgcagtagtcaacgttcttattgtcttggcatttccagtaataactgttgcgttaattcagttacagtttgatagattatatggaactcatttttttaa

SEQ ID NO: 225180 - DNA, 532 bp, Unknown
  Bacterial polypeptide expressing nucleotide sequence isolated from the Sargasso Sea
cttgtgcacatgtgatgggtttttctttaaagacaaagcagttgcagtcataggtggaggaaatgctgcagttgaagaagcaatgtttcttacaaaatttgcatcaaaagttcaattaattcatagaagagattctttaagagctgaaaaaatgcttcaaagtaaattaatggctaacaaaaaaattgaaattatttgggatagtgttgttgaagaggttattggagacaatgatcctaaaagtgttaagggattaaaaattaaaaatgtaaaaacaaataaaattgatgaattaaaaattgatggattatttattgcaattggacacgacccggcaactcaactatttaaagatcaattagatatggataaagaaggctatttaacaacaaaatcagattcaacagaaacaaatgtgccaggtgtttttgctgcaggagatgttaaagacaaaatatttagacaagctgtaactgctgcaggaatgggttgtatggctgcgcttgaagctgaaaaatttttgtctaaataa

SEQ ID NO: 225181 - DNA, 1804 bp, Unknown
  Bacterial polypeptide expressing nucleotide sequence isolated from the Sargasso Sea
aatgtctgtagctgttaataataatgtagataatcacgatgaacatgttcatcaccataaagaaactttcataacaaaatggatctttagtcaagatcataaaatgatagcaaagcaatactttgtaaccggagttattgttatgggtataataggagttcttatgtccctattattcaggattcagttaggttggccagaagaatcatttcaagtatttaaaatatttttaggtgacagatgggctccagacggagttatggatccaaatatatatttagcattagtaactattcatggtactataatggtattttttgttcttactgctggtttaagtggaacttttagtaatcttttaattccacttcaaattggagcaagagatatggcgtctggatttttaaatatgattgcctactggttattttttgtttctagtgtaattatggtagcctcattatttgttgaagctggtccagctgctgctggatggacaatttatcccccactaagtgctcttcctcaaactcaaccaggttcaggtttgggaatgactttgtggcttgtttctatggcattttttattgcctcgtcgctactaggttcattaaattatattgttactgtacttaatttaagaacaaaagggatgaccttttttagattacctcttactatttgggcattcttcatcactgcaattattggtgttatttcattcccagtattattatctgcagcacttttattaataatggatagaagttttggcacttcatttttcctgtctgatatttttgttcaaggtgaagtacttcattatcaaggcggatcacctgttttatttgaacacctcttttggttccttggtcaccctgaagtatatattgttttgttacctgcattagggattacatctgagataattgccacacatgctagaaagccaatttttggttatagagcaatggtagcctcaattttagcgattgctttcttatcaacaatagtttggggacaccatatgtttattactggtatgaatccttttcttggttcagtatttacatttacaacattattgattgcaattccttccgctgtaaaagcattcaattatatagctaccctttggaaaggaaatttacagctaaatcctgcaatgttattttctattggattggtttcaacatttattactggtggattaacgggaattatccttggagatagcgccttagatattaatgtacatgacacgtactttgtagttgcacactttcatttagttatgggtatttctgcattatatggtcttttcgctggtgtatatcattggttccctagactatatggtaggatgatgaataagtctcttggatatatccatttttggataactgcaattggtgcatatggtatatttttcccaatgcattttgttggaatggcaggattaccaagacgatattatacaaatacagcattcccatattttgatgatctagctgatattaatgtattaattactgtgtttgcgttaattactggattagcacaactagtatttttatataatttctttcacagtatgtattatggaaaaaagtctgaacaaaatccttggaagtcaaatactctagaatggactgctccagtagagcatattcatggtaattggcctggaaaaatcccacaagtatttagatgggcatatgattacagtaaacctgggaaaaaagaagattttgtccctcaatctgttccaattgctgaaggagaaaaaattaccgagcattaa

SEQ ID NO: 225182 - DNA, 1109 bp, Unknown
  Bacterial polypeptide expressing nucleotide sequence isolated from the Sargasso Sea
catgcgggcgcccgggatgacgtttttccgcatgccgctgttcctgtggaccgcctgggctgcccagaccatccagctgatcggtttgcccgctctaaccggcggagcggtgatgctgctgttcgacctcagcttcggcaccagcttcttccgcccggaaggcggtggcgatccggtgctgttccagcacttcttctggttctattcccaccccgctgtttacgtgctggtgctgccggtgttcggcatcttctccgagctgttcccggtgtatgcccgcaagccactgttcggttaccgcttcgtggcgatcgcctccttcggcatcaccttcctcagcctgatcgtgtgggcccaccacatgttctatacgggcacgccgaactggatgcgccacatcttcatgttcaccacgatgctgatcgcggtacccacgggcgtgaaggtgttcgcctggttgggaacgttgtggcagggaaatttaagactgaacacgccgatgctcttctgcctcggcggactgttcaacttcatcttcgccggcatcaccggcgtgatgctggccacggttccgatcgacattcacgtgggcaacaccgccttcgtggtggcccacttccactacgtgatcttcaacacgatcggcttcggggtgttcgccgggatctaccactggttccccaagttcaccggccggatgtactacgaaggcctcggcaaggtgcacttcgtgctcaccttcatcggtgccaccttgaactggctgcccctgcactgggccggtctgctaggcatgccccgccgagtcgcctcctacgacccggaattcgcgatctggaacgtgctgggcagcatcggtgccttcatgctcggcgtcgcctcgattcccttcatcctcaacatcgtgagctcctgggcccagggtcagaaggctcctcccaatccctggcgggccatcggcctggagtggctgctgccctccccgccaccggctgagaacttcgaggacgacatccccaccgtgatcagcgagccctacggctacggcctggggcaccccctcgtcgaggacgaggagttctacgtccgccgctcccaggaggcctgac

SEQ ID NO: 225183 - DNA, 400 bp, Unknown
  Bacterial polypeptide expressing nucleotide sequence isolated from the Sargasso Sea
ttattattggtttagtaaaatgtcaggatatgaatattctgaatggttaggacaacttcatttttggctaacttttataggagtgaatttagtattttttcctcagcactttttaggattagcaggaatgccaagaagatacgcagattatccagatgcatttgctgattggaattatatttcatcaattggctcatatatctctgtagtgggtttaggagttttctttgtaaatataatttatgcatttattaaaaaagaaaaagcagctcaaaatccttggggcgagggagcaacaactcttgagtggactgtgccgtctcctcctaattttcatacatttgaagaacttccaaagtttgaagaggagtatgaaactgcagaaaaatctggtagttag

SEQ ID NO: 225184 - DNA, 620 bp, Unknown
  Bacterial polypeptide expressing nucleotide sequence isolated from the Sargasso Sea
aatgtcagcaggtgaaaaaaaacacgattaccatcttgtagacccaagtccttggccgatttatacttcatttgcaactttagttttggctattggatctatttactattttcactcaaaagtaatgtgggcaatgattcttggtttagctcttgtctgttatggagcttttatgtggtttagagatgtagtaattgaagcagaacatcaaggtcaccacacaccagttgtccaaattcatcacagatatggaatgactttatttattgcatctgaggtaatgttttttgttgcttggttctgggcttactttgatgcaagtctgtttccaagtgaatttgtaggaaatgtttggccaccaaaagacatagaagtttttgatccttgggatattccattaataaatacattagtattattgttgtcaggaactacagtaacgtgggcccatcatgctctactagaggacgatagaaaaggttttattcaaggtttatcatggacagtctttctaggcgtatgtttcacagcgctacaagcatatgaatatcaacacgcaacatttgaattttctaatcatatttacggtgctactttttatatggcaacagggtttcatg

SEQ ID NO: 225185 - DNA, 813 bp, Unknown
  Bacterial polypeptide expressing nucleotide sequence isolated from the Sargasso Sea
caattactggcaatgtttccacaatgcttcttcttggtatgttagctgtagttattactatgtctttctggttttctgttgttatgaaagagtcaaaagctggacttgatacaccgcaattaaataattcttatgtatttggaatgggatggtttattttttcagaggtaatgtttttcttcgccttttttggtgcattattctacataagacagtttgcagtaccatggcttggaggtgagggagaaaaaggccttgctggagaattattatggccagaatttgaggcaacttggccacctatgataactcctgagcaaagcattatgggcgatcaggcagtaacaaaaggacctgatgaatctatgtatctgcatggcataagtggaataattaagtggcttcctctatggaatacaatcgttcttctaagttcaagcggaacagttcactttgcacatattgcactaaaagaaaataatagaaaaagatttaacttttggttaggaattactgtgtgcttagcatttatttttgtaattcttcaagcagcagaatactatgaggcctatgctcatctgggattaactctaaattctggagtatatgggacaactttttttatgcttactggatttcacggaatgcatgttttgatcggtggtatctttcttttaactcagctatttaggtcaacagggttcaaacattttacagaaaaagaacattttggctttgaagcagcttcatggtattggcattttgttgatgttgtttgggtttgcttatttttatttgtttatattatttaac

SEQ ID NO: 225186 - DNA, 298 bp, Unknown
  Bacterial polypeptide expressing nucleotide sequence isolated from the Sargasso Sea
atgagctctaaagatcaaaaacatgattaccacttggttgatccaagtccgtggccaatctatacatcttttgctactttaataactgctgtaggatcagtttattattttcactcaaaagttatgtgggcaatgttacttggttttgctcttttaatttatggagcatacatgtggttcagagatgttgtaaatgaagctgaacatcaaggtcaccatacaccagttgttcagatacatcatcgttatggaatgacattgtttatagcatctgaagtaatgttttttgttgcttggt

SEQ ID NO: 225187 - DNA, 943 bp, Unknown
  Bacterial polypeptide expressing nucleotide sequence isolated from the Sargasso Sea
ttaattttatcttggtttatgagattacaactaggttttcccggattagcaggttttatgaccgctgaacattactatcaatttgttacaatgcatggaatgataatggtagtctattttttgactgcgttatttctcggaggttttggaaattatttaattccactaatggtaggcgcaagagacatggtctttccatatgtgaacatgttaagtttttggatgttctttgtggcagtagcagttttaatggcaagcttttttgtaccgggtggaccaactggttcaggatggactttatatccacctcaagcaatcttagaaggaacaccaggttcaggtgctggaattttattaatgcttatctctctttctttgtttgtaatcggttttacaatgggtggattaaattatttaattacagtgttacaagcaagaacaagaggaatgactttaatgagaatgcctttaacagtttggggtatttttacagctacagtattagctatgcttgcatttccagctttactagtaagttcaataatgatgactttagataaagttctcggaacaagtttttttatgccaacaattttaaaagctggtgaagttttggaatatggtggaggaagtccaatattattccagcacttattctggttttttggtcacccagaagtatatattgttgcactaccagcatttggaatagtttccgatttaatttctgtacactctagaaaaaatattttcggatatagaatgatggtctgggcaattgtaggtattggagcattaagcttctttgtttgggctcaccatatgtatgtaagcggaatgaatccatggtttggtttcttctttgccacaacgactctaattattgcagtcccaacagctatgaaaagtatacaactggattttgactctatggagaggtaat

SEQ ID NO: 225188 - DNA, 1091 bp, Unknown
  Bacterial polypeptide expressing nucleotide sequence isolated from the Sargasso Sea
atccgcaattatgatgctttttgatatcttgctgggaaccagcttttttatgccagccattatcgagtccggttcccctctggatcataacggtggatccccgattcttttccagcacttattttggttttttggccatcctgaggtctatatagttgcgcttcctgccttcggtctagtatccgatgtactgagcgtccatgcccgaaaaaatatttttggttaccgcatgatggtatgggcaataattgcaataggcggattgagctttattgtatgggctcatcatatgtatgtaagtgggatgcacccctattttggtttcttttttgcgacaacaactctcataattgcagtgccaaccgctctgaaagtgtataactggatcctaactctctgggaaggtgatattcgactgaatgcgccaatgtatttcgcgataggttttattttcacctttattcatggcggaataaccgggctgtttttgggaaatgtagtaatcgatttaccactttccgattcctactttgttgtggctcatttccatatggtgatgggagtctctccagtgcttgtggtcttcgccgcaatttatcattggtaccccaaaataaccgggcgcatgtttaatgaaggcatggctaaactccatttttggtgcactttcctaggaacctatgctatttacttgcccatgcactatctgggattcttaggcgtgccgcgacgctattatgcattaggtactaccgacttcattccagcttctgcacaggacttgaatacaacaatcacaatagctgcgctgtttgtcggagcatctcagttgttgttcttcataaatgttttttggagcttacgtaacggacctaaagccgatcctaacccatggggagctgcctccctcgaatggcaaacgccagatacaccgccagttcatggaaattggggcgattccctgccaacagtataccgctgggcttatgactacagtgtgccgggcgcagaacaagactttattcctcagaacactccagaggaagaaggacccaccatgaacgatgatggtatggacaaggaggcgtagt

SEQ ID NO: 225189 - DNA, 967 bp, Unknown
  Bacterial polypeptide expressing nucleotide sequence isolated from the Sargasso Sea
atgaatgaatactcaggtgcagctgcagctgatattgattatgttagacctgctgaaattcctgagcaggatttataccacggtcatagctttattactaaatggattttttgtcaggatgcaaaagttatcggagttcaatattttttaactgcagtatttactggaatagttggtttaattttatcttggttaatgagattacaattaggttttccaggacttgcaggctttatgacagcagaacattattatcagttcgttacaatgcacggaatgataatggtagtatattttttgactgcgttatttcttggaggttttggtaattatttaattccattaatggttggtgctcgtgatatggtttttccttatgtcaacatgataagttattggatgttttttgttgctgttgcagttttgatggcaagtttttttgtaccaggtggaccaacaggatcaggatggaccttatatccaccacaagcaatcttagaaggaactccaggttctggaatgggaattcttttgatgcttgtatctttatccttatttgtaataggttttacaatgggaggactaaattatttaattaccgttttacaagctagaactagaggtatgacattaatgagactgcctttaacagtctggggtatttttaccgcaacagtattagcgatgctagcatttccggcacttttagtaagttcaataatgatgactctagataaggtgcttggaacaagtttcttcatgccaacaattttaaaagctggtgaggttttagaatatggtggtggtagtcctattctttttcaacatttattttggttctttggacaccctgaagtttatattgttgcattgccagcctttggaatagtttcagacttaatttcagtacatgctagaaaaaatatatttggttatagaatgatggtttgggcaattgtaggtattg

SEQ ID NO: 225190 - DNA, 631 bp, Unknown
  Bacterial polypeptide expressing nucleotide sequence isolated from the Sargasso Sea
aatgtctgcatcaggtcaaaaacatgattatcatttagttgaccctagtccttggcctttagccacatctatagcaacactagttacagctgttggatctgtttattattttcacagtaaagttatgtgggcaatggttttaggttttttacttataatttattgtgcctttatgtggttcagagatgttgtaatcgaagctgagcacaaaggtcatcatacacctgttgttcaaattcatcatagatatggaatgacattatttattgcttctgaagtaatgttttttgttgcatggttttgggcatactttgatgcaagtttgtttccaaatgaattcatgggaaatgtatggccaccaaaagatattgaaacttttgatccatgggacatcccacttataaatactcttgtcctacttttatctggtacaacagtaacttgggcacaccattctttattagaggatgatagaaaaggatttataaatggtctaatctgtacagtaattttaggagcattttttacgttattgcaaatatacgaataccaacacgctacatttagtttttcaggtccatatttatggagctacattctatatggccacagggtttcatggtttccacgt

SEQ ID NO: 225191 - DNA, 685 bp, Unknown
  Bacterial polypeptide expressing nucleotide sequence isolated from the Sargasso Sea
tattattaaagcaggggaggcactttcttatgacggtggtagccctatacttttccagcatttattttggttttttggtcatccagaagtttacatcgttgcactacctgcttttggaatagtttctgatctaatttcagtacactctagaaaaaatatttttggatacaggatgatggtttgggcgattgttggaattggtgcactaagcttttttgtttgggcgcaccacatgtatgttagtggtatgagcccttggtttggtttcttttttgcaactactacacttattattgcggtacccacagcattgaaggtctataattggatacttacactttggagaggaaatataagaataaatactgtgatgcttttctgtctaggttttattgtcacttttgtaaatggtggtataacaggtattttcttaggaaatgttgctgtagacgttccattatctgatacctattttgtaatcgctcactttcatatggtaatgggaatagctccgcttatggtaatttttggagccatttatcattggttccctttagttactggaagattcttagatgaaaagttgggcaaactggcatttttggataacttttttaggtgcttactctatttattttccaatgcactatttaggcttcattggtgtaccaagaagatactttga

SEQ ID NO: 225192 - DNA, 877 bp, Unknown
  Bacterial polypeptide expressing nucleotide sequence isolated from the Sargasso Sea
aatgaccactaaacatgagacttactacgtccccgcccagagtgcttggccgattgttggtgctatcggcttgtttttaatcgcctttggggcaggacattttgtacatcaactcaaatctggcgcttcaggtggcggctatattttactggcaggcatcgccgtcatcctgtttatgctagtaggctggtttagaaccgtgatcaaagaatcgatgacgggcctctattcccatcagatggatagatcgtttcgccaaggcatgagctggtttattttctccgaggtgatgttctttgccgccttcttcggcgccttattttacgcccgcatgatcgcagtgccctggctcggcggcgcgtccaacaatgccatgactcacgaagtcctgtggccacacttcgaggccgtttggccactcgtcaccacaccagatggcaccaaaaccgaagccatgccatggaatggactgccgctaatcaacacgattgtgctgctgacttcctcagtcacgctgcattttgcccatatcagcttagaaaagggtaagcgttcggccattaccctctggctgggactcacgattttgctcggaatttgcttccttgctttgcaggccgaggaatatagccatgcctaccatgagatggggctaacgctcacctcgggcgtgtatggcaatacctttttcctgttgacgggcttccatggcatgcatgtcaccttgggtaccatctttctattagtcttgtttttcagagtgttaaagggccactttagtgcggataagcattttgccttccaagcgggcagttggtactggcactttgtcgacgtagtctggctctgcctgtttatctttgtttatgtgctttaa

SEQ ID NO: 225193 - DNA, 730 bp, Unknown
  Bacterial polypeptide expressing nucleotide sequence isolated from the Sargasso Sea
atgagtgcagtaatagaaaatcatcatgatgaccaccaccatggacctgcaaagggattaacaaggtggttatttacaacaaaccataaagatattggaacactttatctatggtttagttttgccatgttcttaatcggcggcgcaatggcaatgataataagagctgaactatttcaacctggaatgcagatcgtagagcctgaattttataatcaaatgattactttacatggtttaataatgatatttggaggtgtaatgcctgcctttgttgggttagctaattggttagtgcctatgcaaatcggagcaccagatatggctttaccaagaatgaataatttaagtttttggattttgccattcgctttttttatcttattatcatcactatttatggaaggtggagctccaaattttggttggacattttatgcaccactctcaacaacctacgctccacctagtgtaactttttttatcttttctgttcatatcatgggtgcttcatcaataatgggagcaattaatgtggtagttactattatgaatatgagagcaccaggtgtagggcttatgaagatgccattatttgtttggtcgtggttgattacagcatatctcttaattgctgtaatgccagttcttgcaggagcggtcacaatgatgctcatggatattcattttggaacaagttttttcaatgcagcaggtggtggtgacccag

SEQ ID NO: 225194 - DNA, 520 bp, Unknown
  Bacterial polypeptide expressing nucleotide sequence isolated from the Sargasso Sea
tatggcggaaaaatctacaagtacaggacagaaacacccttatcatttagttgatccaagtccacttccctttttatcttcaattgcagggctagcaatggctgcaggcttggtcttctacatgcattatggaactagttggttgttaatattgggtacaattggattattaactgtcatgttcctttggtggaaagatgtaattaaagaatctacttatcaaaaagctcatactcctgttgttgagttaggtttaagatatggcatggctttatttattgcatctgaagttatgttttttgttgcttttttttgggctttttttgatgcaagtctgactcccaagcttccaattgaagaattttcagaaacttttgactctgaaggtgcagttggtatttggcctccagagggtattaaaacttttgatccacttgatgttccttttttaaatacattaatattattaatgtcaggtactacttgtacatgggctcaccatgctgttagagaaggtcat

SEQ ID NO: 225195 - DNA, 351 bp, Unknown
  Bacterial polypeptide expressing nucleotide sequence isolated from the Sargasso Sea
caccttggcttaagaaagacaacaggaaacaatttaatatttggcttggtgcaacattagttttaggttacttattcgtatttttccaaggtgtggagtattacgaagcctatgctcatatggggctaactcttgacgcagggatttacggaacaaccttttttatgctcacaggttttcatggttttcatgtttgcttaggtgcaattattttgaccatcatgttcttgagaagcctcaaaggtcattttaaaccagacgatcattttggatttgaagcaggttcttggtactggcactttgtagacgttgtctggatttgtctagttgcttttgtctacgtaatgtagc

SEQ ID NO: 225196 - DNA, 877 bp, Unknown
  Bacterial polypeptide expressing nucleotide sequence isolated from the Sargasso Sea
atgaccactaaacatgagacttactacgtccccgcccagagtgcttggccgattgttggtgctatcggcttgtttttaattgcctttggggcaggacattttgttcatcaactcaaatctggcgcttcgggtggcggctatattctacttgcaggcatagtcgtcatcctgtttatgctggtaggctggtttagaaccgtgatccaagaatcgatgacgggcctctattcccatcaaatggatagatcgtttcgccaaggcatgagctggtttatcttctccgaggtgatgttcttcgccgccttcttcggcgccttattttacgcccgcatggtcgcagtaccttggctcggcggcgcgtccaataacgccatgacccacgaagtcctgtggccgcacttcgaagccgtttggccactcctcaccacgccagatggtaccaaaaccgaagccatgccatggaatggactaccgctagtcaacaccattgtgctgctaacctcctctgtcacactgcattttgcccataccagcttagaaaaaggtaagcgttcggccatcaccctctggctgggactcacgattttgctcggaattagcttccttgctttgcaggcggaggaatacagccatgcctaccatgagatggggctaacgctcacctcgggcgtgtatggcaacacctttttcctgctgacgggtttccacggcatgcatgtcactttggggactatattcctattagtcttgtttttcagagtgttaaagggccactttagtgcggataagcattttgccttccaagcgggcagttggtactggcactttgtcgacgtagtttggctctgcctctttatctttgtttatgtgctttaaa

SEQ ID NO: 225197 - DNA, 545 bp, Unknown
  Bacterial polypeptide expressing nucleotide sequence isolated from the Sargasso Sea
ctgtgataccagtaatacttttaataatattgctatcccatcattcagaatactttacacagctgaaacgattccaaaagctgatttaacgattaaagcaattggtaatcaatggtactggagttatgaatatccagattacgatgacttttcttttgatgcaaatatgcttcaagatgatgaattatctgatccaagtttgagattgctagaaacagatacacaaattgttgttccagtaaataaagtagtaaaattattgattacatcaaatgatgtattgcatgcatggactattcctgcttttgcagtaaaaaaagatgcggttcccggaagacttaatgaaacatggtttaaggctgaaaagactggaacatactatggacagtgttctgagctctgtggtccaaaacatgcttttatgccaataaatgtaaaagtcgtatcacaagatgaatttgataactggctaagctttgctaaagaagaatacgcttcaagtaaaacaaactttaatcaaacttttcaggttgcaaaaaattagt

SEQ ID NO: 225198 - DNA, 1321 bp, Unknown
  Bacterial polypeptide expressing nucleotide sequence isolated from the Sargasso Sea
gactggggctggttggacactctatccgccacaatcaattcttgaaggaacgcctggaggtgatggtgcaggaatcatcctcatgcttgcatctctggctgttttcattattgcctttactatgggtggccttaattacattactactgttcttcagtcacgcgccaaaggaatgactttgatgagaatgccacttattatctggtgtattttcttggctacattcttaggattgctagctttccctgcactgcttgtaggtgcgattatgttaatttttgatcgtgtactcgagacgagttttttcatgccagaaattttcaaaggcggtgaagtcctagattatggtggtggtagcccagtacttttccaacatcttttctggttcttcggtcatccagaggtatatatcatcgcgcttcctgcattcggtattatttcagaactcatcagcgttcatgctagaaaaaatatctttggctacaacatgatggtttgggcacttattgccattgccggtatagctttcattgtttgggcgcatcacatgtatgttgcaggcatgaatccttacttagggttcttttttgcaacaacaacgctgatcatcgccgttccaactgcaattaaagtctataactgggttctgactctatggaatgcaaatattaagatgactgttccaatgctttattgtctcgcattccttgtgacttttttgaatggaggtcttacaggcttattcttgggtaacgttgcagtagatgttccactttcagatacctattttgttgttggtcacttccacatggttatggctgtatcgcctgtactcgcattatatggagggttatatcactggtatccatctgtgacaggaagaatgctaaatgacacgcttggaaagattcatttctggattacattcatcggaacatatttaatatacttcccaatgcactacattggattcttgggcgtaccaagaagatattactcaaatgagcagtatgacttcattcctcaatctgtcgcagatctgaaccaatttattactatctgtgcactgattgtcggactggctcaattcatccttctttataacttcatagtaagcctaaagaaaggcgcgattgcttctaagaacccatggggtgcatgtacgcttgaatggcaagccttagaatcacctcctggacatggaaactggggcgaacaattgccagttgtatacagatggccttatgagtatggtcttcctggtgcgaaagaagactttattccacagaatgtgcctgatgagcaaatagttaaagcatga

SEQ ID NO: 225199 - DNA, 1316 bp, Unknown
  Bacterial polypeptide expressing nucleotide sequence isolated from the Sargasso Sea
tatgtcagacgatttagataacaacaaaacaatataccaagcacaatcatccgaaactatgggtggttcaggatcagcatctcccgatatggattatgttaggccagcagagattccagatcaagatttataccatgggcatagttttattactaaatgggttttctgccaagatgcaaaagttataggagttcaatattttcttactgcagtatttacaggaattgtaggtttaattctttcttggttaatgcgtttacaattaggttttccaggagcggcaggatttatgacagctgaacattattatcaattcgtcactatgcatggaatgataatggttgtttattttttaactgcacttttcctgggaggttttggaaattacctaatacctttaatggtgggagcaagagatatggtatttccatatgtgaacatgataagtttttggatgttcttcattgctgttgcagttttaatggctagcttttttgttccaggaggtccaacaggagcaggatggacattatatcctccacaaacaatattagaaggaaccccaggccatggaatgggtatactcttaatgctagtttctttatctttatttgtaattggatttacaatgggtggattaaattacttgattactgtgttgcaagccagaactagaggaatgactttaatgagaatgcctttaactgtctgggggatttttacagctacagttttagccatgttagcatttccagcattactagttagtgcaattatgatgactttagataaaatacttggaacaagtttctttatgccaacaattttaaaggcaggtgaagttctagaatatggtggaggaagtcctattctttttcaacatttattctggttttttggtcatcctgaagtttacatcgtagcattacctgcatttggaatagtttcagatttaatttcggttcattcaagaaaaaatatctttggttatagaatgatggtttgggctatcgttggaattggtgctttaagcttttttgtttgggcacaccatatgtatgtgagtggaatgaatccttggtttggattcttcttcgctacaacaacattaattattgctgttccaacagctatgaaagtttacaattggattttaactttatggagaggaaatatcagacttaatacagtgatgctttggtgtcttgggtttatagtgacattcgtaaatggaggtattactggaatttttttaggaaacgtttctgtagatgttccactttctgatacttattttgttatagctcacttccata

SEQ ID NO: 225200 - DNA, 1006 bp, Unknown
  Bacterial polypeptide expressing nucleotide sequence isolated from the Sargasso Sea
tatgtcagacgaatacgataacaataaatcatatcaagcacagtcatcagaagtaatggatggtacaactggttctgtgaatccagatatagattatgtaagaccagcagaagttggtgaacaagatttatatcatggacatagttttatcgagaaatgggttttttgccaggatgcaaaagttatcggggtacaatatttcttaacggcagtatttactggaattgtaggtttaattttatcttggttaatgagacttcaattaggttttccagaattagcaggtttcatgacagcagaacattattatcaatttgtaactatgcatggaatgatcatggtagtttactttttaactgcactattccttggaggctttggaaattatctaattccactcatggtaggagcaagagatatggttttcccgtatgtcaatatgcttagcttctggatgttctttgttgcagttgcagttttaatggcaagtttctttgttccaggcggaccaacaggagcaggatggaccttatatcctccacaaactattttagagggaactcctggatcaggtatgggaatacttctaatgcttatatctttatctttattcgtaattggtttcacaatgggtggactgaattacatgattacaatcctacaagctagaaccagaggaatgactttaatgagaatgcctttaacagtttggggtatttttacagcaactgtactagcaatgttagcatttccagcactactagttagtgcaataatgatgacattagataaggttctacaaacaagtttctttatgccaactatattgaaggcaggagaggttcttgaatatggtggaggaagtccaatacttttccaacacttgttctggttctttggacatcctgaagtttacattgttgcattgcctgcatttggaatagtttctgacttaatttctgttcatgcaagaaaaaacatatttggttacagaaatgatggtttg

SEQ ID NO: 225201 - DNA, 841 bp, Unknown
  Bacterial polypeptide expressing nucleotide sequence isolated from the Sargasso Sea
attttggttttttggtcatcctgaggtatatattatgatacttccagcctttggtatagttagtcaaataatttcaacattcagtaaaaaaccagtttttggttatcttggaatggcctatgcaatggtttcaattggtgtagttggttttgtggtttgggcacatcatatgtatacagttggaatggatgtagatacaagagcatattttactgcggcaactatggtaattgcagttcctacggggataaagatttttagttggatagctacaatgtggggaggctctatagagtttaaaactccaatgctgtgggcacttggatttatttttctatttacagttggtggtgtgactggtgtcgttttgtctaacgctggcctcgatgttgtacttcacaatacttattatgttgttgctcactttcattatgttttatccttaggagcagtctttggactttttgcaggattttactattggttttccaaaatgacaggatgtgagtataatgaaaagttaggccaacttcatttttgggtaacttttgttggtgttaatttaacttttttcccaatgcattttttagggctagctggcatgccaagaagatatgttgattatccagatgcctttgcggggtggaatttagttgcctcaattggatctcttattagtgttgttggagttgtaattttctttattgttataattgaagctttcagctctcgaagaaaggcagaaaatagtccttggggtattggtgggactacgattgaatggtcaaccacttctccaccacctttccatacttttgatgaattgcctaaagtaaaataa

SEQ ID NO: 225202 - DNA, 828 bp, Unknown
  Bacterial polypeptide expressing nucleotide sequence isolated from the Sargasso Sea
tatggtccttcctgcctttggtttagttagtgaaatacttcccgtacatgctagaaaaccactttttggatatacaacaatggttttttcaataatggggatagtagttttaggtttagttgtttgggcgcatcacatgtttactagtggaactcccccttggatgagattgttctttaccatagcgactgcatttattgcagttccaacggggataaaatttttcaattgggttgcgacattatggggaggtaaaatatccatcaatagtgcaatgctattctcttgtggatttattataaattttgtttttggaggcattacaggagttgctttagcacaggtccctttcgatattcacgtacatgatacatattttgttgtagcccattttcattacatagtttatggaggtactgtttttattattttctcatccatttatcattggttcccaaaagtaactgggaaaatgctcaatgaaaaattaggaattttacattttatcattacctttattggatttaacttatgctttgctcctcaacattggctcggtttaaatggaatgccaagaagagttgcagaatatgatcctcaattccagttcgtaaatcaaattagtagtttaggggctctcttgatggctataagtacaattccttttttaattaacatattccttagtcttacaaatggtaaagattctggagataacccttggaatgctttaacacctgaatggttaacatcttctcctcctccagtagagaattgggaaggagaagctccattagttgaagaaccttatggttatggaaaacaatt

SEQ ID NO: 225203 - DNA, 373 bp, Unknown
  Bacterial polypeptide expressing nucleotide sequence isolated from the Sargasso Sea
aatgtatacaaaaacggcatcacacgacgatcatcatacaccaactggttggaaacgttgggcttattcaactaaccacaaagatattggaactatgtatctaatatttgcaattattgcaggtgtgattggtaccgcattttcagttttaatgagaatggaattgatgcatccaggtgatggaattttaggtggaaattatcatttatataacgtgttggttactggtcatggtttgataatgattttctttatggttatgccagcaatgataggtggctttggtaactggtttgttccaataatgatcggtgcacctgatatggcttttcctagaatgaacaatatttcattctggttgctgcctacatct

SEQ ID NO: 225204 - DNA, 934 bp, Unknown
  Bacterial polypeptide expressing nucleotide sequence isolated from the Sargasso Sea
aatgagcacaacaacagcacacacacaagatcatcatacaccaactggatggaaaagatgggcatactcaacaaaccataaagatataggaacaatgtatataatttttgcaatcattgcaggagttataggtacagttttttcagttgtcatgagaatggaattaatgcatcctggcgatggaattttaaacggaaattatcatctttataatgttttagttactggtcatgggttaattatgatcttttttatggttatgccagcaatgattggtggttttggaaattggtttgttccaataatgattggagctccggacatggcctttccaagaatgaataatatttctttttggctattaccagtttcatttattttgttaattgcatctatatttatggatggacctccaggtgctaaaggagtagggggtggttggactatttacccacctttatcatcaaaagcaggccaacctggaccagcgatggattttgcaattctaagcttacacattgcaggcgcttcttcaatattaggagcagtaaacttcataacaacaatattaaatatgagaacgccagggatgactttacataaaatgccattgtttgcttggtctattttagttactgcttttttgttattattatctttaccagttttagctggagccattacaatgttattgactgatagaaattttggaacagctttctttgaggcacagacaggcggagatccaactttatttcaacatttattctggttctttggtcatccagaagtttatatattaattttgccaggctttggaatgatcagccatattgtttcaactttttcaaaaaaaccagtgtttggttatcttggaatggcatatgcgatggttgcaattggcgttgtaggatttgttgtatgggctcaccac

SEQ ID NO: 225205 - DNA, 682 bp, Unknown
  Bacterial polypeptide expressing nucleotide sequence isolated from the Sargasso Sea
ctgataccaaaagcatattttttagctgcgacaatgataatagccgtcccaaccggaataaaaattttttcttggatcgcaactatgtggggtggatcaatatcatttaaaaccccaatggtttgggcacttggttttatatttttatttacagtcggtggagtaacaggagttgttttagcaaacgctggagttgatacagcattacatgatacatattatgttgttgctcacttccactatgttctatcgcttggagctgtttttgcaatctttgcaggtttttattattggtttggaaaaatgtcgggttatgagtattcagagtggatgggacaacttcatttttggcttacattcattggtgtaaatatagtatttttcccacaacactttttaggtttagcgggtatgccgagacgatatgcagattatcccgatgcatttgccgactggaattatatttcatccatagggtcatatatatcgatcgtaggattggcagtattttttgcaaatttaatttacgcatttgctaaaaagaaaaaagcagctcagaatccatggggcgaaggtgcaaccaccttagagtggacagttccatcaccgcctaattttcatacttttgatgagcttcctaaattcgaaaacgtcgagggtgcagaaaaatctagtagttaga

SEQ ID NO: 225206 - DNA, 993 bp, Unknown
  Bacterial polypeptide expressing nucleotide sequence isolated from the Sargasso Sea
tgatggaattttgggtggaaattatcatttgtataatgtgttagtgacaggtcatggattaataatgatcttttttatggtaatgccagctatgataggtggttttggaaattggtttgttccaattatgattggtgcacctgatatggcattcccgcgaatgaacaatatttctttttggttgttacccgtttcattaacattattgatattatcaatttttgcagatggccctccaggacaaacaggagttggaggtggatggacgatttaccctcctttatcatcaaaagctggtcagcctgggcctgcaatggatttggcgattttaagtttacacttggctggtgcttcatcaattttaggagcagttaattttattacaacaattcttaatatgagaactcctggaatgactctacataagatgccattatttgcttggtcaattttagtaacagcttttttattattattgtctttaccagttttagcaggagcaataacaatgttattaactgataggaacttcgggactgccttttttgaagctcaaactgggggagatccagtgctatttcaacatttattttggttctttggtcatccagaggtttatattttaattttaccaggatttggaatgatcagtcatatcgtttcaacattttctagaaaaccagtttttggttatttaggtatggcttatgccatggtcgcaatcggaatagttggtttcgtagtttgggcacaccacatgtatacagttggattaagtacagatacaaaagcttattttttagcagctactatgattattgctgttcctaccggaataaaaatcttttcttggatagctactatgtggggaggatcgatctcattcaaaactccaatgatgtgggcattaggttttatctttatgtttacagttggtggggtgactggagtagttttagcaaatgcaggagtagatactgcaatgcacgatac

SEQ ID NO: 225207 - DNA, 790 bp, Unknown
  Bacterial polypeptide expressing nucleotide sequence isolated from the Sargasso Sea
aatgtcagctgaaaaaaaacatgattatcatttagtagatccaagtccttggcctatttacgtttcattctcttgcttagtattagctataggtgccgtgtattatatgcattcagatgtttcatggggaatgtatcttggattagctcttttaatttatggcgcatatatgtggtttagagatgtggtcattgaagcagaacatcaaggtcatcataccccagtggtccaaattcaccaccgttatggaatgactttatttattgcatctgaggtaatgttttttgttgcttggttttgggcttactttgacgttagtcttttcccaaatgattttgtaggaaacgtatggccacctaaagatattgtgacttttgatccttgggatatacctttaattaacacattagttttactgttatcaggaacaactgtcacttggtctcaccattcattattagagggtgatagaaaaggttttatacaaggattagtgctaacagtaattcttggagctttttttacagcacttcaagcatatgaatatcatcatgccacatttgctttttcagatcatatttatggttctgttttttacatggcaacaggctttcatggtttccatgttatagttggaacaatttttttagcagtatgtttatggagaggaaaattaggtcattttactaaagaccatcattttggttttgaagcagctgcatggtattggcattttgttgacgttgtttggttatttttgtttgctgcaatatatatttggggaagttaa

SEQ ID NO: 225208 - DNA, 521 bp, Unknown
  Bacterial polypeptide expressing nucleotide sequence isolated from the Sargasso Sea
aggatttatttttctattcactgtaggtggtgtgaccggtgttgttcttgcaaatgcaggaattgatcattcgctgcacgacacttactatgttgttgctcattttcattacgttctttctatgggagctgtttttgcaatatttgctggtttctattattggtttggtaaaatgtttggcagaaactactcagagtttttgggcaagctacatttttggttaacttttattggagtgaatataatattcttcccacaacacttcttaggtttagcgggaatgccaagacgttatgttgactaccctgatgcttacgctggatggaattatatttcctcaattggctcattcatatcagtccttggtttggcagtattctttgtgatgttagtacacgctctcatgaaagttagagattgtgccgacaacccatggggtgagggagccacaacacttgagtggacattgccttctcctccaccattccaccagtttgaggagctaccaaaagttaagtaga

SEQ ID NO: 225209 - DNA, 793 bp, Unknown
  Bacterial polypeptide expressing nucleotide sequence isolated from the Sargasso Sea
aatgtctgcatcaggtcaaaaacatgattatcatttagttgaccctagtccttggcctttagccacatctatagcaacactagttacagctgttggatctgtttattattttcacagtaaagttatgtgggcaatggttttaggttttttacttataatttattgtgcctttatgtggtttagagatgttgtaatcgaagctgagcacaaaggtcatcatacacctgttgttcaaattcatcatagatatggaatgacattatttattgcttctgaagtaatgttttttgttgcatggttttgggcatactttgatgcaagtttgtttccaaatgaattcatgggaaatgtatggccaccaaaagatattgaaacttttgatccatgggacatcccacttataaatactcttgtcctacttttatctggtacaacagtaacttgggcgcatcattctttattagaggatgacagaaaaggatttataaatggtctaatctgtacagtaattttaggagcattttttacgttattgcaaatatatgaataccaacacgctacatttagtttttcaggtcatatttatggagctacattctatatggccacagggtttcatggtttccacgttttagttgggactatttttttagcggtttgcttatggagaggtaaattaggacattttactaaagaacatcactttggtttcgaggctgctgcttggtactggcactttgttgacgttgtctggctgttcttatttgcagctatttacatttggggaagttaa

SEQ ID NO: 225210 - DNA, 679 bp, Unknown
  Bacterial polypeptide expressing nucleotide sequence isolated from the Sargasso Sea
aatgtctactattacagcagataatcatcatactccttatggttggaaaaggtgggcttattcaactaaccataaagatataggcacaatgtatcttatatttgcgattattgcaggaattataggttcagctttctcagttttaatgagaattgagttaatgcatcctggtgatggaattttaggtggaaaccatcatttatataatgttctagttacaggtcatggtttaataatgattttctttatggtcatgccagcgatgataggtggttttggaaactggtttgttccaataatgataggtgctccagacatggctttccctagaatgaacaatatatcgttttggttactgccggtttctcttatattgctccttgcttctatttttgttgacggaccaccaggccaacaaggagtaggaggtggttggacaatttatcctccactctcctcaaaaactggtcagcctggaccagcaatggatttagcaatattaagtctacatattgccggagcctcatctattttaggcgcaatcaattttataactactatattaaatatgagaacaccaggcatgacattacacaaaatgcctttatttgcatggtctattttggttactgcgtttctacttcttttgtctttgccagttttagctggagctatcaca

SEQ ID NO: 225211 - DNA, 899 bp, Unknown
  Bacterial polypeptide expressing nucleotide sequence isolated from the Sargasso Sea
gctataacaatgctacttacagatagaaatttcggaacaactttctttgacccagcaggcggaggcgatccaattttgtaccaacacattctttggttttttggacacccggaagtttatataataattttaccaggttttggtataatttcgcatgttatagcgaccttttcgagaaagcccgtattcggttatcttccgatggtatgggcattaatcgcaattggggcactgggctttgttgtgtgggctcaccacatgtacaccgttggaatgtcactcacgcaacaatcctactttatgctggctaccatggttatcgcagtaccaactgggatcaaaatattttcatggattgcaacaatgtggggcggttcaatcgaattcaaaacgcctatgctttgggcttttggctttttgtttctgttcactctaggtggggtaacgggtatcgttttagcacaagcaggcgtagatcgtgcataccatgacacgtactacgtggtcgcacatttccactacgttatgtcattgggagccgtttttgctatctttgcagggatttatttttattttcctaaaatgacaggaagaattattccagaatgggcaggtcaacttcatttttggacaatgttcgtagggtctaatattacttttttcccccaacacttcttaggacgtcaagggatgcctcgccgatacatagattatccggaagctttcgctttatggaatcaggtatcgtcttatggagcctttttatcatttgcatcatttgtatttttcttcatcgtcataatttatgcgattgtagcaggtaagaaagaaacaagagctaacccttggaatgaatatgctgataccctagagtggacattaccttcacctccgccaga

SEQ ID NO: 225212 - DNA, 550 bp, Unknown
  Bacterial polypeptide expressing nucleotide sequence isolated from the Sargasso Sea
ctaacatttgaaactcctatgctttttgcagttgcatttgttgttttatttactatcggaggattgtcaggattgatgcttgctattgttcctgctgatttccaatatcatgatacatattttgttgttgctcattttcattatgttttggttcctggagcaatattctctatcatggccgctgtttattattggattccaaaatggtctggaaatatgtatgacgagagactcggcaaacttcatttttggctttcatttataggtgtaaacgttacattctttccacaacattttattggtttagctggaatgccaagaagataccctgattatgctctcatatttgcagactggaacatggtttctagtattggagcatttctatttgggttctctcaattactgtttttatttattgttatcaaaactgtgatgggtggcaaaaaggcaacagatcaagtttgggaaggcgccaaagggcttgagtggacagttgcttcaccagctccgtaccatacattttcaacaccaccaaaggttgattgat

SEQ ID NO: 225213 - DNA, 852 bp, Unknown
  Bacterial polypeptide expressing nucleotide sequence isolated from the Sargasso Sea
gatgcatcctggtgatggaattttaggtggaaactatcatttatataatgtcttagtgactggtcatggcttgatcatgatcttctttatggtgatgccagcaatgattggtggatttggaaattggtttgttccaattatgattggtgcaccagatatggcattcccaagaatgaataatatttcgttttggttattacccacatcattcattttattaataatgtcaattttcatggatggccctcctggtcaaaccggtgttggtggtggatggacaatttatcctccattatcatccacagctggtcaaccaggtccagcaatggattttgcaattttaagtttacacttggctggagcttcttcaattttaggtgctgtaaactttattactacaattttaaacatgagaacgcctggtatgacacttcacaaaatgccattatttgcttggtcaatactagtaactgctttcttattattgttatcattaccagttttagcaggagcaattacaatgcttctaacagatagaaactttggaacagctttctttgatgcacaaactggtggggacccagttttattccaacatttattttggttctttggtcacccagaagtttatattttaatcttaccaggttttggaatgatcagtcatattgtttcaacattttctagaaaaccagtttttggatacttaggaatggcttatgcaatggttgcaattggaatagttggtttcgttgtttgggctcaccacatgtatacagttggtttaagcacagatactaaagcatactttttagctgcaacgatgatcattgcagttccaaccggtataaa

SEQ ID NO: 225214 - DNA, 337 bp, Unknown
  Bacterial polypeptide expressing nucleotide sequence isolated from the Sargasso Sea
ggaaacaaaaaaacattcaatatttggcttggcattacagttttactcgctctaatttttgttggccttcaagcagcagaatactatgaggcttatgagcattttggacttactctaaattcaggaatttatggatcaactttctttatgttgaccggattccacggattccatgtaatgttaggcggccttatgctcgcagttatgtttataagatctgtattttatggccactttaatgagcacaaacatttcggattcgaagccgcatcttggtattggcactttgtagatgttgtttgggttatgttgttcctatttgtttatattttataaa

SEQ ID NO: 225215 - DNA, 265 bp, Unknown
  Bacterial polypeptide expressing nucleotide sequence isolated from the Sargasso Sea
atttaagacacctatggtttgggctttagggtttatatttttatttacggttggtggagttacaggcgttgttcttgcaaatgcaggtgtagatacagcaatgcatgatacttactatgtagtagctcacttccactatgtattatctttaggagcagtgtttgcaatttttgctggcttttattactggtttggaaaaatgactggctatgaatactcagagtggatgggccaacttcacttctggttaacatttataggtgta

SEQ ID NO: 225216 - DNA, 883 bp, Unknown
  Bacterial polypeptide expressing nucleotide sequence isolated from the Sargasso Sea
aagcccaattttatttcaacacttattctggtttttcggtcatcctgaagtttatatcgtagctcttccagcatttggaatagtttcagatttaatttcagttcatgcgagaaaaaatatttttggttacagaatgatggtatgggcaattgttggaattggtgctttaagctttttcgtttgggcgcatcatatgtatgtaagcggaatgaacccatggtttggtttcttttttgctaccacaacacttataatagcagtaccgaccgctatgaaagtttataactggattttgacattgtggagaggaaacataagaattaatacagtaatgctttggtgtttaggatttatagtaacattcgttaatggaggtataactggtatatttttaggaaatgtttccgttgatgttccactatcagacacttatttcgttgtagctcatttccatatggtaatgggtatagccccggttatggttatcatgggagcggtatatcattggtttccattaataactggaagattattaaatgagactttaggtaaatggcacttttgggcaacattcttaggcgcttattcgatatacttcccaatgcattatctaggatttataggggttccaagaaggtattatgaaatgtatgacagtccgtatatgacttcagctgtaggaatgaatgaatttattagtttagctgctttcttagtaggtgcagcacaatttattttgatcttcaatataattaaaactttaaagactggaaaaccagctcctaaaaatccatggaaagcaaattctttagagtggcatacttcaacacagccacctgaacatggaaattttggtgaaagattgcctgtggttcacagatgg

SEQ ID NO: 225217 - DNA, 638 bp, Unknown
  Bacterial polypeptide expressing nucleotide sequence isolated from the Sargasso Sea
gcttttctttatgtgggcaacgatgcttatagcagtcccaactggagttaaggtatttaactgggttgcaacaatgttcaaaggctccatcacttatgaaactccaatgctgtttgcaatttcctttgtagttctctttacaattggtggattctcaggacttatgcttgcaatagtacccgctgattttcaataccatgatacttattttgtagtggctcatttccattacgtcctagtgcccggatcaatattttcaataatggcagcagtttattactggataccaaagtggacaggcaacatgtatgacgaaagaatgggcagattgcatttctggctttcgtttgtgggagtaaatgtcacatttttccctcagcactggattggattggcaggaatgccaagaagatatccagactatgcccttcagtttgcagactggaatatggtttcaactgcaggagctttcttgtttggagcttctcaaatcttattcttatttattgttctaaaaacagtaatgggtggaaagaaagctactcctcaggtttgggaaggagcaagaggtttggagtggtcagttgaatcaccagcaccctaccatacgttttcaacaccacctaaagttaactaat

SEQ ID NO: 225218 - DNA, 792 bp, Unknown
  Bacterial polypeptide expressing nucleotide sequence isolated from the Sargasso Sea
actctgtatatatattatattcaggatttgcatgtttatttttgaccatgtttttttggttcagacaagtaataaaagaacatcttgctggattagattctaatcaattaaaacaatcttatgtatacggaatggcatggttcattttttctgaagtcatgttctttgctgcattttttggtgctttattttatgttagaactctagcagttccttggttagctggcgaaggatcaaaaggagcagcaattacagccattgaactatggccagcctttgagtcttcatggccggttatgaccacaccggatcaaggtaatgagtatgatttagctgacaagagcatggcatggccaggatggagtaaggctcttttatggctgcctttgtggaacacaattgttcttttgagttcatcatggactgttcacttagcccaccttggtttaaaaaaaggaaatagaaaaaagtttaatgtatatcttggagttacagttcttttggctttaatttttgttggactgcaggctcttgaatattatgaagcttatgcacattatggccttaaattaaattctggaatatatggatcaacgttttttatgcttactggttttcatggcttccatgtgatgatgggcggttttatgttagctattatgcttgcaagatcagtttttgcaggtcactttgagcaacacgatcactttggctttgaagctgcatcatggtattggcattttgtagatgttgtctggctaatgctatttatatttgtttatattttataat

SEQ ID NO: 225219 - DNA, 893 bp, Unknown
  Bacterial polypeptide expressing nucleotide sequence isolated from the Sargasso Sea
ttggttattacctacatcttttatcttattgataatgtcgattttcatggatggccccccaggtcaaacgggagttggtggaggatggactatttatcctcctttatcatctacagctggacaacctggtcctgcaatggattttgcaattttaagtttacacttagctggtgcatcttcaattttaggtgcagttaattttattacaacaattttaaatatgagaacgccaggtatgacattacataaaatgccattatttgcctggtcaatattagtaacagcttttttattacttttatctttaccagttttagctggagcgattacgatgcttcttactgataggaattttggaacagctttctttgacgcacaaactggcggagacccagtgctattccaacatttattttggttttttggtcacccagaagtttacattttaattttaccaggctttggaatgatcagtcatattgtttcaacattttctagaaaaccagtttttggatacttaggaatggcttatgcaatggttgcaattggaatagttggttttgttgtttgggctcaccacatgtatactgttggtttaagcactgatacaaaagcatactttttagccgcaacgatgatcatcgcagttccaactgggataaaaatattttcatggatagcaactatgtggggtggttcgatttcattcaaaaccccaatggtttgggctttaggatttatatttttatttactgttggtggtgttacgggagtagttcttgcgaatgctggagttgatacagcaatgcatgatacttactacgttgttgctcactttcattatgtgttatctttaggagcttgtatttgcaatctttgctggattttatact

SEQ ID NO: 225220 - DNA, 910 bp, Unknown
  Bacterial polypeptide expressing nucleotide sequence isolated from the Sargasso Sea
agcacaaacaggaggagatcctgttctatttcaacatttattttggttttttggtcatccagaggtttatattttaattttacctggctttgggatgattagtcatatcgtttcgacattttctagaaaaccagtttttggttatctaggaatggcctatgcaatggttgcaataggaatagttggctttgtcgtttgggctcatcacatgtatacagttggtttgagcaccgatacaaaggcttattttctggcagccacaatgattattgcggttcctacagggattaaaattttttcatggatagcaactatgtgggggggatccatttcatttaaaacaccaatgatgtgggcattaggattcatatttatgtttactgttggtggagtaacaggtgtagttttagcaaatgcaggagtagatacagcaatgcatgacacatattacgtggttgctcacttccattatgtattatcattaggagcggtttttgcaatttttgcaggcttctactattggttttcaaaaatgtctggatatgaatattcagaatggatggggcatttacatttttggttaacatttataggtgttaatttgattttcttcccgcaacattttttaggtttagctgggatgccacgaagatatgcggattatccagatgcttttgctggatggaattatatttcttcaataggatcgtatgttgcggtagctggtttagctgttttttttgcaaatctaatttatgcttttgcaaaaaagaaagcagcagaacaaaacccttggggagagggggccacaactttagaatggactgtgccatctccacctaatttccacacatttgaggagttgccaaagtttgttgatgatcaagaaacggaaaaatcacacagctaa

SEQ ID NO: 225221 - DNA, 886 bp, Unknown
  Bacterial polypeptide expressing nucleotide sequence isolated from the Sargasso Sea
aatggacttcgcaattttaagtttacacttagctggtgcttcatcaattttgggtgcagtaaattttattacaacaattttaaatatgagaactccaggtatgacattacacaaaatgcctctatttgcttggtcaattttagtaacagcatttttattactactttctttacctgtattagctggagcaattacgatgttgctaaccgatagaaattttggaacagctttctttgaggctcaaactggaggcgatccagttttatttcaacacttattttggttctttggccatccagaagtctatattttaattcttccaggttttggaatgattagtcacatagtttctacattttcaagaaaacctgtctttggttatttaggaatggcttatgcaatggttgctattggagttgttggatttgttgtatgggcgcaccatatgtatacagttggtttgagtacagatactaaagcttacttcttagccgccacaatgatcatagcagtaccaactggaattaaaattttttcatggattgcaaccatgtggggtggatcaatatcatttaaaacacctatgatgtgggctttagggttcatatttatgtttacagttggtggtgtaactggagtagtactggcaaacgcaggtgtagacactgcaatgcatgatacatattatgttgttgctcactttcattatgttctatctctaggagctgtatttgcaatttttgcaggcttttactattggttttcaaaaatgtctggctatgaatattcggaatggatgggacaattacatttttggttaacatttattggagtaaacttaattttcattccacaacatttcttaggattagctggaatgccaaga

SEQ ID NO: 225222 - DNA, 727 bp, Unknown
  Bacterial polypeptide expressing nucleotide sequence isolated from the Sargasso Sea
atgttactttcaggacaatctgtcttctcacagatgtttttttctttcattacatattttgttggaatacctactggtgttaaaatctttagttggattttgacgatgtataaaggacaggtgtcctttactcccccaatgttttatgcattatcattcttatttttatttactattggcggattaactggaatatttttaggagcagttgctttagatattcatttacatgatacttattttgttgtagctcactttcattacgtcatgcagggtggaaccattgttgccttcttaggaggattacatcattggtggccaaaatcttttggagtaatgtataatcaaactatagctaatattgcagccttgggtgtatttataggattcaatggaacatttttcccacaattcttgctaggcttaagaggaatgcctagaagatatgcgacttatgatgagcagtttgtcgaattgcatagttattcaacattttggtccggcatacttggtatctcaatttttatagctgtaatgaatttattttggtcatttattaaaaagaataaggttgatcctggttcaaatccatggggaggtatgacattagaatggacacatacctcatcaccacctcatcctcacaattttgaagaagagccagttctacaacatggtccatatgattatgataaggtcatcgttgataaaacttataagaaataat

SEQ ID NO: 225223 - DNA, 900 bp, Unknown
  Bacterial polypeptide expressing nucleotide sequence isolated from the Sargasso Sea
ggagctagggatgttgctttcccaagattgaatgctcttagtttctggatttgggtttttggaggacttttcttgtactcaacattcgtatttggaacagcaggagcgcctgaaggaggatacctagctgaggaagttggatggcttggcaatgctccaaatggtggttggtttggatatcaacctaatgcaggttttaaatattcaccaggaactgcaatggactattgggcaatcggcttacaaatacttggaatttcttctcttgtatcagcatttaatttcatcgtaacaatattaaatatgaggactcaaggaatgagattgatgagaatgcctgtatttacctggatgacttttgctgtggcttttcttcttgccttttcattaccaataattgcaattgctctcttttacgtaacttttgatagacaatttggtactactttcttcttgactgaaggtggaggagatcctgttttatggcagcatttattctggctatttggtcaccccgaagtatatattcttattcttcctgcttttggaattgtttctgaaatactacctacattttcaagaaagcctctcttcggttatccagcgatagtttttgcaggttttggtattgcatttatcggattcggagtctgggcacaccatatgtttgcttcagcaatcagccctgttgcgcaagctgggtttggtatctcaactatgattattgctgttcccacaggggtaaaaatatttaattggttaggaacaatatggggaggtaagttaaatctaaaaacccctatgttgtttgctcttggttttataggaatgtttgttattggtggattaagtggagtaacacactcggttgttccagctgatacacaacaaactgatacg

SEQ ID NO: 225224 - DNA, 953 bp, Unknown
  Bacterial polypeptide expressing nucleotide sequence isolated from the Sargasso Sea
tatgcttggcactagtttttttatgcctgcaattattcaatttggtgaaaaacttactcatgagggaggaagcccaatattattccaacatcttttttggttttttggtcatcctgaagtttatatagttgccctacctgcatttggtattgtttcagatttaatttctgttcatgcaagaaagaatatttttggttatcgtatgatggtatgggcaatagtcattattggaggtttaagttttgttgtttgggcgcaccatatgtatgtagcaggtatgaatccatggtttggatttttctttgccacaacaactctaattattgccgttccaacagcaataaaagtttataactgggttcttactttatggagaggaaatattaaactgactctcccaatgttattctcaatagcctttattattacttttgttaatggaggtttaactggattgtttttaggaaacgttgctgttgatgtaccactatcagatacttattttgtagtagctcattttcatatggttatggggatagcacctgtactcgtaatcttaggatcagtataccactggttccctcttataactggacgttttcttaatgaaagacttggcaaaattcacttttgggtaacgtttattggatcgtattcaatatatttcccaatgcattacctaggctttatgggagttactagaagatattttgaagtttttgaaggtgaagcttttacctattcaattacaggaattaatcagtttataactgttgcagcactagttactggagcggcacagttcttattcatttacaatattatagttagctctaaatttggtaaaaaagctggtaaaaatccttggaaggcatgttctttggaatggagaacaaaagatgtccctccaactcatggaaattttgataaagaattacctgttgtttatcgat

SEQ ID NO: 225225 - DNA, 571 bp, Unknown
  Bacterial polypeptide expressing nucleotide sequence isolated from the Sargasso Sea
aactccaaatggttgggcattaggttttatatttttatttacagtaggtggagttacaggcgttgtgctagctaacgcaggtgtagatactgcaatgcatgacacttattatgttgttgcacactttcactatgttttatctttaggtgcagtgtttgcaatctttgcagggttttattattggtttggaaagatgtctggatatgaatactcagagtggatgggacaactacatttctggttaacatttattggtgttaatttaatatttttccctcagcattttttaggtcttgctggtatgccaagaagatatgctgattatccagatgcttttgcaggatggaattacatttcatcaataggatcatatatttcagttttaggtttagttgtatttttcgcaaaccttatttacgcattttcaaagaaaaaagcagcagcccaaaacccttggggtgagggagccacaactttagaatggactgtgccatcaccaccaaatttccatacctttgaggagttaccgaaatttgaagacgatgaaagtattgaaaaatctacaagttaa

SEQ ID NO: 225226 - DNA, 931 bp, Unknown
  Bacterial polypeptide expressing nucleotide sequence isolated from the Sargasso Sea
gcgttttaattttattacaaccattatcaacatgagaacagaaggtatgcgattcatgagaatgccagtatttacttggatgacttttgccgtatcttttttgcttgctttttctttgccaataattgcaatagcgctcttctatgtaacatttgatagaaaatttggaactacattctttttaacagaaggtggcggtgatccaattttatggcagcacctgttctggttgtttggccatccagaagtttatattctaattctgcccgcatttgggattgtctcagaagtacttccaactttttcaagaaagccactttttggttatgctgcaatagtttttgcaggatttggaatcgcatttataggctttggagtatgggcgcaccacatgtttgcttctgcaattagcccagttgctcaggctggatttggtttatcgacaatggtaattgctgtcccaacaggagtaaaaatatttaattggcttggtacgatatggggtggcaaactaaagctgaatactccaatgctattttctttaggtttcataggtatgtttgtcattggtggcttaagtggagtaactcactcaatagttccagcagacacacagcaaacggatacctactatgttgtagcacactttcactacgtattgtttggtggagctttgtttggaattttttctggactttattattggtttccaaaagtttggggcaaaatgtataacgagtcgcttggaaagatacatttttggctaatgatgattggttttaatcttacttttggaccaatgcattggttgggacttcaaggtcaggtaaggcgtacctgggtatatgcagaagaaacaaacttacaattctggaatattattgtaacagttggggcttttatcatagctttgtcaattattgttttcatg

SEQ ID NO: 225227 - DNA, 814 bp, Unknown
  Bacterial polypeptide expressing nucleotide sequence isolated from the Sargasso Sea
gtttacatcatgattctgcttgctttcgggattgtctcgcacatcattgaaactttctcaagaaaaccaatttttggatacacatcaatggtttatgcaatagcatcaatcgctattctttctttcattgtttgggcgcaccacatgtttacagttggtatgcctatcgcgggtgaacttttctttatgtatacaaccatgttgattgctattccaacaggagtaaaagtgttcaactggttatcgacaatgttcaaaggctcaatctcttttgagaccccgatgcttttttcaatagcttttgtagctttgtttaccatcggtggattatcagggttgatgcttgcaatagctccagctgactttcaataccacgacacttattttgtcgtagcgcattttcattatgttttagtcccaggagccatctttggaataattgccggtgtctattattggttaccaaaatggacaggcaacatgtatgacgaagttctaggtaagactcatttttggatgtcttttatttcggtgaacattactttctttcccatgcactttgttgggttagcaggaatgcctagaagaattcctgactacgcgcttcaattcgcagattttaatatggtgatttcaattggcgcattcatatttggtttaactcagcttcttttcttgtttatcattcttaagagcattttcgccggtaaacaggctacttctgaagtatgggaaggcgccaagggattagagtggactgttgcatcgccagctccatatcatactttcgaaaccccgccagaagttaagtgaa

SEQ ID NO: 225228 - DNA, 718 bp, Unknown
  Bacterial polypeptide expressing nucleotide sequence isolated from the Sargasso Sea
gcttcaatagcaattttatctttcgttgtctgggctcaccatatgtttacagtcggtatgcctctagcaggagagttattcttcatgtactcaacaatgcttattgctattcctactggagtgaaagttttcaattgggttgcaacaatgtttagaggttcaattacttttgagacgccaatgttattttccattgcttttgtggctttatttacaattggtggattttcaggactaatgcttgcaatagtacctgcagacttccagtatcatgatacttactttgtagttgcacactttcactatgttctagtgccgggcgcactatttggaataatagctgctgcatactattggctgcctaagtggacaggaaatatgtacgacgagacacttggaaaattacatttctggctaacatttatatccgtaaacattactttcttcccaatgcattttgtcggattggctggaatgcctagacgatatcctgattatgcacttcagtttgccgacttcaatgccctaataagcgttggtgcctttatgtttggtttaactcagcttttattcttatttattgttattaaaacaataagatcaggcaaacaagctaagccggaggtttgggaaggtgcaggagatttaggtttggagtggacgttaacttcacctcctccttatcactcatttacagttcaaccgcaagtaaaatagt

SEQ ID NO: 225229 - DNA, 730 bp, Unknown
  Bacterial polypeptide expressing nucleotide sequence isolated from the Sargasso Sea
atggcttatgccatggtagcaataggtgttgtcggttttgttgtttgggctcatcatatgtatacagtaggattagatacagatactaaggcctattttttagcagccacaatgatcattgctgtgccaaccggtataaaaattttctcttggatagcaactatgtggggtggatctattagttttaaaacaccaatgctttgggctataggatttatatttttatttacattaggcggagttactggcgtcgtattagctaatgcaggtgtagataccgcactacacgatacttactatgtagttgctcatttccattacgtattgtctttaggagcagtttttgcaatttttgctggttggtactattggttcagcaagatgagcggttatgagtactctgagtttttaggtaaacttcatttttggctaacttttatcggtgtaaacctaattttctttccccaacattttttaggtctcgctggtatgccaagaagatacgctgattatccagatgcctttgcagggtggaattatatatcctcaataggttcttatatttctattgttgggctagctgtatttttattaaatcttctatactcttttataaaaaaaagaaaagctgaacaaaatccttggggagaaggcgctacaacattggaatggactgttacttcaccgccaccatttcacacttttgaagagctgcctaaagtaaaataaa

SEQ ID NO: 225230 - DNA, 541 bp, Unknown
  Bacterial polypeptide expressing nucleotide sequence isolated from the Sargasso Sea
gatgacactttttattgcatcagaggtaatgttttttgttgcatggttttgggcatattttgacgtaagtttatttccaaatgactttgtaggaaatgtttggccaccaaaagatattgaaacttttgatccttgggacattcctttaataaatacattaatcttattattatcaggaacgacagttacatggtctcatcatgctcttttagaagatgatagaaaaggttttattcagggtttatggttgactgttattttaggtttttgttttactcttctacaaatttatgagtatcagcatgcatccttctctttttcagatcatatttatggatcagtattttatatggcaacaggatttcatggtttccatgttcttgttggaaccatatttttagctgtatgtttgtttagagggaaaagagggcattttaataaagatcaccattttggatttgaggctgcagcatggtattggcattttgttgatgtagtgtggttatttctgtttgcagcaatctatatttggggaagttaa

SEQ ID NO: 225231 - DNA, 195 bp, Unknown
  Bacterial polypeptide expressing nucleotide sequence isolated from the Sargasso Sea
acatggcaaccggttttcatggatttcatgttttaattggtactttgtttttattagtttgtttactgagaataagaaaaggtcatttaaccacagaaagacattttggatttgaagcagctgcatggtattggcatttcgtcgatgttgtttggttgtttttatacataagtatctactggtggggaaaataga

SEQ ID NO: 225232 - DNA, 845 bp, Unknown
  Bacterial polypeptide expressing nucleotide sequence isolated from the Sargasso Sea
ttttgtttggtcaattttgattactgcattcttattacttctatctctgccagtattagcaggagcgataactatgatgcttacagatagaaattttggaactgctttttttaatcctgaggctggtggagaccctgtacttttccaacatcttttctggttctttggtcatcccgaagtctatatcttgatacttcctggttttggtataattagtcatgttgtttccacattctctaagaagccagtctttggatatttaggtatggcttatgcaatggcagcaatcggtgtagttggttttgttgtttgggctcatcacatgtacactactggtttggatgttgatacaagggcttatttcttggccgctacaatggtaatagcggtgccaacaggtattaaaattttcagctggattgcgaccatgtggggtggatcaatagaatttaaaacacccatgctttttgcaattgccatgatttttctatttactttgggtggagtaactggtgttgttttagctaacacgggtatcgatgtagcactccacgacacttattatgttgtagctcatttccattatgtcatgtccatgggagctttattctcaatttatgctggattttactattggtttagtaaaatgtctgggatagagtatagcgaaattcttggtaaaattcatttttggttaacttttattggagtaaacataacattctttcctatgcatttttctggtctagcggggatgccaagaagaatacctgattatcctgacgcttatgcaggttggaattacgtatcaggtattggagcttacatatctgtttttgctgctt

SEQ ID NO: 225233 - DNA, 370 bp, Unknown
  Bacterial polypeptide expressing nucleotide sequence isolated from the Sargasso Sea
tctggtacaacagttacttgtggcacaccattctttattagaggatgatagaaaaggatttataaatggtctaatctgtacagtaattttaggagcattctttacgttattgcaaatatacgaataccaacacgctacatttagtttttcaggtcatatttatggagctacattctatatggccacagggtttcatggtttccacgttttagttgggactattttcttagcggtttgcttatggagaggtaaattaggacattttactaaagaacatcactttggtttcgaggctgctgcttggtactggcacttcgttgacgttgtctggttgttcttatttgcagctatttacatttggggaagttaa

SEQ ID NO: 225234 - DNA, 779 bp, Unknown
  Bacterial polypeptide expressing nucleotide sequence isolated from the Sargasso Sea
tgtttttggatatttgggaatggcttatgcgatggtagcaatcggaatagttggatttgttgtatgggctcaccatatgtacacagttggattaagcacagatacaaaagcatattttttagctgcaacaatgattattgctgttccaacaggaataaaaattttctcatggatcgcaacaatgtggggtgggtcgatatcttttaaaacaccaatggtatgggcattaggatttatttttatgttcacagtcggtggagtcactggagtcgttttagctaacgcaggtgttgatactgcaatgcatgacacttattacgtagttgctcattttcactatgtactttctctaggagctgtttttgcaatctttgcaggcttttattattggttctcaaaaatgagtggttatgaatattctgagtggatgggtcagctacatttctggttaacatttattggagttaatttgattttcttccctcagcactttttaggattagctggaatgccgagaagatatgctgattatcctgatgcatttgctgggtggaattatatatcttcaatagggtcttacgtggctgtagctggactagctgtgttttttatgaatttgatttatgcatttgcaaaaaagaaagctgctgcacaaaacccgtggggtgagggagcaacaacgttagagtggactgtgccatctccaccaaattttcatacttttgaggaattgccaaaatttgaagatggtcagggtacacaaaaatcgcacggctaat

SEQ ID NO: 225235 - DNA, 449 bp, Unknown
  Bacterial polypeptide expressing nucleotide sequence isolated from the Sargasso Sea
tatgtatacgcaaacagcaccacacgacgatcatcatacaccaactggttggaagcgttgggcatactccacaaatcataaagatataggaacaatgtatttaatttttgcaatttttgcaggtgttattggtacagctttttcagttttaatgagaatggagcttatgcatccaggcgatggtatcttgggtggaaattatcatctttataatgttttagtaaccggtcatggattaataatgattttcttcatggtaatgccagctatgatcggtggttttggaaattggtttgttccgattatgattggagcgccagatatggcctttcctcgaatgaataatatttctttctggttattacccgtttcactaactttattaatattatcagtttttgctgacggtcctccaggacaaactggagttggtggtggatggactatct

SEQ ID NO: 225236 - DNA, 505 bp, Unknown
  Bacterial polypeptide expressing nucleotide sequence isolated from the Sargasso Sea
gtattagcccaggccggtgtcgaccgcgcatatcatgatacctattacgttgtggcacattttcactacgtaatgtcactcggtgctgtctttgcaatatttgcaggtatctacttttacttttcaaaaatgacagggcgtgcttaccccgaatgggcgggtaaattgcacttttggatgatgtttattgggtctaatttgacattcttccctcagcatttcttagggcgccaaggtatgccgagaagatacattgactatcctgaagcttttgcttactggaacgtaatatcttcatacggtgcgtttcttgctttcgcttcatttctattctttttcggtataatattttattcattgtttttcggcgctcgacaaaatgctccaaacccatggaatgagtacgccgatacgttagaatggactttaccgtccccaccaccggagcatacttttgaaattttgcctgagcaaaaagattgggataagtcggaagttcactagg

SEQ ID NO: 225237 - DNA, 694 bp, Unknown
  Bacterial polypeptide expressing nucleotide sequence isolated from the Sargasso Sea
gttggacttagcacagatacaaaagcttattttttagccgctacaatgattattgctgtcccaacgggaattaaaattttttcttggatcgcaactatgtggggtggatcaatatcatttaaaacaccaatgatgtgggctcttggatttatatttatgttcactgtaggaggcgtaacaggagtagtgttagctaatgctggagtagatacagcaatgcatgatacttactatgttgtagcacactttcattatgttttatctttaggggcagtatttgcaattttcgctggtttttattattggttttcaaagatgtcgggttatgaatactcagaatggatgggacaattacacttttggttaacatttataggcgtaaacttaattttctttccacagcactttttaggtttagcaggaatgccaagaagatatgccgattatcctgatgcttttgccggatggaattatgtttcttcaataggatcttatattgcagtaattggtcttggtgtattttttataaatttaatttatgcatttgctaaaaaaaaatctgcagaaaaaaatccctggggagaaggagcaacaactttagaatggactgtaccatctccaccaaattttcatacttttgaagaattaccaaagtttgaggatgatcaagaagtagaaaaatctcacggttgat

SEQ ID NO: 225238 - DNA, 224 bp, Unknown
  Bacterial polypeptide expressing nucleotide sequence isolated from the Sargasso Sea
agatggaaatatttacggatctactttttatatggctacaggttttcatggttttcacgttatcataggaacgatttttttagcagtatgcctttatagatcaattaaaggtcattttaaacctgaccaccattttggatttgaggcagcagcctggtactggcactttgtagatgtcgtttggttatttctgtttgctgctatctatatttggggaagttaga

SEQ ID NO: 225239 - DNA, 379 bp, Unknown
  Bacterial polypeptide expressing nucleotide sequence isolated from the Sargasso Sea
actggctatgagtattcagagtggatgggtcaattacacttctggttaacttttattggagtaaacttagttttctttccacaacactttttagggcttgcaggaatgccaagaagatatgctgattatccagatgcttttgcaggatggaattatatttcttcaatcggttcttatatttctgtaattggattagtagtattttttgtaaatcttgcttatgcgttttataaaaaaaaggctgcagcacaaaacccttggggagaaggtgctacaactttagaatggacagttccatctccacctaattttcatacttttgaagaattaccaaagtttgaagaagaagaagagggagttgaaaaatctactagttaag

SEQ ID NO: 225240 - DNA, 499 bp, Unknown
  Bacterial polypeptide expressing nucleotide sequence isolated from the Sargasso Sea
aatgatacttcctgcgtttggtattgtcagccaagttatttctacattctctagaaaaccaatatttggttatctcggtatggtctatgcaatggtatctataggctttattggttttatagtttgggctcatcatatgtttacagttggcctgagcgcagacttaagagcatatttcatgttagcaactataattattgctgtaccaactggaataaaaatatttagttggattgcaactatgtggggcggttcgctaacttttgaaacacctatgttgttttcaataggttttgttttcttattcactcttggtggagtaacgggagttattctcgcaaatgctggtattgatacggtaatgcatgatacatattatgttgttgcacacttccactatgtattaagcatgggagctatgtttggcatttttgctggaatatattactggtttggcaaaatgacaggaaggcaatacaatgaattttttggcaaactt

SEQ ID NO: 225241 - DNA, 980 bp, Unknown
  Bacterial polypeptide expressing nucleotide sequence isolated from the Sargasso Sea
ggcaatttttgctcttcatttagcaggtgcttcctcaatcttaggtgcagttaattttataacaacaattctcaatatgagaactcctggaatgactcttcataagatgcctctttttgtatgggctatgttgattacagcattcttgcttttattagctgttcctgttttagctggagcaattacaatgcttctaactgatagaaactttggtacaacattttttaatcccgccggtggtggagatccagttcttttccaacacttattttggttctttggtcatccagaagtttacatcatgatattaccagcttttggaattgtaagtcaggtcatctctactttctcaagaaaaccagtatttggatatttaggaatggtgtatgctatgatatctataggatttataggctttattgtttgggctcaccatatgttcacagttggtatgagcgcagatttaagagcatattttatgctagctacaattattattgctgttccaaccggtataaaaatctttagttggatagcaactatgtggggtggatcacttacatttgaaactccaatgttatttgcaattggatttgttttcttatttacactcggaggagtaacaggagtcattctggccaatgctggaatagacactgtaatgcatgatacgtattatgttgttgcacacttccattatgttctgagtatgggagctatgtttggaatttttgcaggtatttactattggtttggtaaaatgtctggaagaaagtataatgaatttttaggcaaactacatttttggttattttttattggggtaaatgtaacatttttccctcaacatttcttaggacttgctggtatgcctcgaagaattccagattatccagacgcttatgcaggatggaatcttgtatcaacttatggttcttacatttcttttgctgcaactttgatatttcttttcgcgattg

SEQ ID NO: 225242 - DNA, 324 bp, Unknown
  Bacterial polypeptide expressing nucleotide sequence isolated from the Sargasso Sea
gttttaatgtctggcttggcataactgttacccttgcattaatatttgtcggactgcaggcagctgagtattacgaagcatatgctcattatggtttaactcttaattcaggtatatatggttcaactttctttatgttgacagggttccatggatttcacgttatgatgggcgggttcatgcttgctgtaatgttatccagatcagttttttataatcactttgatcctcatagtcattttggatttgaagcggcctcttggtactggcacttcgtagatgtggtttgggtgatgctatttctttttgtttatatactttaaa

SEQ ID NO: 225243 - DNA, 431 bp, Unknown
  Bacterial polypeptide expressing nucleotide sequence isolated from the Sargasso Sea
tatgtcaagtgaagcaataagtcatcattcaaatccatcaggttggaaacgttgggtatactcaacaaaccataaagatattggtacaatgtatttaatatttgccattgtaagcggaatagttggtggggttttatcattgttcatgagacttgaattacaacaaccaggactacaaattttcggtgacccacatgtgtacaatgttttcacgacagggcatggcttgataatgatattttttatggttatgcccgctatgattggtggttttgggaattggtttgtgccactcatgatcggtgctcccgatatggcattcccgcgaatgaataatatttcattttggttattaccacctgcgctagcactattagttatctcgatgtttgttccgggtccacccggggcgaatggtgttggtggaggct

SEQ ID NO: 225244 - DNA, 724 bp, Unknown
  Bacterial polypeptide expressing nucleotide sequence isolated from the Sargasso Sea
atgtctgcaacaaccgtatcacacgaacatcatcataacccaactggttggaagcgatgggcttattctacaaatcataaagatatcggaacaatgtatttaatttttgcgattatcgccggaattattggaacagctttttcagtgctaatgagaatggaattagcgcatccaggtgatggaattcttggaggaaattatcacctatataatgtattagtgactggtcatggactaatcatgatctttttcatggttatgccagcaatgatcggtggatttggaaattggtttgtcccaatcatgatcggagctccagatatggcatttccacgaatgaataatatttctttttggttattgccagtagctttaattttattaatcgcatcaatttttgtggatggccctccaggtgcacagggcgttggtggaggttggacaatttatccaccgttatcttctaagacaggtcaaccaggaccagcaatggatttagcaattttaagtttacacgtagcaggtgcctcttctatcttaggggcaataaattttataactacaattttaaacatgagaacgccgggtatgactttacataaaatgccattgttctcgtggtcaattttagttacagcttttttacttttattatcattaccagttttagcaggagcaattacaatgcttcttacagatagaaattttggtactgcttttttga

SEQ ID NO: 225245 - DNA, 784 bp, Unknown
  Bacterial polypeptide expressing nucleotide sequence isolated from the Sargasso Sea
atgtcagcagaaaaaaaacacgattaccacttagttgatccaagtccttggccaatctatacatcttttgcatgcttagtattagctataggtgcaattttttatatgcataacggtatttcttggggaatgtatcttggtttggctttattaatttatggtgcttacatgtggtttagagatgttgtaattgaagccgaacatcaaggccatcacactcctgttgttcaaattcatcatagatatggaatgactttatttattgcttcagaggtaatgttctttgttgcatggttctgggcttactttgatataagtttatttccaaatgaatttgttggaaatgtgtggcctccaaaagatattgaaacatttgatccttgggacattcctttgataaacactttagttttattactatcaggaacaactgtaacttgggcccatcactctttattggaggatgatagaaaaggatttatacaaggattaactttgactgtaatattaggtttcttttttactttattacaagcatatgaataccatcatgctacttttacctactcgggccatatttatggagcagtcttttatatggcaacaggttttcacggttttcacgtgattataggaacaatttttttggcggtatgtttgtggaggggaagactcggtcattttaataaagatcatcattttggatttgaagcagctgcttggtactggcattttgttgatgtagtgtggctattcttatttgccgccaatatatatttgggga

SEQ ID NO: 225246 - DNA, 781 bp, Unknown
  Bacterial polypeptide expressing nucleotide sequence isolated from the Sargasso Sea
agtagtaataaccattcatatcatctagttgaaccaagtccttggcctgctgttggtgctgcagctggttttgtcctcgctctcggtggcgctatgtatatgcatgagtatgagtatggtggtattacttctttagttggatttggactagtttttttgacaatgttctactggtggagagatattgtaagagaaggggaatttcaaggccaccacagtccaattgttcaaattggtctaagatatggtatgatgttatttattgcctcggaagttatgttttttgttgcatttttttgggctttttttgcttcatctctttttccagttggtggagtgtggccgcctgaaggtattaaaacctttgatccttttgatctaccattaataaatactttaattttattattatccggatgtactgttacatgggctcatcatgctttaattgaaaatgatagatcagactttcttcttgggctactattgactgttatacttggaatttcatttactggccttcaggcattagagtatatgcatgcaccatttggttttacagaaggcatctatccatcagtctttttcatggcaactggttttcatggttttcatgtaatcgttggaactatctttctttttgtttgtttaattcgtggttaccttggtcattttacaagtactcagcattttgggtttgaggctgctgcttggtattggcattttgttgatgttgtttggttgtttttatttatttgtatctatatgtggggagcttgat

SEQ ID NO: 225247 - DNA, 677 bp, Unknown
  Bacterial polypeptide expressing nucleotide sequence isolated from the Sargasso Sea
agatgtatcatggggaatgtatttgggtttagctctattaatttacggagcatacatgtggtttagagacgttgtgattgaagctgagcatcaaggtcatcataccccggttgttcaaatacaccatcgttatggaatgacattatttattgcttcagaagttatgttttttgtagcatggttttgggcttattttgatgtaagtctttttccaaatgaatttatagggaatgtatggcctccaaaagacatagaaacttttgacccctgggatatacctttaattaatacattggtacttttattgtcgggaacaactgttacttggtctcatcatgctcttttggaagatgataggaagagttttatcaacggtttaatcttaacagtaattcttggagtttgttttacagctttacaagcttatgaatatcatcacgcgacatttactttctcagatcatatttatggatcagtgttttatatggcaacaggatttcatggatttcatgtaattgttggaactatattcttagctgtatgcctatttagaggtaggagaggtcattttaacaaagatcaccattttgggtttgaggcagcagcatggtactggcattttgttgacgtagtctggctattcttatttgctgcaatatatatttggggaagttaat

SEQ ID NO: 225248 - DNA, 903 bp, Unknown
  Bacterial polypeptide expressing nucleotide sequence isolated from the Sargasso Sea
tatttcattctggttactgcctacatctttcatattattaataatgtcaatatttatggatggccctccaggtcaaacaggggtaggaggaggatggacaatatatcctccattatcatctacagcaggtcaaccaggtccagcaatggattttgcaattttaagtctacacttagctggagcttcttcgattttaggtgcggttaattttattacgacaattttaaacatgagaacacctggcatgacactccataagatgccattatttgcttggtcaatactagtaactgctttcttattattattatcattaccagttttagcaggagcaattacgatgcttctaacagacagaaattttggaacagctttctttgatgcgcaaactggaggagacccagttctattccaacatttattttggttctttggtcatcctgaagtttatattttaattttaccaggttttggaatgatcagtcatattgtttcaacattttctagaaaaccagtttttggatacttaggaatggcttatgcaatggtcgcaattggaatagttggtttcgttgtctgggctcaccacatgtatacagttggcttgagcacagatactaaagcatactttttagctgcaacgatgatcattgcagttccaaccggtataaaaatattttcatggatagcaactatgtggggtggttcgatttcatttaaaacaccaatggtttgggctttaggatttatattcttatttacagttggtggagttacaggagtagtactagcgaatgcaggtgttgatacagcaatgcatgatacttactacgttgttgctcactttcattacgtactatctttaggagctgtgttttgcatatttgcaggattttactattg

SEQ ID NO: 225249 - DNA, 854 bp, Unknown
  Bacterial polypeptide expressing nucleotide sequence isolated from the Sargasso Sea
ttttttcaatcctgttttaggtggcaatgtcgtagtttatcagcatttattttggttttattctcatccagctgtatacattatggtccttcctgcctttggtttagttagtgaaatacttcctatacatgccagaaaaccactttttggatatacaacaatggttttttcaataatggggatagtagttttaggtttagttgtttgggcgcatcacatgtttacgagtggaactcccccttggatgagattgttctttactatcgccacagcatttattgctgttccaacaggtataaaatttttcaattgggttgcgacattatggggaggtaaaatctccatcaatagtgcaatgctattctcttgcggatttattataaattttgtttttggaggtattacaggagttgctttagcacaagtgccttttgatattcatgtacatgatacctatttcgttgtagctcattttcattacatagtttatggaggtactgttttcattattttctcttcaatttatcattggttccccaaagtaactggaaaaatgctcaatgaaaaattaggagttttacattttatcattacttttattggatttaacttgtgctttgctcctcaacattggcttggtttaaatggaatgccaagaagagttgcagaatatgatcctcaattccagttcgtcaatcaaattagtagccttggggctcttttgatggctataagtacaattcctttcttaattaatgtatttattagcgcgagaaatgggaaagatgctggagataacccttggaatgctcttacacctgaatggttaacatcttctccacctccagttgaaa

SEQ ID NO: 225250 - DNA, 904 bp, Unknown
  Bacterial polypeptide expressing nucleotide sequence isolated from the Sargasso Sea
aaaaaatttacaattttcacctttcgttttaaggtggtttttttcaacaaatcataaagatattggaactttatattttatttttggcggtttcgccagtgttgtaggtacttggttatctattttaattcgaatgcaattagcttttcctggtggagaagctttatcaggtaattggcagctttataatgttattgtaacggctcatgcttttataatgattttttttatggttatgcctattatgattggtggttttggtaactggcttgtaccattaatgattggtgctccagatatggcatttccacgaatgaataatattagtttttggttattaccaccagcattaatattattattaatgtcatcacttgttgaagcaggtgctggaacaggatggacagtttatccacctttagcaggtgttagtggccacccaggtccttcagtagatttagctatttttagcttacacttagcaggtgcatcttcaattttaggtgcaattaattttattacaacagtttttaatatgagagctccgggtctttattactatcggttaccattatttgtttggtctgttttaattactgcttttcttcttcttctttcattaccagtattagcaggtgctattacaatgttactaacagatcgtaactttaatacaactttttttgagccagctggcggtggagacccaattttataccaacatttattttggttttttggccacccagaagtttatattttaattttacctgcttttggtatcattagccatgttgtatctaatttatcaaataaaagtgtttttggttatttaggtatggtatatgcaatgttatcaattggtattttaggttttgttgtttgggctcatcacatgtttaca

SEQ ID NO: 225251 - DNA, 344 bp, Unknown
  Bacterial polypeptide expressing nucleotide sequence isolated from the Sargasso Sea
aatgaacgatcaccatgatcataagcctggattttttaccagatggtttttttccacaaaccataaggatattggaacgttatatttaatttatgcaatcattgcaggtgtagtaggaggagctctttcagttattatgagaatggagctatctgaacccggcatgcagtttgttgcagatggacaaatgtggaatgtaatcatctcagctcatggattgctcatgatattttttgttgttatgccagcattaattggtggctttggaaattggtttattcctttaatgattggtgccccagatatggcatttcctagactaaataatataagcttttggctat

SEQ ID NO: 225252 - DNA, 523 bp, Unknown
  Bacterial polypeptide expressing nucleotide sequence isolated from the Sargasso Sea
atttattgcttcagaggttatgttttttgtacattcttttgggctttctttgcatcatctctttttccggttggtggagtatggccgcctgaaggtattaaaacatttgacccttttgatctgccattaataaacactttaattttattactatcaggatgtactgttacatgggcccatcacgctctgattgaaaatgacagatctgacttcttacttggattactattgacagttatacttggaatttcattcactggtctgcaggctttagaatatatgcatgctccgtttggatttacagaaggtatttatccatcagtttttttcatggcaactggttttcatggttttcatgtaatcgttggaacaatttttctttttgtttgtttaattcgtggttaccttggtcattttacaagtgctcagcactttgggtttgaggctgctgcttggtattggcattttgttgatgttgtttggttgtttttatttatttgtatttatatgtggggtagctaaa

SEQ ID NO: 225253 - DNA, 472 bp, Unknown
  Bacterial polypeptide expressing nucleotide sequence isolated from the Sargasso Sea
attgggccatcaatggtattggtcgtatgaatatcctgacgctggtaatttggcttttgatagcaatttaatcccagatgaggaaatagatgttagtaaaggtcagatccgtctattggaagttgataaccgggttgctatccccgtagatactaccattagagtaattatgacatctgatgatgttcttcacaattgggcaataccagcctttggaattaaaatggatacagttcccggtcgcattaacgaggcatggattagggttcctgccgagaaggctggagtgtatagaggacagtgttctgaactttgtggagtcaatcacggttatatgcccatcgttatagatgcaatgccaaaacaaaggtttgcaaagtggttggagaaagcaaaaaaagaatttgctagcaatggcgggcaggtagatttggctcaaacaaaaatcactattgataccatggtggattag

SEQ ID NO: 225254 - DNA, 847 bp, Unknown
  Bacterial polypeptide expressing nucleotide sequence isolated from the Sargasso Sea
tacatgaaaaacgggcacgtgtggaatgtttatgtcacggctcacggcctcattatggtcttttttgttgttatgccggcccttataggagggttcggcaactggtttgtgccgcttatgataggtgccccggacatggcattccctcgaatgaataatatcagcttttggctacttattccggcatttttattactcttactgtcggtgtttgcggacggtggcgcgggtgttggctggacaatttacccgcctatgtcggggaaagaagggacgcccgggatgtcaatggatatggcaatactgtcacttcatttggcgggagcgtcatcaatactgggggcagcaaactttattacaacaatatttaatatgcgggcaccgggaatgacgcttcataggatgcctttgtttgtttgggcaatgctgataactgccttcttgctcctattatcgcttcctgtcttggcaggtgccataacgatgttacttacagaccgcaactttggcaccacgttttttgtagccgctggaggcggagatccaatcttattccttcacttgttttggttttttgggcacccagaagtttacataatgatacttccagctttcggaatcgtcagtcacgttatatcaacgttctctaagaagccgatatttgggtacttgggtatggcatatgccatggttgcaattggttttgtcgggttcatcgtatgggcccaccacatgtacactgttggtctagatgttgatacgagagcgtatttcactgctgctacgatggtaattgctgtacctacaggggtgaaaattttctcctgggattgctacgatgtggggc

SEQ ID NO: 225255 - DNA, 453 bp, Unknown
  Bacterial polypeptide expressing nucleotide sequence isolated from the Sargasso Sea
gggaaatgtatggccgccaaaaagatattgaaacttttgacccatgggatatcccacttataaatacccttgtcctacttttatctggtacaacagtaacttgggcacatcattcattattagaggacgacagaaaaggatttataaatggtctaatctgtacagtaattttaggagcattctttacgttattgcaaatatacgaataccaacacgccacatttagtttttcaggtcatatttacggagctacattctatatggccacagggtttcatggtttccatgttttaattggaactattttcttagctgtgtgcttatggagaggtaagttaggacattttaccaaagaacatcattttggtttcgaggcagcagcctggtattggcactttgttgatgttgtctggttgtttttatttgctgctatttacatttggggaagttaat

SEQ ID NO: 225256 - DNA, 385 bp, Unknown
  Bacterial polypeptide expressing nucleotide sequence isolated from the Sargasso Sea
ttggttttacttttatctggaacaacagtaacatggtcacatcatgccttattagaggatgatagaaaaggatttattcaagggttggttttaactgttatattaggagtttgttttacagcattacaagcttacgaatatcatcatgcaacatttgctttttcagatcatatatatggttcggtattttatatggcgaccggatttcatggcttccatgtaattgttggtacaattttcttagctgtatgtttatggagaggaaagttaggtcattttaacaaagatcaccactttggttttgaggcggcagcatggtactggcactttgttgacgtggtatggttattcttattcgccgcaatatatatttggggaagctaat

SEQ ID NO: 225257 - DNA, 598 bp, Unknown
  Bacterial polypeptide expressing nucleotide sequence isolated from the Sargasso Sea
atgtgggggggatcaatatcttttaaaacacccatgatgtgggcgcttggatttatatttatgtttactgttggtggagtaacaggtgtggtattagcaaatgctggagtagatactgcaatgcatgacacttactatgtagttgcacactttcactatgttttatcattaggtgcagtttttgcaatttttgcaggtttttattattggttttcaaaaatgtctggctatgaatactctgagtggttaggacaattacatttttggttaacgtttgtaggggtaaatttaattttctttccacaacattttttaggattggcgggtatgcctagaaggtatgcagattatcccgacgcttttgctggttggaattatatctcctcaatcggttcatacatcgcggttgcagggttagcagtattttttgtaaatctgatttatgcatttgctaagaagaaagctgctgctcaaaacccttggggagtaggagccaccactttagaatggacagtaccgtctccacctaattttcacacgtttgaggaactgccaaaatttgaggatgatcaggaagcgcagaaatcacatagctaac

SEQ ID NO: 225258 - DNA, 826 bp, Unknown
  Bacterial polypeptide expressing nucleotide sequence isolated from the Sargasso Sea
atgtatacacaaactgcatcaactgacgatcatcatacaccaacaggttggaaacgttgggcttactcaactaaccataaagatataggtacaatgtatttaatctttgcaattgttgcaggggtgattggaacagcattttcagttttaatgagaatggaattgatgcatcctggtgatggtattttaggtggaaattatcatttatataatgtgttagtaactggtcatggtttaatcatgattttttttatggtgatgccagcaatgataggtggctttggtaattggtttgttccaattatgattggtgcccccgatatggcatttccaagaatgaataatatttctttttggttgttaccagtttcgttaacactattaattttatcaatttttgttgatggacctccaggtcaaacaggtgtgggtggtggatggaccatttatcctccattgtcctctaaagcaggccagccaggtccagctatggatttagcgattttgagtttacacttagcaggagcctcttcaattttaggtgctgtgaattttatcactacgattttaaatatgagaactccaggtatgacattgcataaaatgcctctatttgcctggtcaattctagtaacagcatttttattgttactatctttaccagtgcttgcgggagcaattaccatgttattaactgataggaattttggaactgcattctttgaggcccaaacaggaggtgacccagttttattccaaccatttattttggttctttggtcatccaaaagtttatattttaattcttcccaggctttggaatgat

SEQ ID NO: 225259 - DNA, 825 bp, Unknown
  Bacterial polypeptide expressing nucleotide sequence isolated from the Sargasso Sea
tgggtattagttcctgctttggttttattagttgtatcagcaacaataggttcaggagctggcactggttggacaatttatcctccattgtcaaacaagattggacacgcaggtccatccgttgacatggctatttttgctcttcaccttgcaggagcttcatctattttaggagctgtaaattttataacaactatacttaatatgagaacacctggaatgacattgcataaaatgccattgtttgtttggtcaatgttaataaccgcatttcttttacttttagcagtgccagtattagctggagctattacaatgctcttaacggatagaaattttggaacaacattttttaatcctgcaggaggtggagatcctgttttatttcaacatttattttggttttttggccatccagaagtttatataatgatacttccagcttttgggattgtaagtcaggttatctcaactttttctagaaagcctgtttttggttatttaggaatggtatacgcaatgattgcaattggttttattggttttattgtatgggcacatcacatgttcactgtcggaatgagtgcagatttaagagcatattttatgttagcaacaattataattgctgttccaacaggtattaaaatattcagctggattgcaactatgtggggaggatcgttaacatttgaaactcctatgttatttgcaataggcttcgtatttttatttacactaggtggagtaactggagtaattttagcgaatgcaggcattgatactgttatgcatgatacttattacgttgttgctcattttcac

SEQ ID NO: 225260 - DNA, 258 bp, Unknown
  Bacterial polypeptide expressing nucleotide sequence isolated from the Sargasso Sea
acagatagaaattttgggacaactttctttagtgcagctgaaggtggagacccagtgctttttcaacacctattttggttctttggtcaccctgaggtttatatcttaattttaccaggttttggaatcgttagtcacgttgtagcgacattttcgaagaagccagtctttggctatcttggaatggcttatgcaatggtatctattggtttcttagggttcattgtatgggctcaccacatgtacaccgttggcatg

SEQ ID NO: 225261 - DNA, 746 bp, Unknown
  Bacterial polypeptide expressing nucleotide sequence isolated from the Sargasso Sea
tatgagttacggaacgtctactgaaaatcatttagatcatcacgatcatagacctgggtttataagacgttggtttttttctacaaaccacaaagatattggaacactttatataatttttgctttaatcgctggattgatagggggttttttctccttattgatgagagcagaacttgccgctcctggcttagatatagttgcagatggacaaatgtggaatgtaataattacagcacatggtttattaatggttttctttgtagttatgccagctctaattggtggttttggaaactggtttgttccacttatgataggtgctccagatatggcatttccaagaatgaataactttagtttttgggtattagttcctgctttagttttattagttgtttcagcaacaataggtactggagctggaactggttggacaatttatccgcctttatcaaataaacttggacatgccggtccttcagttgatatggcaatatttgcccttcatcttgcaggagcatcttcaatattaggtgcagttaatttcattacaacaattcttaatatgagaactccagggatgacacttcataaaatgccattatttgtatgggcaatgctgattactgctttcttattacttttagctgtacctgttttagctggtgcaataacaatgttacttactgatagaaattttggtacaacattttttaatcctgctggaggaggtgatccagttt

SEQ ID NO: 225262 - DNA, 565 bp, Unknown
  Bacterial polypeptide expressing nucleotide sequence isolated from the Sargasso Sea
tgttcaaattcatcacagatatggtatgactttatttattgcttcagaggtaatgttctttgttgcatggttctgggcttattttgatataagtttatttccaaatgaatttgttggaaatgtgtggccaccaaaagatattgaaacatttgatccttgggacattcctttgataaatactttagttttattactatcaggaacaactgttacttgggctcatcactctttattagaggatgacagaaaaggatttatacaagggttaactttaactgtaatcctaggtttcttttttacgttattacaagcatatgaataccatcatgctactttcacatactcgggccatatttatggagcagtattttatatggcaacaggctttcacggtttccacgtgattattggaacaatatttttggctgtatgtttgtggagaggaagacttggtcattttacaaaggatcatcattttggatttgaagcagctgcttggtactggcattttgttgatgtagtgtggctatttttatttgctgcaatttatatttggggaagttaa

SEQ ID NO: 225263 - DNA, 156 bp, Unknown
  Bacterial polypeptide expressing nucleotide sequence isolated from the Sargasso Sea
gaacaatatttttagctgtatgcttgtttagaggaattaaaggtcattttacatcaaatcatcattttggttttgaggcagctgcttggtattggcactttgttgatgttgtatggctatttctctttgtctgcgtttattggtggggtggctaaa

SEQ ID NO: 225264 - DNA, 710 bp, Unknown
  Bacterial polypeptide expressing nucleotide sequence isolated from the Sargasso Sea
tcaccatatgtacacagttggtttagatactgatactaaagcgtatttcttagcggcaacaatgatcatcgctgttccaacaggaattaaaatattttcatggatagctacaatgtggggaggatctatatcattcaaaaccccaatggtttgggctttaggatttatatttttatttacagttggaggagtaactggtgttgttctagcaaacgctggagtagatactgcattgcatgatacttattatgttgtagctcacttccactatgtattatctttaggagctgtttttgcaatatttgcaggcttctactattggtttggtaaaatgtcagggtatgaatattctgagtggatgggtcaacttcatttttggttaactttcataggtgtaaatttagttttttttccacaacactttttaggactagccggaatgccaagaagatacgctgattatccagatgcatttgctgattggaattatatttcttcgattggttcatatatttcagtagttggattggtggtatttttcgctaatttaatctacgcttttgcaaaaaagaaaaaagcagcacaaaacccatggggagaaggggccacaacattagagtggacagttccatcaccaccgaattttcacacttttgatgaattacccaagtttgaagattatgaaggtactgaaaaatctagtagttagt

SEQ ID NO: 225265 - DNA, 398 bp, Unknown
  Bacterial polypeptide expressing nucleotide sequence isolated from the Sargasso Sea
attaattaatacactagttttattattatctggaacaactgttacatgggctcatcactctttattagaggatgatagaaaaggttttatacaaggtctttgggcaacagttctactaggtttcttttttacccttctccaaatatatgagtatcaacacgcgagttttaatttttcaggacatatttacggtgcaacattttatatggctacaggttttcatggtttccatgtagtagttggaactatatttttggcagtctgtttgtggagaggaaaacttggtcattttaataaggaacatcattttggatttgaagctgcagcatggtactggcattttgttgatgtagtttggttgtttttatttgcagcaatctacgtttggggaagctaat

SEQ ID NO: 225266 - DNA, 663 bp, Unknown
  Bacterial polypeptide expressing nucleotide sequence isolated from the Sargasso Sea
gtacacagttggtttagatactgatactaaagcgtatttcttagcagcaacaatgattatcgccgtcccgacaggaattaaaatattttcatggattgctacaatgtggggaggatctatatcattcaaaaccccaatggtttgggctttaggatttatatttttatttacagttggaggagtaactggtgtagttctagcaaacgctggagtagatactgcattgcatgatacttattatgttgtagctcacttccactatgtattatctttgggagctgtttttgcgatatttgcaggcttctattattggtttggtaaaatgtcagggtatgaatattctgagtggatgggtcaacttcatttttggttaactttcataggtgtaaatttagttttctttccacaacacttcttaggattagctggaatgccaagaagatacgctgattatccggacgcatttgctgattggaattatatttcttcaatcggttcatatatttctgtagttggcttagtggtatttttcgctaatttaatctacgcttttgcaaaaaagaaaaaagcagcacaaaacccatggggagaaggggccacaacattagagtggacagttccatcaccaccaaattttcacacttttgatgaattacccaagtt

SEQ ID NO: 225267 - DNA, 880 bp, Unknown
  Bacterial polypeptide expressing nucleotide sequence isolated from the Sargasso Sea
ccgacttcttgagaccagtttctttatgcctgcgatcatctctgctggcggccagaccgattacgatggtggtagcccggtgttattccaacacctgttttggttcttcggacaccctgaggtgtatatcgtagctcttcctgcttttggtcttgtctctgaaatattgagcgttcatgcacgaaaggcgatatttggttatcgaatgatggtttgggcgatcgtagcgattggcgcgttaagcttcatagtatgggcgcaccacatgtacgttagcgggatgaatccttattttggattcttttttgcgacgacaacgctgattattgcggtgcctactgcgattaaagtttataactgggtattgacgttatggcggggtaatatcaagttgactgtccccatgttgttcgcaattggctttattttcacattcattaatggtggcttgacaggtttgttcttgggtaatgtcaccatcgacttgccgctttctgacacctactttgtggttgctcatttccatatggttatggcggtctcgccggtgctcgttgtttttggggcaatctatcattggtatccaaaaatcactgggcgcatgtttaatgacaagctgggtagaattcatttctggttcaccttcgtgggctcttatgcgatttattacccgatgcactaccttggcttagaaggtatgccaaggcgctatttctcctacggagatactgagtttatctctgcgtcatctgcagatttgaatgtcgcgatttctatcgcagccatttttgttgcagcttcgcagatcttctttttctggaatatgatccagagcctatttaaaggcgaaaaggcagatcctaatccttggggcgcgacc

SEQ ID NO: 225268 - DNA, 608 bp, Unknown
  Bacterial polypeptide expressing nucleotide sequence isolated from the Sargasso Sea
tatgtctagtcacgcaccatctttttttaaaagatattttttttcaaccaaccataaagatattggcgttctatacctcgtcttcgcgataatagcgggtttaattggtggaattttttctttattaatcagaatggaattggctgaacctggaatgcagattttaggagatgactaccaacgatacaacgtttggataactgctcacggacttttgatgattttctttatgataatgcctgcaatggtgggtggatttggtaattattttgttccgctcttgattggtgctccagatatggcctttccaaggatgaataacctaagtttttggttattgcccccttcaatcatattgctaataggttccgcttttgttggagatggtgccgggccggggtggacactctatgccccattatcaacatcgggccatggcggacccgccgttgatatggcgatactttcaatgcatttagctggcgcatcttccatattaggtgccatcaactttattactacaatttttaacatgagagcaccagggatgacgatgcataagatgcctttgtttgcctggtcaattcttataacagcattcttattac

SEQ ID NO: 225269 - DNA, 940 bp, Unknown
  Bacterial polypeptide expressing nucleotide sequence isolated from the Sargasso Sea
ccttacggatggagaaggtgggcttattctactaatcataaagaatattggaaccatgtatcttatctttgcaattattgcaggattaataggttcaattttttcagtgttaatgagaatggagctcatgcaccctggtgatggtattctcggcggaaaccatcatttatataatgttctagttacaggacatggattaataatgattttcttcatggtaatgcctgcgatgatcggcggatttggaaactggtttgtacccataatgattggggcaccagacatggcctttccaagaatgaacaatatttctttttggttattacctgtttctttaatattgcttttggcgtcaatatttgttgatggtcctccaggccaatcaggagttggaggaggatggacaatttacccaccactttcatccaaaactggtcaaccaggaccagcgatggatttggcaattttaagtttacatatagcaggggcctcatcgattcttggcgcaattaattttatcactactattttaaatatgcgaacaccaggtatgacactacataaaatgccattgtttgcgtggtcaattcttgttacggcatttttacttcttttatctttacctgttttggcaggagccattacaatgttattaactgataggaattttggaacagctttttttgaagctcaaactggcggagacccagttttatttcaacatttgttttggttttttgggcaccctgaagtttatattttgattttaccaggtttcggtatgataagtcacattgtttcaacattttcaaaaaaaccaatatttggttatcttggaatggcttatgcaatggtagcaataggtgttgttggtttcgtggtttgggctcatcacatgtatactgtaggtttagatacagatacaaaagcctatttttta

SEQ ID NO: 225270 - DNA, 229 bp, Unknown
  Bacterial polypeptide expressing nucleotide sequence isolated from the Sargasso Sea
ctatacggttccgccttcttcatggcgaccgggttccacggcgcgcacgtggtgatcggtaccatcttcctgaccgtctgcttgctgcgtctctatgctggcaacatgaccaaggataagcatctcggcttcgagttcgcggcttggtactggcactttgttgatgtggtctggttgttcctgttcgcctttgtttacgtcattccgcacctggtcttggggcactgac

SEQ ID NO: 225271 - DNA, 823 bp, Unknown
  Bacterial polypeptide expressing nucleotide sequence isolated from the Sargasso Sea
aatggcagatattacagcagatcaggtagacagtcacgatcatcacccaactggctggagaagatacctatactcaacaaaccataaagatattggaactctgtatttaatttttgccgttatagcaggtttagtaggaactggaatgtctgttctgatgagaatggagttgatgtatcctggagacggaatattgggaggcgatcataatttatataatgttctagttacaagtcatggtttactcatgattttctttatggttatgccagctatgattggtggttttggaaactggattgtgccgcttatgattggcgctcctgatatggctttcccacgaatgaataatatctctttttggttattgccagcatcactaatactacttatcgcatcattatttgttgagggaacatcaggtggtgcaggcgttggaggaggatggaccatatatccaccattgtctgctaacttaggttcgcctggtcctgcagtggatttagcaatcttctcattacaccttgctggagcatcatcaattcttggtgcaattaactttataacgacaatttttaatatgagggctcctggtatgactcttcataagatgcctttatttgtatggtcaattcttgtgacagctgtccttttactactttcattaccagtattggccggtgcaattacaatgcttcttacagatagaaattttgggacaactttctttagtgccgctgaaggtggagatccagtactttttcaacacctattttggttctttggccaccccgaggtttatattttaattttgccaggtttt

SEQ ID NO: 225272 - DNA, 868 bp, Unknown
  Bacterial polypeptide expressing nucleotide sequence isolated from the Sargasso Sea
ttgttatctttaccagtattagcaggtgcaattacgatgttattaacagatagaaattttggaactgcgtttttcgaagcgcaaactggaggagatcctgttctatttcaacatttattttggttctttggtcacccagaagtttatattttaattttacctggctttgggatgataagtcatattgtttcaacattttctagaaaaccagtctttggttatttaggtatggcatatgcaatggttgcaattggaatagttggttttgttgtatgggctcatcacatgtatactgttggattgagtacagatacaaaggcttatttcttagcagctacaatgattattgctgtaccaacaggaattaaaattttctcatggatagcaactatgtggggtgggtcaatttcatttaagacacctatgatgtgggcactaggctttatatttatgtttaccgttggtggtgtaacaggtgtagttttagcgaatgcaggagtagatacagcaatgcacgatacctattatgtggtagctcattttcattatgttttatctctaggagcagtttttgcaatttttgctggtttctattattggttttcaaaaatgtctggttacgaatattctgaatggatgggacaattacatttttggttaacatttataggtgttaatttaattttctttccacaacactttttaggtttggctggtatgcctagaagatatgcagattatccagatgcttttgctggctggaattatatatcatcgattggctcctacattgctgtagcaggattagcagtattttttgttaatctaatttatgcttttgcaaaaaagaaagctgctgcacagaacc

SEQ ID NO: 225273 - DNA, 931 bp, Unknown
  Bacterial polypeptide expressing nucleotide sequence isolated from the Sargasso Sea
acagcaggtcaaccaggtccggcaatggattttgcaattttaagtctacacttagctggagcttcttcaattttaggtgcagtaaactttattactacaattttaaacatgagaacacctggcatgacacttcataaaatgccattatttgcttggtcaatattagtaaccgctttcttattattgttatcattaccagttttagcaggagcaattacaatgcttcttacagataggaacttcggaacagctttctttgatgcacaaactggaggagatccagtactattccaacatttattttggttctttggtcacccagaagtttatattttaattttaccaggttttggaatgatcagtcatattgtttcaacattttctagaaaaccagtttttggatatttaggaatggcttatgcaatggttgcaattggaatagttggttttgttgtgtgggctcaccatatgtacacagtaggtttaagcacagatacaaaagcatattttttagctgcaacaatgatcattgcagttccaaccggtataaaaatattttcatggatagcaactatgtggggtggttcaatttcatttaaaactccaatggtttgggccttaggatttatatttttatttacagttggtggagttacaggtgtagttcttgcgaatgctggtgttgatactgcaatgcatgatacatattatgttgttgctcattttcattacgttttatcattaggagctgtgtttgccatcttcgctggtttttattactggtttggcaaaatgactggttacgagtattcagaatggatgggtcaattacacttctggttaacgtttataggagtaaacttagttttcttcccacaacactttttaggccttgcaggaatgccaagaagatatgctgactatccagatg

SEQ ID NO: 225274 - DNA, 904 bp, Unknown
  Bacterial polypeptide expressing nucleotide sequence isolated from the Sargasso Sea
gtccaatttcttctagcttttgcggtgcctgttataaccgttgcgctctttttattaatgtttgatagaaattttggatcgcattttttcaatccggaaatgggagctgatcctttactctggcaacatctcttctggatatttggtcatccagaggtatatattctgatacttccatcatttggaatcatttcagaagtaattccaactttttctcggaaacctatttttggttatccatttatggttttttcaggaattgcaatcggtttcatgggttggggagtttgggcacaccacatgtttgtctctggtataggtccaatttcagttgctgccttttctctttcgacaatgtttattgctgttccgacaggcgtgaaaattttaaactggatggcaactatgtggggaggcaaattattgttcaacaccccgatgttgttcgccgccggagtggtttctatgttcacgattggtggcctttcgggagttacccactcggtagcaccagctgatactcaacaaaccgacacttattacatcgtcgctcatttccattatgtaatttttggtggagcgctgttaggaatttttgctggtttttatttttggtggccgaaagtatttggttacatgctcggcgaaaagttaggaaaattgaatttctggctcatgataattggatttaatttaactttcggccctatgcatattttgggtcttcaaggcatgtctagacgaattcatagttacagcccaggttttggattcgaattctggaatctggtagagacaattggttcttttgttataggaataggagttttattattcctcataaatatttatgcctcagctaaaaaagccaaagggcacccacctgttggtccagatccatgga

SEQ ID NO: 225275 - DNA, 917 bp, Unknown
  Bacterial polypeptide expressing nucleotide sequence isolated from the Sargasso Sea
gttggtggtggttggactatttatccaccattatcatccaaagcaggtcagcctggaccagcaatggatttagcaattttgagtttacacttagcaggggcttcatcgattttaggagcagtaaactttataacaacaattttaaatatgagaactccaggtatgacattacataagatgcctttgtttgcatggtcaatcttagtcacagctttcttattattgctatcgttaccagttctagctggagcaattacaatgttattaacagacagaaactttggaaccgccttttttgaagcgcagaccggaggagatccagttctttttcaacatttgttttggttcttcggccatccagaagtttatattttgattttaccaggatttggaatgattagtcatattgtatcgaccttttcaagaaaaccagtttttggttatttaggaatggcatatgctatggtagcaattggaatagttggtttcgttgtatgggctcatcatatgtacacagttggattaagtacagatactaaagcttactttttagcagccacgatgattatcgctgttccaacaggtattaaaattttctcatggatagcaactatgtggggtggatcaatttcattcaaaacacctatgatgtgggctcttggttttatattcatgtttacagttggaggtgtgacaggtgttgttttggcaaatgctggagtagatactgcaatgcatgacacttattatgtggttgctcacttccattatgtactttcattaggtgcagtttttgcaatttttgcaggtttctattattggttttcaaaaatgtcaggctatgaatattctgaatggatgggccaattacatttttggttacatttattggtgttacttaattttcttcccacagc

SEQ ID NO: 225276 - DNA, 499 bp, Unknown
  Bacterial polypeptide expressing nucleotide sequence isolated from the Sargasso Sea
tttaggtggtgtaaccggcgtagttctagctaacgcaggagtggacactgctttacacgacacttactatgtagtagctcactttcattacgttttgtcaatgggagcgctatttgctatttttgctggcttttactattggtttagcaaaatgtcagggtatgagtattcagaatttttgggaaaactacatttttggttaacttttataggtgtaaatttacttttttttccgcaacattttttaggtttagcaggtatgccaagacgttacgcagattacccagatgctttcgctggatggaattatgtctcgtcaataggatcatacatttctttagttggagtaggagtatttttaataaatctactttactcatttattaaaaaaagagcagcagctcaaaacccatggggagaaggtgctacaacattagaatggacagtttcttcacctcctccttttcacacatttgaagaattaccgaaggtaaaataa

SEQ ID NO: 225277 - DNA, 889 bp, Unknown
  Bacterial polypeptide expressing nucleotide sequence isolated from the Sargasso Sea
attttgggtgctgtaaattttattactacaattttaaatatgagaacaccaggcatgacacttcataaaatgcctttatttgcttggtctattttagttactgcttttttattgttgctgtctttacctgttctagcaggagcaattactatgttgctgacagatagaaattttggaactgccttctttgaggctcaaactggaggagatccagttttattccaacatttattttggttctttggtcatcctgaagtttatatactaattcttccaggatttggaatgattagccatattgtttcaacattttcaagaaaaccagtttttggatatttaggaatggcctatgcaatggttgcgattggagtcgtcgggtttgttgtttgggctcatcatatgtacactgttggattaagcactgatacaaaagcttatttcttagctgcaacaatgattattgctgtaccaacaggtattaaaatattttcttggattgctactatgtggggaggctctatatcttttaaaacaccaatgatgtgggctttaggttttatatttatgtttacagttggcggtgtaactggtgtagttttagcaaatgctggagtagatacagcaatgcatgatacatactatgttgtagctcattttcattatgtactatctttaggagcagtttttgcaatttttgcaggtttttattattggttttcaaaaatgtctggttatgaatattctgaatggatgggtcaattacatttttggttaacatttataggtgtaaatttgattttttttcctcaacactttttgggtttagctggcatgcctagaagatatgcagattatccagatgcatttgcaggatggaattatattcatc

SEQ ID NO: 225278 - DNA, 981 bp, Unknown
  Bacterial polypeptide expressing nucleotide sequence isolated from the Sargasso Sea
gggttggacactttatcctccacaagcaattttagaaggaaccccgggatcaggatggggaataatgttaatgtgtatatcattaattttatttgttgctggatttaccatgggaggcttaaattatttgattaccgtgcttcaagctagaacaagaggaatgacattaatgagaatgcctctaacagtttggggaatttttactgctacagtattagcaatgttagcttttccagcattactggtaggtgcattaatgatgagtttagacaatgtgcttggaacaagcttctttatgccaaccatattgaaagcaggagaagttttagaatatggcggaggaagtcctattctttttcaacatttattttggttcttcggacatcctgaagtttatatagtcgcgttacctgcgtttggaataatttctgacttaatctctgttcatgctagaaaaaatatatttggttatagaatgatggtttgggcaatagttggcataggcgccttaagcttttttgtatgggcgcaccacatgtatgttagcggaatgaacccttggtttggattcttttttgcaacaactactcttataatagcagttcccacagcaatgaaagtttataattggatcctaactctttggagaggaaatattagacttaacactgttatgctgtggtgtttaggttttattgttacttttgtaaatggtggaatcactggaatttttttaggaaatgttagcgtcgatgttccgttatcagatacctactttgttatcgctcactttcatatggtaatgggtattgctccgcttatggtaattatgggagcggtttaccactggttccctctagtagcaggtagatttttagatgaaaaattaggtaaatggcatttctggttaactttcttaggcgcttattcaatatattttcctatgcattatttaggatttattggagtacctagaagata

SEQ ID NO: 225279 - DNA, 414 bp, Unknown
  Bacterial polypeptide expressing nucleotide sequence isolated from the Sargasso Sea
gcaattttgcaggattttactattggtttggaaaaatgactggttatgagtactcagagtggatgggtcaattacacttctggttaacgtttatcggagtgaacttggttttcttcccacaacactttttaggccttgcgggaatgccaagaagatatgctgactatccagatgcttttgcaggatggaattacatttcttcaattggttcttatatttctgtaattggattggtagtattttttatgaaccttgcttatgcgttttataagaaaaaggctgcagcacaaaacccatggggagaaggtgccacaactttagaatggactgtgccatctccacctaattttcatacttttgaagaattaccaaagtttgaagatgaagagggtgttgaaaaatctaccagctaag

SEQ ID NO: 225280 - DNA, 827 bp, Unknown
  Bacterial polypeptide expressing nucleotide sequence isolated from the Sargasso Sea
tctgcttctttctttaccagtcttagccggagcaattacaatgttattaactgacagaaactttggcaccaatttttttgtacctgaaggtggaggtgatcctatattgtttttacatttattttggttttttgggcatcccgaggtttatatcatgatactccctgcttttggtatcgttagtcagattatatctactttttcgaagaaacctgtttttggttatttgggaatggcttatgcaatggtagcaattggtgttgttggttttgttgtatgggctcatcacatgtacacagtaggactgtcaattgatacaagagcatactttactgcagcaacaatggttatagcagtgccaacaggtgtcaaaatattttcatggattgcaactatgtggggtggctctataacgtttagaattccaatgttgtgggcaataggattcatatttttgtttaccgttggaggcgtgacaggagttgttttagccaacgcaggattagatgtagttttacataatacatactatgtaatagcacattttcattacgtattatctttaggtgcagtatttggattatttgcaggtttctattattggttttcaaaaatgactggatatgaatataattcttttcttgcaagaattcatttttggttaactttcattggagtaaatttgacttttttccctatgcactttttaggacttgctggtatgccaagaagatacgtagattatcctgatgcatttgcagggtggaattttgttgcttcaataagttcttatataagtgctttttgcacattagtatttttctatt

SEQ ID NO: 225281 - DNA, 474 bp, Unknown
  Bacterial polypeptide expressing nucleotide sequence isolated from the Sargasso Sea
atgatacttattatgttgtagctcacttccactatgtattatctttgggagctgtttttgcgatatttgcaggcttctattattggtttggtaaaatgtcagggtatgaatattctgagtggatgggccaacttcatttttggttaactttcataggtgtaaatttagttttctttccacaacacttcttaggattagctggaatgccaagaagatacgctgattatccggatgcatttgctgattggaattatatttcttcaattggttcatatatttctgtagttggcttagtggtatttttcgctaatttaatctacgcttttgcaaaaaagaaaaaagcagcacaaaacccatggggagaaggggccacaacattagagtggacagttccatcaccaccgaattttcacacttttgatgaattaccgaagtttgaagattatgaaggtactgaaaaatctagtagttagt

SEQ ID NO: 225282 - DNA, 538 bp, Unknown
  Bacterial polypeptide expressing nucleotide sequence isolated from the Sargasso Sea
tatgctattctcaatagcattcgttgccctatttactataggcggtttttcgggacttatgctggctattgttccagccgacttccaataccatgacacctactttgttgtagctcatttccactatgtattagtaccaggagccttatttggaataatagctgcggcttattactggttgcctaaatggactggcaatatgtacgatgagaccttaggaaaattacacttctggctaacctttatttcagtcaatgtaactttcttccctatgcactttgtgggtctcgctggaatgcctagaagatacccggattatgctctgcaatttgcagacttcaatgcattaatcagtgtgggagcttttatgtttggcttaactcagcttctctttttattcatcgtgattaaaacaatcaggtcaggtaaacaagccaagccggaggtttgggaaggtgctggagatctaggccttgagtggactttgagctcaccacctccatatcactcatttactgttcagcctcaagttaaataa

SEQ ID NO: 225283 - DNA, 856 bp, Unknown
  Bacterial polypeptide expressing nucleotide sequence isolated from the Sargasso Sea
gagaaccaaaaggaccgtttccatgagcgcccaagccaaacacccttatcacatggtgacccaagcccctggcctgcacttggagccttcggtgctctagtcctagctctcggcgcgattttgtacttccatgaagtgcctgtctttggaatggaagatttaggagtgatcacacttatccctggatttgctctcgtgatccttacaatggtcttctggtggcgcgatgtggtgaaagagtccgtagtgcaaaaagcacacacagagcccgttaatgacggcctgcgttttgggatggtcctgtttatagcttctgaagtgatgttcttcgtcgcatttttctgggctttttttcataatgctacagggttctcgaccacaacactgcaatggccgcccgcaaacatcacaccactggacgcctgggaactacctttttacaacaccgtcatattgctgacatctggagggacggtgacacgagcacacttatttattgaggaaggaaataacgaagccgccgctcgctggatcttccttacggcagcgctgggcgcaattttcctaggtctacaggcgtttgagtatgtccatgctgaattcagcctgaccgagggcatttatccatctactttctaccttgcaacaggcttccatggtttccacgtttttgtcggaacggtattcctaattgtatgcggctttcgcgccgctaagggccacttcaaaccgcacaaacatgtcggatttcagtcagccgcatggtactggcatttcgtggatgtggtgtggcttttcttgtttgtatgggtctattggctgctcgccctgccggttcgcacctttagtggctaaa

SEQ ID NO: 225284 - DNA, 794 bp, Unknown
  Bacterial polypeptide expressing nucleotide sequence isolated from the Sargasso Sea
atggatttagcaatacttagtcttcatatagctggagcttcttcaatactaggtgctgtaaattttattactacgatattaaatatgagaacaccaggaatgactttgcataagatgccattgtttgcttggtcaattcttgtaacagcctttttattacttttatctttaccagttttagctggagcaataacaatgttgttaacagataggaattttggaacagcattctttgatgcgcaaacaggtggagatccacttttatttcaacatttattttggttctttggtcatccagaggtttatattttgattttaccaggttttggaatgataagtcatattgtttcaaccttttctaagaaaccagtttttggatatttaggtatggcttacgcaatggtcgcgattggtattgtgggttttgtagtttgggctcatcacatgtatacggtaggattgaatactgatacaaaagcatattttcttgcagcaacaatgatcattgctgttcctacaggaataaaaattttttcttggatagcaaccatgtggggtggctctatttcttttaaaactccaatgatgtgggctcttggttttattttcttatttacagttggaggtgttactggtgtagttttagccaacgctggtgttgatacagccttgcatgatacatattatgtagtagcgcactttcattatgtgttatcactcggagcagtttttgcaatttttgcagggttctattattggtttggaaaaatgtctggttacgaatattcagaatg

SEQ ID NO: 225285 - DNA, 307 bp, Unknown
  Bacterial polypeptide expressing nucleotide sequence isolated from the Sargasso Sea
aaatggtttgatagcaacagtatttttaggatttatattttcttgttttcaagcttatgagtatcatcacgcaacatttactttagatggtggaatttacggttcaacattttatatgtcgactggttttcatggctttcatgtaattgttggaacagtttttcttgcagtttgtttgtttcgatcgatgaggggccattcaacgcctcaacatcattttggatttgaggcagcagcctggtattggcattttgtagacgtagtatggttattcttatttgctgcgatctatatttggggaagctaa

SEQ ID NO: 225286 - DNA, 502 bp, Unknown
  Bacterial polypeptide expressing nucleotide sequence isolated from the Sargasso Sea
tcggcggagtgggacaggagttatcttggcaaatgcaggaattgatactgttatgcatgatacatattatgtagttgctcatttccattacgtattaagtatgggagcgatgtttggaatttttgcaggtatctattattggtttggaaaaatgtctggaagaaaatacaatgagtatttaggtaaactacacttttggttattttttataggtgtaaatgtaacttttttccctcagcattttttaggattagctgggatgccaagaagaatacctgattacccagatgcatatgcaggatggaatcttgtttcaacttatggttcatatatttcttttgctgctactttagtattcttattttcgataatttattcacttttctttggaaaaaaagaggcatcaaatccttggggagaaggagcagacactttagaatggactttatcttctccaccacctttccatcaatttgaaacccttcctaaatttaaaggttaa

SEQ ID NO: 225287 - DNA, 637 bp, Unknown
  Bacterial polypeptide expressing nucleotide sequence isolated from the Sargasso Sea
aatttatggtgcgtacatgtggttcagagatgtagttattgaagctgagcatcaaggtcatcatactccagttgttcaaattcatcatagatatggaatgactttatttattgcttcagaggtaatgttctttgttgcatggttttgggcttactttgacataagtttatttccaaatgaatttgttggaaatgtatggccaccaaaagatattgaaacatttgatccttgggacattcctttaataaatactttagttttattattatcaggaacaactgttacttgggctcatcacgctttattagaagatgatagaaaaggctttatacaaggtttaacactgactgttattcttggtttcttttttacattattgcaagcatacgaataccatcacgctacttttacttactcaggccatatttatggagctgtattttatatggcaacaggttttcatggttttcacgtcatagttggaacgatatttttagcagtatgtttgtggagaggaaaacttggtcattttactaaagatcaccattttggatttgaagcggctgcatggtactggcattttgttgacgtggtgtggctattcttatttgctgcaatttatatttggggaagttaa

SEQ ID NO: 225288 - DNA, 490 bp, Unknown
  Bacterial polypeptide expressing nucleotide sequence isolated from the Sargasso Sea
atggcctacgttgaaaatgtgtggccctccaacggtcctgctaattatggtggggactttgtggtaatgaaagcagcaggtatacctgcacttaacacaattattctactcattagtggtttgacagtcacttgggctcaccatggactcaaagagggtaaaagaaatcaactcatactaggattaatcgcgactgtgcttttaggctttatctttgtaggtttccaagcctatgaatattctcatgcgtataatgaccttaatttaaaaatgtcgtcagggatttatggctctacgttttatatgttaaccggatttcatggtttccacgtcacacttggtgcaataatgttgactgttattttattcagatgtattcgaggacattttactaatgagaatcattttggattcgaggcagttgcttggtattggcattttgttgatgttgtctggcttggcttatttgtatttgtctactggttataag

SEQ ID NO: 225289 - DNA, 597 bp, Unknown
  Bacterial polypeptide expressing nucleotide sequence isolated from the Sargasso Sea
gggtgaaagtattcaactgggtagccacaatgtggcgaggctcactgacatttgaaatgccaatgatgttcgccattgcgtttattgtgctattcactattggcggcttatcaggactcatgctggcgataacacctgttgatttccaataccatgacacttacttcgtggttgcgcacttccattatgtcttggttactggcgcggtcttttccattatggcggcggtgtattactggctgcctaagtggacgggcaagatgtacaacaccacgttggcaaaatggcatttctggtgctcgttagtatcggtaaatgtgctgtttttccccatgcactttgttggattggcaggtatgccacgccgaatcccagactatgcacttcagtttgccgactttaataagtggataagcctaggcggttttgccttcggtttatcacaacttattttcttagcactattgattaaagcgtgtaagaagcaaggtgaaccagtatcggctcaggtgtgggacggtgcagaaggactcgagtgggaaataccttctccagccccttaccacactttcgaaacgccgccactagtaaagtaag

SEQ ID NO: 225290 - DNA, 574 bp, Unknown
  Bacterial polypeptide expressing nucleotide sequence isolated from the Sargasso Sea
gttgctaccatgttcagaggctcaattacttatgagactccaatgctgtttgccatagcatttgttgttctttttactattggtggtttttcaggacttatgcttgctattactcctgctgactttcaatatcacgatacttattttgtagtagctcattttcactatgtgctcgtaccaggatcagtgttttcaataatggctgcagtttattattggataccgaaatggaccggtaatatgtatgacgaaagattatcaagattacatttttggctatcctttgttggagttaatgtaacttttttccctcaacactggattggtttagcaggcatgccaagaagatatcctgattatgcgctgcaatttgccgattggaacatggtatctacggcaggagctttcttatttggagcttcccagattttgtttcttttcattgtattgaagaccgttgttggtggaaaaaaagcaacttctcaagtatgggagggtgcaaaaggtttagagtggtcagtcgcttcaccagctccttatcatactttctcaactccaccaaaggttgattgat

SEQ ID NO: 225291 - DNA, 520 bp, Unknown
  Bacterial polypeptide expressing nucleotide sequence isolated from the Sargasso Sea
gcctttattgtgctgttcaccatgggggggctttcaggattaatgttggcgatcacgcctgtggacttccagtaccacgacacttatttcgttgtggcccatttccactatgttctggtaacaggggcagtcttttctatcatggcagcggtgtattactggttgcctaaatggacgggaaaaatgtatgacacaaccttagctaaatggcatttctggtgttcattggtatcggtcaatgtgttgttcttccctatgcactttgtgggtttggctggtatgccacgccgtattcctgactatgcattgcagttcgctgattttaataaatggataagcctgggtggttttgcattcggtttatctcagctcatctttcttgccctgcttatcaaggcatgcaaaaagcaaggtgagccggtatcagcgcaagtttgggacggcgcagaaggactggaatgggaaattccatcacccgctccttatcacacgtttgaaacgccacctgtcgttaagtaac

SEQ ID NO: 225292 - DNA, 940 bp, Unknown
  Bacterial polypeptide expressing nucleotide sequence isolated from the Sargasso Sea
ggatcgggttggacactatatcctccacaagcaattttagaaggcactccagggtcaggatggggaataatgttaatgtgcatatcgttaattttatttgtagctggatttaccatgggtggtttaaactatttgattaccgtacttcaggccagaacaagaggaatgacgttaatgagaatgcctctaacagtttggggaatttttacagctacagttttagcaatgttagcttttccagcgttattggtaggtgcattaatgatgagtttagataatgtacttggaacaagcttttttatgccaactatattaaaagcaggagaagttttagaatatggtggtggaagtcctatcctttttcaacatttattttggttttttggtcatcctgaagtttatattgttgcactacctgcatttggaataatttcagatttaatttctgttcatgctagaaaaaatatatttggttatagaatgatggtttgggcaatagttggtattggcgcactaagcttttttgtgtgggcacaccatatgtatgttagtggaatgaatccttggtttggattcttttttgcaactactactcttataatagctgtccctacagcaatgaaagtttataactggattttaactctttggagaggaaatattcgacttaatactgttatgttatggtgcttaggttttattgttacttttgtaaacggtggaattacaggaattttcttaggaaatgttagcgtagatgttccgttatctgatacttattttgtaattgcacactttcatatggtaatgggtatcgcaccacttatggtaattatgggagctgtttaccactggtttcctttagtagctggaagatttttagatgaaaaattaggaaaatggcatttttggttaacttttttaggcgcttattcgattt

SEQ ID NO: 225293 - DNA, 484 bp, Unknown
  Bacterial polypeptide expressing nucleotide sequence isolated from the Sargasso Sea
tgggctttttttgcttcatctctttttccagttggtggagtgtggccgcctgaaggtattaaaacctttgatccttttgatctaccattaataaatactttaattttattattatccggatgcactgttacatgggctcatcatgctttaattgaaaatgatagatcagactttcttcttgggcttcttttgactgttatacttggaatttcatttactggccttcaggcattagagtatatgcatgcaccatttggttttacagaaggcatctatccatcagtttttttcatggcaacaggttttcatggttttcatgtaatcgttggaacaatctttctttttgtttgtttaattcgtggttatcttggacatttcacaagtactcagcattttgggtttgaggctgctgcttggtattggcattttgttgatgttgtttggttgtttttatttatttgtatctatatgtggggagcttgat

SEQ ID NO: 225294 - DNA, 574 bp, Unknown
  Bacterial polypeptide expressing nucleotide sequence isolated from the Sargasso Sea
tacgcctgtagttcaaattcatcaccgttatggaatgactttatttatcgcgtctgaggtaatgttttttgttgcttggttttgggcttactttgacgtaagtcttttcccaaatgattttgtaggaaatgtttggccacctaaagatattgtgacttttgatccttgggatatacctttaataaacacactagttttactcttatctggtacaacagttacttggtctcaccattcactattagaaggcgatagaaaaggtttcattcaaggattagtgttaacagtaattcttggggcattttttacagctcttcaagcatatgaatatcatcatgctacatttaccttttcagatcatatttatggttctgttttttacatggcaacaggctttcatggtttccatgtcatagttggtacaattttcttagcagtgtgtttatggagaggaaaattaggccattttactaaagaccatcattttggttttgaagcagctgcatggtattggcattttgttgatgttgtttggttatttttgtttgctgcaatatatatttggggaagttaa

SEQ ID NO: 225295 - DNA, 499 bp, Unknown
  Bacterial polypeptide expressing nucleotide sequence isolated from the Sargasso Sea
atgagttacgcagattcagcaagtcacgaccatcatgatcataaacctggatttataaaaagatggtttttttctaccaatcataaagatattggaactctctatatcatatttgctatactagctggattagttggaggtttcttttcattattaatgagagctgaattagctgccccaggtttagacgttgttgcagatggacaagtttggaatgtaattattactgcccatggtttgttaatggtattcttcgtagtaatgcctgcattaataggtggttttggaaactggtttgttccattaatgatcggtgcacctgatatggcttttccaagaatgaataactttagtttttggatacttgttcctgccctagttttattagttgtttcggcaacaataggaaccggtgctggtacggggtggacaatttatcctccactctcaaataaacttggacacgcaggaccttctgttgatatggcaatttttgctc

SEQ ID NO: 225296 - DNA, 514 bp, Unknown
  Bacterial polypeptide expressing nucleotide sequence isolated from the Sargasso Sea
atgttctttgtcgcatggttctgggcttactttgacataagcttgtttccaaatgaatttgttggaaatgtatggccgccaaaagatattgaaacatttgatccttgggacattcctttgataaatactttagttttattattatcaggtacaactgtcacttgggcccatcactctctattggaggatgatagaaaaggatttatacaagggttaactttaactgtaatactaggtttcttttttactttattacaagcatatgaataccatcatgctacttttacctactcgggccatatttatggagcagtattttatatggcaacaggttttcatggttttcacgtgattattggaacaatttttttggcagtatgtttgtggagaggaaggcttggtcatttcacaaaagatcatcattttggatttgaagcagctgcttggtactggcattttgttgacgtagtgtggctcttcttatttgctgcaatatatatttggggaagttaat

SEQ ID NO: 225297 - DNA, 895 bp, Unknown
  Bacterial polypeptide expressing nucleotide sequence isolated from the Sargasso Sea
aacattcgtatttggaacagcaggagcgcctgaaggaggatacctagctgaggaagttggatggcttggcaatgctccaaatggtggttggtttggatatcaacctaatgcaggttttaaatattcaccaggaactgcaatggactattgggcaatcggcttacaaatacttggaatttcttctcttgtatcagcatttaatttcatcgtaacaatattaaatatgaggactcaaggaatgagattgatgagaatgcctgtatttacctggatgacttttgctgtggcttttcttcttgccttttcattaccaataattgcaattgctctcttttacgtaacttttgatagacaatttggtactactttcttcttgactgaaggtggaggagatcctgttttatggcagcatttattctggctatttggtcaccccgaagtatatattcttattcttcctgcttttggaattgtttctgaaatactacctacattttcaagaaagcctctcttcggttatccagcgatagtttttgcaggttttggtattgcatttatcggattcggagtctgggcacaccatatgtttgcttcagcaatcagccctgttgcgcaagctgggtttggtatctcaactatgattattgctgttcccacaggggtaaaaatatttaattggttaggaacaatatggggaggtaagttaaatctaaaaacccctatgttgtttgctcttggttttataggaatgtttgttattggtggtttaagtggagtaacccactcggttgttccagctgatacacaacaaactgatacgtattatattgttgcccactttcattatgttctgttcggtggtgcaatgtttgggatttttgctggtttatattat

SEQ ID NO: 225298 - DNA, 195 bp, Unknown
  Bacterial polypeptide expressing nucleotide sequence isolated from the Sargasso Sea
atatggcaaccggatttcacggtttccatgtgatcataggcactatcttcttagctgtttgcttatggagaggaaaattaggtcatttcaataaagatcatcactttggatttgaggctgcagcgtggtactggcattttgttgatgtggtttggttgtttttatttgcagctatatatgtttggggtagttaaa

SEQ ID NO: 225299 - DNA, 851 bp, Unknown
  Bacterial polypeptide expressing nucleotide sequence isolated from the Sargasso Sea
tatgactttacataaaatgccgttgtttgcttggtcaattttagtaactgcattccttctacttttatctcttccagtattagcaggagcaataacgatgttattgactgatagaaattttggaactgctttttttgaagcacaaaccggtggagatccagtattgtttcagcacttattttggttctttggtcatccagaagtatatatattaattttacctggtttcggtatgataagtcatatcgtatccacattttcaaaaaaaccggtttttggatatttaggaatggcttatgcgatggttgctattggagttgttggatttgttgtttgggctcaccatatgtatacggttgggttagacacagacacgaaagcatatttcttagctgccacaatgattattgctgtaccaactgggataaaagttttttcttgggtagcaacaatgtggggaggatctataagttttaaaacgcctatgctttgggcaatcggatttattatcttattcacattagggggtgtaacaggtgtagttttagctaatgcaggcgttgatactgcgttacatgatacttattacgttgttgctcactttcattacgttttatccatgggtgcactattcgctatttttgcaggattttattattggtttagcaagatgtcaggttatgagtattcagaatttttaggaaaactccatttttggttaactttcattggtgtaaatctgctttttttccctcagcatttcttaggattagcaggaatgccaagacgatatgcagattatccagacgcttttgcaggatggaattatgtttcatcaataggatcttata

SEQ ID NO: 225300 - DNA, 886 bp, Unknown
  Bacterial polypeptide expressing nucleotide sequence isolated from the Sargasso Sea
tcaatttttgctgatggccctccaggacaaacgggggttggtggtggatggactatatacccacctttatcatcaaaagcaggtcagccaggaccagcgatggatttagcaatcttaagtttacacttagcaggagcttcatcaattttaggagcagtgaattttattactacaattttgaatatgagaacaccaggtatgacattacataagatgcctttatttgcatggtcaatcttagtaacagcttttttattattattgtctttaccagttttagctggagcaatcacaatgttgttaaccgatagaaattttggtactgcattttttgaggcacaaacaggaggggatcccgtattattccaacatttattttggttctttggtcatccagaagtttatatattaatccttcctggttttggaatgattagtcatatagtttcaacattttcgagaaaacctgtttttggctatttaggtatggcttatgcgatggttgcaattggaatagtaggatttgtagtctgggctcatcatatgtataccgtaggattaagcaccgatacaaaagcttatttcttagcagctacgatgattatagcagtcccgacagggattaaaatattctcatggattgccactatgtggggtggatcaatttcatttaaaacacccatgatgtgggcattgggttttatattcatgtttacagttggtggagttaccggtgttgttttagctaacgcaggtgtggatactgcaatgcatgatacttattatgttgttgctcactttcattatgtattatctttaggtgcagtttttgcaatttttgcaggtttttactattggttttcaaaaatgttctggttacgaatat

SEQ ID NO: 225301 - DNA, 566 bp, Unknown
  Bacterial polypeptide expressing nucleotide sequence isolated from the Sargasso Sea
gtggggaggctcaattagttttaaaaccccaatgctttgggctatagggtttatagttttattcactttgggcggagtaactggagttgttttagcaaatgctggcgtagatacagctttacatgatacttattatgtagttgctcattttcattatgttttatctttgggcgctgttttcgccatatttgctggattttactactggttcagtaaaatgtctggatatgaatattctgaatttttaggcaagttacatttttggttaacatttattggtgtaaatctaatattttttcctcaacattttttaggattagccggaatgccaagaagatatgcagattatccagacgcattcgctggctggaattacgtatcatcaattggttcatatatatctttaattggggtaggtgtttttttattaaatttactttattcatttataaaaaaaagagtagcagctcaaaatccatggggagaaggcgctactactttggagtggactgtaagttcaccacctccttttcacacttttgaggaattacctaaggtaaaataaa

SEQ ID NO: 225302 - DNA, 935 bp, Unknown
  Bacterial polypeptide expressing nucleotide sequence isolated from the Sargasso Sea
gcttattctacaaatcataaagacataggaactatgtatttaatttttgcaattattgcaggagttataggtacagctttttcagttgttatgagaatggaattaatgcacccgggtgacggaatattaaatggaaattatcatttatataacgttttagttactggtcatggattaataatgatttttttcatggttatgccagcaatgatcggtggatttggaaattggtttgttccaattatgattggtgcacctgatatggcttttccaagaatgaataatatttctttttggttattaccagtttcatttattttattaattgcatcaatttttatggatggacctccaggcgcaaaaggtgtaggaggtggatggacaatttaccctcctttatcatccaaagcaggtcaacctgggccagcaatggattttgctatattaagtttacacattgcaggtgcttcatcaattctaggagctgtaaatttcataactacgatattaaacatgagaacccctggcatgactttacataaaatgcctttgtttgcatggtctattctagttacagcatttttattactattatctttaccggtattagctggggcaatcacaatgttattaactgatagaaattttggaacagctttcttcgaggcacaaaccggtggagatccaactttgtttcaacatcttttttggttttttggtcatccagaagtttacatattaattttaccaggttttggaatgatcagtcatatagtttcaactttttcaaaaaaacctgttttcggttatcttggaatggcatatgcgatggttgcaatcggagttgtaggatttgttgtatgggcccaccacatgtatacagttggacttgatactgatacaaaagcctactttcttgcagcgacaatgattat

SEQ ID NO: 225303 - DNA, 838 bp, Unknown
  Bacterial polypeptide expressing nucleotide sequence isolated from the Sargasso Sea
ttaataatgtcaattttcatggatggccctccaggtcaaacaggagtaggaggaggatggacaatatatcctccattatcatctacagcaggtcaaccaggtccagcaatggattttgcaattttaagtctacacttagctggagcttcttcaattttaggtgcagtaaactttattactacaattttaaacatgagaacacctggcatgacattgcacaaaatgccattatttgcttggtcaatattagtaactgctttcttattattgttatcattaccagttttagcaggagcaattacgatgcttcttacagataggaacttcggaacagctttttttgatgcgcaaactggaggagatccagttttatttcaacatttattttggttctttggtcacccggaagtttatattttaattttaccaggttttggaatgatcagtcatattgtttcaacattttctagaaaaccggtttttggatacttagggatggcttatgcaatggtcgcaattggaatagttggttttgttgtttgggctcaccacatgtatacagttggtttaagcacagatactaaagcgtactttttagctgcaacgatgatcatagcggttccaaccggtataaaaatattttcatggatagcaactatgtggggtggttctatttcatttaaaactccaatggtttgggctttaggatttatatttttatttactgttggtggagttactggagtagtacttgcgaatgctggagttgatactgcaatgcatgatacttactacgttgttgctcactttcattacgtgctatctttaggagccgtat

SEQ ID NO: 225304 - DNA, 807 bp, Unknown
  Bacterial polypeptide expressing nucleotide sequence isolated from the Sargasso Sea
tctttccagcttttggtattgtttctcatataatagaaacattctctagaaaaccaatttttggctattcatctatggtttatgcaatggcctctatagccatcttatctttcgtggtttgggcgcaccatatgtttactgttggtatgccgcttgctggacagttattctttatgtactcaactatgttgatagctataccaacaggagtgaaggtatttaattgggtagcaaccatgttcaggggctcaataagttttgaaactccaatgttattttctattgcttttgtagcattatttacaataggaggattttctggactaatgctagctatagtgccggctgatttccaatatcatgatacatattttgtagtggcacactttcattacgttcttgttcccggagcattgtttggaataatagctggagcttactattggctgcctaaatggactggtaatatgtatgatgaatttttaggtaaacttcacttctggcttacttttatctcggtaaatgtaacttttttccctatgcattttgtagggttagcaggaatgccaaggagatatccagactacgcacttcaatttgcagatttcaatgcattaattagcgttggagcatttatgtttggcctgacgcagcttctttttcttttcatagttattaaatcaataagaactggaaagaaagctaagcctgaagtatgggaaggcgctggagatcttggattagagtggactttaagctcgccacctccctatcactcgtttactgttcaaccacaagttaagtaga

SEQ ID NO: 225305 - DNA, 623 bp, Unknown
  Bacterial polypeptide expressing nucleotide sequence isolated from the Sargasso Sea
aatgtctgcaacaactgcatcacacgagcaccatcataatccaactggttggaagagatgggcatattctactaaccataaagatattggaacaatgtatttaatttttgcgattatcgctggaattattggaacagctttttcagtgctaatgagaatggaattagcgcatccaggtgatggaattcttggaggaaattatcatttatataatgtattagttacaggacacggactgatcatgattttcttcatggtaatgccagcaatgattggtggatttggaaattggtttgtcccaataatgatcggagctccagatatggcatttccacgaatgaataatatttctttttggttattgccagtagctttaattttattaattgcatcaatttttgtggatgggcctccaggtgcacagggtgtaggtggaggttggacaatttatcctccgttatcatctaagacaggtcaaccaggaccagcaatggatttagcaattttaagtttacacgtagcaggagcctcttctatcttaggagcaataaattttataactacaattttaaatatgagaacgccgggtatgactttacataaaatgccattgttctcgtggt

SEQ ID NO: 225306 - DNA, 865 bp, Unknown
  Bacterial polypeptide expressing nucleotide sequence isolated from the Sargasso Sea
tatgtctgatcatgcgccttcattttttaagagatatttcttctcaactaatcataaagacataggtgtactatatctttactttgcagttattgccggattgattggtggaatattttcccttttgattagaatggagctagcagagcctggtatgcaaatcctcggtgatgattaccagcagtataatgtatggataacctcacatggtcttttaatgatcttttttatgatcatgccagctatggtcggagggtttggtaactatttcgttcctctattaattggtgctccggatatggcatttccaaggatgaataatttaagtttttggttgctagttccttcaattattttacttgtaggatcaggctttgtagatggtggggcaggtccagggtggactctctatgcacctctatctacttcaggccacggcggcccggctgttgatatggtcattctatctatgcatttagctggtgcatcatctatattaggtgccataaatttcattaccacgatcttcaatatgagagctccagggatgactcttcataaaatgccattatttgtttggtcaattctgattacagcatttctgttgctcttatctcttccagtgctggctggcgcaataacaatgatgctaactgacagaaactttggtacagcattcttcaaccccgaggctggaggtgatcctgtcttgtttcaacatcttttctggttctttggtcatcctgaagtttacatcctaattttgcctgggtttggtattgttagtcatgttgtttctaccttctctaaaaaacctatttttggatatttgggaatggcatatgcaatggcagcaataggtgta

SEQ ID NO: 225307 - DNA, 785 bp, Unknown
  Bacterial polypeptide expressing nucleotide sequence isolated from the Sargasso Sea
tatgtacacacaaacagcatctcacgatcatcatactccaactggttggaaacgttgggcatattctactaatcataaagatatcgggacaatgtatttgatctttgcaattgttgcaggagtaataggaactgctttttcagttttaatgagaatggaactaatgcatcctggggatggtattttaggtggtaactatcatttatataacgtgttagtcactggacatggtttaataatgatttttttcatggtaatgccagcgatgattggtggatttggtaattggtttgttccaattatgattggggctcctgatatggcatttccaaggatgaacaatatttcattttggctattacctgtttctttaactttattaattttatcaatttttgcagacggacctccgggacaaactggtgttgggggtggatggacgatctatcctccgttgtcttcaaaagctggacaacctggaccagcgatggatttagctattttaagtttgcacttagcaggtgcctcatcaattttaggagcagttaattttattactactattttaaatatgagaacaccaggtatgacattacataaaatgcctttgtttgcttggtctatattagtaactgcatttttattattattatctttaccagtattagctggagctataacaatgttattaacagatagaaatttcggtacagccttctttgaagccagacagggggtgatccagtctttgtccacatttattttggttttttggtcatccagaa

SEQ ID NO: 225308 - DNA, 874 bp, Unknown
  Bacterial polypeptide expressing nucleotide sequence isolated from the Sargasso Sea
tttattctggttttttggtcatccagaagtctatattctaatcttgccgggatttggaatgattagtcatatcgtatctacgttttcaaagaagccagtttttggatatttaggaatggcttacgcgatggtagcaattggaattgtaggttttgttgtttgggctcaccacatgtacacagttggtttagatactgatactaaagcgtatttcttagcagcaacaatgattatcgctgtcccaacaggaattaaaatattttcatggattgctacaatgtggggaggatctatatcattcaaaactccaatggtttgggctttaggatttatctttttatttacagttggaggagtaactggtgtagttctagcaaacgctggagtagatactgcattgcatgatacttattatgttgtagctcactttcactatgtattatctttgggagctgtttttgcaatatttgcaggcttctattattggtttggtaaaatgtcagggtatgaatattctgagtggatgggacaacttcatttttggttaacgttcataggtgtaaatttagttttctttccacaacatttcttaggattggctggaatgccgagaagatacgctgattatccggatgcatttgctgattggaattatatctcttcaatcggttcatatatttctgtagttggcttagtggtatttttcgctaatttaatctacgcttttgcaaaaaagaaaaaagcagcacaaaacccatggggagaaggggccacaacattagagtggacagttccatcaccaccgaattttcatacttttgatgaattacctaagtttgaagattatgaaggtactgaaaaatctagtagttag

SEQ ID NO: 225309 - DNA, 310 bp, Unknown
  Bacterial polypeptide expressing nucleotide sequence isolated from the Sargasso Sea
cataagtcacgtagtttcaactttttcaaggaagccagtatttggttacttaagaatggcttacgcaatggtagcaattggagtagtgggttttgtagtgtgggcacatcatatgtacaccgtaggattagatgtagatacaaaagcttactttacggctgctacgatggttattgcagttccaacaggtattaaaatattcagctggattgcaactatgtggggaggatcaataagattcactacccctatgttattcgcaataggttttattttcctttttacacttggtggagttactggtgtagtg

SEQ ID NO: 225310 - DNA, 448 bp, Unknown
  Bacterial polypeptide expressing nucleotide sequence isolated from the Sargasso Sea
tatgagtggagatcaaaaacatcaatttcatctagttgaaccaagtccatggccagcaataggttctgcagcaggttttactcttgctttaggcggagcaatgtacatgcatgattatctttacagtggatatattcttattgctgggtttttaatgcttttaacagtaatgtttttctggtggagagatgttattagagaagctgagttccaaggacatcatacacctattgttcaaattggaatgagatatggaatgatactcttcatatcatcagaggttatgttttttgttgcctttttttgggcattttttgattcaagtttgtatcctgataccggagtttggccaccagcagacatagtcacttttgatccgtttgatttaccattgataaatacaatgatattattactttcaggctgtacagtgacttggtctcatcat

SEQ ID NO: 225311 - DNA, 361 bp, Unknown
  Bacterial polypeptide expressing nucleotide sequence isolated from the Sargasso Sea
actgttactttgtcacaccatgctcttcttgaggatgacagaaaaagttttattaatggtttgattttaacagtaattcttggagtttgttttacagctctacaagcatatgaataccatcacgcaacatttgctttttcagatcatatttatggatcagtgttttatatggcaacaggatttcatggtttccatgtaatcgttggaacaatctttttagcagtatgtttgtggcgtggtaaacttggtcactttaataaagatcatcattttggtttcgaggcagccgcttggtattggcacttcgttgatgtggtgtggttgtttttatttgctgcaatttacatttggggaagttaat

SEQ ID NO: 225312 - DNA, 634 bp, Unknown
  Bacterial polypeptide expressing nucleotide sequence isolated from the Sargasso Sea
aatgtcagcggaaaaaccaaaacacgattatcatttagttgacccaagtccttggccgatctacgtttcattcgctactttagttttagcttttggagcagtttattactttcactcaaaagccctttggttgctattaattggttttgctttagtagtttatggtgcatttatgtggtggagggatgttatagaagaggcagaacatcaaggtcatcatactcctgtagttcaaatcggacataggtacggtatgacattatttattgcctctgaagtaatgttttttgttgcatggttttgggctttttttaacgcaagtttatttccaccagactctattggcggtatctggccaccagcagatattaaaacttttgatccttgggatataccattaattaacactctaattttattattatcaggaactacagtcacctgggcgcatcatgcaatgttagaaaatgacagaaaaggattagtaaatggtttgatcgcaacagtatttttaggatttatattttcttgttttcaagcttatgagtatcatcacgcaacatttactttagatggcggaatatatggttccacattttatatgtcgactggttttcatggttttcatgtaata

SEQ ID NO: 225313 - DNA, 825 bp, Unknown
  Bacterial polypeptide expressing nucleotide sequence isolated from the Sargasso Sea
acagataggaactttggaacagctttttttgatgcacaaactggaggagatccagttctattccaacatttattttggttctttggtcacccggaagtttatattttaattttaccaggttttggaatgatcagtcatattgtttcaacattttctagaaaaccagtttttggatatttaggaatggcttatgcaatggtcgcaattggaatagttggtttcgttgtttgggctcaccatatgtatacagttggtttaagtacagatactaaagcatactttctagctgcaacgatgatcattgcagttccaaccggtataaaaatattttcatggatagcaactatgtggggtggttcaatttcatttaaaactccaatggtttgggctttaggatttatatttttatttactgttggtggagttaccggtgtagtccttgcgaatgctggagtggatactgcaatgcatgatacttactacgttgttgctcactttcattacgtactatctttaggagctgtatttgcaatctttgcaggattttactattggtttggaaaaatgactggttacgagtactcagagtggatgggacaattacacttctggttaacttttatcggagtgaacttggttttctttccacaacactttttgggccttgcgggaatgccaagaagatatgctgactatccagatgcttttgcaggatggaattacatttcttcaattggttcttatatttctgtaattggattggtagtattttttataaaccttgcttatgcgttttataagaaaaaggctgcagcacaaaaccca

SEQ ID NO: 225314 - DNA, 846 bp, Unknown
  Bacterial polypeptide expressing nucleotide sequence isolated from the Sargasso Sea
aatatgtatacaaaaacagcatcacacgatgatcatcacacaccaacaggatggaaacgttgggcatattcaactaaccataaagatataggtacaatgtacttaatctttgcaattgttgctggtgtaattggaacagcattttcagttttgatgagaatggagctaatgcatcctggtgacggtattttgggtggaaattatcatttatacaatgtgctagtaactggtcatggtttgatcatgattttctttatggtgatgccagcaatgataggtggatttggtaattggtttgtaccaattatgattggtgcacctgatatggcatttccaagaatgaataatatttctttttggttattaccggtttcattaacattattaattttatcaatctttgctgatggccctccaggtcaaacaggagttgggggtggatggactatttatcctccattgtcttctaaagctggtcaaccaggtcctgcaatggacttggcaatattaagtttacacttagcaggagcctcttcaattttaggtgcagtgaattttataactacaattttaaatatgagaacaccaggaatgacattacacaaaatgcctctatttgcttggtcaattttagtaacagcatttttattattactatctttacctgtactagccggtgcaataacgatgttgttaacggatagaaattttggaaccgccttcttcgaggctcaaacagggggcgatcctgttttattccagcatttgttttggttttttggtcatccagaggtttatatattaattcttcctggctttggaatgattagtcatatagtttcaaca

SEQ ID NO: 225315 - DNA, 847 bp, Unknown
  Bacterial polypeptide expressing nucleotide sequence isolated from the Sargasso Sea
atcattggtggtattatgtctcttataatgagaactgaattagctgctcctggtgatggaattttaaatggtgattatcagatgtataatgttttaacaacagctcatggattaataatgatctttttcatgataatgccggctatgattggtggttttggtaattggtttgttcctattatgatcggcgctccagatatggcatttcctagaatgaataatatcagtttttggttattagttccggctttcatattattaatggctagtccttttgtacaaggaggtgcaggtacagggtggaccatttatccacctttatcaagcaacctaggacattctggtcctgctgttgatatggctattctaagtttacatttggccggagcatcctcaattttaggtgcaataaattttataactaccatattcaatatgagaactcctgaaatgactttacacagaatgcctctttttgtatggtcaattcttgttacagttttcttgttagtattatcattgcctgtattagcaggagcaataactatgcttttaactgaccgtaactttggtactgcattttttgctcctgaaggtggtggtgatcctattttatttcaacacttgttctggttttttggtcatccagaagtgtatattttaattttaccagcttttggtattattagtcatgtagtttcgactttttcaagaaagcctgtatttggttacctaggaatggcttatgctatggtagccataggagtagtaggttttgtagtgtgggcacatcacatgtatacagtgggattagatgtagatacaaaggcttattttactgcagcta

SEQ ID NO: 225316 - DNA, 916 bp, Unknown
  Bacterial polypeptide expressing nucleotide sequence isolated from the Sargasso Sea
aggtataactagatgggtatacactactaaccataaagacatcggtacgctttacctttggtttagctttttgatgttatttttaggtggcgccatggcaatggttattagagccgagttatttgagcctggaagccaaatagtatctccagaattctacaatcaaatgctgactaatcacggcctgattatggtttttggagctgtcatgccagctttcgttggtttggctaactggattatacctatgcaaatcggtgccccagatatggcattaccaagaatgaataacttaagtttttggattcttccagtggcttttggaattttaatttccacctttttcatggagggcggaggtcccaactttggttggactttctatgcacctttatccactacttatgcaccgccaaccgtaactttctttatttttgctgttcacatcatgggagcatcttccattatgggatctataaacatcataaccacaattttaaacatgagagcacctggaatgactttcatgaagatgcctttgtttacttggacttggctgattactgcctatcttctaattgctgtaatgccagttctcgcaggggctgtaactatgatgctcatggatatccattttggaaccagtttcttcaacgctgctggtggtggagatccagtgttattccaacatatcttctggttctttggtcaccctgaggtttacataatgattttgcctgcttttggaatcgtatcgcacatcattgaaaccttctcaagaaaaccaatttttggatacacgtcaatggtttatgcaatagcatcaatcgctatcctttctttcattgtttgggcgcatcatatgtttacagttggaatgccaattgcgggtgaacttttcttcatgtacacaacc

SEQ ID NO: 225317 - DNA, 502 bp, Unknown
  Bacterial polypeptide expressing nucleotide sequence isolated from the Sargasso Sea
gcttggttctgggctttttttaacgccagtttatttccaacagaggcaattggaaaaatatggccacctgcagacattaaaacttttgatccgtgggacataccactgataaatactttaattcttttattatcaggtacgactgtgacttgggcacaccacgcaatgcttgaaaatgacagaaaaggcttggtgaatggtttaatagcaacagtttttttaggttttatattttcatgttttcaagcttatgaatatcaccatgcaacattcacaatatctcaaaatatttatggatcaacattttatatggcgacaggtttccacggctttcacgtaattattggcacaatttttttagcagtatgcttgtatagatcaatgaagggtcatttcaaagtggagcatcattttggttttgaggcagcagcatggtattggcattttgtagacgttgtttggttatttttatttgctgccatatacatttggggaagttaaa

SEQ ID NO: 225318 - DNA, 307 bp, Unknown
  Bacterial polypeptide expressing nucleotide sequence isolated from the Sargasso Sea
tcaaggattaacagcaacagttgttcttggtttcctttttaccttattacaagcatacgaataccatcatgccacttttgattattcaggtcacatttatggagcagttttttatatggctacgggtttccacggatttcacgtaatagttggaacaatatttttagctgtttgtttatggcgaggaaaattaggtcactttactaaagaccatcattttggatttgaggcagcagcttggtactggcattttgttgatgtagtttggttatttttatttgctgctatttatatttggggaagttaa

SEQ ID NO: 225319 - DNA, 733 bp, Unknown
  Bacterial polypeptide expressing nucleotide sequence isolated from the Sargasso Sea
atggcaacgcaaaaaaaacatgattttcatttagttgatccaagtccttggccaatatttacatcattcgcatcactaattttagcgtttggagcagtgtattattttcatacaaaaacattatggttgttattagttggttccgcacttttgatctatggatcatttatgtggtttagagatgtgattgatgaagcagaaaaacaaggccatcataccacggttgttcaaataggtcatagatatggtatgactttatttattgcttcggaggtgatgttttttgttgcttggttctgggctttttttaatgcgagtttatttccaacagaagcagttggaaaaatttggccacctgcagatatacaaacttttgatccttgggacatacctctaattaatacattaatcttgcttttgtcaggaaccacagttacatgggcgcatcacgctatgttggaaaatgacagaaaaggtttagtaaatggattaatagctactgtgtttttaggatttattttttcatgttttcaagcatacgaatatcatcacgcaacttttactatttctcaaaacatatacggatctaccttttatatggccactgggtttcatgggtttcatgttataataggtacgattttcctagcagtatgtttgtaccgatcaatgaaaggacattttaaacctgaccaccacttcggttttgaagcggctgcatggtattggcatt

SEQ ID NO: 225320 - DNA, 436 bp, Unknown
  Bacterial polypeptide expressing nucleotide sequence isolated from the Sargasso Sea
aataaaaacatttgatccactggatgttccttttttaaatacattaattttattaatgtctggaacaacatgcacatgggcacatcatgctgtgcgtgaaggtcatagagatcaggcaattcaagcattatggatgactgttggcttaggtttattttttacttttatgcaaggagtagaatattatgaagctgccttacattactttagttttacagatggaatatacccatctgtattttatatggccactggttttcatggatttcatgtaatggttggtacagcttttctagcagtttgtttatttagagtttacaaaaatcatttcacacctgatagacattttggtcttgaagctgctgcatggtactggcactttgtagatgtagtatggctttttctttttgtttgtgtctacgtctggggcggataa

SEQ ID NO: 225321 - DNA, 765 bp, Unknown
  Bacterial polypeptide expressing nucleotide sequence isolated from the Sargasso Sea
gatgcacaaactgggaggagatccagttctattccaacatttattttggttctttggtcacccagaagtttatattttaatcttaccaggttttggaatgataagtcatattgtttcaacattttctagaaaaccagtttttggatatttaggaatggcgtatgcgatggttgcaattggaatagttggttttgttgtgtgggctcaccacatgtacacagtaggtttaagtacagatacaaaagcatactttttagctgcaacaatgatcattgcagttccaaccggtataaaaatattttcatggatagcaactatgtggggtggttcgatttcatttaaaaccccaatggtttgggctctaggttttatatttttattcactgttggtggagttactggagtagttctagcaaatgctggagttgatacagcaatgcatgatacttactacgttgttgctcactttcattatgtactatctttaggagctgtatttgcaatatttgcaggattttactactggtttggaaagatgactggttatgagtactcagaatggatgggtcaattacacttctggttaacgtttattggtgtaaatttagtttttttcccacaacattttttaggacttgcaggaatgccaagaagatatgctgattatccagatgctttcgcaggttggaattatatttcttcaattggatcttatatttctgtaataggattagtggtattttttataaaccttgcttatgcatt

SEQ ID NO: 225322 - DNA, 307 bp, Unknown
  Bacterial polypeptide expressing nucleotide sequence isolated from the Sargasso Sea
atgaatgatcaccatgatcataagcctggattttttacaagatggtttttttccacaaaccataaggatatcggaacattatatttaatttatgcaatcatcgcaggtgtagtaggcggagctctttcagttattatgagaatggagctatctgaacctggcatgcagtttgttgcagatggacaaatgtggaatgtcatcatctcagctcacggattacttatgatcttttttgttgttatgccagcattaattggtggctttggaaattggtttattcctttaatgattggtgctccagatatgg

SEQ ID NO: 225323 - DNA, 745 bp, Unknown
  Bacterial polypeptide expressing nucleotide sequence isolated from the Sargasso Sea
ccctggcctatttatgtttctttttctactttagttctagcttttggagcattttactattttcattcaaaagctttatggcttttacttgttggttttgctttagtaatttatggctcgttcatgtggtggagagacgttattgaagaagctgaatttcaaggtcatcatactcaagtagttcaaataggtcatagatacggtatggtactttttattgcttcagaggtaatgttttttgttgcttggttttgggcatactttaatgcaagtctatttccaacggaagcagtgggcgctacttggcctccaccagatataaaaacatttgatccttgggacattccattaattaatactttaatattactcctgtcaggaaccacagtaacttgggcgcatcatgcaatgttagaaaatgacaggaaagctctggttaatggattagtgcttacagtatttttaggttttatatttacttgttttcaggcttacgaatatcatcatgcaacatttacaatagatggtaacatttatggctcaactttttatatggcaacaggatttcacggttttcacgtaatagtcggtacaatctttttggctgtttgtttgttcagaagtatgagaggacactctaactctgagcaccattttggattcgaagcagctgcttggtactggcattttgttgatgtagtatggttatttttatttgcagccatttacatttggggaagttaat

SEQ ID NO: 225324 - DNA, 685 bp, Unknown
  Bacterial polypeptide expressing nucleotide sequence isolated from the Sargasso Sea
ttattaccagtttctttaacactattaattttatcaatttttgttgacggacctccaggccaaactggagttggtggcggatggactatatatcctccgttatcatccaaagcaggtcaaccaggtccagctatggatctagcaattttaagtttacatttagcaggggcttcctcaattttaggagcagtgaactttataactacaatattaaacatgagaacaccgggaatgacattacataagatgccattatttgcttggtcaattttagtaacagcttttctattgttattatctttaccagttcttgctggcgcaataacaatgttattgacagatagaaattttggaactgctttctttgaagctcaaactggaggagacccagttttgttccagcacttattttggttttttggtcatccagaagtttatattttaattctgccaggttttggaatgattagtcatattgtttcaacgttttctagaaaaccagtttttggttatttaggaatggcttacgcgatggttgcaattggaattgtaggttttgttgtatgggcacatcacatgtatacagtaggattaagcactgatactaaagcatattttcttgccgcaaccatgattattgctgtgccgacaggtattaaaattttttcatggattgctacaatgt

SEQ ID NO: 225325 - DNA, 820 bp, Unknown
  Bacterial polypeptide expressing nucleotide sequence isolated from the Sargasso Sea
agaagtgtatattttaattttgccaggttttggaatgataagtcatattgtttcaactttttcaagaaagccagtgttcggttatctcggaatggcctatgcgatggtggctattggagttgttggtttcgttgtttgggctcaccacatgtacacggttggattagacacagatacaaaagcttattttttagcagcaacaatgattattgcagtcccaactggaattaagattttttcttggatagcaacaatgtggggtggttctataagctttcaaactccaatgttatgggcaataggttttatatttctttttactttaggaggtgtaactggagtagtacttgcaaacgcaggtgttgataccgcgcttcatgacacttattatgttgtagcgcatttccattacgtattatcgatgggcgctgtgtatgcaatttttgcaggattttactattggtttagcaaaatgacaggttatgaatattcagaatttttgggaaaactacatttttggttaacattcataggagtcaacttaatattttttcctcaacatttcttagggttagcaggaatgccaagaagatacgcagattatccagatgcgtttgctggttggaattatatttcttcaattggttcttatatatctattatcggcctagcggtatttttattaaatttattgtacgcttttatgaaaaagaaaaaagcagaaccaaatccatggggagaaggagcaacaactctagaatggacagtgtcatcaccgccaccattccatacttttgaagagctacctaaagtaaagtaa

SEQ ID NO: 225326 - DNA, 924 bp, Unknown
  Bacterial polypeptide expressing nucleotide sequence isolated from the Sargasso Sea
tttcccgaggatgaataatatttctttttggttgttgcctgttgctcttattttgttgttagtatcaatttttgtagacggacctccaggagctaaaggagttggaggaggttggacgatttatccgcctttatcatcaaaaacgggtcagccaggccctgcaatggacctagcaattctaagtttacatgttgcaggagcttcatcgatattaggagcaattaattttatcacaacaattttaaatatgagaactcctggtatgactttacataaaatgcctttgttctcttggtcaattctagttacagcatttttacttttattatctttaccagttttagctggagctataacaatgcttctaacagatagaaattttggaactgccttctttgaagcacaaacaggtggagatccagttctattccaacacttattttggttttttggtcatccagaagtatatattttgattttaccaggttttggaatgataagtcatattgtttcaactttttcaaggaagcctgtgtttggttatctaggaatggcttatgcgatggtggctattggagtagttggtttcgttgtttgggctcaccacatgtacacggttggattagacacagatacaaaggcttatttcttagcagctacaatgattatcgcagtcccaactggtattaagattttttcttggatagcaacaatgtggggtggctcgataagctttcaaactccgatgctttgggctattggctttatattcttattcactttaggaggcgtaactggagtagttcttgcaaacgcaggtgttgataccgcgcttcatgacacttattatgttgtagcgcattttcattacgtattatcaatgggcgctgtgtatgcaattttcgctggattttactattggtt

SEQ ID NO: 225327 - DNA, 511 bp, Unknown
  Bacterial polypeptide expressing nucleotide sequence isolated from the Sargasso Sea
atgagcactggagccacacatcacgatcatcacaccccaaccggatggaaaagatgggcgtattcgacaaatcacaaagatattggaaccatgtatttaatttttgcaattattgcaggattaattgggactgcgttttcagttttaatgagaatggaacttatgcatccaggagatggtattctaggcggagactatcacttatataatgtcctggttactggacacggattaataatgattttctttatggttatgccagctatgataggtggatttggaaattggtttgtaccaataatgatcggagctcccgatatggcatttcctagaatgaataatatctcgttctggctattacctgttgcatttattttattactatcatcaatttttgtagatggaccgcctggagcccaaggtgttggaggaggctggacaatttatcctccactatcatcacaaaacaggtcagccaggtcctgcaatggatttagcaattttaagttgc

SEQ ID NO: 225328 - DNA, 651 bp, Unknown
  Bacterial polypeptide expressing nucleotide sequence isolated from the Sargasso Sea
gattagctcttttaatttatgcagcttatatgtggttcagagatgttgtgattgaagctgaacatcaaggtcaccatactccagttgttcaaatccatcatagatatggaatgacgttatttattgcttctgaagttatgtttttcgttgcatggttttgggcttattttgatgtaagtttgtttccaaacgagtttgttggaaatgtttggcctccacaagacatagaaacttttgatccatgggacattccattaattaatacactagttttattattatcaggtaccacagttacttgggctcaccactctttattagaagacgatagaaaagggtttatccaaggattaacagcaactgttgtactaggcttcttttttactttgttacaggcttacgaatatcatcatgctacatttgattattcaggacatatttatggtgcagtattttatatggcaacaggttttcacggtttccatgtaattgttggaacaatttttcttgctgtttgtttatggagaggaagattaggtcactttactaaagaacaccactttggttttgaggcagctgcttggtactggcactttgttgatgttgtttggttattcttatttgcagcaatttacgtctggggaagttaat

SEQ ID NO: 225329 - DNA, 711 bp, Unknown
  Bacterial polypeptide expressing nucleotide sequence isolated from the Sargasso Sea
gatggccgctattggggttgtcggttttgccgtttgggcacaccatatgtatacaactggtttggacgtagatactagagcttatttccttgccgcaacaatggttattgctgttcctactggtattaaaatttttagttggattgcaactatgtggggtggatcgattgaatttaaaactccaatgttatttgcaattgcgatgatatttttatttacacttggtggagtgacaggtgtagttctcgctaatacaggcattgatgtagcacttcacgacacttactatgtggttgcacacttccattatgtgatgtccatgggtgcacttttctcgatttattcaggattttattattggtttagcaaaatgtcaggtattgaatatagtgagatactcggtaagatccacttttggttaacttttataggtgtaaacatcacattttttcctatgcacttttcaggattagctggtatgccgcgaagaatacccgactatcctgatgctttcgctggttggaattatgtatcaagtattggtgcctacatttcggtttttgctgcttttttcttcgttttcgtaatattagaagcatatatgaggtcaagaaaagcgcaaaaaaatccttggggtaagggagctactaccttcgaatggcaattaagttctcctccaccattccattcatttgacgacttgccgaaagt

SEQ ID NO: 225330 - DNA, 946 bp, Unknown
  Bacterial polypeptide expressing nucleotide sequence isolated from the Sargasso Sea
atggcatttccatatgtaaatatgctcagctattgggcattcgttgtagccgtattagtcttattagcaagtttctttgtacccggaggtcccaccggagcaggttggacgttgtatccaccacaagcaattacagccggaacacctggttacaatgggggaataatattaatgttaatttcactcatattatttgtggctggtttcacaatgggtggattaaattatataattacagttttacagttaagagctagaggtatgacattgatgagaatgcctttaacgatttggggaatttttaccgcaaccgtactagcaatgtttgcttttccagcactcttagttggttgtttgatgatgacacttgatagtttgcttggaactagtttctttatgcctgctatggtttctttaggagaaaagttaacacatgaaggtggaagccctatacttttccaacatcttttttggttttttggtcatccagaagtttacattgtagcactaccagcttttggtattgtttcagatttactgtctgttcattcaagaaaaactatttttggttacagaatgatggtttgggcgatagttggaattggtgctttaagcttttttgtttgggctcaccatatgtacgtaagcggaatgaacccttggtttggtttcttttttgcaaccacgacattaataatcgcagttccaacagctataaaagtttataattggattttaactttgtggagaggaaacatacaactatctcttccaatgttattctcacttggtttcattgtaactttcttaaatggagggttaactggtttgtttttaggaaatgtaacagttgatgttccattatcagatacctactttgttgtagctcatttccatatggttatgggtattgctcccaatacttgttatcttcggagctatttat

SEQ ID NO: 225331 - DNA, 937 bp, Unknown
  Bacterial polypeptide expressing nucleotide sequence isolated from the Sargasso Sea
aatggcagatataacagcagatcaaatagatagtcacgaccatcatccaactggttggagaagatacctttattctactaaccataaggatattggtacattgtatctaatatttgcagttatagctggcttagtgggaacaggaatgtctgttttaatgagaatggaattaatgtatccaggtgatggaattttaggtggtgaccataacctctataatgttcttgtaactagtcatggactactgatgattttcttcatggttatgccagccatgataggtggatttggcaactggattgttccattaatgattggcgcaccagatatggcatttccaagaatgaataatatctccttttggcttttaccagcctcattaatattattaattgcttcgttgtttgttgagggaacttctggtggaccaggggtaggtggtggctggacaatctatcctccattatcggcaaacctaggctctcctggaccggctgtcgacttagcaatattttctctacacttggctggagcctcgtcaattcttggagcgattaattttatcacgacaattttcaatatgagagccccaggaatgactttgcataaaatgcctttatttgtttggtcaatactggttactgcagttttattgttattatcattacctgttttagcgggcgccattactatgttgcttacagatagaaactttggaactgccttctttagtgcagctgaaggtggggatcctgtacttttccaacatcttttttggttttttgggcatccagaagtatatatccttattcttccaggctttggtatcgtgagtcatgttgtagcaactttttctaaaaaacccgtttttggataccttgggatggcgtatgctatggtctctattggattcctggggtttccattgtttgggcac

SEQ ID NO: 225332 - DNA, 743 bp, Unknown
  Bacterial polypeptide expressing nucleotide sequence isolated from the Sargasso Sea
ggggttcgtcatgctgttcggcgccgttctgtggatgtcgccgcaggtggaaaacaaccagccctggatcttcctgatcggctttgtcggcgtgctctatgtcatgttcggctggtggtccgacgtggtgaacgaaggcgaaaccggcgatcacaccccggttgtccggatcggcctgcgctatggcttcatcatgttcatcatgtccgaggtgatgttctttgccgcctggttctggagcttcttcaagcacgccatgtacccgatggggccgcaaagcccggcggtggacggtgtctggccgcctgccgggatcgaaacttttgatccgtggcacctgccgcttatcaacacgctgatcctgttgtgctcgggcgctgcggccacttgggcgcaccacgctttggtgcatgaaaacaaccgtgaggacatgaagtggggcctgatcatcgccatcgcactgggcgccatctttaccgtgttccaggcctacgaatacagccacgcggcctttgggttctcgggcaatatctatggcgcgaacttcttcatggccaccggcttccatggcgcgcacgtgattatcggcacgatcttcctgtttgtctgcctgatgcgcgtgatgcgcggccatttcacacccgaacagcacatcggcttcgaggctgccgcctggtactggcacttcgttgatgtcgtgtggctgttcctctttgccgctgtctacatctggggtggctgag

SEQ ID NO: 225333 - DNA, 765 bp, Unknown
  Bacterial polypeptide expressing nucleotide sequence isolated from the Sargasso Sea
gatactccctgcgtttggtattgtcagccaagttatttctacattctctagaaaaccaatatttggttatcttggcatggtctatgcaatggtatctataggctttattggcttcattgtttgggctcatcatatgtttacagttggcatgagcgcagacttaagagcatattttatgctagcaactataattattgctgtaccaactgggataaaaatatttagttggattgcaactatgtggggtggttcgctcacttttgagacaccaatgttgttttcaataggattcgttttcttatttactcttggtggagttacgggcgttattctcgcaaatgccggaattgatacggtaatgcacgatacttattatgttgttgcacacttccactatgtattaagcatgggagctatgtttggtatttttgctggaatttattactggtttggcaaaatgacaggaaggcaatataatgaattttttggcaaacttcatttttggctcttcttcattggagttaatataacatttttcccgcaacactttttaggtttagcaggaatgccgagacgtatacctgactatccggatgcatatgcaggatggaatttagtttcatcttatggatcatatttatcctttggcgctacattgattttcttctttgcaattgtttatgcattattttttggtaaaaaagctgaagctaatccatggggagaaggcgctgatacccttgaatggactttgtcgtctccacc

SEQ ID NO: 225334 - DNA, 903 bp, Unknown
  Bacterial polypeptide expressing nucleotide sequence isolated from the Sargasso Sea
gctgattaccgccttcttgctgatcgccgtcatgcccgtgctcgctggcgccgttactatggtgttaaccgataagtttttcggtactagcttcttcgaggcggctggcggtggtgatcctgtgatgttccagcatatcttctggttcttcggtcaccccgaagtctacatcatgattttgccgtccttcggcattatctccgccatagttccggcctttagtcgcaagaaattgttcggctattcatccatggtgtatgccacggcgagtattgcgattctgtccttcctcgtgtgggcgcaccatatgttcaccaccggtatgcctgtgtttgccgagttgttttttatgtactgcactatgctgattgccgtgccgacaggggtaaaagtgtttaactgggtagcgaccatgtggcgcggctcactgagttttgaaaccccaatgttgttcgccgtggcctttattatcctgttcactattggcggcttctcgggtttgatgctcgccatcacgccggctgacttccaataccacgatacttactttgtggtggctcacttccactatgtgttagtcactggtgcgattttctccatcatggcggcagcctattactggttacctaaatggaccggccatatgtacagcgaaaagctcggccagtggcatttttggtgctcggtgatttcggtcaacgtgttgtttttcccgatgcatttcttgggtcttgcgggtatgccaaggcgtattcccgattactcgattcaatttgccgatgtaaaccaaatcgtatcgattgggggttttgcttttggtctttctcagctgattttcctcgtgctggtgattaagtgcattcggggcggtgaaaaggcgcccgccaaaccttgggaaggcag

SEQ ID NO: 225335 - DNA, 298 bp, Unknown
  Bacterial polypeptide expressing nucleotide sequence isolated from the Sargasso Sea
acttttataggagtaaatttaatattttttcctcaacattttttaggattagcaggaatgccaagaagatacgctgattatccagatgcatttgctggatggaactatatttcatctattggctcatatatttctatcatcggtgtaggtgtctttttaattaatttactttattcatttattaaaaaaccatcagcatcaaaaaatccgtggggtgaaggagctaccacattagaatggacagtatcgtcaccgccgccgtttcatacttttgaagagctacctaaaataaaataaa

SEQ ID NO: 225336 - DNA, 632 bp, Unknown
  Bacterial polypeptide expressing nucleotide sequence isolated from the Sargasso Sea
aatgagtagtaataaccattcatatcatctagttgaaccaagtccttggcctgctgttggtgctgcagctggttttgtcctcgctctcggtggtgctatgtatatgcatgagtatgagtatggtggcattacctctttagttggatttggactagtttttttgacgatgttctactggtggagagatattgtaagagaaggagaatttcaaggccaccacagtccaattgttcaaataggtcttagatatggtatgatgttatttattgcctcagaagttatgttttttgttgcatttttttgggctttttttgcttcatccctttttccagttggtggagtgtggccacccgaaggtattaaaacctttgatccttttgatctaccattaataaatactttaattttattattatctggatgcactgttacatgggctcatcatgctttaattgaaaatgatagatcagactttcttcttgggctactattgactgtcatacttggaatttcatttactggtcttcaggctttagaatatatgcatgctccatttggtttcactgaaggtatttatccatcagtcttttttatggcaacaggttttcatggttttcatgtaatcgttggaa

SEQ ID NO: 225337 - DNA, 367 bp, Unknown
  Bacterial polypeptide expressing nucleotide sequence isolated from the Sargasso Sea
tattattggttttccaaaatgactggatatgaatataatgaaactctgggtcaatggcacttttggataacatttgttggggtgaacttgacattctttcctatgcatttccttggtcttgctggaatgcccaggcgttatgttgattatccagatgcttttgcaggttggaatatggtggcatcaattggctcttatattagtactataggtgtgatagtattttttgtagtaatttttgaagcttttagatccaaaagatctgcagaaaataatccttggggagatggaggtaataccattgaatggactgttagttctccacctccatttcatacttttgatgaattgccaaaagttaattaat

SEQ ID NO: 225338 - DNA, 97 bp, Unknown
  Bacterial polypeptide expressing nucleotide sequence isolated from the Sargasso Sea
catcattttggatttgaagctgcagcatggtattggcattttgtagacgttgtttggctattcttatttgctgcaatatatatttggggaagttaat

SEQ ID NO: 225339 - DNA, 427 bp, Unknown
  Bacterial polypeptide expressing nucleotide sequence isolated from the Sargasso Sea
tttgatccactagacgttccatttttaaatacactaatattattaatgtcaggtacgacttgcacatgggctcaccatgcagttagagaaggtcatagagatcaggcaatacaggctttgtggtgcactgttggtcttggaattttcttctcatttatgcagggtgtagaatattatgaagcagctcatcattattttagttttactgatgggatctatccgtcagttttttatttagccacaggattccacggttttcatgttatcgttggaactgcatttctatcagtttgtttatatagagtttacaaaaatcattttactccagacagacatttcggactagaagctgcagcatggtattggcattttgttgatgtagtatggcttttcctttttgtttgtgtatatgtttggggtgcataaa

SEQ ID NO: 225340 - DNA, 874 bp, Unknown
  Bacterial polypeptide expressing nucleotide sequence isolated from the Sargasso Sea
ttgtcgcgaaatcttaagtgtaatttctataaaatcactttatatagttttaaagatgcaaaaaactttttttatattatcaactttaattttgttgccttcaaaggtatttgcagaccaacctagagattggcagcttggatttcaagacgctgcctcacaatcaatgtacgaaatagttagttttcataattcgattttacttccaattattatagcaataagtgtttttgttttatttttgatggcttatgcttgttttagattcagagagtcaagaaatcctaatccttctaagacaacccataatgttgctgttgaagttctttggactttaataccttgcttgattttaattgtgatggcggtcccatctttcaaaattttatattcacaagatacgatacctaaagctgatgtaactattaaagcaatcggctatcaatggtactggggttatgaatatcctgatgagaatataatttttgactcttatatgattgaagacaaagatctattaccaggccaaccaagattattagcagtcgataatgaagtaattgtacccgttaataaagtagtaaaagttttaatcactgctaatgatgtattacatgcttgggcgttacccgcttttggagttaaaagggatgcaatgcctggtagagtaaatgaaacttggtttaaagcagatagggtaggaactttttatggccaatgttcagagctttgcggaattaagcatgcttttatgccaatcactgtaaaagttgtaacagatgaggaatatcaagaatggcttgttgaggctaaaataaaatttgcaaaaaaggaaatagcaaatcaaaataataatttaatggcaagtaaataa

SEQ ID NO: 225341 - DNA, 550 bp, Unknown
  Bacterial polypeptide expressing nucleotide sequence isolated from the Sargasso Sea
aggatttatatttttatttactgttggtggagttactggagtagtccttgcgaacgctggagtggacactgcaatgcatgatacttactacgttgttgctcactttcattacgtgctatctttaggagctgtttttgcaatctttgcaggattttattattggtttggaaaaatgactggttacgagtactcagagtggatgggtcaattacacttttggttaacgtttatcggagtaaacttagttttcttcccacaacactttttaggtcttgcgggaatgccaagaagatatgctgactatccagatgcttttgcaggatggaattacatttcttcaattggttcttatatttctgtaattggattagtagtattttttataaaccttgcttatgcgttttataagaaaaaagctgcagcacaaaacccatggggagaaggcgctacaactttagaatggactgtaccatctccacctaattttcatacttttgaagaattaccaaagtttgaagatgaggagggtgttgaaaaatctactagctaa

SEQ ID NO: 225342 - DNA, 856 bp, Unknown
  Bacterial polypeptide expressing nucleotide sequence isolated from the Sargasso Sea
catttattctggttttttggacacccagaagtatacataatgatacttcctgcgtttggtattgttagccaagttatttctacattctctagaaaaccaatatttggttatctcggtatggtctatgcaatggtatctataggctttattggtttcatcgtttgggctcatcatatgtttacagttggcctgagcgcagacctaagagcatatttcatgttagcaactataattattgctgtaccaactggaataaaaatatttagttggattgcaactatgtggggtggctcactcacatttgagacaccaatgttgttttcaataggtttcgttttcttattcactcttggtggagtaacgggagttattctcgcaaatgctggaattgatacggtaatgcatgatacttattatgtcgttgcacactttcactatgtattaagtatgggcgctatgtttggtatctttgctggaatatattattggtttggtaaaatgacaggaagacaatacaatgaattttttggcaaactgcatttttggctctttttcattggagttaatgtaacattcttcccgcagcactttttaggtttagcaggaatgccaagacgtatacctgactatcctgatgcctatgcaggttggaacttagtctcatcgtacggatcttatttgtctttcggagctactttgatcttcttctttgcaattgtatatgcactattttttggtaaaaaagctgaagctaatccatggggagaaggagctgatacacttgagtggactttatcgtctccacctccatttcaccagttaaaactttaccagaatttaaagaataaatttggtg

SEQ ID NO: 225343 - DNA, 731 bp, Unknown
  Bacterial polypeptide expressing nucleotide sequence isolated from the Sargasso Sea
aatggctaatactgtggaagcccatcacgacgatcacgaccatcacatgccagggttcttcacccgctggttctgttcaactaatcacaaagacatcggaacgctctatatcctcctttcgtttatcgccgcgatcatcggcggcgccatgtcatggtatattcgtttggaactggcggcaccagggattcagtacattgacgacttccagttttacaacgtgctggtgacggcccacgggttcctcatggtcttcttcgttgtcatgccggctatgatcggtggcttcggaaactggtttgtcccgctgatgatcggcgccccagatatggcgtttccgcggatgaacaatatctcgctgtggcttttagtcgcagcatttattcttctactattatcagctgtaattggggacggtccgggcactggctggaccgtttatccgccactctcgagccaggactaccagtcaggtccctcggtcgacctgggaatcctgtccctgcacctagcaggtgcgtcctcaattctgggcgccatcaacttcatcgtcaccattttcaacatgcgcgcccctgggatgaccatccaccgcatgccgctgttcgtttgggcaatccttattaccgcgttcctgctccttctggctttaccagtgctggccggcgcgcttactatgctgctcacggaccgcaactttggcacagcgttctttgttccaggccagggcg

SEQ ID NO: 225344 - DNA, 790 bp, Unknown
  Bacterial polypeptide expressing nucleotide sequence isolated from the Sargasso Sea
atgtcagcagagaaaaaacacgattaccacttagttgatccaagcccttggccaatctatacatcttttgcatgcttagtattagccataggtgcaattttttatatgcataacggtatttcttgggggatgtatcttggtttggctttattaatctatggtgcttacatgtggtttagagatgttgtaatcgaagccgaacaccaaggccatcacactcctgttgttcaaattcatcatagatatggaatgactttatttatagcttcagaggtaatgttctttgttgcatggttctgggcttactttgatataagtttatttccaaatgaatttgttggaaatgtatggccaccaaaagatattgaaacatttgatccgtgggacattcctttgataaatactttagttttattattatcaggaacaactgtcacttgggcccatcactctttattagaggatgatagaaaaggatttatccaaggtttaactttaactgtaatactaggtttcttttttacgttattacaagcatatgaataccatcatgctacttttacctattcaggtcatatttatggagcagtcttttatatggcaacaggttttcatggttttcacgtgattattggaacaatatttttggcagtatgtttgtggagaggaagactcggtcatttcacaaaagatcatcattttggatttgaagcagctgcttggtattggcattttgttgatgtagtatggctgttcttatttgccgcaatatatatttggggaagttaat

SEQ ID NO: 225345 - DNA, 733 bp, Unknown
  Bacterial polypeptide expressing nucleotide sequence isolated from the Sargasso Sea
ttttgggggctgtagttttttttctagcgaaaatccttggatgtttattgcaggtttcgtcggtgttttgtttgtgatgtatgtctggtggtcagacacagtaaaagaaaatcaagttggtgatcatacgccagtagttttgattggtttaagatacggcttcattctttttataatgtcagaagttatgttcttccttgcgtggttctggagtttttttaagcatgctatgtatccaatgggtgatatgagtccattgcaggatggtcaattccctcctgctggcatagaggtttttgacccttggcatctaccactaattaatactttaattttgttgtgttccggagcagccgcaacttgggcgcaccatgcaattgctcatgaagaagatagaaaatctatggtgcagggtcttgtgattgcggttggcttgggtgttttgttcacaattttccaggcttatgaataccagcacgcagcatttggtttttcaggaaacatatacggagcaaacttttttatggccacaggttttcatggttttcacgtgatagtaggcacaattttccttgcgatttgtatgctaagagcaatgcgtggacactttacaaaggatcagcacctaggctttgaagctgcagcatggtactggcattttgtggacgtcgtatggctattcttgtttgcggctatttatgtctggggaagcgttggcgcgacaattcactaa

SEQ ID NO: 225346 - DNA, 855 bp, Unknown
  Bacterial polypeptide expressing nucleotide sequence isolated from the Sargasso Sea
tattctacaaatcataaagacattggaactatgtacataattttttctatcttagcagcactcataggtggaggtttttctatatttatgcgaatggaattaatgcatcctggagttcaatatatggcagatggacatgtttggaacgtttttgcaactgcacatggacttattatggttttttttgttgtgatgcctggactcattggtggttttggtaattggtttgttcctattatgattggagcacctgacatggcttttccaagaatgaacaatatttctttttggcttttacctcctgcttttattcttcttttgttatctgcggttatggatggtggagctggtgtaggttggactatttatccaccaatgtccaactcagctggaacaccgggaatgtctatggatcttgcgatcttatccttacatcttgctggcgcatcttctattcttggtgcggcaaattttataacaaccattttaaatatgcgtgctcctggtctaacaatgcacaaaatggcattatttgcttgggctatgctcataacagcttttcttttattgttgtctttacctgttcttgcaggcgcaattaccatgcttctcactgaccgaaattttggtactacattttttattccagaaggtggtggtgaccctatactttttcttcatttattttggttttttggtcatcctgaagtgtatatcatgatactgcctgcattcggaattgtaagccatataatatcaacattctccaaaaaaccaatttttggttatttaggtatggcatatgcaatggtagctatcggtgtaattggttttgtagtttgggcacatcacatg

SEQ ID NO: 225347 - DNA, 754 bp, Unknown
  Bacterial polypeptide expressing nucleotide sequence isolated from the Sargasso Sea
tatgcaatggttgcaattggaatagtaggttttgtggtgtgggctcaccacatgtacacagttggattaagcactgatacaaaagcttactttttggcggcaacgatgattattgccgttccaacaggaattaaaattttttcatggatagcaactatgtggggtggttcaatttcatttaaaacaccaatgatgtgggcgctaggttttatattcatgtttactgttggtggtgtaacaggagttgttttagcaaatgcaggagtggatactgctatgcatgatacttattatgttgttgctcactttcattacgttttatcgcttggagctgtttttgcaatttttgctggcttttattattggttttcgaaaatgtcgggatatgaatattctgaatggatgggtcaattacatttctggttaacatttattggtgtgaatttaattttcttcccacaacattttttaggtttagctgggatgccaagaagatatgcagattatcctgatgcatttgcaggatggaattatatttcatcaatagggtcatatgttgctgttgcaggattagctgtattttttgcaaatcttatttatgcttttgcaaaaaaaagagcagctgcacaaaacccttggggagaaggagctacaactcttgagtggacagtgccatctccgccgaatttccatacgtttgaagaattgccaaagttcgttgatgatcaagaaacagaaaaatcacatagctaaa

SEQ ID NO: 225348 - DNA, 904 bp, Unknown
  Bacterial polypeptide expressing nucleotide sequence isolated from the Sargasso Sea
ggcttattcaccaatcacaaagatatttggaacaatgtatttaatttttgcaattattgcaggtgtaatcgggacagctttttcagttttaatgagaatggagttgatgcatccgggagatggtatcttaggtggtaattatcatttatataatgttttagtaactggtcatggattgatcatgattttctttatggttatgccagcaatgatcggcggttttggtaattggtttgttccaattatgattggagccccagatatggcgtttccaagaatgaataatatttcattttggttactacccacatcatttattttgttaattatgtctatcttcatggaagggcctccaggtcaaacaggagtcggaggtggatggactatttatcctcctttatcatcttcagctggacaacctggtcctgcaatggattttgctattttaagtttacacttagcaggtgcttcatcaattttaggagcggtaaactttattacaacgattttaaatatgcgaactccaggcatgactttacataaaatgcctttatttgcttggtcaattctagttacagcgtttttattattgttatctttaccagttttagcaggagcaattacaatgcttttaactgatagaaattttggaacagctttttttgatgctcaaactggaggagacccagttttattccaacatttattttggttttttggacaccctgaagtttatattttaattttacctggcttcggaatgatcagtcatattgtttcaacattttctaaaaaacctgtatttgggtatttgggaatggcttatgctatggttgcaatcggaattgtaggttttgttgtatgggctcatcatatgtatacagttgggtttaagcacagatac

SEQ ID NO: 225349 - DNA, 817 bp, Unknown
  Bacterial polypeptide expressing nucleotide sequence isolated from the Sargasso Sea
tatgtatacacaaacatcatctcctgacgatcatcacacaccaacaggatggaagcggtgggcttattcaacaaaccacaaagatattggaacaatgtatttaatttttgctattgttgccggagtaattgggactgcattttcggttttaatgagaatggaattaatgcatcctggcgatggaattttgggaggaaattatcatttatataatgtattagtaacgggtcatgggttaatcatgattttttttatggttatgccagcaatgattggtggctttggtaattggtttgtgccaataatgattggtgcaccagatatggcattcccaagaatgaataatatttctttctggttacttccagtttcattaacattattaattctttctatttttgctgatggtcctccgggagctcaaggagttggaggagggtggactatatatccccctttatcttctaaagcaggacaacctggaccagcaatggatttggcaattttaagtttacacttagctggagcttcctcaatactaggtgctgtaaattttataactacgattcttaatatgagaacaccgggcatgactttacataaaatgccattatttgcatggtcgattttagttacagcttttttattattactttctttaccagttttagcaggcgcaataacaatgttattaactgatagaaattttggaacggccttttttgaggctcaaactggtggtgatccagttttatttcaacatttattttggtttttcggtcacccagaagtttatattttaattcttccgggtttt

SEQ ID NO: 225350 - DNA, 811 bp, Unknown
  Bacterial polypeptide expressing nucleotide sequence isolated from the Sargasso Sea
atgtatacacaaacagcatcacacgacgatcatcacacaccaacaggttggaaacgttgggcatattcaacaaaccataaagacataggaactatgtatttaatttttgcaattgttgcaggagttataggtacagcattttcagttttaatgagaatggagttaatgcatcctggtgatggcatcttaggtggaaattatcatttgtataatgttttggtaacaggtcatggtttaattatgattttcttcatggtaatgccagcgatgataggaggttttggtaattggtttgtgccaattatgattggtgctcctgatatggcatttccaagaatgaataatatttctttctggttgttaccagtctcattaactcttttgattttatctatttttgcagatggacctccaggcgcacaaggagtcggaggaggttggactatatatccacctttatcttctaaagctggacagcctggccctgcaatggatttagcaattttaagtttacacttagctggagcttcatcaattttaggagcagtaaatttcattacaacaatattaaatatgcgaacaccaggaatgactttacataaaatgccattatttgcttggtctattttagttacggcttttttattgttattatctttgccagttctagctggtgcaattactatgttgctgactgacagaaattttgggactgctttctttgaagctcaaactgggggagatccagtattattccaacatttattttggttttttggacatcctgaagtttatatattaattcttccgg

SEQ ID NO: 225351 - DNA, 424 bp, Unknown
  Bacterial polypeptide expressing nucleotide sequence isolated from the Sargasso Sea
aatgaaagcagcaggtatacctgcacttaacacaattattttacttattagtggtttgacagtcacatgggctcatcacggtctcaaagagggtaaaagaaatcaacttatattaggattgatcgcgactgtgcttctaggttttatatttgtaggttttcaagcctatgaatattctcatgcatacaatgatcttaatttaaaaatgtcatcagggatttatggctcgacattttatatgttaaccggatttcatggtttccatgtcacactcggtgcaataatgttgactgtcatcttattcagatgtatcaaaggacattttactaaccagaatcattttggattcgaagctgttgcctggtactggcattttgtcgatgttgtttggcttggtctgtttgtgtttgtctactggctgtga

SEQ ID NO: 225352 - DNA, 848 bp, Unknown
  Bacterial polypeptide expressing nucleotide sequence isolated from the Sargasso Sea
taatatttctttttggttattaccagtttcattaactttactaattttatcaatttttgttgatggccctccaggacaaactggggttggaggtggttggactatttatccacctttatcatctaaagcaggtcaacctggaccagcaatggatttagcaattttgagtttacatttagcaggtgcttcatcaattttaggagcagtaaatttcataacgacaattttaaatatgagaaccccaggcatgactttacataagatgcccttatttgcttggtcaattttggtaacagcttttttattgttactatctttaccagttttagctggagcgattacaatgttattaacagatagaaattttggaaccgccttttttgaagcgcagaccggaggagatccagttctattccaacatttattttggttttttggtcatccagaagtttatattttaattttaccaggcttcggaatgatcagtcatattgtatcaacattttcaagaaagccagtttttggttatttaggtatggcatatgccatggttgctataggaatagtaggttttgttgtatgggctcaccatatgtacacagttggattaagcacagatacaaaagcttactttttagcagcaacaatgattattgcagttccaacaggaataaaaattttctcatggatagcaactatgtggggaggatcgatttcattcaaaactcctatgatgtgggcacttggttttatatttatgtttacggtagggggagtaacaggtgtagttttggctaacgccggtgtagatactgcgatgcatgatacttatttatgtgtagctcatt

SEQ ID NO: 225353 - DNA, 641 bp, Unknown
  Bacterial polypeptide expressing nucleotide sequence isolated from the Sargasso Sea
tatgtcatctaaagagaaaaaacatggatttcatttagtagacccaagcccttggccaatatacgtttctttcgccactttaatcttggcttttggggcagtttattattttcactcaaaagctttatggcttttactagtcggttttgcgttggttatttacggggcatttatgtggtggagagatgtagtcgaagaagctgaatttcaaggacaccacactccagtagtccagattggacacaggtatggaatggtgctttttattgcatctgaggtcatgttttttgttgcttggttctgggcatattttaatgcaagtttatttccaacagaggccgttggcgctacttggcctccacctgacattcaaacatttgatccctgggatattcctctaataaatactttaattctattattatctgggacgactgtaacttgggcgcatcatgcaatgttagaaaatgatagaaagggcttagtaaatggtttagtgctcactgtatttttaggttttatttttacttgtttccaagcttacgaatatcatcatgcatcttttacaatcgatggcaatatttatggatctacgttttatatggccacaggtttccatggtttccatgttatagtcggta

SEQ ID NO: 225354 - DNA, 880 bp, Unknown
  Bacterial polypeptide expressing nucleotide sequence isolated from the Sargasso Sea
gcacttttagttagctctataatgatgactttagacaaacttttaggaactagtttctttatgcctactattttaaaagctggtgaggtcttagaatatggtggtggaagcccgatattgtttcaacacttattctggttttttggacatcctgaagtttatatagttgcacttccagcatttggtattgtttctgacttaatttcagttcatgcaagaaaaaatatatttggttatagaatgatggtttgggcaatagttggtattggcgctctaagctttttcgtatgggctcatcatatgtatgttagtggaatgaacccatggtttggtttcttttttgcatcaactacattaattattgctgtgccgactgctatgaaagtttataattggatacttactttgtggagaggaaatataagaattaatactgttatgttatggtgtttaggttttatagtaacatttgttaacggtgggattactggaatatttttaggtaatgtttcagtagatgttcctctatcagatacatattttgtagtggcccattttcacatggttatgggaatagctcctctaatggtaattatgggagcaatttatcattggtttccactagtagctggaaaaatgttagatgaaaaattaggtaaatggcatttctggacaacatttcttggtgcttactccatttatttcccaatgcactacttaggatttattggggttccgagaagatattatgagatgtatgacagtccatacatgacatcaggtgtaggtctaaatgaatttataagcacggcagcatttatagttggagcagctcagcttattttagtttttaatattgttaagacaagaaaacaggcaa

SEQ ID NO: 225355 - DNA, 790 bp, Unknown
  Bacterial polypeptide expressing nucleotide sequence isolated from the Sargasso Sea
ctctgtatatatattatattcaggatttgcatgtttatttttgaccatgtttttttggttcagacaagtaataaatgaacatcttgctggattagattctaatcagctaaaacaatcttatgtatacggaatggcatggttcattttttctgaagtcatgttctttgctgcattttttggtgctttattttatgttagaactctagcagttccttggttagctggcgaaggatcaaaaggagcagcaattacagctattgaactatggccagcttttgagtcttcatggccggttatgaccacaccggatcaaggtaatgagtatgatttagctgacaagagcatggcatggccaggatggagtaaggctcttttatggctgcctttgtggaacacaattgttcttttaagttcatcatggacagttcacttagcccaccttggtttaaaaaaaggaaatagaaaaaagtttaacgtatatcttggagttacagttcttttggctttaatttttgttgggctgcaggctcttgaatattatgaagcttatgcacattatggtcttaaattaaattctggaatatatggatcaacgttttttatgcttactggttttcatggcttccatgtgatgatgggcggttttatgttagctattatgcttgcaagatcagtttttgcaggtcactttgagcaacacgatcactttggctttgaagctgcatcatggtattggcattttgtagatgttgtctggctaatgctatttatatttgtttatattttataa

SEQ ID NO: 225356 - DNA, 775 bp, Unknown
  Bacterial polypeptide expressing nucleotide sequence isolated from the Sargasso Sea
cttattttatatacaggcctagcttgtttcttagcaacactgtttttttggtttaggcaggttgttaaagaaaacaatgccggcctagaaagtgcacaactttctcagtcttttgtttacgggatggcgtggtttatattttctgaagtaatgttttttgcagctttctttggagctttgttttacgtaagatctttcgcagttccgtggttagggggcgaaggagaaaaaggccttgctaatatgctatggcaagattttgaagctacgtggccactaataaatactcctgatgggggtaaagcttttgtcatagctgcaaaaagtatgagctttcccgggtgggaaaatattagccactggctacctttatacaacactattgtattgctaagttctagtgtgacagttcactttgcacatctgggtcttaagaaaggaaacaaaaaaacattcaatatttggcttggtattacagttttactcgctctaatttttgttggccttcaagcagcagaatactatgaggcttatgaacattttggacttactctaaattcaggaatttatggatcaactttctttatgttgaccggatttcacggattccatgtaatgttgggcggccttatgctcgctgttatgttgataagatctgtattttatggacactttaatgagcacaaacatttcggctttgaagccgcgtcatggtattggcactttgtagatgttgtttgggttatgttgttcctatttgtttatattttataaa

SEQ ID NO: 225357 - DNA, 139 bp, Unknown
  Bacterial polypeptide expressing nucleotide sequence isolated from the Sargasso Sea
ttgtctactcagattaaatgcaaatcaattttcaactcaccaacattttggttttgaagctgctgcttggtattggcactttgttgatgttgtttggttgttcttatttgttgcaatttattggtggggtgggctttaa

SEQ ID NO: 225358 - DNA, 783 bp, Unknown
  Bacterial polypeptide expressing nucleotide sequence isolated from the Sargasso Sea
aactttgttaattttatcaatttttgctgacggccccccaggacaaacaggggtaggcggcggttggactatttatccacctttgtcatctaaagcaggtcaaccaggaccagcaatggatttagcaattttaagtttacacttagctggtgcttcttcaattttaggagcagtaaactttattacaacaattttaaatatgagaactccgggcatgactttacataagatgcctttgtttgcttggtcgatcttagtaacagcattcttattgttgttatctttacctgttttagctggtgcaattacaatgttattaactgacagaaattttggtaccgcattctttgaggcacaaacggggggagatccagttttatttcaacatttattctggttctttggacacccggaagtttatattttaattcttcctggttttggaatgattagtcacatcgtttcgacattttcaagaaaaccagtatttggctatttaggaatggcttacgcaatggttgcaatcggaatagtaggttttgttgtatgggctcatcacatgtatacagttggattaagtacagacactaaagcttattttttagcagctacaatgattattgcggtaccaacaggtattaaaattttttcatggattgcaacaatgtggggtggatcaatttcatttaaaacacctatgatgtgggcattaggttttatattcatgtttactgttggaggtgtaacaggggtagttttagcaaatgcaggtgtagataccgc

SEQ ID NO: 225359 - DNA, 698 bp, Unknown
  Bacterial polypeptide expressing nucleotide sequence isolated from the Sargasso Sea
tatgtatacacagactgcatctcacgacgatcatactccaactggttggaaacgttgggcttattcaaccaatcacaaagatattggaacaatgtatttaatttttgcaattattgcaggtgtaatcggtacagcattttcagttttaatgagaatggagttgatgcatccaggagatggtatcttaggtggtaattatcatttatacaatgttttagtgactggtcatggattgatcatgattttctttatggttatgccagcaatgatcggtggttttggtaattggtttgttccaattatgattggtgccccagatatggcgtttccaagaatgaataatatttcattttggttactacccacatcatttattttgttaattatgtctatcttcatggatgggcctccaggtcaaacaggagttggaggtggatggactatttatcctcctttatcatcttcagctggacaacctggtcctgcaatggattttgctattttaagtttgcacttagcgggtgcttcatcaattttaggagcggtaaattttattacaacgattttaaatatgcgaactccaggcatgactttacataaaatgcctttatttgcctggtcaattttagttacagcatttttattattgttatccttacctgttttagcaggagcaattacaatgctcttaactgata

SEQ ID NO: 225360 - DNA, 340 bp, Unknown
  Bacterial polypeptide expressing nucleotide sequence isolated from the Sargasso Sea
gctcttctagaagatgatcgaaaaagttttatacaaggtttaactttaacagtaatattaggtgtatgctttactgcacttcaagcatatgaatatcatcatgcaacttttactttctcagatcacatatatggatcagtgttttatatggcaacaggtttccatggttttcatgtaatagttgggacaatatttttagctgtatgtttgtggagaggaaagttaggtcattttaataaagatcaccattttggttttgaggcggcagcatggtactggcactttgttgacgttgtatggctattcttatttgctgcaatatatatttggggaagctaat

SEQ ID NO: 225361 - DNA, 853 bp, Unknown
  Bacterial polypeptide expressing nucleotide sequence isolated from the Sargasso Sea
cctccttcaggtttgatgctggtagcaagctattttgttgagggtgctgctcaggctggatggacggcttatcctcctttgagcataactactcctcaatcgggacaaattatttggattctgagcgttctattacttggaggcagttctatatttggtggaataaactttatcgcgaccattatcaaactaagaaggccaggattaaaacttatgcaattgccaatgtattgttgggcaatgcttggaacaagtctattagttgttttgtcaactcctgttttagcaggcactttaattctacttagcttcgatatcatcgctaatacagggtttttcaatcctgttttaggtggcaatgtcgtagtttatcagcatttattttggttttattcgcatccagctgtatacattatggtccttcctgcctttggtttagttagtgaaatacttcctgtacatgctagaaaaccactttttggatatacaacaatggttttttcaataatggggatagtagttttaggtttagttgtttgggcgcatcacatgtttacgagtggaacgcccccttggatgagattattctttactatcgctacagcatttattgctgttccaacaggtataaaatttttcaattgggttgcaacattatggggaggtaaaatttccatcaatagtgcaatgttattctcttgcggatttattataaattttgtttttggaggtattacaggagttgctttggcacaggtacctttcgatattcacgtacatgatacctatttcgttgtagcccattttcattacatagtttatggagggactgtttttattatttctcttcaat

SEQ ID NO: 225362 - DNA, 769 bp, Unknown
  Bacterial polypeptide expressing nucleotide sequence isolated from the Sargasso Sea
ttgatggagcctggtgtccaatacatgataatggatggtgaacccaacggtcacatgtggaatgttctagttacagggcatgggattttaatgatgtttttcgtggtaattcccgcactttttggagggtttggtaactattttatgccactcatgattggtgcccccgatatggctttcccaagattgaacaatttatcatattggctctacgttatgggatcaactttagctgtatgttcgcttatagctcccgggggaaacggccagttgggctctggggtaggttgggttttatatgctccactgtcaactaatgagcagggtatgtcgatggatcttgctatttttgcgatccatgtttcaggagcctcctcaattttgggggcgataaatatgattacaactttcttgaacatgcgcgcacctgggatgacattgcacaaaactccgcttttcccctggtctatattggttacggcgttcctaattcttttctcattgccggtactagcgggagcaattacaatgctcctgactgacagaaattttggcactactttttttgatcccgcaggaggcggcgaccctgtattataccagcacttactctggtttttcggtcatcccgaagtttacatgatagtggtacctgggttcggtatagtgagtcacgtgatagctacattttccaggaagccaatttttggctaccttccaatgatttacgcaatgattgctattggggcacttggctttgtagtttggg

SEQ ID NO: 225363 - DNA, 655 bp, Unknown
  Bacterial polypeptide expressing nucleotide sequence isolated from the Sargasso Sea
actgagtgtaaaaatctttagttggattttgacaatgtataaaggacaggtttcctttactcctccaatgttttatgcattagcattcctattcttgtttacaattggtggactaactggaatatttttaggagcagttgcattagatattcatttacatgatacttattttgttgttgctcactttcattatgtaatgcagggtggaaccattgtagccttcttaggaggactacatcattggtggccaaaatcttttggagtgatgtataatcaaactatagcgaatattgctgctttaggtgtatttataggatttaatggaacattttttccacaattcttgcttggtttaagaggaatgccaagaaggtatgcgacttatgatgagcagtttgttgaattacatagctattcaacattttggtccggtattcttggtatctcaatttttatagctgtaatgaatttattttggtcatttattaaaaagaataaagtcgatccaggttcaaatccatggggaggtatgactttagaatggacgcatacttcatcaccgcctcatcctcataattttgaagaggagccagtattacagcatgggccatatgattatgataaaataattgttgagaaaacatataagaaataa

SEQ ID NO: 225364 - DNA, 438 bp, Unknown
  Bacterial polypeptide expressing nucleotide sequence isolated from the Sargasso Sea
cttattatgttgtagcgcatttccactatgtattatcaatgggtgctgtgtatgcaatctttgcaggattttattattggtttagcaagatgacaggttatgaatactcagaatttctgggcaaactacatttttggttaacattcattggagtcaacttgatattctttcctcaacatttcttaggattagcagggatgccaagaagatatgctgattatccagatgcatttgctggttggaattatatttcttcgattggctcgtatatttctattattggtttagcggtatttttattaaatcttttgtatgcttttatgaaaaagaaaaaagctgaacaaaatccatggggagaaggagctacaactctagaatggacagtgtcatcaccgccaccattccatacttttgaagagctacctaaagtaaaataaa

SEQ ID NO: 225365 - DNA, 404 bp, Unknown
  Bacterial polypeptide expressing nucleotide sequence isolated from the Sargasso Sea
aatgagttacgcagattcagcaagtcacgaccatcatgatcataaaccaggttttataaaaagatggtttttttctaccaaccacaaagatattggaactctctatataatatttgctatactagctggtttggttggaggtttcttttcattattaatgagagctgaattagctgccccaggcttagatgttgttgctgatggtcaagtttggaatgtaattatcactgctcatggtttgttaatggtattttttgttgtaatgcctgcattgataggcggttttggaaattggtttgtcccattgatgattggtgctcctgatatggcttttccaagaatgaataattttagtttttggatacttgttcctgctctagttttattagttgtttcagcaacaa

SEQ ID NO: 225366 - DNA, 724 bp, Unknown
  Bacterial polypeptide expressing nucleotide sequence isolated from the Sargasso Sea
ggcccaggtgttggaggtggttggacaatttaccctccgctttctgcaaatttaggctcgccaggtcctgctgttgacttagcaattttttctcttcacttagctggggcttcctcaatacttggtgcgataaattttataacgacaatctttaatatgagagcgccaggcatgactttacacaagatgcccctctttgtttggtccattcttgtcacagctgttttattactattatctcttcctgtattggctggagctataacaatgcttctaactgatagaaattttggcacggcatttttcagtgctgccgagggtggagatcctgttttattccagcacttattctggttttttggacatcctgaagtctacattcttattttacctggctttgggattgtgagtcatgttgtagcaacattttctaagaaacctgtgtttggttatcttggtatggcttatgcgatggtttcaattggtttcctaggctttattgtttgggctcaccatatgtatactgttggcatggatgcagatgttaaggcttactatatttttgcaactatggtgattgcagtacctacaggcatcaaggtattttcatggattgctacaatgtggggtggttcagtagagcttaagactcctatgttatgggcaataggatttattttcctatttactgtgggtggagttaccggagttgttctggctaacg

SEQ ID NO: 225367 - DNA, 886 bp, Unknown
  Bacterial polypeptide expressing nucleotide sequence isolated from the Sargasso Sea
tttggtaattatttaattcctttgatggttggagctagagatatggtctttccttatcttaacatggtaagtttttggtctttttttgttgctgttgtagttttattagcaagcttttttgttccaggaggaccaaccggagcaggatggacactttacccacctcaaactattttagaaggaacaccaggacatggtatgggaatattattaatgtgtgtgtctttaattttatttgttgcaggttttacaatgggtggacttaattatttaattactgttttacaagcacgtactagaggtatgacattaatgagaatgccccttacagtttggggtatttttacagcaactgttttagcaatgttagcttttccagcattattagtaggcgctttaatgatgactttagataatgttcttggaacgagtttttttatgccaacaatattaaaagctggtgaagttttagaatatggtggaggaagtcccattctttttcaacatttattctggttttttggacacccagaagtttatatagttgcattacctgcatttggaatagtttcagatttaatatctgttcattctagaaaaaatatttttggctatagaatgatggtttgggctattgttattataggagctctaagcttttttgtatgggcacatcatatgtatgttagcggaatgaacccatggtttggtttcttttttgctacgacaacacttataatagcaattccaactgctatgaaagtttataactggattttaactctttggagaggaaacattagacttaatgttgtaatgttatggtgtcttggttttatagttacttttgtaaatggtggtattacaggaattttcctaggcaatg

SEQ ID NO: 225368 - DNA, 766 bp, Unknown
  Bacterial polypeptide expressing nucleotide sequence isolated from the Sargasso Sea
tatgagttcagaaaatacaaaaagaacacacgaataccatttagttgatccaagtccttggccccttcttgcatcgattggagctttaatcgcgtgcgttggtgcggttgtttattttaggaccgatgacatgtggacaatgttaattggtttagcaattgttatatatgtctcatacatgtggtttagagatgtgattatagagggcgaacatcaaggtcatcacacaccagttgttcaaattggacttagatatggcatgactttatttattgcatcagaagttatgttctttgttgcttggttttgggcatatttcaacgcaagtctattccccacagaacaaataggagctatttggcctccaccagatattcatctaatggatccatggcatatacctttaatcaacacgttaatcttgcttttatcaggaacaacagttacctgggctcatcatgcattgctagagggaaatagaaaagagctaatacagggactatggtgcacggtaggacttggtgtcgtgttcactggttttcaggtttatgaatacatgcatgctgatttttcattttctgggcacatctatggcgcaactttttatatggcgactggctttcatggctttcatgttctaattggaaccatattcttaattgtttgccttgccagatcgattgctggccattttaaatctgaccatcatttttgggttcgaggctgctgcatggtattggcatttttgtggatgtgtttgggtatt

SEQ ID NO: 225369 - DNA, 658 bp, Unknown
  Bacterial polypeptide expressing nucleotide sequence isolated from the Sargasso Sea
tgaatccgagaccggcaagtacggcgaccgcgtggatgcctcgttccgctggtcgatgagctggttcatcttctcggaagtgatgttcttcgcggcgttcttcggcgcgctgttctatgcccgaacgatcgccatgccgtggctgggcgatctgaacaacaagctgctgtggcccgacttcaacgcgctgtggccgaacgccggaccggccggcacggtagcgcccttcacaacgatggggccgtggccgattccgacgatcaacacggcgctgctgctgacttctggcgtgactctcacgtgggcacaccatgcgctgcgtgaaggcaagcgtgcccaggtcatccagggcctgctgctgacgatcctcctgggcttcacgttcatgggcttccaggcgttcgaatacatccacgcctatcacgaactgaacctgaagctgacctcgggcatctacggttcaacgttcttcttgctgacgggcttccacggcttccacgtgaccatgggcgccatcatgctgtcggtggtgctggggcgtgtgatcaagggccacttcacgccggaacatcacttcgcttttgaaggcgctgcgtggtactggcacttcgtggacgtggtgtggctcggcttgtacgtggtggtgtactggctgtaa

SEQ ID NO: 225370 - DNA, 792 bp, Unknown
  Bacterial polypeptide expressing nucleotide sequence isolated from the Sargasso Sea
catgattttctttatggttatgccagctatgatcggtggttttggaaattggttcgtgccaattatgataggtgcgcctgacatggcatttccacgaatgaataatatttctttttggttattaccagtttcattaactttattaattttatcaatttttgctgacggccctccaggacaaacaggagttggtggtggttggactatttatccacctttatcatccaaagcaggtcagcctggaccagcaatggatttggcaattttaagtttacacttagcaggggcttcttcgattttaggagcagtaaactttataacaacaattttaaatatgagaactccaggtatgacattacataaaatgcctttgtttgcttggtcgatcttagtaacagcttttttattattattatcgttaccagttttagctggagcaattacaatgttattaacagatagaaactttggaactgccttttttgaagcgcaaactggaggagatccagttctgtttcaacatttgttttggttctttggtcatccagaagtttacattttaattttaccaggctttggaatgatcagtcatattgtatcgacattttcaagaaaaccagtttttggttatctgggtatggcatatgccatggttgcaataggaatagtgggttttgttgtatgggctcaccatatgtatacagttggattaagtacagataccaaagcttactttttagcagcaacaatgattattgctgtgccaacaggaataaaaattttctcatggat

SEQ ID NO: 225371 - DNA, 550 bp, Unknown
  Bacterial polypeptide expressing nucleotide sequence isolated from the Sargasso Sea
gtgtaggatatctgcattaggtttgtgggaaggctttgaatcctcatggcctgtaattacaactccagacaaaggtgccgaatatgcattagctgaaaagagtatggcatggcctggctgggggcatgcattagagtggctgcctttatggaatacaatagttctcttaagctcaagtgtgacggttcattttgctcacattggccttaaaaacggagacagaaaaaagtttaatcgattcttaggtataacagttggtttagctttaatttttgttggtcttcaagctgcagagtattacgaagcctatgctcattatggtcttacacttaattcagggatttacggctcaacattctttatgctgacaggctttcatggcttccatgtgatgatgggaggcttcatgcttgcagttatgttggctagatcggtttttgctggacactttgaggaccatgaccattttggttttgaggcagcctcatggtattggcactttgttgatgtagtctgggtaatgttgttcttatttgtttatatactgtaa

SEQ ID NO: 225372 - DNA, 490 bp, Unknown
  Bacterial polypeptide expressing nucleotide sequence isolated from the Sargasso Sea
atgtcggcagataaaaaaaaacatgattttcatttagtggacccaagtccttggccaatatacgtatcatttgcaactttagtattggcagttggagctgtttactattttcattcaaaggctctttggcttttactagtaggttttgcattagtaatttatggggcctttatgtggtggagagacgtgattgaagaggcagagcatcaaggccaccatacaccagtagtacaaattggtcaccgttatggtatgacactttttattgcatcagaagttatgttttttgttgcttggttctgggcttactttaatgcaagtttgtttccgacagagtcaataggaggcacttggccaccacctgacataaagacgtttgatccttgggatataccattaattaacactcttattttattattgtctggaacaacagttacttgggctcaccatgcaatgttagagaatgatagaaaaggacttgtgaaaa

SEQ ID NO: 225373 - DNA, 790 bp, Unknown
  Bacterial polypeptide expressing nucleotide sequence isolated from the Sargasso Sea
atgtcagctgaaaaaaaacatgattatcacttagtagacccaagtccttggccaatctatgtttctttttcttgtttagttttagcgttaggtgcagtttattatatgcactcagatatatcgtggggaatgtatttaggctttgctctgttaatttacggagcttatatgtggtttagagatgtagttattgaagctgagcaccaaggacatcatacacctgtagtccaaattcatcataggtatggtatgacattattcattgcatcagaggtcatgttttttgttgcatggttctgggcttactttgatataagtcttttcccaaatgattttgtaggaaatgtttggccaccaaaagatatcaaaacttttgatccatgggatatcccattaattaatacactggtattactattatctggcacaaccgttacttggtcacatcatgctcttttagaaggtgatagaaaaagttttataaatggtttaattttaacagtaatccttggtgtttgtttcactgctttacaggcatatgaatatcatcatgcaacattttcattttcagatcatatatatggctcagtattttatatggcaacgggatttcatggtttccacgtaatagttggaacaatttttttagcagtatgtttgtggcgaggaaaattaggtcatttcaacaaagagcaccactttggttttgaggctgctgcttggtattggcactttgtggatgttgtatggttgtttttatttgctgcaatctatatttggggaagttaat

SEQ ID NO: 225374 - DNA, 578 bp, Unknown
  Bacterial polypeptide expressing nucleotide sequence isolated from the Sargasso Sea
aactccaatgttatttgcagttggtttcatctttttatttactgttggtggcttaacaggggtaatgttagcaaatgcaggaattgatattgctttacacgatacctactatgtagttgctcacttccattatgtattatcaatgggagcagttttcgccctattcgcaggattttattactggattggcaaaatctctggatatcaatacccagaagtttatggtcaaattcatttttggttatttttcattggagtaaatcttaccttctttccaatgcatttcttaggacttgccggaatgccaagacgtattcctgactatccagatgcttttgcagggtggaatgccgtttgtagttatggatcttatctttcaatcttggcgagtgttttcttcttttatgttgtttacattacacttactagtgaagacaaatgccccacaaacccatggaattttgatgacaatgagaaatctgtaccaactttagaatggacagtgacctcaccaccagctttccatacttttgcagaaatcccagctattaaatcacctcagcaattaacgaaataat

SEQ ID NO: 225375 - DNA, 784 bp, Unknown
  Bacterial polypeptide expressing nucleotide sequence isolated from the Sargasso Sea
ttctcacataatagaaacattttctaggaaacctatttttggctattcctcaatggtctatgctttaacttctatagctgttctctcttttgtagtttgggctcaccatatgtttactgttggaatgccgctggctggagagcttttctttatgtattcaaccatgcttatagccattcctacaggagtaaaagtttttaactgggtagctactatgtttaagggatcaataagctttgaaacaccaatgttgtttgctatagcatttgtatccttatttactataggtggtttttcgggattgatgctggctattgttccagctgactttcagtatcacgatacttattttgtagtggctcacttccattatgtgcttgtaccgggatcattgtttggaattattgctggtgtttattattggctaccaaaatggacagggaacatgtatgacgaaacgctcggaaaactgcatttttggttatcattcttttctgtaaatctaacttttttcccaatgcactttgtgggccttgccggtatgccaagaaggtatcctgactatgccctacaatttgcagactttaacgcaatagtatcagtgggggcctttatttttggattcactcaattgttattactttttatagtaattaaagcaattaggacgggcaaaaaggctaccgatgaagtttgggaagatactaaagactgggggctagagtggacactggattcgcctcctccatatcatagctttaccgttcaaccagaagttaagtaa

SEQ ID NO: 225376 - DNA, 834 bp, Unknown
  Bacterial polypeptide expressing nucleotide sequence isolated from the Sargasso Sea
gttggatggttggggtccgcaccaaacggtggctggtttgggtatcaacctaacgcaggtatgaaatactccccgggtactgctatggattattgggctatagggctacaaatacttggaattgcatctttaatttctgcatttaattttattacgaccattatcaatatgagaacagagggtatgcgatttatgagaatgccagtatttacttggatgacttttgctgtatcttttttgcttgctttttccttaccaataattgcaatagcactcttctatgtcacctttgatagaaaatttggaactacatttttcttaacagaaggtggtggtgatccaattttatggcagcatctgttttggttatttggtcatccagaagtttatattctaatattacctgcctttggaatcgtctctgaagtacttccaacttttgcaagaaagccactttttggttatgctgcaatagtttttgcaggatttggaattgcgtttataggttttggagtatgggcacaccatatgtttgcttctgcaattagtccagttgctcaggctggttttggtttatcaacaatggttattgctgttccgacaggtgtaaaaatatttaattggcttggcacaatatggggaggaaaactaaagctgaataccccaatgctattctctttaggttttataggtatgtttgttattggtggcttgagtggtgtaactcactcaatagttccagctgacactcagcaaacagatacttactatgttgtcgctcactttcactatgttttattcggtggagctttgtttggaattttttctggactt

SEQ ID NO: 225377 - DNA, 920 bp, Unknown
  Bacterial polypeptide expressing nucleotide sequence isolated from the Sargasso Sea
caattttagttacagcattcttacttttattatcattaccagttttagctggagctataacaatgctgttaacagatagaaattttggaactgctttctttgaagcacaaacaggtggagatccagttctattccaacatttgttttggttttttggtcacccagaggtttatattttaatcttgccaggttttggaatgataagtcatattgtttcaactttttcaaaaaaacctgtgtttggttatctaggaatggcttatgctatggtggccataggagtagttggttttgttgtttgggctcaccacatgtacactgttggattagacacagatacaaaggcttatttcctagctgcaacaatgattatcgcagtcccaactggaattaagattttttcttggatagcaacaatgtggggtggctctataagttttcagacccctatgttatgggctattggttttatttttttattcactttaggaggagtaactggagttgttttggcaaacgcaggcgttgataccgcacttcacgacacctattacgttgtagcgcatttccactatgtattatcaatgggcgctgtttacgcaatctttgcaggattttactattggtttagtaaaatgacaggttatgaatactctgaatttttgggaaaactgcatttttggctgactttcataggagtcaacctaatattcttccctcaacatttcttaggattagcagggatgcctagaagatacgctgattatccagacgcatttgctggttggaattatatttcttcaattggttcttatatatctataatcggtttagcggtgtttttattaaatttattgtacgcctttatgaaaaagaaaaaagcagaaccaaacccatggggagaaggagcaacgacttag

SEQ ID NO: 225378 - DNA, 823 bp, Unknown
  Bacterial polypeptide expressing nucleotide sequence isolated from the Sargasso Sea
atggccttttctagctactatttcgcttgtagtatttttcattggcttagctaattatatgaacggctattcatctggaatggttataatgcttaccggatttgccttattatttataataacatatggatggttttccaatgttataagtgaaagtgagtctggtacatataatgcacaagtagatatatcatttaggtggggaatggtgtggtttatcttttcagaagtaatgtttttctcggctttttttggagctctttattatgcaagagaattatctttaccatggctgggtggtgatggcgctaaagtttctacaaacttatttttatggccacaatttgagacagtatggccttctaatgggccaacaaatgctggtggcgactttacattaatgaaagcgagcggcataccagcgctaaatacattaatcttattaacaagtggtttaacagttacatgggcacatcatggcctgaaagaacagaatagaaaacagcttatcattggtctagctcttacagtattcttaggttttatttttgtgggtttccaggcttacgaatacatgcatgcttactctgacttaaatcttactctttcaactggtatatatggatcaacattttatatgttgactggctttcatggctttcatgtcactcttggtgcaattatgctgactgttataatgattaggtgtattaatggccactttgctggagacaatcattttggttttgaggcggtagcatggtactggcattttgttgatgttgtatggttaggcctatttgtttttgtttattggttataa

SEQ ID NO: 225379 - DNA, 765 bp, Unknown
  Bacterial polypeptide expressing nucleotide sequence isolated from the Sargasso Sea
gaatggcatatgctatggttgcaattggtgttgtaggttttgttgtgtgggctcatcacatgtatactgttggacttgacactgatactaaagcatatttccttgcagcaacaatgattattgcagtacctactggaattaaaatattttcttggatagctactatgtggggtggctccatctcatttaaaactccaatggtatgggcactaggttttatttttttatttacagttggtggtgtaacaggaattgttttagcgaatgcgggagttgatacagcattacatgacacatattacgtagttgcccatttccattatgttctctcacttggagcagtatttgctatatttgcaggattttattattggttcagcaaaatgtcaggatatgaatattctgaatggttgggacaattacatttttggttaacttttattggggtgaaccttgtgttttttccacaacacttcttaggattagcgggtatgccaagaagatatgcagattacccggatgcatttgctgattggaactatatttcctcgatagggtcttatatatctgttgtgggattaggagtgttctttgttaacataatttacgcatttattaaaaaagaaaaagcagctcaaaatccatggggtgagggagcaacaacacttgagtggacagtgccatctcctccaaattttcatacatttgaagaacttccaaagttcgaagaggagtatgaaactgctgaaaaatctggtagttaga

SEQ ID NO: 225380 - DNA, 582 bp, Unknown
  Bacterial polypeptide expressing nucleotide sequence isolated from the Sargasso Sea
catggatagcaactatgtggggtggctcaataagctttcagaccccaatgctttgggcaattggttttatttttttattcactttaggaggtgtaactggagtcgtcttggcaaacgctggtgttgataccgcacttcatgatacttattatgttgtagcgcattttcattatgtactatcgatgggtgctgtatacgcgatctttgcaggattttattattggtttagcaaaatgacaggttatgaatactcagaatttcttggaaaattgcatttttggttaactttcataggagtaaacctaatattctttccgcaacatttcttaggattagcaggaatgccaagaagatacgctgattatccagatgcgtttgctggctggaattatatttcttccattggctcatatatatctatcatcggcttagcggtatttttattaaatctattgtacgcttttatgaaaaagaaaaaagcggaacaaaatccatggggagagggagcaacgactctagaatggacagtgtcatcaccgccaccattccatacttttgaagagctacctaaagtaaagtaaa

SEQ ID NO: 225381 - DNA, 900 bp, Unknown
  Bacterial polypeptide expressing nucleotide sequence isolated from the Sargasso Sea
tacagatagaaattttgggacaactttctttagtgccgctgaaggtggagacccagtactttttcaacacctattttggttctttggtcaccctgaggtttatatcttaattttgccaggctttggaattgtgagtcacgttgtagcaacattttctaagaaaccagtctttggctatcttggaatggcttacgcaatggtatctattggtttcctaggtttcatcgtttgggctcaccacatgtacactgttggcatggacgcagatgtaaaagcttattatgtgtttgccacgatggtaattgctgtgcctaccggaattaaagtcttctcatggattgctactatgtggggtggttcggtagatcttaaaacaccaatgttatgggcaataggctttatttttctattcactgtaggtggtgtgacaggtgttgttcttgcaaacgcaggaattgatcattcgctgcacgacacttactatgtcgttgcacattttcattacgttctttctatgggagctgtttttgcaatatttgctggtttctattattggtttggtaaaatgtttggcagaaactactcagagtttctaggcaagttacatttttggttaacttttattggagtgaatataatattcttcccacaacacttcttaggtttagcgggaatgccaagacgttatgttgactaccctgatgcttacgctggatggaattatatttcctcaattggctcattcatatcagttcttggtttggcagtattctttgtaatgttagtacacgctctcatgaaagttagagattgtgccgacaacccatggggcgagggagctacaacacttgagtggacattgccttctccctccacattcaccagtttgaggagctacca

SEQ ID NO: 225382 - DNA, 259 bp, Unknown
  Bacterial polypeptide expressing nucleotide sequence isolated from the Sargasso Sea
ttcagcatatgaatatcatcatgctacatttgccttttcagatcatatttatggttctgttttttacatggcaacaggctttcatggtttccatgttatagttggaacaatttttttagcagtatgtttatggagaggaaaattaggtcattttactaaagatcatcattttggttttgaagcagctgcatggtattggcattttgtcgacgttgtttggttatttttgttcgctgcaatatatatctggggaagttaa

SEQ ID NO: 225383 - DNA, 976 bp, Unknown
  Bacterial polypeptide expressing nucleotide sequence isolated from the Sargasso Sea
agtccaatgtctgactttatgccaagagatgtttataaccaagttttaactttacacggaacaataatgatattcctttggatagtgcctgtagttaatggtgcttttggaaattatttaattccattttatgtaggtgctagagatatggcattcccaagattaaatgccgtagctttttggttaattcctccttcaggtttgatgctggtagcaagctattttgttgagggtgctgctcaggctggatggactgcttatcctcctttgagcataactactcctcaatcgggacaaattatttggattctgagcgttctattacttggaggcagttctatatttggtggaataaactttatcgcgaccattatcaaactaagaaggccaggattaaaacttatgcaattgccaatgtattgttgggcaatgcttggaacaagtctattagttgttttgtcaactcctgttttagcaggcactttaattctacttagtttcgatatcatcgctaatacagggtttttcaatcctgttttaggtggcaatgtcgtagtttatcagcatttattttggttttattctcatccagctgtatacattatggtccttcctgcatttggtttagttagtgaaatacttcctgtacatgctagaaaaccactttttggatatacaacaatggttttttcaataatggggatagtagttttaggtttagttgtttgggcgcatcacatgtttacgagtggaacgcccccttggatgagattattctttactatcgcgacggcatttattgctgttccgacaggcataaaatttttcaattgggttgcaacattgtggggaggtaaaatttcaataaatagtgcaatgttattctcttgcggatttattataaattttgtttttggaggtatgacaggagttgctttggcacaggtccctttcgatattcacgtacatgatacct

SEQ ID NO: 225384 - DNA, 147 bp, Unknown
  Bacterial polypeptide expressing nucleotide sequence isolated from the Sargasso Sea
ttcttgcagtttgtttgtttagatcaatgagaggccattcgacgcctcaacatcattttggatttgaagcagcagcctggtactggcattttgtcgacgtagtttggttattcttatttgctgcgatctatatttggggaagctaat

SEQ ID NO: 225385 - DNA, 922 bp, Unknown
  Bacterial polypeptide expressing nucleotide sequence isolated from the Sargasso Sea
aatgtccttattgtgggagcaatggcaatgatcataagagctgaattatttcagcctggcatgcaaatagtagaacctgagttctataatcaaatgattacactgcatggcttgataatgatattcggtggagtaatgcctgccttcgttggtcttgcaaattggttagtgccaatgatgattggggcaccagacatggccttaccaagaatgaataatttaagtttctggattttaccatttgcatttttaatattactttcttctctgtttatggaaggaggtgcgcctaattttgggtggaccttctatgctccactttcaactacatatgcaccaccaagcgtaactttcttcatattctcagttcatataatgggagcttcatcgattatgggagctattaatgttgttgtaacaataatgaatatgagagctcctggcgttgggcttatgaagatgccactatttgtgtggtcgtggttaataacagcatacttattaattgctgtcatgcctgttttagctggagctgtaacaatgatgttgatggatatccattttggaacaagtttttttaatgctgctggaggtggagacccggtattatttcagcatatattttggttttttggacatccagaagtatacataatgatacttcctgcatttggtattgtttcccatatcattgaaaccttttcaagaaaacaattattcggttattcttcaatggtttgggcaatgctatcaattgctatactctcattcgttgtttgggcacatcatatgtttacagtaggactgcccttagctgctgaaatattcttcatgtgggcaactatgctgattgctgttccaacaggagttaaagtttttaattgggttgcgacaatgtttagaggatcactcacatttgaaa

SEQ ID NO: 225386 - DNA, 729 bp, Unknown
  Bacterial polypeptide expressing nucleotide sequence isolated from the Sargasso Sea
tccctggccattagttggtgctttttcagctctttttctagtttcaggagctattttgttcatgcactatgagatgctatggcctatgttggcaggtcttgttctaatactttttactatgtttatgtggtggcgagacataataaaagagagtacttttttgaaagtacataattcaatcactgagattggtcttaggtggggtatggctctgttcatcacatcagaagttatgttttttgtagctttcttttgggcttttttcgatgcaagtctattacctaaaacatttttagctgagtacaaagaagttttcacaggcactcttggaataggagtttggcccccaaaaggaattgaaacttttgacccactagacatcccatatttaaataccttaattttacttttatcaggcactacttgtacatgggcacaccatgaattaagagagggtaataataaagaggctctgaaaggtttatattacacggtttttttaggtttcatattttcacttttacaaatatatgaataccaacatgcaacttttggttttactgaaggtatatatccttcaacttttttcatggcaaccggttttcacggctttcatgtattaataggtactttgtttttattagtctgtttattgagaataagaaaaggtcatttaaccccaaaaagacattttggttttgaagcagctgcatggtattggcatttttg

SEQ ID NO: 225387 - DNA, 752 bp, Unknown
  Bacterial polypeptide expressing nucleotide sequence isolated from the Sargasso Sea
tgcaatggttgcaattggaattgttggttttgttgtgtgggctcaccacatgtacacagtaggtttaagtacagatacaaaagcatactttttagctgcaacgatgatcattgcagttccaaccggtataaaaatattttcatggatagcaactatgtggggtggttcgatttcattcaaaaccccaatggtttgggctttaggatttatatttttattcacagttggcggagttacaggtgtagttcttgcgaatgctggtgttgatactgcaatgcatgatacatattatgttgttgctcattttcattacgttttatcattaggagctgtgtttgccatcttcgctggtttttattactggtttggaaaaatgactggttacgagtattcagagtggatggggcaattacacttctggttaacgtttattggagtaaacttagttttcttcccacaacactttttaggccttgcaggaatgccaagaagatatgctgactatccagatgcttttgcgggatggaattacatttcttcaattggttcttatatttctgtaattggattagtagtattttttataaaccttgcttatgcgttttataagaaaaaggctgcagcacaaaacccatggggagaaggtgctacaactttagaatggacagtaccatctccacctaattttcatacttttgaagaattaccaaagtttgaagatgaagagggtgttgaaaaatctactagctaaa

SEQ ID NO: 225388 - DNA, 919 bp, Unknown
  Bacterial polypeptide expressing nucleotide sequence isolated from the Sargasso Sea
ataatgatattcctttggatagttcctgtagtaaatggtgcttttggaaattatttaattccattttatgtaggtgcgagagatatggcattcccaagattaaatgctgtagctttttggttaattcctccttcaggtttgatgctggtagcgagctattttgttgagggtgctgctcaggctggatggacggcttatcctcctttgagcataactactcctcaatcgggacaaataatttggattctcagcgttctattacttggcggcagttctatatttggtggaataaactttatcgcaaccattatcaaattaagaaggccaggattaaaacttatgcaattgccaatgtattgttgggcaatgcttgggacaagtctattagttgttttgtcaactcctgttttagcaggcactttaattctacttagcttcgatatcatcgctaatacaggttttttcaatcctgttttaggtggcaatgtcgtagtttatcagcatttattttggttttattctcatccagcagtttatattatggtacttcctgcctttggtttagtaagtgaaatacttcctgtacatgctagaaaaccactttttggatatacaacaatggttttttcaataatggggatagttgttttaggtttagttgtttgggctcatcatatgtttactagtggaacgcccccttggatgagattgttctttactatcgcgacagcatttattgctgttcccacagggataaaatttttcaattgggttgcaacattatggggaggtaaaatttcaatcaatagtgcaatgttattctcttgcggatttattataaattttgtttttggaggtattacaggagttgctttggcgcaggttccttttgatattcacgtacacatgatacttattt

SEQ ID NO: 225389 - DNA, 733 bp, Unknown
  Bacterial polypeptide expressing nucleotide sequence isolated from the Sargasso Sea
gctacatctatagcaacactagttacggctgttggatctgtttattattttcatagtaaagttatgtgggcgatggttttaggtttcttacttataatttattgtgcatttatgtggttcagagatgttgtgattgaggctgaacataaaggtcatcatacacctgtagttcaaattcatcacagatatggaatgacattatttatagcgtctgaagtaatgttttttgttgcatggttttgggcttactttgatgcaagtttgtttccaaatgaattcatgggaaatgtatggccgccaaaagatattgaaacttttgatccatgggacatcccacttataaatactcttgtcctacttttatctggtacaacagtaacttgggcacaccattctttattagaggatgacagaaaaggatttataaatggtctaatctgtacagtaattttaggagcattctttacactattgcaaatatacgaataccaacacgctacatttagtttttcaggtcatatttatggagcaacattctatatggccacaggatttcatggtttccatgttttagtaggaactattttcttagcggtttgcttatggagaggtaaattaggacattttactaaagaacatcactttggtttcgaagccgctgcttggtactggcactttgttgatgtcgtctggttgtttttatttgctgctatttatatttggggaagttaat

SEQ ID NO: 225390 - DNA, 655 bp, Unknown
  Bacterial polypeptide expressing nucleotide sequence isolated from the Sargasso Sea
atgtcggctggagaaaaaaaacacgattatcatcttgtagatccaagtccttggccaatttatacatcttttgcaactttagttttggctattggatcaatttattattttcattcaaaagtaatgtgggcaatgattctcggcttggctcttgtttgttatggtgcttttatgtggttcagagatgtagtaattgaagcagaacatcaaggtcatcatacaccagttgttcaaattcatcatagatatggaatgacattattcattgcatcagaggtaatgttttttgttgcctggttctgggcttattttgatgcaagcctgtttccaggagagtttgttggaaatgtttggccaccgaaagatatagaagtttttgatccttgggatattccattaataaatacattggtgttattactttcaggtactacagtaacatgggcccatcattcacttttagaagatgatagaaaaggttttatccaaggactatcatggacagtatttctaggtgtttgttttactgcgctacaagcttatgaatatcaacatgcaacatttgaattttcaaatcatatttatggtgctactttttatatggccaccggattccatggtttccatgttattattggaacaattttcttagcag

SEQ ID NO: 225391 - DNA, 695 bp, Unknown
  Bacterial polypeptide expressing nucleotide sequence isolated from the Sargasso Sea
aatggctgatggccattctagagatcatagctaccatctagtagatccgagcccgtggccaattgttggagcatttgcggcactaatacttacattaggtatgatcctttggtttcacgatgtaactgtctgggtttttattattggtgcagtaattactgcatatgtatttcttgtctggtttagagatattgtaaaagaaggagaacatcagggtttccatactccggttgtccagcttggccttagatacggaatggttctatttatagcctctgaggtaatgttttttgctgcttggttttgggcatactataatgctgctttgtttcctaccgaatcaatgggtggcacttggccacctgaaggaattttaacatttaacccttgggatcttccatttttaaatacacttattcttcttttgtcatccaccactgttactatagctcatcatgctcttagaaatggaaattatgcagggcttaaaatctggttatggataactatacttcttggtataagttttactggttgtcagatactggagtatgtagaagcacctttcccatttggtcaaggagcctatggatcaactttttttatggctactgggtttcatggcgcgcacgttataatcggaactatatgtctgatcgtatgtcttatcagagcttacgctggccactttaaac

SEQ ID NO: 225392 - DNA, 790 bp, Unknown
  Bacterial polypeptide expressing nucleotide sequence isolated from the Sargasso Sea
aatggcacatgaaaaaaatcacgattaccacatactaaatccaagtatatggccttttttaagtgctgtaggtgcatttgtattgctattaggaagtgttttattatttcatgattatacatcagttgttttctttataggattacttcttgtaatttattgtatgtatggatggtggtcagatgtgattactgaaagtcacataggagatcatactccagttgtaaaaattgctctgaaatatggcgttattatgtttatagtctcagaggtaatgttttttagtgcttggttttggagcttttttaaacatgcactttatccaatggaagctattggttctacatggcccccagcaggtattgaaacctttgatccttggcatttacctcttatcaatacattaatacttttgtgttctggtgcagcagcaacgtgggctcatcatgcaattgcgcacgaaaataacagaaaagacttagtaaatggattaataatttctataatgttaggcatattatttactatttttcaagcttatgaatatactcatgcagcttttagtttttcgggtaatatttatggcgctaacttctttatggcaactggttttcatggttttcatgttatagtaggaacgatttttttggctgtttgtctttttagagctttaaaaggtcactttacccccgaaagtcacattggttttgaagcagcagcatggtactggcattttgtcgatgtagtttggctatttttgtttgcggctatatacatatggggatcctaa

SEQ ID NO: 225393 - DNA, 495 bp, Unknown
  Bacterial polypeptide expressing nucleotide sequence isolated from the Sargasso Sea
aagaatatactgaaacgtttgatacaaatggtgctgtaggtgtttggccaccagaaggaattaaaacttttgatccacttgatgtaccttttttaaatacactcatattattaatgtcaggtacaacttgtacttgggctcaccacgcggtaagagaaggtcatagagatcaggcaattcaagctttatggattactgttgggctgggtttattttttacatttatgcaaggtgtagaatattatgaagctgcgttacattattttagttttacagatggtatttatccttcagttttctatatggcaactggcttccatggatttcatgtaatggtaggtactgccttcttagcagtttgcttatacagggtttataaaaatcattttacacctgaccaacattttggtttagaggctgctgcttggtattggcattttgtggatgttgtatggctatttctttttgtttgtgtttatgtttggggtggataaa

SEQ ID NO: 225394 - DNA, 674 bp, Unknown
  Bacterial polypeptide expressing nucleotide sequence isolated from the Sargasso Sea
actctttactatgttcatgtggtggagagatatcataaaagaaagcactttcctaaaagttcataattcaattacggagattggtctaaggtgggggatggctctatttatcacttcagaagttatgttttttgtcgcttttttttgggctttttttgatgctagtcttttgcctaaaacatttttagctgaatacaaagaagtttttacaggcacccttggaataggagtttggcctccaaaaggaattgaaacttttgatccattagacatcccatatttaaatactttaattttacttctatcaggcactacatgtacatgggctcaccatgaattaagagagggcaataataaagaggcacttaaaggtttatattatacagtttttttgggtttcatattttctcttttacaaatatatgaataccaacatgcaacttttggttttactgaaggtatatatccttcaactttttacatggcaaccggttttcatggatttcatgttttaattggtactttatttttattagtttgtttattgagaataagaaaaggtcatttaaccacagaaagacattttggatttgaagcagctgcatggtattggcatttcgtcgatgttgtttggttgtttttatacataagtatctactggtggggaaaataga

SEQ ID NO: 225395 - DNA, 470 bp, Unknown
  Bacterial polypeptide expressing nucleotide sequence isolated from the Sargasso Sea
tatgagcggagaccaaaaacatcaatatcatttagttgaaccaagtccttggccagcggttggttctgcggctgggtttactctagttttagggttaacaatgtttatgcatgaatatgcatattccatttatatattaggggccggtgttttaatggtattagctacaatgtttttctggtggagagatgtagttagagaagctgaacaccaaggtcatcatacacctatagttcaaataggtatgcgttatgggatgatgttatttatatcatcagaggtaatgttttttgtggcttttttctgggctttctttgatgcaagtctttatcctgatacaggaatctggccacctgctgatattacaacatttgatccttttgatcttccccttattaatacaatgatacttcttctgtctggatgtacagtaacttgggcccaccatgctttacaacatgacaatagga

SEQ ID NO: 225396 - DNA, 786 bp, Unknown
  Bacterial polypeptide expressing nucleotide sequence isolated from the Sargasso Sea
catctggtcaaaaacatgattatcatttagttgatcctagtccttggcctttagctacatctatagcaacactagttacagccgttggatctgtttattattttcacagtaaagttatgtgggcgatggtcctaggttttttacttatattttattgtgcctttatgtggttcagagacgttgtgatagaagctgagcataaaggtcatcatacacctgttgttcaaattcatcacagatatggaatgacattatttattgcttctgaggtaatgttttttgttgcatggttttgggcatactttgatgcaagtttgtttccaaacgaattcatgggaaatgtatggccaccaaaagatattgaaacttttgatccatgggacatcccacttataaatactcttgtcctacttttatctggtacaacagtaacttgggcacaccattctttattagaggatgatagaaaaggatttataaatggtctaatctgcacagtaattttaggagcattttttacgttattgcaaatatacgaataccaacacgccacatttagtttttcaggtcacatttatggagctacattctatatggccacagggtttcatggtttccacgttttagttgggactattttcttagctgtttgcttatggagaggtaaattaggacattttactaaagaacatcactttggtttcgaggctgctgcttggtactggcactttgttgacgttgtctggttgttcttatttgcagctatttacatttggggaagttaat

SEQ ID NO: 225397 - DNA, 826 bp, Unknown
  Bacterial polypeptide expressing nucleotide sequence isolated from the Sargasso Sea
atgtcagcaacaactgcagatcacgagcatcaccacaatccaacaggttggaagagatgggcttactcaaccaatcataaagatattggaacaatgtaccttatcttcgcaattattgccggtataattggatccgcattttcagttttaatgagaatggaattaatgcaccctggagatggaattcttggaggcgattatcatttatataacgttttagtaactggtcacggtctgatcatgattttctttatggtaatgccagcgatgatcggtggttttggtaattggtttgtaccaatcatgataggcgcaccagatatggcatttccaaggatgaataatatttctttttggttattaccagtcgctttaattttattactagtatcgatttttgttgatggccctccaggcgcaaagggagtagggggaggctggacaatttatccacctttatcctcaaaaactggtcagccaggacctgcgatggacttagcgattttaagcttacacgtggcaggagcttcttcaattttaggagcaattaattttatcacaacaattttaaatatgagaactcctggtatgactttacataaaatgccactattttcatggtcaatcttagttacggcatttttacttttattgtcactaccagttttagcaggagctataacaatgcttttaacagatagaaattttggaaccgctttctttgaagcacaaacaggtggagatccagttctattccaacatttgttttggttttttggtcatccagaaggtatacattttaattttgcccaggctttggaatgat

SEQ ID NO: 225398 - DNA, 622 bp, Unknown
  Bacterial polypeptide expressing nucleotide sequence isolated from the Sargasso Sea
gtggtttcgtgacattatcaaagaaggggaacatgatggccatcattctgaagttgttcagttggggcttagatatggcatgactttgtttatagcgtcagaggtaatgttttttgttgcatggttctgggcttattttaatgcgtcattgtttcctacagaacaaattggttcagcatggccaccagcagacattcacttaatggacccgtggcatattcctcttataaatactcttatactattactatctggcactacacttacatgggcacatcacgcacttcaagaaggccatagaaaagaagttattcaaggtctcattctcacaattatattaggcgttatctttactggatttcaagtttatgagtatatgcatgcagaatttgaattttcaggtcatatatatggtgccacattttatatggccactgggttccatggtgctcatgttctaataggaacgcttttcatagttgtatgcttgggaaggatgcttgctggccatttcaaatctgatcaccattttgggttcgaggcttgtgcatggtattggcatttcgttgatgttgtttggctattcttatttgcagcaatatatgtttggggctattactaa

SEQ ID NO: 225399 - DNA, 855 bp, Unknown
  Bacterial polypeptide expressing nucleotide sequence isolated from the Sargasso Sea
aatgtcatctattactgcagactcacactgtcatacaccaacgggttggaaaagatgggcgtattcaactaaccacaaagacattggtacgatgtatttaatttttgctatcatagcaggattaattggttctgctttttcagttttgatgagaatggagctaatgtatccaggagatggtatactaggaggaaatcaccatttatataatgttttagttacaggacatggactaatcatgatttttttcatggtcatgcccgcaatgataggtggatttggaaattggttcgtccctattatgattggcgcaccagatatggcatttccgcgaatgaataatatttcattttggttattgccagtgtctttaatattattactcgcatctatttttgttgatggtcctccaggtcaaactggagtaggaggtggttggactatttatcctccgttatcttctaagacaggtcaacctggtccagcaatggatttagcaatattgagtttgcacatagcaggggcatcctcaattttaggagcaattaactttataactacaattttaaatatgagaactcctggaatgacactacataaaatgccgttgtttgcttggtcaattttggttacagcatttcttcttcttttatcacttcctgttttagcaggtgctattactatgctattgactgatagaaactttggaacagcattttttgaagcacaaacgggaggagacccggttttatttcaacacttattctggttttttggacacccggaagtatacatattgatcttacctggttttgggatgataagtcatattgtttcaacattttcaaagaaacc

SEQ ID NO: 225400 - DNA, 907 bp, Unknown
  Bacterial polypeptide expressing nucleotide sequence isolated from the Sargasso Sea
atgtatacacagacggcatcacacgacgatcatcatacaccaacaggttggaaacgttgggcatattctacaaaccataaagatataggtacaatgtatttaatttttgcaattgtagcaggtgttataggtacagcattttcagttttaatgagaatggagttaatgcacccaggtgatggtattttaggtggcaactaccatttatacaacgtattggtaactggtcatggtttaattatgattttctttatggtcatgccagctatgattggtggttttggtaattggttcgtaccaattatgataggtgcacccgatatggcatttcctagaatgaataatatttctttctggttattaccagtgtcattaactttattaattttatcaatttttgctgacggccctccaggacaaacaggagttggtggtggttggactatatatcctccattatcatcaaaagcaggtcaaccaggtccagctatggatttggcaattttaagtttacacttagcaggtgcttcatcaattttaggagcagtaaactttattactacaattttaaacatgagaactccaggtatgacattacataagatgcccttatttgcttggtcaatattagttacagcatttttattattgttatctttaccagttttagcaggcgcaattacaatgttgttaactgatagaaattttggaactgcatttttcgaagctcaaactggaggtgatccagttttatttcagcatctattttggttctttggtcatccagaagtttatattttaattttacctggttttggaatgattagtcatattgtttcaacgttttctaaaaaaccggtttttggttatttaggtatggcatatgcaatggtggcaattggaatag

SEQ ID NO: 225401 - DNA, 867 bp, Unknown
  Bacterial polypeptide expressing nucleotide sequence isolated from the Sargasso Sea
aaaactccccttttcccctggtcaatagtagtgacggccttccttatacttctttcgctacctgtacttgccggggcgataacaatgcttctaaccgatagaaattttggtactacattttttgatcccgctggaggtggtgatcctgtattgtatcagcacttgctatggttttttggccaccctgaagtttacatgattgttattcctggttttggaatagtaagtcatgttatttcaacattttcaaaaaagccagtattcggatatttaccaatggtttatgcgatgatagcaattggggcattaggctttgttgtatgggcacatcatatgtacacagtaggcatgtccgttacacaacaagcatactttatgctagcaacaatggttatagcggttcctacaggaataaaaatattttcgtggatcgctacgatgtggggtggatcagttgaatttaaaacaccaatgctgtggtctataggctttctatttcttttcacagtaggtggagtgacaggtatagttttgagccaagcggggattgatagagcatatcatgacacttattatgtggtagctcactttcattacgttatgtctttaggtgcagtcttttgtattttcgcaggtatatattactggattggtaaaatgtctggtcgtcagtatccagaatgggcaggcaaactacacttttggacaatgtttattgggtcaaacatcacgtttttcccacaacattttcttgggagacaaggtatgcctcgacgatacatagattacccagagcaatttgcattgtggaattatgtgtcatctattggggcttttatatcttttggatcgtttatatttttcttt

SEQ ID NO: 225402 - DNA, 253 bp, Unknown
  Bacterial polypeptide expressing nucleotide sequence isolated from the Sargasso Sea
agtaacgggagtagttcttgctaacgcaggaattgaccactcacttcacgatacttactatgtggttgcccattttcactatgttttatcaatgggtgctgttttttccatatttgcagcattttattactggtttggtaagatgacaggttacaactattctgaattgcttgggaagattcatttctggatatcttttattggtgtgaatttaatcttcttccctcaacatttcttggggcttgcatgtatg

SEQ ID NO: 225403 - DNA, 753 bp, Unknown
  Bacterial polypeptide expressing nucleotide sequence isolated from the Sargasso Sea
gacattggaactctttacataatatttgcactaattgctggtttaataggtggttttttctctttacttatgagagctgaacttgctgctccaggattagatatagtagctgacgggcaagtttggaatgtaattataactgcacatggacttctaatggttttctttgttgtaatgccagctttaattggtggatttggaaattggtttgttcctataatgataggcgctccagatatggcgtttccaagaatgaataattttagtttttgggtgcttgtacctgctttagtacttttagtagtttctgctacaattggaacaggtgcaggaactgggtggacaatatatccacctttatcaaataaattaggtcatgctggcccatctgtggatatggctatatttgctttacatcttgcaggagcatcatcaatattaggtgcagttaattttataacaactattcttaatatgagaactcctggaatgacgttacataaaatgccactttttgtatgggcaatgttaattactgcttttcttttattacttgcggttcctgtgcttgctggagcaataaccatgcttttgactgatagaaattttggtacaacctttttcaatccagcaggaggaggtgatccagttttatttcaacatttgttctggttttttggacacccagaagtctacatcatgatacttcctgcttttggaattgtaagtcaggtaatatcgactttttcacga

SEQ ID NO: 225404 - DNA, 826 bp, Unknown
  Bacterial polypeptide expressing nucleotide sequence isolated from the Sargasso Sea
atgtatacacaaacagcatcacacgacgatcatcatacaccaacaggttggaaacgttgggcttattctacaaatcataaagacataggaacaatgtatttaatttttgcaattgttgcaggagttattggaactgcattttcagttttaatgagaatggaattgatgcatccaggagatggaattttgggtggaaattatcatttgtataatgttttagtgacaggtcacggactgataatgattttctttatggtaatgccagccatgattggtggctttggaaattggtttgttccaattatgattggtgcacctgatatggcattcccgcgaatgaataatatttctttttggttattacctgtttcattaacattattgatattatcaatttttgctgatggccctccagggcaaactggagttggaggtggatggacaatatatcctcctttatcatcaaaagctggtcaaccaggacccgcaatggatttagcgattttaagtttacacttggctggagcttcatcaattttaggagctgtaaattttatcacaacaattctaaatatgagaactcctggaatgactttacataagatgccattgtttgcttggtcaattttagttacagcttttttattattattgtctttaccagttctagcaggagcaataacaatgttattaactgacaggaactttggaaccgcctttttcgaagctcaaactggaggagatccagttttatttcaacatttattttggttctttggtcatccagaagtttgtattttaattctaccaggatttggaatgataa

SEQ ID NO: 225405 - DNA, 589 bp, Unknown
  Bacterial polypeptide expressing nucleotide sequence isolated from the Sargasso Sea
tttagcagttccttggttggctggtgaaggttctaaggtagccgcaattgcggctattgaactgtggccagcgtttgaatcctcatggccagttatgacgactcctgatcaaggaaatgaatatgatttagcagataaaaatatggcatggccaggatggagtaaagcacttcaatggttacctctttggaatacaatagtgcttttaagttcttcttggactgttcacttggcgcatctcggtttaaaaaagggaaatagaaaaaaatttaatgtttatcttggtataacagttttcttagctttaatttttgttgggttgcaggctctcgaatattacgaagcctacgcacattatggtctcaagttaaattcaggtatttatggctctacattttttatgttaactggcttccatggttttcatgtcatgatgggtggctttatgttgggaattatgttggcaagatcagtatttgcaggtcatttcgaacagcatgatcattttggttttgaggctgcatcttggtactggcattttgtagatgttgtttggctaatgctctttctattcgtttatattttatag

SEQ ID NO: 225406 - DNA, 886 bp, Unknown
  Bacterial polypeptide expressing nucleotide sequence isolated from the Sargasso Sea
tttggaactagtttttttaacgcagcaggtggaggggatccagtactgtttcagcatgtattctggttttttggacaccctgaagtttacataatgattcttccagcttttggtattgtttctcatataattgaaacattctctagaaaaccaatttttggctattcatctatggtttatgcaatggcctctatagccatcttatctttcgtggtttgggcgcaccatatgtttactgttggtatgccgcttgctggacagttattctttatgtactcaactatgttgatagctataccaacaggagtgaaggtatttaattgggtagcaactatgttcaagggttcaataagttttgaaactccaatgttattttctattgcttttgtagcattatttacaataggaggattttctggactaatgctagccatagtgccggctgatttccaatatcatgatacgtattttgtagtggcacactttcattatgttcttgttccaggagcattgtttggaataatagctggagcttactattggttgcctaaatggactggtaatatgtatgatgaatttttaggcaaacttcatttctggcttactttcatctcggtaaatgtaacttttttccctatgcattttgtagggttagcaggaatgccaaggagatatccagactacgcacttcaatttgcagattttaatgcattaattagtgttggagcctttatgtttggcctaactcagctcctttttcttttcatagttattaaatcaataagaactggaaagaaagctaagcctgaagtatgggaaggtgccggagatcttggattagagtggactttaagctcgccacctccttaccactcgtttactattc

SEQ ID NO: 225407 - DNA, 667 bp, Unknown
  Bacterial polypeptide expressing nucleotide sequence isolated from the Sargasso Sea
tattttttagctgctacaatgattatcgctgtgccaacaggaataaaaattttttcatggatagcaactatgtggggtggatcaatttcatttaaaacaccaatgatgtgggctttaggcttcatatttatgtttacagttggcggagttactggtgtcgtcttagctaacgcaggagtggatactgcaatgcatgatacttattacgttgttgctcattttcattatgttttatctttaggggctgtcttcgcaatttttgcaggtttttactattggttttcaaaaatgtctggatatgaatactctgaatggatgggccatttacatttttggctgacttttattggtgtaaatttaattttctttccacaacattttttaggtttagcaggtatgccgagaagatatgcagattatcctgatgcgttcgctggctggaactacatttcttcaataggttcttatgttgctgttgctggtttagctgtattttttatcaacttaatttatgcctttgcaaagaagaaatctgcttcaaagaacccatggggagaaggtgctacaactttagaatggacagtgccatcaccaccaaatttccatacttttgaagaattgcctaagtttgaggatgaccaagagacacaaaaatcacatagctaat

SEQ ID NO: 225408 - DNA, 469 bp, Unknown
  Bacterial polypeptide expressing nucleotide sequence isolated from the Sargasso Sea
atgagtacagtaactacacatacacacgatcatcatacgccaacaggttggaagagatgggcatactcaactaatcacaaagatataggaacaatgtatttaatctttgcaatcattgcaggcgtcataggtacagctttttctgtagtaatgagaatggagttaatgcacccaggcgatggaatattaaatggcaactatcacctatataacgtactagttactggacatggattaatcatgatcttcttcatggttatgccagcaatgattggtggatttggtaattggtttgttccaattatgattggcgcgcctgatatggcatttccaagaatgaataatatttctttttggttattaccagtttcatttattctattaatcgcatcaatatttatggatggtccccccaggtgccaaaggagtaggaggtggatggactatatatcctcctttatcatctaaa

SEQ ID NO: 225409 - DNA, 408 bp, Unknown
  Bacterial polypeptide expressing nucleotide sequence isolated from the Sargasso Sea
tatgtatacacaaactatatcaaacgatcatcatacaccgactggttggaaacgttgggcatattctacaaatcataaagacattggaacaatgtatttaatttttgctataattgctggagtaattggtactgcattctctgttttgatgagaatggaattgatgcatccaggtgatggtatattaggtggtaactatcatttgtataatgtattagtaactggccatggtttgatcatgatatttttcatggtaatgcctgcaatgattggtggttttggaaactggttcgtaccaattatgattggtgctccagatatggcatttccaagaatgaataacatatcattctggttgttaccagtatcactaacgttgttaatattatcaatttttgttgacggccc

SEQ ID NO: 225410 - DNA, 839 bp, Unknown
  Bacterial polypeptide expressing nucleotide sequence isolated from the Sargasso Sea
tcttcatgctgccggcggcggtgatccagttttatttcaacatgtcttttggttctttggtcatccagaagtctatatcatgatcttaccagctttcggtattgtttctcatatcattgagaccttctctagaaaaccaatttttggatattcttctatggtttatgctatggcttcaatagccattttatctttcgttgtctgggcccaccatatgtttacggtcggtatgccactagcaggagagttattcttcatgtactcgacaatgctaattgctattcctaccggcgtgaaagttttcaattgggttgcaacaatgtttagaggctcaattacatttgaaacaccaatgttattctcaattgcttttgtggctttgtttacaattggtggattctcaggattaatgcttgcaatagtacctgcagacttccagtatcacgatacttactttgtagtggcccactttcactatgttctagtgccgggcgcactatttggaataatagctgctgcatactactggctacctaagtggacaggaaatatgtacgacgagactcttggaaaactacatttttggctaacatttatatccgtaaatgttactttcttcccaatgcattttgttggattagctggaatgcctagacgatatcctgactatgcactgcagtttgcagacttcaatgctttaataagtgttggtgcctttatgtttggcataactcagcttttattcttatttattgttattaaaacaatcagatcaggcaaacaagctaagcctgaggtttgggaaggtgcaggagatttaggtctggagtggacgttaa

SEQ ID NO: 225411 - DNA, 778 bp, Unknown
  Bacterial polypeptide expressing nucleotide sequence isolated from the Sargasso Sea
agtttttggatatttaggaatggcttacgcaatggttgcaattggaatagttggttttgttgtttgggctcaccacatgtatacagttggtttaagtacagatacaaaagcatactttttagctgcaacgatgatcattgcagttccaaccggtataaaaatattttcatggatagcaactatgtggggcggatcaatttcatttaaaacaccaatggtttgggctctaggttttatatttttatttactgtcggtggagttacaggtgtagttcttgcgaatgctggtgttgatactgcaatgcatgatacatattatgttgttgctcattttcattacgttttatcattaggagctgtgtttgccatcttcgctggtttttattactggtttggaaaaatgactggttacgagtattcagagtggatgggtcaattacacttctggttaacgtttattggagtaaacttagttttcttcccacaacactttttaggccttgcaggaatgccaagaagatatgctgactatccagatgcttttgcgggatggaattacatctcttcaattggttcttatatttctgtaattggattagtagtattttttataaaccttgcttatgcgttttataagaaaaaggctgcagcacaaaatccatggggagaaggcgctacaactttagaatggactgtaccatctccacctaattttcatacttttgaagaattaccaaaatttgaagatgaagagggtgttgaaaaatctactagctaa

SEQ ID NO: 225412 - DNA, 829 bp, Unknown
  Bacterial polypeptide expressing nucleotide sequence isolated from the Sargasso Sea
ctaatatttgcaattatcgcaggtgtgattgttactgcattctcagttttaatgagaatggaattgatgcatcctggtgatggaattttaggtggaaactatcatttatataatgtcttagtcactggtcatggtttgatcatgatcttctttatggtgatgccagcaatgattggtggatttggtaattggtttgttccaattatgatcggcgctccagacatggcatttccaagaatgaacaatatttcattctggttactacctacatcttttatcttattaataatgtcgattttcatggatggccctccaggtcaaacaggtgttggtggtggatggactatttatcctcctctatcatctacagctggtcaaccaggtccagcaatggattttgcaattttaagtttacacctagctggagcctcttcaattttaggtgcagtaaactttattactacaattttaaacatgagaacacctggcatgacacttcataaaatgccattatttgcttggtcaatactagtaacagctttcttattattgttatcattaccagttttagcaggagcaattacgatgcttcttacagataggaattttggaacagctttctttgatgcacaaactggaggagatccagttctattccaacatttattttggttctttggtcacccagaagtttatattttaattttaccaggttttggaatgatcagtcatattgtttcaacattttctagaaaaccagtttttggatatttaggaatggcttatgcaatggttgcaattggaatagttggttttgttgtgtgggctc

SEQ ID NO: 225413 - DNA, 916 bp, Unknown
  Bacterial polypeptide expressing nucleotide sequence isolated from the Sargasso Sea
aatcatgattggcgcaccagatatggcatttccaagaatgaacaacatttctttttggttgttaccagtttcgttgacgttattgatcctgtcaatttttgttgatggtcctccaggtcaaacaggtgtgggcggtggatggactatttatcctccattgtcatctaaagcaggtcaaccaggtcctgctatggatttagcgattttaagtttacacttagcaggagcttcatcaattctgggagcagtaaactttatcactacaattttaaatatgagaacaccaggaatgactttacataaaatgcctttatttgcctggtcaattctagttacagcttttttattattgttatctttaccagttcttgcaggtgcaattacaatgttattgacagatagaaattttggaacagctttctttgaagctcaaactggaggagatccagttttatttcaacatttattttggttctttggtcatccagaagtttatattttaattcttccaggttttggaatgatcagtcatattgtttcaacgttttctaaaaaaccagtttttggttatttaggtatggcttatgcgatggtagcaatcggaattgtaggttttgttgtgtgggcacaccacatgtacacagtaggtttaagcacagatactaaggcgtatttccttgccgcaactatgattatagctgttccaaccggtattaaaattttttcatggattgctacgatgtggggtggatcaatatcatttaaaacacctatgatgtgggcattaggatttatatttatgttcacagttggcggggtaacaggtgttgtattggcaaacgcaggtgtagatactgcaatgcacgacacttattatgtagttgcacactttcactatgttttatctttaggtgca

SEQ ID NO: 225414 - DNA, 828 bp, Unknown
  Bacterial polypeptide expressing nucleotide sequence isolated from the Sargasso Sea
aatgagtacagtagtagaatcacacgatcacggacatcacggacctgcaaaaggactttctagatggctgttcacaactaatcataaagatataggaacgctatacctttggttcagtttcatcatgctcttcataggcggcgcaatggctatggttattcgagctgagctatttcagccgggactacaaatagttcaacctgaattctttaatcagatgaccactaatcatggtctgatcatggtttttggagtgataatgccggcttttgttggacttgctaattggatgttgccaatgcagattggcgctcctgatatggcattgccaaggcttaataatctaagcttctggctcttacccatggcttttggaatattgatttccacattgttcatgccagaaggcggacccaattttggttggaccttctatgcaccactttcaactacttacgctccatctactgttaatttcttcatattctcagttcatgtgatgggggtttcttcgatacttggttcaattaatatcattacaactatctttaatatgagagcccctggcatgactttgatgaaaatgcctctctttgtttggagttggttgatcactgcttatttattaattgcagtaatgcctgttttagccggtgtagtaaccatgatgctcatggatataaactttggaactagcttcttcaatgctgcaggcggtggagatccagtcttattccagcacgttttctggttttttggacatcctgaggtttatatcatgatacttcctgcctttggtatcgtttcacacataattgagactttctc

SEQ ID NO: 225415 - DNA, 683 bp, Unknown
  Bacterial polypeptide expressing nucleotide sequence isolated from the Sargasso Sea
ctacgtgacgatggtgtattcgatcatggccatcgttttgttgggcctgattgtgtgggcgcaccacatgttcaccagcgggacacctccctggatgcgccttttcttcaccattgcaactgcattcatcgccgttcccaccggcatcaaattcttcaactggttggcaacactctggggcggccgcatcagcctcaacagtgccatgctgttttcatgcggcttcattgtgaacttcgtgctcggaggcatcacaggggtcgccctggcgcaggtgccgttcgacattcatgtgcacgacacctacttcgtcgtcgcgcacttccactacatagtcttcggtggatcggtgttcgtgatcttcgcctcgatctaccactggtatcccaagttcaccggccggatgctcaatgaagatctcggccgcctgcactgtgccctcacgttcatcggcttcaacctgtgcttcggccctcagcactggctgggcctcaatggcatgccgcgacgcgttgctgagtacgacccccaattcaccctgatcaatcagatcagctccatcggagccctgctgatggccattagcaccctgcctttcctatggaatgtgatccacacgcgccctgcagcggtcccgtcgcaggcgacaacccctggaaagcactcacgcccgaatggctgac

SEQ ID NO: 225416 - DNA, 562 bp, Unknown
  Bacterial polypeptide expressing nucleotide sequence isolated from the Sargasso Sea
ggtttgggctttaggatttatatttttatttacagttggaggagtaactggtgtagttctagcaaacgctggagtagatactgcattgcatgatacttattatgttgtagctcacttccactatgtattatctttgggagctgtttttgcgatatttgcaggcttctattattggtttggtaaaatgtcagggtatgaatattctgagtggatgggccaacttcatttttggttaactttcataggtgtaaatttagttttcttcccacaacacttcttaggattagctggaatgccaagaagatacgctgattatccagatgcattcgctgattggaattatatttcttcaatcggttcatatatttctgtagttggcttagtggtatttttcgctaatttaatctacgcttttgccaaaaagaaaaaagcagcacaaaacccatggggagaaggggccacaacattagagtggacagttccatcaccaccgaattttcacacttttgatgaattaccgaagtttgaagattatgaaggtactgaaaaatctagtagttag

SEQ ID NO: 225417 - DNA, 382 bp, Unknown
  Bacterial polypeptide expressing nucleotide sequence isolated from the Sargasso Sea
gctgcaacctggggcgcaccatgcaattgctcatgacgaagatagaaaatctatggtgcagggtcttgttattgcggttggcttaggtgttttgttcacaatttttcaggcttatgaatatcagcacgcagcgtttggtttttcaggaaatatatacggagcaaacttttttatggccacaggttttcatggttttcatgtgatagtaggcacaattttccttgcgatttgtatgctacgagcaatgcgtggacactttaccaaggatcagcaccttggctttgaagctgcagcttggtactggcattttgtggacgtagtatggctattcttgtttgcagctatttatgtctggggaagcgttggcgcgacaattcactaa

SEQ ID NO: 225418 - DNA, 751 bp, Unknown
  Bacterial polypeptide expressing nucleotide sequence isolated from the Sargasso Sea
cccaagtccatggcctatctacaattcaatagcttgtttagttttagcattcggtgcagtttattattttcataccaaaaccctatggcttctgttgatcggtactgctttgctgatttacggtgcttttatgtggtggagagatgtgattcaagaggccgaattcgatggtcatcatactgaagtggttcaaataggccatcgatatggaatgactttatttatagcttcagaagttatgttttttgtagcttggttttgggcatattttaatgcaagtttgtttcctacagaatcaataggcgggatttggccaccagcagatattaaaacttttgatccgtgggacatacctttgataaataccttgatacttttattatcaggcactacggttacttgggcacatcatgcaatgttagaaaatgatagaaaaagtttagtaaatggtttggtgttgactgtatttttaggatttatatttacctgctttcaagcatatgaataccatcacgctacgtttactattgacggaaacatttacggttcgactttttttatggctacaggttttcacggatttcatgttataattggaacaatttttcttgcagtatgtttgtttagatcaatgaaaggtcattcaaattcaaaacatcattttggatttgaagcagcagcctggtattggcactttgttgatgtagtgtggttattcctatttgctgcgatctatatttggggaagttaa

SEQ ID NO: 225419 - DNA, 382 bp, Unknown
  Bacterial polypeptide expressing nucleotide sequence isolated from the Sargasso Sea
aatggcagatataacggcagatcagatagacagtcacgaccatcatccaactggctggagaagatacctatactcaacaaatcataaagatattggaactctctatttaatttttgctgttatagcaggtttagtaggaactggtatgtctgttcttatgaggatggaactaatgtatcctggggacgggatattgggaggagaccataatttatataatgttttagttacaagtcatggtttactcatgattttctttatggttatgccagctatgattggtggttttggaaactggattgtaccgcttatgattggcgctccagatatggctttcccacgaatgaataacatctctttttggttattgcagcatcactaa

SEQ ID NO: 225420 - DNA, 619 bp, Unknown
  Bacterial polypeptide expressing nucleotide sequence isolated from the Sargasso Sea
gttggtgatcatacgccagtagttttgattggtttaaggtacggcttcattctttttattatgtcggaagttatgttctttcttgcgtggttctggagtttttttaagcatgcaatgtatccaatgggtgatatgagcccattgcaggatggtcaattcccccccgctggcatagaggtttttgacccttggcatctaccactaattaatactttaattttgttgtgttccggagcagctgcaacctgggcgcaccatgcaattgctcatgacgaagatagaaaatcgatgatacaaggtcttgccgttgctgtggggttgggcgttctgtttacagtttttcaagcgtatgaatatcaacatgctgcgtttggcttctcaggaaatatctatggagcaaactttttcatggctactggttttcatggatttcatgtgattgttggtacaatatttttagccatatgcatgttgcgtgctatgcggggtcattttactaaagatcaacatctcgggtttgaagctgccgcatggtattggcactttgttgacgtagtatggttatttttgtttgccgctatttacgtgtggggaagcgttggcgcaacaattcactaaa

SEQ ID NO: 225421 - DNA, 673 bp, Unknown
  Bacterial polypeptide expressing nucleotide sequence isolated from the Sargasso Sea
atgtcagcagaaaaaaaacacgattaccacttagttgatccaagcccttggccaatttatacatcttttgcatgcttagtattagcaataggtgcaattttttatatgcataatggtatttcctggggaatgtatcttggtttagctttgttaatttatggtgcctacatgtggtttagagatgtagttattgaagccgagcatcaaggtcatcatactcccgttgttcaaattcatcatagatatggaatgactttatttattgcttctgaggtaatgttctttgttgcatggttctgggcttactttgatataagtttgtttccaaatgaatttgttggaaatgtatggccaccaaaagatattgaaacatttgatccttgggacattcctttaataaacactctggtattattattatcaggaacaactgttacttgggctcatcacgctttattagaagacgatagaaaaggatttatacaaggtttaacactaactgttattcttggtttcttttttactttattgcaagcatacgagtatcatcatgctacttttacttactctggccatatttatggagctgtattttatatggcgacaggttttcatggttttcacgtcataattggaacaatatttttagccagtatgtttgtggagaggaaga

SEQ ID NO: 225422 - DNA, 826 bp, Unknown
  Bacterial polypeptide expressing nucleotide sequence isolated from the Sargasso Sea
tatgtatacacaaactgcatcacacgacgatcatcatacaccaactggttggaaacgttgggcctattcaactaatcacaaagatatcggtacaatgtaccttatatttgcaattgttgcaggtgtgatcggaactacattctcagttttgatgagaatggaattgatgcatccaggtgatggaattttaggtggaaattatcatttatataatgtcttagttacaggtcatggtttaatcatgattttctttatggttatgccagcaatgattggtggttttggaaattggtttgtaccaattatgattggtgcacccgatatggcattcccaagaatgaataacatttcattttggttgttaccaacttcattcattttattaattatgtctatatttatggatggccctccaggtcaaacgggagttggtggtggatggacaatctatcctcctttatcatctacagcaggacagcctggtccagctatggactttgcaattttaagtttacacttagcaggagcgtcttcaattttaggagcagtaaactttattactacaattttaaatatgagaacccccggcatgacactgcataaaatgcctttatttgcttggtcaattttagttacagcgttcttgttacttttatcacttccagtattagcaggtgcaatcacaatgctattaacggatagaaattttggaactgcattctttgatgctcaaacaggtggagatccagtattgtttcaacacttattctggttctttggtcatcctgaagtatatattttaattttaccaggttttggaatgatt

SEQ ID NO: 225423 - DNA, 911 bp, Unknown
  Bacterial polypeptide expressing nucleotide sequence isolated from the Sargasso Sea
catgcctctaatgataggtgctcccgatatggcatttccacccttgaacaatctgtcctactggttgtacgttacaggatccaccctcgcaatatgctcaatacttgctccggggggcaatggacaatttggctcgggggttggctgggtcctttatgcacctttatcaaccagtgagcaaggtatgtcgatggatttggctatctttgcaattcacgtatctggagcgtcgtccattttgggcgcaataaatatgatcactacttttctgaacatgcgagcgccggggatgacacttcataaaacgccattatttccttggtccatcgtaataactgcatttcttatcttactttccctacctgttttggctggagcaataacaatgttattaacagaccgaaattttggaacaaccttttttgatccagccgggggaggagacccagttctttatcaacatttactatggttttttggacacccagaagtttacatgttgattgtacctggatttggaattgtaagccatgtgatatccacgttttcaaaaaaacccatttttggatatttgccaatggtctatgctatgatagctataggcgcacttggtttcgtagtttgggctcatcatatgtacacagtcgggatgtcagtcacgcagcaagcctattttatgttagccaccatggttatagcggttccgactggcattaagattttttcttggatagcgacaatgtggggcgggtcagtagaatttagaacgccaatgctgttcgcaattgggttcttgttcctattcaccgttgggggtgttactgggatagttttaagtcaagccggagttgatcgtgcttaccacgacacctattatgttgttgctcatttccattacgtgatgtctctgg

SEQ ID NO: 225424 - DNA, 316 bp, Unknown
  Bacterial polypeptide expressing nucleotide sequence isolated from the Sargasso Sea
actggttggattagacacagatacaaaagcttacttcttagctgcaaccatgattatagcagtgccaacaggtataaagattttctcttggatagcaacaatgtgggggtggttcaataagttttcaaactcctatgttatgggctatcggttttatttttcttttcactttagggggagtaacaggagttgttttagcgaatgcaggtgtcgataccgcacttcacgatacttattatgttgtagcacatttccattacgtattatcaatgggtgctgtgtatgcaatatttgcaggattttattattggtttag

SEQ ID NO: 225425 - DNA, 778 bp, Unknown
  Bacterial polypeptide expressing nucleotide sequence isolated from the Sargasso Sea
tggggtattttcacagctacggtgttggctatgtttgcattcccagctcttcttgtgagtgcaataatgatgattttagacaagacacttatgacaagtttctttatgcccgcattagtagagatgggtgaacaattaagttatggtggtggtagtccaatcttattccaacatttattttggttctttggtcatcctgaagtatatattgttgcccttccagcctttggaatagtttctgatgttttatcagttcattccagaaaaaatatttttggataccgtatgatggtatgggcgattgttgcaattggagcattaagtttcattgtttgggctcatcatatgtatgttagtggtatgcatccatattttgggtttttctttgcaaccacaacattaattatagccgttccaacagccataaaagtttacaattgggtattaacactttggaaagggaatatttctctaacagttccaatgctattttgtatatcttttataataacattccttaatggaggtttgactggcttattcctcggcaatgttattgttgatgttcctttatcagatacatattttgttgttgcacattttcatatggtaatgggcattgctcctgttcaagttgtttttgcagcaatatatcactggtttcctctaatgactggccggatgtacaatgaaacacttggaagattacatttctggttcacctttctagggtcatatttaatttatttcccaatgcattacctaggattgattggag

SEQ ID NO: 225426 - DNA, 666 bp, Unknown
  Bacterial polypeptide expressing nucleotide sequence isolated from the Sargasso Sea
ccgttggattggatgttgacacaaaggcttattttaccgccgcaacaatggttattgcagtacccaccggcgttaaaattttctcttggatagctacgatgtggggtggatctattacttttagaatcccgatgttatgggcaattggttttatttttcttttcactgtcggaggtgttacaggagttgtgttagcgaatgccggcgtggatataatgctgcataacacctactatgtgattgctcattttcactacgttttatcacttggtgcagtgtttggtattttctgtggattttactattggttcgcgaaaatgactgggtataattataacagcactctagcgtcgctgcacttttggctaacgtttattggcgttaacgtgacatttttcccacagcatttcttgggattggccgggatgccgcgccgttatatagattatccagaggctcttcatggatggaatatggtatcctcatatggggcatatgtggcgggtttaggcactctggtctttgttgtccttataatagaggccttcattaaaaagagagccgcggaaaataatccatggggtgaaggtgcaactactcttgagtggactttgtcttcccctccaccttttcatacttacgaggacttgccgcgcgttaactaat

SEQ ID NO: 225427 - DNA, 577 bp, Unknown
  Bacterial polypeptide expressing nucleotide sequence isolated from the Sargasso Sea
tggcgtgatattgttcgtgaatcaacgttagaaggtcatcatactaatattgttcagcttggtttacgttacggtatgatactatttattgtctctgagattatgttttttttcgcctttttctgggctttctttgctgccgcactagcacctgttattgagattggttctatatggcctcctaaaggaattgacgtttttgacccgattgaagtcccgttattaaacacgctgattcttttatgttccggtgcgaccgttacttattctcatcatgctattacttgcggcaacaaaattgaagctgtcttggggctagttttaaccgttgttttagccgcgatttttacaggttttcaaggttttgaatacgttagtgcttcttttactatttcagacggtatttatggttctactttttatatggctaccgggtttcatggttttcacgttttaattggcaccatttttctaacagtttgtttaattcgtttaattcgtgaccactacacaatccagcaccattttggttttgaagctgcagctttttattggcatttcgttgacgttgtctgat

SEQ ID NO: 225428 - DNA, 827 bp, Unknown
  Bacterial polypeptide expressing nucleotide sequence isolated from the Sargasso Sea
tatgcttctaacagatcgaaattttggtactgcattttttgatgcacaaacaggtggagacccaacattattccaacatttattctggttttttggtcatccagaagtgtatattctaatcttgcctggatttggaatgatcagtcatatcgtatctactttttcaaaaaagccagtttttggatatttaggaatggcttacgcgatggtagcaattggaattgtcggttttgttgtttgggctcaccacatgtacacagttggtttagatactgatactaaagcgtatttcttagcagcaactatgattatcgctgttccaacaggaattaaaatattttcatggatagctacaatgtggggaggatctatatcattcaaaaccccaatggtttgggccttaggatttatatttttatttacagttggaggagtaactggtgttgttctagcaaacgctggagtagatactgcattgcatgatacttattatgttgtagctcacttccactatgtgctgtctttaggggctgtttttgcaatatttgcaggcttctattattggtttgggaaaatgtcagggtatgaatattctgagtggatgggtcaacttcatttttggttaacttttattggtgtaaatttagttttctttccacaacatttcttaggattagctggaatgccaagaagatacgctgattatccagatgcatttgcagactggaattatatctcttcaattggttcatatatttctgtagttggcttagtggtatttttcgctaatttaatctacgcatttgcaaaaaagaaaaaagcagcac

SEQ ID NO: 225429 - DNA, 613 bp, Unknown
  Bacterial polypeptide expressing nucleotide sequence isolated from the Sargasso Sea
atgtacacacaaacggcatcacacgacgatcatcatactccaactggttggaagcgttgggcttattcaactaaccacaaagatattggaacaatgtatctaatatttgcaattattgcaggtgtgattggtactgcattctcagttttaatgagaatggaattgatgcatccaggtgatggaattttaggtggcaattatcatttatataacgtcttagttactggtcatggtttaataatgattttctttatggttatgccagcaatgataggtggctttggtaactggtttgttccaataatgattggcgcacctgatatggcttttcctagaatgaataatatttcattctggttgctgccaacatctttcatattattaataatgtcaattttcatggatggccctccgggtcaaacaggagtaggaggtggatggacaatatatcctccattgtcatctacagctggacaaccaggtccagcaatggattttgcaattttaagtttacacttagctggagcttcttcaattttaggtgccgtaaactttattactacaattttaaacatgagaacaccaggtatgacattgcataaaatgccattat

SEQ ID NO: 225430 - DNA, 922 bp, Unknown
  Bacterial polypeptide expressing nucleotide sequence isolated from the Sargasso Sea
attctaccagtattctcgagaaagccacttttcggttattcagtaatggtttactcaatgtgcgcaatcggtttcttaggtttcgcagtttgggctcaccacatgtttacaactggacttggagcctgggcgacagctttctttgcgacagcaaccatgctgattgctattccaacgggtgttaaaatctttaactggatttccacactgtggggcggtcacattaaatttacaacggcttcattattcggaattagtttcatttgtatgtttacactaggtggactttcaggcgtaatgcacgcttctcctcctattgattatcaccatcaagatacttacttcgttgttgctcacttccactatgtactttatggcggtgcggtaatggctctattcggtggtctattctactggtggccaaaagtattcggtaaaatgctttctgaaccaatgggtaagatccagttctggctatacatgattggtttcaacatgactttcttcccaatgcatttcctaggtcttcaagggatgccaagaagaaactatacttacgcaccagatcaaggctgggaattctggaaccttgtttgtactcttgggtcttacattactgctcttggagctctagtattcgtagtgaacgtagtatggacttacttcaaaggcgaaaaagcacctcacgatccatgggatggtagaactcttgagtggagcttaagctctcctcctcctgagtataactttgctgttgatccagaagtaaaagctactgatgattggtggagaattaagtatgtaaacggtcaaaagatcgataacgttccttatcaaccagaaattgatccagctacgaagcatcttcaaaacccaagtttctggccactaattttagcagctggtatcacagggattgctt

SEQ ID NO: 225431 - DNA, 853 bp, Unknown
  Bacterial polypeptide expressing nucleotide sequence isolated from the Sargasso Sea
tttgggacagctttttttgatgcacaaactgggcggagacccagttttattccaacatttattttggttctttggtcacccagaagtttatattttaattttaccaggttttggaatgatcagtcacattgtttcaacattttctagaaaaccagtttttggatatttaggaatggcttatgcaatggtagcaattggaatagtaggtttcgttgtttgggctcaccacatgtatacagttggtttaagcacagatactaaagcatactttttagctgcaacgatgatcattgcagttccaaccggcataaaaatattttcatggatagcaactatgtggggtggttcgatttcatttaaaaccccaatggtttgggctttaggatttatatttttatttactgttggtggtgttactggtgtagttctagcaaatgctggagtggatactgcaatgcatgacacttactatgtcgttgcgcactttcattacgtactatcattaggagctgtatttgccatctttgctggtttttattactggtttggaaaaatgactggttacgagtactcagagtggatgggtcaattacacttctggttaacgtttattggagtaaacttggttttcttcccacaacactttttaggccttgcgggaatgccaagaagatatgctgactatccagatgcttttgcaggatggaattatatttcttcaattggttcttatatttccgtaattggattggtagtattttttataaaccttgcttacgcgttttataagaaaaaagctgcagcacaaaacccatggggagaaggtgctacaacattagaatggactgtacca

SEQ ID NO: 225432 - DNA, 475 bp, Unknown
  Bacterial polypeptide expressing nucleotide sequence isolated from the Sargasso Sea
agcaatgcaggaatagatacagttatgcacgacacttactatgttgtagctcacttccattatgttttaagcatgggtgctatgtttggaatatttgcaggtatttattattggtttggtaaaatgtctggacgtaaatataatgaattctttggaaaagttcatttttggttattttttattggagttaatgtaacattttttcctcaacactttttaggattagcgggaatgccaagaaggattccagattatcctgatgcatatgctggatggaatcttgtatctacttatggatcttacatctcatttgcggcaactcttattttcttttttgcaattttatacgcttttttctttggaaaaaaagaagttgctaatccatggggagaaggtgcagatacattagaatggacattgtcttcacctccacctttccatcagtttgagactcttccaaaatttaaagattaaa

SEQ ID NO: 225433 - DNA, 790 bp, Unknown
  Bacterial polypeptide expressing nucleotide sequence isolated from the Sargasso Sea
atgtcagctgaaaaaaaacatgattatcacttagtagatccaagtctttggccaatctatacttcttttgcatgcttagttttagcattgggagcagtttattatatgcattcagatgtatcatggggaatgtatttgggttttgctttattaatttacggagcctacatgtggtttagagatgtagtgatcgaagctgagcatcaaggacatcatacaccagtagttcaaatacatcatcgttacggtatgacattatttatagcctcagaggtaatgttttttgttgcatggttttgggcttattttgatgtgagtctttttccaaatgaatttgtaggtaatgtttggccaccaaaagatattgaaactttcgatccttgggatattccattaatcaatacattagtattactattatcaggcactactgttacatggtctcatcatgctcttttagaagatgataggaaaggttttgtgaatggcttaatctttacagtcattcttggtgtttgctttaccgctctacaagcatatgaatatcatcatgcaacatttgctttttcggatcatatttatggatcagtgttttatatggcaacaggatttcatggttttcacgtaatagtaggaactatatttttagcagtttgtttatggcgtggaaaattaggccattttaataaagatcatcattttggttttgaagctgcagcgtggtattggcattttgttgatgttgtatggttgtttttatttgctgcaatttatatttggggaagttaat

SEQ ID NO: 225434 - DNA, 674 bp, Unknown
  Bacterial polypeptide expressing nucleotide sequence isolated from the Sargasso Sea
tatgtatacggttgttttgtccgtagatacaagagcatattttacagctgccaccatggtaatagctgttccaaccggcattaaaattttttcatggattgcaacaatgtggggtgggtctatagtttttaagatacctatgtactgggcaataggttttatttttctttttactgttggtggcgtaacaggtgtagtgctagccaatgctggattagatgttgtcctacataacacatactacgttattgcacactttcattatgtattatcattaggagctgtgtatggcttattcgcagctttttactattggttttctaaaatgactggatatgaatacagtgaaggtttagcaaagctccatttttgggttacgtttataggtgtgaacctaacattttttccaatgcattttttaggcttagcaggtatgccaagacgctatgttgattatcctgatgcatttgcaggatggaatatggttgcatcaattggatcttacataggagctcttggtgctataatctttttagtcgttataatcgaggcttttgtaaagaagcgaaaagctgttaaaaacccatggggttcaactgacaatactttagagtggacggtttcttcaccgcccgcatttcatacttttgctgaaataccaaaagtaaaataaa

SEQ ID NO: 225435 - DNA, 1018 bp, Unknown
  Bacterial polypeptide expressing nucleotide sequence isolated from the Sargasso Sea
atgagagcgcccgggatgacgttaatgaagatgcctatgtttgtatggacgtggttatttaccgcttttctgcttatcgcagctatgccagttttagcaggtgcaatcactatgctactaacagatagattctttgggaccagtttctttaccgcttctggcggaggcgacccagtgatgtttcaacatatcttctggttttttggacatcccgaagtctatatccttattcttcctgcttttggaatagtctctacaataattccagcattttcaagaaagaaactgtttggttatgactcaatggtatatgcaactgcatctattgccatactgtcgttcatcgtttgggctcatcatatgtttactgttggaatgccgctagcaggcgagatatttttcatgttaactacaatgttgatagccgtaccgaccggagttaaagtttttaattgggtagcaacgatgtggaaaggatcgatgacttttgaaactcctatgttatttgccctagcatttattattttattcacaataggtggtttttctgggcttatgttagctatgacaccagctgactttcaatatcatgatacctattttgttgttgcacactttcattacgtattagtaccaggcgcggtctttgcaataatagctgcagtgtattattggttaccgaagtggacaggaaaaatgtacagcgagtcactaggcaagcttcatttttggttaactactatttttgtaaacctaactttctttccaatgcattttgttggactagctggaatgccaagacgtattcctgattatcccgtccagtttgctgattttaatgcaatagcatctgttggcgcgtttggatttggcttgtctcagttacttttcgtctatatcttatacaatacgttgaaaaaagatgtaacagttgatgataaagcatgggatggagctgaaggactagaatggaccatatcttctccaccgccatatcattcgttgagaaagcacccca

SEQ ID NO: 225436 - DNA, 681 bp, Unknown
  Bacterial polypeptide expressing nucleotide sequence isolated from the Sargasso Sea
tatgagtggaaaacaaaatcatcaatatcatttagttgagcctagtccttggcctgctgttgggtctgcttcaggctttactcttgtattaggaactgcaatgtatatgcatgaatacccatacagtatttatattgtaattgtaggttttttgatgctttttgccacaatgtttttttggtggagggatgtagttagagaagctgaatttcaaggtcaccatacccctatagttcaaattggtatgagatatggtatgatgttatttatctcatcagaggtaatgtttttcgtagcctttttttgggcattttttgattcgagtctttatcctgatacaggtgtttggccaccagcggacatcaatgtatttgatccatttgatcttccattgattaatacaatgatattacttctttctggttgtactgttacatgggctcatcatgcgttacaacatgacaataggaaagattttttgacaggtttatttctgactattttactaggtgttagctttacagctttacaagcttatgagtattctcatgcagcttttggttttacagatggtatttatgcatcaacattttatatggctactggttttcatggagctcatgtcattatagggacaattttccttattgtgtgttactttagagcgttaaaaggtcattt

SEQ ID NO: 225437 - DNA, 733 bp, Unknown
  Bacterial polypeptide expressing nucleotide sequence isolated from the Sargasso Sea
atggttaataaatcaacaacaggacagaaacatccatatcacttagttgatccaagcccacttccatttttatcatcaatagctggtcttgcaatggcggctggtcttgtattttatatgcattatggaacttcttggcttcttattcttggtacaattggtttgttaactataatgtttttatggtggagagatgtaattaaagagtcaacttttcaaaaggtccatactcctgttgtagaacttggattaagatatgggatggcactatttattgcatcagaagtaatgttctttgttgcttttttctgggctttttttgatgcaagcttaacaccaaaattacctatagaagaattttcagaaacttttgatagtaatggtgcagttggaatttggcctccagagggtattaaaactttcgatccacttgatgttccttttttaaatacattaatattattaatgtctggtacaacttgtacatgggctcaccatgctgttagagaaggtcatagagatcaagccattcaggcattatggtgcactgtcggtcttggaatcttcttttcatttatgcagggagtagaatattatgaggcagcccatcattattttagctttacagatggaatatatccatcagtattttacatggctactggttttcatgagatttcatgtaatggttgggacagtatttctagctgtttgtttgtatcgtgtttataaa

SEQ ID NO: 225438 - DNA, 182 bp, Unknown
  Bacterial polypeptide expressing nucleotide sequence isolated from the Sargasso Sea
atttcatggtttccatgttattataggaactatttttttagccgtatgttggtggagagctaaaaatgacaaatataaaaaaggtgaattttttggttttgaagcagctgcatggtactggcattttgtagatgtagtatggttatttttatttgctgcaatttatatttgggggagttaat

SEQ ID NO: 225439 - DNA, 575 bp, Unknown
  Bacterial polypeptide expressing nucleotide sequence isolated from the Sargasso Sea
ggcaacaatgtggggtggttctataagctttaaaacaccgatgctttgggcgataggatttatagttttatttacacttggaggtgtaacaggagtagttttagctaatgctggagtggatacagctcttcacgatacatattatgtagttgcacactttcattacgtattatctttaggtgcagtttttgcgatatttgctggattttattattggtttagcaaaatgtcaggatatgaatattctgaatttttaggcaagttacatttctggttaacatttatcggggtaaatttaatattttttcctcaacattttctaggacttgctggaatgccaagaagatacgcagattaccctgacgcgtttgcaggttggaattacgtttcatcaattggctcatacatatcactaattggagttgcagtctttttattaaatttactttactcttttattaaaaaaagagctgcagctcaaaatccttggggagagggcgctacaactctagagtggactgtatcttcaccacctccttttcacactttcgaggaactaccaaaggtaaaataaa

SEQ ID NO: 225440 - DNA, 793 bp, Unknown
  Bacterial polypeptide expressing nucleotide sequence isolated from the Sargasso Sea
tttggaatgataagccacatagtttcaactttttcaaagaaacctgtttttggttatctaggaatggcatatgcaatggtagcaattggagtagtaggatttgttgtttgggcacatcacatgtacaccgtaggattagacactgataccaaagcttacttcttagcagcaacaatgataattgcagttcctacgggtataaaaatcttctcatggatagctactatgtggggtggttcaatcagttttaaaacaccaatgctttgggccattggttttattttcttatttactttaggaggagttactggtgtcgtattagctaatgcgggtgtagatactgcattacatgacacttactatgttgtagctcatttccactacgtactatctttaggagcagtatttgcgatttttgcaggatggtactattggtttagcaaaatgtctggctatgaatattctgagtttttaggcaagcttcatttctggttaacatttattggtgtaaatttaattttctttcctcaacattttttaggtttggctggtatgcctagaaggtatgtggattatccagatgcttttgctggatggaactatatatcttcaataggatcttatatttcacttgtaggacttttagtatttttattaaatcttctgtactcttttttaaaaaaaaggaaagcagagcaaaatccatggggagagggtgccactactttggaatggacagttacttcaccaccgccatttcatacttttgaagagctacctaaagtaaaataaa

SEQ ID NO: 225441 - DNA, 346 bp, Unknown
  Bacterial polypeptide expressing nucleotide sequence isolated from the Sargasso Sea
tcaattacacttctggttaacatttatcggagtaaacttggttttcttccctcaacactttttaggccttgcaggaatgccaagaagatatgctgactatccagatgcttttgcaggatggaattacatttcttcaattggttcttatatttctgtaattggattagtagtattttttataaacctagcttatgcgttttataagaaaaaagctgcagcacaaaacccctggggagaaggtgccacaactttagaatggacagtaccatctccacctaattttcatacttttgaagagttgccaaagtttgaagatgaagagggtgttgaaaaatctactagctaa

SEQ ID NO: 225442 - DNA, 759 bp, Unknown
  Bacterial polypeptide expressing nucleotide sequence isolated from the Sargasso Sea
aatgtcagcaacaactgcatcacacgagcatcatcacaacccaaccggttggaaacgatgggcttattctacaaatcataaagacattggaacaatgtatttaatttttgcgataattgcaggaattattggaacagctttttcagtattaatgagaatggaattaatgcacccaggtgatggaattcttggaggaaattatcatttatataacgtactagtaacgggacatggcttaatcatgattttcttcatggtgatgccagcaatgatcggtggatttggtaattggtttgttccaattatgatcggtgccccagacatggcgttcccacggatgaataatatttctttttggttattgccagttgctttaatattgttaatagcatcaattttcgtagatggccctccaggcgcacaaggcgttggcggaggttggactatttaccctcctttatcttctaagacaggtcaaccaggtcctgcaatggatttagcaatcttaagtttacacgtagccggagcttcttctattttaggagcaataaatttcataactactattttaaatatgagaacacctggtatgactttacacaaaatgccattattctcgtggtcgatattagtaacagcatttttacttttattatctctaccagttttagcaggagcaatcacaatgcttctaacagatagaaactttggaactgctttctttgaagcttcaacagggggagatccagttttattcca

SEQ ID NO: 225443 - DNA, 787 bp, Unknown
  Bacterial polypeptide expressing nucleotide sequence isolated from the Sargasso Sea
atggcttcaactatttacaactggtcatctcgatggctattttcgaccaaccacaaagatatcggtactctatacctaatctttggtggtgtttctggtgttatgggtactaccctatctatgcttatccgtgtagagctttcacaaccaggaaaccagattcttgctggaaacggtcaactttataacgtaattgtaactgctcacgcgctagttatgattttcttcatggtaatgcctatccttatcggaggtttcggtaactggatggttcctttaatgcttggtgcacctgatatggcgttcccacgtatgaacaacattagtttctggttactaccaccggcagtactacttttactagtgtcttcacttgtagagtcaggtgctggtaccggatggactgtatatcctccattatctagtgttcaggcacactctggaccttctgtagacttagcgatctttagtcttcacttagcaggtgcttcatcaattatgggtgcggtaaactttattaccactatcctaaacatgcgagctcctggtatcactatgcaccgattacctctattcgtatgggcaatcttcattactgttatcctgttactgctttctcttcctgttcttgcagcagcgattactatgttactaacagaccgtaacttcaacactaccttcttcgacccagctgggggaggagaccctgtattataccagcacctattctggttctttggacaccctgaggtatacattctaatccttcctggattcggtatggttt

SEQ ID NO: 225444 - DNA, 861 bp, Unknown
  Bacterial polypeptide expressing nucleotide sequence isolated from the Sargasso Sea
gaccacggtacgccaacggggttcttgaggtggctctactcgactaatcataaagacattggaacaatgtatctgattttctcaatcgtagcaggtttgattgggggcggaatatccatgtatatgagaatggagcttcaggatcctggtgtccaatatatggaaaatggacatgtttggaacgtgtatgtaaccgcccatggtcttattatggtcttttttgtcgtaatgccggcgttgattggtggttttggaaactggtttgtgccgcttatgataggcgcgccagatatggcatttccgcgaatgaataatattagtttttggcttttgatcccggccttcctgttgttgtttttatcaatgtttgcagatggaggcgctggagtaggttggactatctatccgcccatgtccgggaaagaagggacgcctgggatgtccatggatatggcaatattatcgctccatttggctggtgcatcttcaattttaggggcggccaatttcataacaacgatattcaacatgcgtgccccggggatgactttacaccgtatgcccttgtttgcgtggtctattctgataacggcatttttacttttgctcgcacttcccgtgcttgcgggagctatcacaatgcttctgacagatcgtaattttggaactacgttttttattccatcgggtggtggcgatcccatcttatttttgcatctgttctggttcttcggccatccagaagtttacattatgatccttccagcttttggtatagtaagccatgtgatctcgaccttttcccgaaagcctgttttcggttatctgggaatggcgtacgctatggtatcgataggtttc

SEQ ID NO: 225445 - DNA, 484 bp, Unknown
  Bacterial polypeptide expressing nucleotide sequence isolated from the Sargasso Sea
atgtatacacaaacagcatcacacgatcatcatactccaactggttggaaacgttgggcgtattctactaaccataaagatattgggacaatgtatttaatttttgcaattgttgcaggagttattggaactgctttttcagttttaatgagaatggaattaatgcatcctggggatggcattttaggtggtaattatcacttatataatgtgttggttactggacatgggttgataatgatttttttcatggtaatgccagcaatgattggtggttttggtaattggtttgtaccaattatgattggagctcccgatatggcatttccaagaatgaacaatatttctttttggctgttacctgtttcattaactttattaattttatcaatttttgcagacggacctccaggacaaactggtgttggcggtggttggacgatttatcctccatttcctcaaaagctggacaacctggaccagc

SEQ ID NO: 225446 - DNA, 814 bp, Unknown
  Bacterial polypeptide expressing nucleotide sequence isolated from the Sargasso Sea
atcagtcatattgtttcaacattttctagaaaaccagtttttggatacttaggaatggcttatgcaatggttgcaattggaatagttggtttcgttgtttgggcgcaccatatgtatacagttggtttaagtacagatactaaagcatactttttagctgcaacgatgataattgcagttccaaccggtataaaaatattttcatggatagcaaccatgtggggtggttcgatttcatttaaaactccaatggtttgggctttaggatttatatttttatttactgttggtggagtaactggtgtagttcttgcaaatgctggagtagatactgcaatgcatgatacttactatgttgttgctcactttcattacgtgctatctttaggagctgtatttgcaatctttgcaggattttactattggtttggaaaaatgtctggttacgagtactcggagtggatgggtcaattacacttctggttaacgtttattggagtaaacttggttttcttcccacaacactttttaggccttgcaggaatgccgagaagatatgctgactatccagatgcttttgcaggatggaattatatttcttcaattggttcttatatttctgtaattggattggtagtattttttataaaccttgcttatgcgttttataagaaaaaagctgcagcacaaaacccatggggagaaggtgctacaactttagaatggactgtaccatctccacctaattttcatacttttgaagaattaccaaagtttgaagatgaagagggtgttgaaaaatctactagctaaa

SEQ ID NO: 225447 - DNA, 691 bp, Unknown
  Bacterial polypeptide expressing nucleotide sequence isolated from the Sargasso Sea
tgtttgggctcaccatatgtacaccgtaggttttagtgcaaatgttagggcttattttatgctagctacaattgttattgctgtgccaactggtgtaaagatctttagttggattgctacaatgtggggcggttcaataacttttacaactcctatgttatttgcattaggatttatatttttatttactcttggtggagtaacaggtgtaattttggcaaatgcaggaattgacgtcgtattacacgatacatattacgttgtagctcacttccattacgttttaagtatgggagcggtatttggaatatttgcaggtatctattattggtttagtaaaatgagtgggaaaaattactctgagttttttggtaaattgcatttttggttattctttctaggagtaaatttaactttctttcctcaacacttcttaggactagctggaatgccaagacgtattccagattatccagatgcttatgcaggatggaatgttatatcctcaattggttcatatatatcttttgcctcatttattctttttattttcataattatttacgcattattaaaaggtaaaaaagcagaagcaaatccatggggtgagggtgcaaaaactctagagtggacactaccatctcctccaccttatcaccagtttgatacattacctgaagttaaaaattaa

SEQ ID NO: 225448 - DNA, 667 bp, Unknown
  Bacterial polypeptide expressing nucleotide sequence isolated from the Sargasso Sea
atcttttgtttttggtatgggctggtttattttttctgaagtaatgttctttgccgcattttttggggcactgttttatgtaagaaatttttcagttccatggctcggtggtgatggcgagaaaggattagctaatattctgtgggaaggtttcgaggcctcgtggcctgtgatgtcaactcctgatgctggatcagcatttgttcttgccgataaaagcatgagttggccaggttggggtaatgcattaaagtggttgccattgtggaatacaattgtacttcttagttcaagcgtaaccgttcactttgcccatcttgctctcaaaaatgataataaaaaaagttttaatacatggcttggtattactgttacccttgctttgatatttgttggattacaggctgctgagtactatgaggcatatgcacattatggtttaacacttaactctggaatatatggttcaactttcttcatgttaactggattccatggctttcacgtcatgatgggtggatttatgcttgcggtgatgctctctagatcagttttttataaccactttgatcctcataatcattttgggtttgaagcagcttcctggtattggcactttgttgatgtagtttgggtgatgttattcctttttgtttatatactttaa

SEQ ID NO: 225449 - DNA, 530 bp, Unknown
  Bacterial polypeptide expressing nucleotide sequence isolated from the Sargasso Sea
tatgtatacacaaacatcatcacacgacgatcatcatactccaacgggttggaagcgttgggcttattcaactaaccataaagatattggaacaatgtatttaatatttgcaattattgcaggtgtaattggtacagcattttctgttttaatgagaatggaattgatgcatcctggtgatggaattttaggtggaaactatcatttatataacgtcttagtaacaggtcatggtttgatcatgatcttctttatggtgatgccagcaatgattggtggatttggaaattggtttgttccaattatgattggtgcaccagatatggctttcccaagaatgaataacatttcattctggttgttacctacttcattcattttattaataatgtcaatttttatggatggccctccaggacaaactggtgttggtggtggatggactatttatcctcctttatcttctacagctggtcaaccaggtcctgcaatggattttgcaattttaagtttacacttagctggagcat

SEQ ID NO: 225450 - DNA, 448 bp, Unknown
  Bacterial polypeptide expressing nucleotide sequence isolated from the Sargasso Sea
tatggcttggcctggatgggatcatgcacttgagtggttacctctttggaatactattgttttgttaagttcaagcgtaacagttcatttcgctcacttggggcttaagaatggtgacagaaagaaatttaatagatttcttggaatcactgtaaccctggcacttatttttgtaggccttcaagcagcagaatattatgaggcatatgcccattatggattaacattaaattcaggtatttatggctctacattttttatgcttacagggtttcatggttttcatgtgatgatgggcggtattatgttagcaataatgttggcaagatcagtttttgctggacactttgaagagcatgatcattttgggtttgaagctgcctcatggtattggcactttgtcgatgttgtgtgggtcatgttgtttttatttgtatatataatttaa

SEQ ID NO: 225451 - DNA, 274 bp, Unknown
  Bacterial polypeptide expressing nucleotide sequence isolated from the Sargasso Sea
acgtccaatgatgttttacatagttgggcagttccatcattaggagttaaaaaggacgctgttccaggaagattaaatgaaacttggttcaaagcggatagagtaggaattttttatggtcaatgctcagagttatgcgggctgcgccatggttatatgccaatagaagttcatgctgtatcagaagaagattttctagcttggattgaagaggctaaagaaaaatatgctaaagttggagaagacttaaatctagcagaagtaaaagaatagt

SEQ ID NO: 225452 - DNA, 586 bp, Unknown
  Bacterial polypeptide expressing nucleotide sequence isolated from the Sargasso Sea
tatggctactacaactgattcacatgatcatacaccaacaggtttccgtcgttgggcatactctactaatcataaagatattggatctatgtatattatttttgccgttatagcaggcgttgttggcggaattatgtcaatgattatgcgaacagaattggcatatcctggagatggtatattgctggagaattttgacgctcaaatgtacaatgttcttactactgcgcatggcttgattatgatattttttatgattatgccagctatgattggtggttttggaaattggtttgttccaatcatgataggcgcaccagatatggcttttcctagaatgaataatattagtttctggttattagtacctgcctttatattgttattatctagtccgtatgtagggggaggtgcaggaacagggtggacaatttatcctcccttatcatcctcattagggcattcctctcctgccgtagatatggcgatattatctctacatttagctggtgcatcatctatattaggagctattaattttataactactatttttaatatgcgcgctcctggaatgacattgcat

SEQ ID NO: 225453 - DNA, 389 bp, Unknown
  Bacterial polypeptide expressing nucleotide sequence isolated from the Sargasso Sea
tacattaattttattgctatcaggaacaacagttacgtgggctcatcatgcaatgttagagaatgatagaaaaggattgattaatggtttgatagcgacggtgttccttggttttatattttcgtgtttccaagcctatgaataccaccatgcaacatttactatagatggtggaatttacggttctacattttatatggcaacaggttttcatggctttcatgtaatcataggaacaatatttttagcagtatgtttattcagatcaatgaaaggccactcaacaccaactcatcactttggatttgaagcagcagcctggtactggcattttgtcgacgtagtttggctattcttatttgctgcgatctatatttggggaagttaat

SEQ ID NO: 225454 - DNA, 859 bp, Unknown
  Bacterial polypeptide expressing nucleotide sequence isolated from the Sargasso Sea
ggaattatgtcaagtcacgcaccatcattttttacaagatatttttattcaactaatcacaaagacataggtgtattatatttagtttttgcgattgtagccgggctaatcggtggtattttttctcttctaatcaggatggaattagccgagcctggaatgcaaattgttggtgatgactaccaaacatacaatgtatggataacttcacacggcttattaatgattttttttatgataatgccagccatggtaggtggcttcggtaattattttgttccattactaattggtgctcctgacatggcattccctagaatgaataatttaagcttttggttgttagtaccttcactaattttacttgttggttctggctttgttgagggaggggcgggtcctgggtggacactatacgctccactttctacctcaggacatggaggaccggcagttgacatggttatattatcaatgcacctcgcaggagcttcgtcaatacttggagcaataaatttcataactacaattttcaatatgagagcaccaggtatgactttacataagatgcctctttttgcatggtcaattcttattacagccttcttacttttattatcattaccagttctagctggggccattacaatgatgttaacagacagaaattttggtaccgccttttttaaccctgaagctggaggagaccctgttttatttcagcacctattttggttttttggtcatccagaagtttacattttaatacttccaggttttggaatagtcagtcatgttgtttcaactttttcaaagaaaccaatttttggatatttaggtatggcttatgcgatggctg

SEQ ID NO: 225455 - DNA, 678 bp, Unknown
  Bacterial polypeptide expressing nucleotide sequence isolated from the Sargasso Sea
tatggctactacaactgatacacatgatcatacaccaacgggctttcgtcgttgggcttattctactaatcataaagatattggatctatgtacattatttttgctgttatagcaggagtaattggtggagttatgtcaatgattatgagaacagaattagcttatccaggagatagtatactaggtggtgactatcaaatgtacaatgttttaactactgctcatggattaattatgattttctttatgatcatgccagctatgattggtggattcggaaattggtttgttcctataatgataggtgctcctgatatggcttttccgagaatgaataatattagtttttggctattagtgccggcattcattttattattagcaagtccttatgtgggtggtggagctggaacagggtggactatttatcctccattatcttctacagtaggtcatgcctcacctgcagtagatatggcaattttatcacttcatttagctggtgcttcttcaatattaggtgcaattaattttataactacaattttcaatatgcgtgctcctggaatgacacttcataaaatgcctttatttgtttggtcaatattagttactgtatttttactagttctatctcttcctgttttagctggtgctataactatgttacttacgga

SEQ ID NO: 225456 - DNA, 542 bp, Unknown
  Bacterial polypeptide expressing nucleotide sequence isolated from the Sargasso Sea
atttttatttacagttggaggggtaactggtgttgttctggcaaacgctggagtagatactgcattgcatgatacttattatgttgtagctcacttccactatgtactatctttaggggctgtttttgcaatatttgcaggcttctattattggtttgggaaaatgtcagggtatgaatattctgagtggatgggtcaacttcatttttggttaactttcattggtgtaaatttagttttctttccacaacactttttaggattagctggaatgccaagaagatacgctgattatccagatgcatttgctgattggaattatatttcttcaatcggttcatatatttcagtcgtaggtttagtagtattttttgctaatttaatctacgcatttgcaaaaaagaaaaaagcagcacaaaacccatggggagaaggggccacaacattagagtggacagttccatcgccaccaaattttcatacttttgatgaattaccaaagtttgaagattatgaaggtactgaaaaatctagtagttagt

SEQ ID NO: 225457 - DNA, 730 bp, Unknown
  Bacterial polypeptide expressing nucleotide sequence isolated from the Sargasso Sea
aatgagcactgcagctacacatcacgatcatcacaccccaaccggatggaaaagatgggcttattcaacaaaccacaaagatattggaaccatgtatttaatctttgcaattattgcaggattaattgggactgcgttttcagttttaatgagaatggaacttatgcatccaggagatggtattctaggcggagactatcatttatataatgtcttagttactggacacggattaataatgattttctttatggtaatgccagcaatgataggtggatttggaaattggtttgtaccaataatgattggagctccagatatggcatttcctagaatgaacaatatttcattttggctactacctgttgcatttattttattattatcatcaatttttgtagatggacctcctggagcacaaggtgttggaggaggctggacaatttatccgccgctatcatccaaaacaggtcagccaggtcctgcaatggacttagcaattttaagtttgcacgtagctggagcatcttcaattcttggagcagtaaacttcataactactattttaaatatgagaactcctggaatgacacttcacaaaatgcctttatttgcatggtctattttagtaaccgcatttttattattattgtcattaccagtattagcaggcgcaataacaatgctattaacagacagaaattttggaactgcattttttgacgctcaa

SEQ ID NO: 225458 - DNA, 482 bp, Unknown
  Bacterial polypeptide expressing nucleotide sequence isolated from the Sargasso Sea
tatgtatacacagacagcatcacacgacgatcatacacctactggttggaagcgttgggcttattcaactaaccacaaagatattggaacaatgtatctaatattcgcaattattgcaggtgttattggaacggcattttctgttttaatgagaatggaattgatgcatccaggagatggtatcctaggtggcaattatcatttatataatgttttagtaactggtcatggtttgattatgatttttttcatggttatgccagcaatgattggtggttttggaaattggtttgtgccaattatgattggtgctccagatatggcgtttccaagaatgaataatatttcgttttggttgctacctacatcctttattttattaattatgtctatttttatggatggacctccaggtcaaacaggagttggaggtggttggactatttatccacctttatcatcctcagctggacaacctggtc

SEQ ID NO: 225459 - DNA, 727 bp, Unknown
  Bacterial polypeptide expressing nucleotide sequence isolated from the Sargasso Sea
ttacctggttttgggatcgtgagtcatgttgtagcaacattttctaagaaacctgtgtttggttatcttggtatggcttatgcgatggtttcaattggcttcctaggttttattgtttgggctcaccatatgtatactgttggcatggatgcggatgttaaggcttactatatttttgcaactatggtgattgcagtacctaccggcatcaaagtattttcatggattgcgacaatgtggggtggttcagtagagcttaagactcctatgttgtgggcaataggatttattttcctatttactgtgggtggagttaccggagttgttctggctaatgcaggcatagatcactctttacatgacacgtattatgttgtagctcacttccattacgtactatcaatgggtgcagtttttgcaatctttagtggtttttattactggtttggtaaaatgtttggaagtgattattctgaactattgggtaaattacacttttggttaacatttgtaggggttaatttaatcttcttccctcagcatttcttgggtcttgcaggcatgcctaggaggtatgtagattatcctgatgcttacgctggttggaactatatatcttcaatcggctcatttgttactttgattggattagctgtattcttcataatgcttgttcatgcttttgtgagacagaaacaaacagctgacaatccttggggtgagggag

SEQ ID NO: 225460 - DNA, 859 bp, Unknown
  Bacterial polypeptide expressing nucleotide sequence isolated from the Sargasso Sea
aattggtttgtaccaattatgataggggctcctgacatggcttttccaagaatgaataatatatctttttggttactaccagtgtcattcattttattactttcatcaatatttgtagatggacctccaggcgcacaaggtgtaggaggaggctggacaatctatccaccactttcatctaaaactggtcaaccgggtcctgcaatggatttagcaatacttagtcttcatatagcgggagcttcctcaatactcggtgctgtaaattttataactacgatattaaatatgagaactccaggcatgactttgcataagatgccattgtttgcttggtcaattcttgtaacggcatttttattactattatctttaccagttttagcaggagcaataacaatgttgttaacggacagaaattttggaacagctttttttgatgcgcaaactggtggagatccacttttatttcaacatttattttggttctttggtcatccagaagtttatattttgattttaccgggtttcggaatgataagtcatattgtttcaaccttttctaaaaaaccagtttttggatatttaggtatggcttatgcgatggtcgcgattggtattgttggttttgtagtttgggcacatcacatgtatacggtaggattaaacaccgatacaaaagcgtattttctagcagcaacaatgatcattgctgttcctacaggaataaaaattttctcatggattgcaacaatgtggggtggctctatatcttttaaaactccaatgatgtgggctcttggttttattttcttatttacagttggaggtgttaccggagtagttctagccaacgctg

SEQ ID NO: 225461 - DNA, 534 bp, Unknown
  Bacterial polypeptide expressing nucleotide sequence isolated from the Sargasso Sea
aatgtcggcagaaaaaccaaaacacgattatcatttagttgatccaagtccttggcctatctatgtttcattcgccactttagtcttagcctttggagctgtttattactttcattctaaagctctttggttattattaattggcttcgctttagtagtttatggcgcatttatgtggtggagagatgttatagaagaagcagaacatcagggccatcatacccctgtagttcaaattggacatagatacggtatgacattatttatcgcctctgaagtaatgttttttgttgcgtggttttgggctttttttaatgcaagtttattcccaccagactcaattggcggtatatggccaccatcagatataaagacttttgatccttgggacataccactaattaacactctgattttattattatcaggaactactgtcacttgggcgcatcatgcaatgttagaaaatgacagaaaaggattagtaaatggtttgatcgcaacagtatttttaggatttatattttcttgttt

SEQ ID NO: 225462 - DNA, 900 bp, Unknown
  Bacterial polypeptide expressing nucleotide sequence isolated from the Sargasso Sea
atgtttaatctttcaatttttgctgatggccctcccggtgcacagggagtgggaggaggctggaccatatatccgcctttatcatctaaagctggacaaccaggccctgcgatggacttagctattttgagtttacacttagctggagcgtcttctattttaggcgcggttaactttattactacaatcttaaatatgcgaacaccaggtatgactttacataagatgccattgtttgcttggtcaattttagtaacagcatttttattattattgtccttaccagtcctagctggtgcaataacaatgttattaactgatcgaaactttggaacagctttctttgaggctcaaacaggtggagatccagttttattccaacatttattttggttttttggtcatcccgaagtttacatattaattcttcctggttttggaatgataagtcatatagtttcaacattttcaagaaaaccagtatttggttatttaggaatggcctacgcaatggttgctattggagttgttgggtttgttgtttgggctcaccatatgtacaccgtaggtttaagtacagatacaaaagcttattttttagctgcaacaatgattattgctgtgcctacaggtattaaaatattttcttggatagctactatgtggggtggctctatatctttcaaaacaccaatgatgtgggctttaggttttatttttatgtttactgttggtggagtaaccggtgtagtattagcaaatgcaggagtggatacggcaatgcatgatacttactatgtcgttgcgcactttcattatgtattgtctttaggtgcagtttttgcaatttttgcaggtttttattattggttttcaaaaatgtcaggatatgaatactca

SEQ ID NO: 225463 - DNA, 757 bp, Unknown
  Bacterial polypeptide expressing nucleotide sequence isolated from the Sargasso Sea
gatgcctctctttgtttggtcgtggctaattactgcttatttattaattgctgttatgccagtcttagctggagcagtaacaatgatgttaatggatattcattttggaactagcttttttaatgcagctggcggaggagacccagttctttttcaacatatattttggttctttggacatcctgaggtttatataatgatcttaccagcatttggaatagtttctcatataattgaaaccttttctcgtaagcctttatttggatatgcttcaatggtttgggcaatgttatcaattgcaatattatcttttgtagtatgggcgcaccatatgtttacagttggcatgccattggcggctgagattttctttatgtgggcaacgatgctgatagcagttccaactggagtaaaagtttttaattgggttgcgacaatgtttagaggttctataacatttgaaactcctatgttatttgcatgtgcctttgttgtactttttacaattggtggattgtccggcttgatgcttgctatcgttcctgcagattttcaataccatgatacatattttgtagtcgcacattttcattatgttctagttccgggggctatattttctattatggctgcagtttattattggatacctaaatggtctggaaatatgtatgacgaaagattgggtaagttacatttttggctttcttttatcggagttaatgtaacattcttcccgcaacattttattggtctt

SEQ ID NO: 225464 - DNA, 831 bp, Unknown
  Bacterial polypeptide expressing nucleotide sequence isolated from the Sargasso Sea
tatttggtcatccggaagtttatattttaattcttcctgcttttggaattgtttcagaagttctacctaccttttctagaaagccgttatttggatacccagcaatcgtgtttgccggattcggaattgcatttataggatttggtgtatgggcgcaccatatgtttgcatctgcaataagtccagttgctcaagcaggatttggtctttcaacaatgattattgctgttccaacgggagtgaaaatatttaattggctagggacaatttggggaggaaagctaacactcaacactccaatgttatttgcacttggctttataggtatgtttgttattggtgggttaagtggagtcacccactctgttgtaccggcagacacccaacagacagatacttattacatagtggcacattttcattatgttctttttggtggagctctattcggtatcttttcaggattgtatttctggtttcctaaggtgtggggaagaatgtataacgaaacaatggggaaaatacacttttggctaatgcttattggatttaatgtgacttttggaccaatgcattggctagggctgcaaggacaagtaagaaggacatgggtttatgcagaggaaacaaatcttggattttggaatttaattgtcactatcggtgcgttcatacttgctgttgcaatattagtatttatggcaaattggatatattctcgaagaaagggtgaaaaagctccttttgatccatgggatgcaagaactattgaatggagtattccttcgcctacacctgtctggaatttttcaaaaagcaccctgaaataaa

SEQ ID NO: 225465 - DNA, 754 bp, Unknown
  Bacterial polypeptide expressing nucleotide sequence isolated from the Sargasso Sea
aaaccgatatttggttatctgggtatggcttatgccatggtagcgataggtgtcgttggtttcgtcgtgtgggctcaccatatgtataccgtaggattagatactgatacaaaagcttattttttggctgcaacaatgataatagctgttccaaccggaataaaagttttttcttgggttgcaacaatgtggggtggatcaattagttttaaaaccccgatgttatgggctataggctttattgtacttttcacattaggcggtgtaacaggcgtagtacttgcaaatgcaggagttgatacagcgcttcatgatacatactatgtagttgcgcactttcactatgttttatctttgggtgcagtctttgctatttttgccggtttttattattggtttagtaaaatgtcaggttatgaatattctgaatttcttggcaaaattcatttttggctaacttttataggcgtaaatttaatattttttcctcaacactttttaggtttagcagggatgccaagaagatacgcagattacccggatgcatttgcgggatggaattatgtttcatcaattggctcttatatttctttaataggagttgcagtatttttggtaaatatattatatgcatttataaagaaacaatcagcagaaaaaaatccatggggagaaggagctacaactttagaatggacagttgcgtcaccgccgccttttcatacttttgaagagcttcctaaaataaaataaa

SEQ ID NO: 225466 - DNA, 876 bp, Unknown
  Bacterial polypeptide expressing nucleotide sequence isolated from the Sargasso Sea
tgctgggctaattggtggaattttttctttattaattagaatggagctggccgaaccaggtatgcaaatacttggcgatgattatcagcaatacaatgtctggataactgcccatggtcttttaatgattttctttatgataatgcctgctatggttggaggttttggtaactattttgttcctttactcataggtgcacctgacatggcatttcctagaatgaataacctaagtttttggttgcttcctccctctataatacttttaattggttctgcttttgtaggagatggcgctggccctggttggacactatatgctccgttatcaactagtggacatggaggtccagcagtagatatggcaattttatcaatgcacttagctggagcttcctcaatccttggggctataaatttcattactacaatttttaatatgcgagcacctggaatgacaatgcataagatgcctctttttgcatggtcaatcttaattacagcttttcttcttcttttatcacttcctgttcttgcaggtgcaataactatgatgctaacagatagaaattttggtactgcattctttaatgcagaaatgggtggagatccagttttattccaacacttattttggttttttgggcatccggaagtttacattcttattttacctggttttgggatcatcagtcacgtagtatctactttctcaaaaaagcctatttttggttatctgggtatggcttatgcaatggctgctatcggtgttgttggtttcgttgtttgggctcaccacatgtacaccactggacttgacgttgatacgagggcttattttcttgcagctacaatggtaattgctgttccaactgg

SEQ ID NO: 225467 - DNA, 829 bp, Unknown
  Bacterial polypeptide expressing nucleotide sequence isolated from the Sargasso Sea
atgtctaatacaaaagcaaatcatccctatcatttagtggacccaagtccatggccactagtaggagcaatatcagctctagtactagcagtaggagctataatgtacatgcatgaaattgacggaggtttggtattaggtgtgggacttttaatgtctttggcgactatggctgtatggtggagggacgtaattaaagaggcagaacatgatggtcaccatactactactgttcaattagggctaagatatggaatggttctatttattgcatcagaagtaatgttttttgttgcttggttctgggctttttttgatgcgagcttttatgcaggtgaggctattcaggaagcaagagttgctcatactggtggagtttggcctccacaaggtgtagaggtctttgatccttggcatttaccattattgaatacagtaattttattaacttctggcactacagttacatgggcacaccatgcgttaaaagaaggtaaaagaggaggtcttatctggggattagttttgaccgtcctattaggactattgtttactgcagttcaagcatatgaatatgggcacgctgcttttggatttacagacggtatatattcttctacattttatatggctacgggattccatggtgcacatgttattattggatcaatatttttaattgtatgcctaggcagagctttggcgggacattttaaacctgatcatcattttggttttgaggctgctgcttggtactggcattttgtagatgttgtgtggttgtttttgttttttgctatttactggtggggaggactaggcggcaccg

SEQ ID NO: 225468 - DNA, 101 bp, Unknown
  Bacterial polypeptide expressing nucleotide sequence isolated from the Sargasso Sea
agcggcagcctggtactggcacttcgttgacgtggtatggcttttcctgttcgtctgcatctactggtggggcggttcaggatacgtgccggcatcctgac

SEQ ID NO: 225469 - DNA, 211 bp, Unknown
  Bacterial polypeptide expressing nucleotide sequence isolated from the Sargasso Sea
ttatggagctgtattttacatggcaacaggctttcatggttttcatgttataattggaacaatatttttagccgtatgtttgtggagaggcaaattaggccattttacaaaagatcatcattttggatttgaggcagccgcatggtattggcattttgtcgatgtagtttggttatttttatttgcagccatttatatttggggaagttaa

SEQ ID NO: 225470 - DNA, 856 bp, Unknown
  Bacterial polypeptide expressing nucleotide sequence isolated from the Sargasso Sea
ttaattccattttatgtaggtgctagagatatggcattcccaagattgaatgctgtagctttttggttaattcctccttcaggtttgatgctggtagcaagctattttgttgagggtgctgctcaggctggatggacggcttatcctcctttgagcataactactcctcaatcaggacaaattatttggattctgagcgttctattacttggaggcagttctatatttggtggaataaactttatcgcgaccattatcaaattaagaaggccaggattaaaacttatgcaattgccaatgtattgttgggcaatgctagggacaagtctattagttgttttgtcaactcctgttttagcaggcactttaattctacttagcttcgatatcatcgctaatactggttttttcaatcctgttttaggtggcaatgtcgtagtttatcagcatttattttggttttattctcatccagctgtatacattatggtccttcctgcctttggtttagttagtgaaatacttcctatacatgctagaaagccactttttggatatacaacaatggttttttcaataatggggatagtagttttaggtttagttgtttgggcgcatcacatgtttacgagtggaacgccaccttggatgagattattctttactatcgccacagcatttattgctgttccgacgggtataaaatttttcaattgggttgcaacattatggggaggtaaaatttccatcaacagtgcaatgttattctcttgcggatttattataaattttgtttttggaggtattacaggagttgctttggcaccaggtacctttcgatattcacgttcatgat

SEQ ID NO: 225471 - DNA, 964 bp, Unknown
  Bacterial polypeptide expressing nucleotide sequence isolated from the Sargasso Sea
atgataacgcttcatggtttgatcatgatatttggcggtgttatgccggcgtttgttggactcgctaactggttggttccaatgatgattggggcaccagacatggcattaccgagaatgaacaatttgagtttctggatattgccttttgctttctttattcttttatcatcccttttcatggagggcggagctcctaactttggatggacattttatgcaccactttcaacaacatatgcaccgccaagcgtaacgttttttatattttctgttcatataatgggagcttcttcaattatgggtgcaattaatgtggttgtaacaatcatgaatatgagagcaccaggcgtaaccttaatgaagatgccattatttgtatggtcatggttaataactgcatatttgttaatagctgtaatgcctgttttggccggagcagtaacaatgatgttaatggatatccattttggaacaagtttctttaatgcagctggtggcggagatcctgttctctttcaacatattttttggttctttggccatcctgaggtttacataatgattttgccagcctttggtatcgtttcccatatcattgagactttttctaggaaacaattatttggatattcttcaatggtttgggctatgctttcaattgcaatcctttcttttgtagtatgggctcaccacatgtttacagttggtttgccattagcagctgaaatattttttatgtgggcaactatgttgatagctgtgcctactggtgtaaaagtatttaattgggtagcaactatgtttagaggatctctaacatttgaaacgcctatgctttttgcagttgcatttgttgttttatttactattggaggattatcaggattgatgcttgctattgttcctgctgatttccaatatcatgatacatattttgttgttgctcatttttccattatgt

SEQ ID NO: 225472 - DNA, 747 bp, Unknown
  Bacterial polypeptide expressing nucleotide sequence isolated from the Sargasso Sea
aatgaacgatcaccatgatcataagcctggattttttaccagatggtttttttccacaaaccataaggatattggaacattatatttaatttatgcaatcatcgcaggtgtagtaggaggagctctttcagttattatgagaatggagctatctgaacccggcatgcagtttgttgcagatggacaaatgtggaatgtaatcatctcagctcatggattgctcatgatattttttgttgttatgccagcattaattggtggctttggaaattggtttattcctttaatgattggcgctccagatatggcatttcctagactaaataacataagtttttggttattggtccctgcattgtttttgattgcaggctcaatgtttgttgggagtggagcaggaacgggttggactatttacccaccattaagttctaatattggacatagtacacctgctgttgatatggctattttttcactccatttagcaggagcttcatcaatacttggagctgtaaatttcataacaactattttaaacatgagagctccaggaatgactattcataaaatgcctctttttgtctgggcaatgttagttactgcttttcttcttcttcttgccgttccagttctaggcggagctattacaatgcttttaaccgatagaaactttggaactactttttttgatcctgccggtggaggagatcctgtcttatttcaacaccttttttggttctttgg

SEQ ID NO: 225473 - DNA, 817 bp, Unknown
  Bacterial polypeptide expressing nucleotide sequence isolated from the Sargasso Sea
gcttattttggcacttcgttttttgatgctgcaggtggtggtgatcctgtattgttccagcacatattctggttctttggtcacccagaagtttacattatgattcttccagcatttggaattacgtcacacataatttcaacattctctcgaaagcctttgtttggacatgcttcaatggtatatgcgatggtatctattgccgtattatcttttgttgtttgggctcaccatatgtttacagtaggcatgcctttggctgctgaacttttctttatgtgggccacaatgattatcgccatcccaacaggagtaaaagtgtttaactggtgtgcaactatgtttaaggggtctattacttatgaaacaccaatgttatttgcagtagcctttgttgtgttatttacaattggcggattttcaggcctgatgcttgctattacaccagctgatttccaataccatgatacttattttgttgttgctcactttcactatgtgcttgtgccaggctcaattttttcaattatggcagctgtgtattactggctaccaaaatggacaggtaacatgtatgacgaaaagatgggaagacttcatttctggctttcattcgttggtgtaaacgtcacattctttcctcagcactttgtagggcttgcaggcatgcctcgtagatatgctgactactcattgcagttcgctgagtggaatgcagtatcatctgttggtgctttcttattcgggctgtcgcaattattattcttatatatagtggttaagacagtattcgctggtaaaaaagcaacaccacaag

SEQ ID NO: 225474 - DNA, 928 bp, Unknown
  Bacterial polypeptide expressing nucleotide sequence isolated from the Sargasso Sea
tggggaatttttacagcaacagtacttgcaatgctagcatttccagctcttttggtaagttctataatgatgactttagacaaggttcttggaactagtttttttatgccaacaattttaaaggctggcgaagttttagaatatggtggaggaagccctattttatttcaacacttattttggttctttggccatcctgaagtttacattgttgcacttccagcttttggtatagtttctgacttaatatcagttcatgctagaaaaaatatttttggttacagaatgatggtttgggcaattgtcggtattggtgcattaagtttctttgtatgggcacaccacatgtatgttagtggcatgaacccttggtttggttttttctttgcttcaacaactctaattattgcagtaccaacagctatgaaagtctacaactggatattaactctctggagaggtaacattagaattaatacagttatgttatggtgtcttggatttatagttacgtttgttaatggaggaatcactggaatattcttaggaaacgtgactgtagatgtcccattgtctgatacttactttgtagttgctcactttcacatggtaatgggaattgctccacttatggttatcatgggtgcagtatatcattggttcccattagtatcaggaagaatgctaagtgaaaaattaggtaaatggcatttctggttaactttcttaggagcttattcaatatacttcccaatgcattatttaggatttattggggtgcctagaagatattttgaaatgtatgacagtccatatatgacttcagcggttggtatgaacgagtttataagtctagcagcgtttatagttggtgctgctcaattcattttaatttttaatgtaataaaaactctaaaaaatgaaaaaa

SEQ ID NO: 225475 - DNA, 766 bp, Unknown
  Bacterial polypeptide expressing nucleotide sequence isolated from the Sargasso Sea
tgccacctttgcccgtaagcctttgtttggttacgcctctatggtgtacgccactgccagtatcgccttattgtccttcttagtttgggcgcatcatatgttcaccaccggcatgccggtgtttgctgagctgtttttcatgtactgcaccatgctgattgcagtgccgactggggtgaaagtctttaattgggtggccactatgtggcggggcgccatgacctttgaagtgcctatgatgtttgccctggcctttattgtactttttaccataggaggcttctctggcctgatgctggccattacgcctgctgactttcagtatcacgatacctattttgtggtagcgcatttccattatgtgttagttacaggcgctatcttctccattatggcggctgcctattactggctgccgaaatggacaggccatatgtacgacgaaaccttggggcagtggcatttctggtgttcgttgatttccgtcaatgtactgtttttccctatgcattttgttggcttagccggtatgccacgacggatcccggattacgcactgcaatttgctgactttaatgcacttattagtattggtggttttgcctttggtttatcccagttgctgtttgtcgctctggtggtgaagtgtattaaaggcggcaaaaaagccacagctcaggtgtgggagggtgctgaaggactggagtggactatcgcgtctcctgcgccttatcacagctttactacaccacctgaaatcaagtag

SEQ ID NO: 225476 - DNA, 507 bp, Unknown
  Bacterial polypeptide expressing nucleotide sequence isolated from the Sargasso Sea
ttctattcactatcggaggcttctctgggttgatgcttgcaataactccagcggatttccagtaccacgacacatactttgtagtagcacacttccactacgttctcgtccctggcgcaatatttgctgttatagcagcagtatattactggcttcctaaatggacggggaaaatgtacaacgaaacactcgggaaagttcatttctggatgacaacagtatttgtaaacattacctttttccctatgcacttcgttggattagctggtatgccaagaaggattcctgattacgctgttcagtttacagacttcaatatgattgcatctattggtgcatttggctttggattatcacaacttcttttcgtgtacatactatttcaaacgcttagacagcctgtaacagcagctgataagtcttgggaaggcgctgagggattagaatggactttaccttctccagcaccatatcattcatttgatacaccacctaaggttgactaat

SEQ ID NO: 225477 - DNA, 253 bp, Unknown
  Bacterial polypeptide expressing nucleotide sequence isolated from the Sargasso Sea
tacgaatataatcatgcagcattttcctttacagatggaatttatgcatcaactttttatatggcaacagggtttcatggttttcatgttttagttggtacaatatttttaacagtatgtttatttagaggtcttaatggacatttttctcctgaccatcattttggttttgaagcggccgcgtggtattggcattttgttgacgtagtttggttgtttttatttgtttgtatatactggtggggcggttgat

SEQ ID NO: 225478 - DNA, 448 bp, Unknown
  Bacterial polypeptide expressing nucleotide sequence isolated from the Sargasso Sea
aatgtcagctacgaccgcagttcatgaacaacatcataatccaactggttggaaaaggtgggcttactcaactaatcataaggatatcggtacaatgtatcttatctttgcaattattgctggtttaattggatctgctttttcagttttaatgagaatggaactgatgcacccaggcgatggaattcttggaggcgattaccatttatataacgttttagtgactggccatggtttaatcatgattttctttatggtgatgccagcaatgatcggtggatttggaaattggtttgttccaataatgatcggcgcacctgatatggcatttcctagaatgaacaatatatctttttggttattacccgtcgctttaattttattgcttgtatcaatttttgttgatggccctccaggagcacaaggagtaggaggaggttggacgatt

SEQ ID NO: 225479 - DNA, 649 bp, Unknown
  Bacterial polypeptide expressing nucleotide sequence isolated from the Sargasso Sea
ttcttagcggcaacaatgattatcgctgttccaacaggaattaaaatattttcatggatagctacaatgtggggaggatctatatcatttaaaactccaatggtttgggctttaggatttatatttttatttacagttggaggagtaactggcgttgttctagcaaacgctggagtagatactgcattgcatgatacttattatgttgtagctcacttccactatgtattatctttgggagcagtttttgcaatatttgcaggcttctattattggtttggtaaaatgtcagggtatgaatattctgagtggatgggccaacttcatttttggttaactttcattggtgtaaatttagttttctttccacagcatttcttaggattagctggaatgccaagaagatacgctgattatccggatgcatttgctgattggaattatatctcttcaatcggttcatatatttctgtagttggcttagtggtatttttcgctaatttaatctacgcatttgcaaaaaagaaaaaagcagcacaaaacccatggggagaaggggccacaacattagagtggacagttccatcaccaccgaattttcatacttttgatgaattaccaaagtttgaagattatgaaaggcactgaa

SEQ ID NO: 225480 - DNA, 864 bp, Unknown
  Bacterial polypeptide expressing nucleotide sequence isolated from the Sargasso Sea
tcatcaactgcagggacccccggcatgtcgatggacttggcaattttctcgcttcaccttgctggtgtttcatcaatacttggcgcggctaacttcatcacaacaatttttaacatgcgcacgccgggtatgacactccacaagatgccattgtttgcttgggcgatgcttgtcacagccttcttgttgctgttagcggttcccgtcctcgctggtgcgatcactatgctgctcactgaccgtaattttggcacaacgttctttattccagagggtggtggcgacccaattttgttcttgcacttgttttggttcttcgggcatccagaagtgtacattatgatattgccggcgtttgggatcgttagtcacattatttcaacgttttcgaaaaaacccgtattcggctatttgggcatggcatatgcaatggtggcaatcggcgttgttggttttgttgtgtgggcgcaccacatgtacacagtggggctcagcgtggatactcgtgcctattttactgctgcaacaatggtgattgcggtgccaacaggcgtaaagattttttcatggattgccactatgtggggtgggtcaatcagtttccgggtgccaatgttgtgggcaattggttttatctttctatttaccgttggcggagttacaggggtggtcttgtcaaacgccggtctggatgtggtcttacataacacttattacgtgatcgcgcactttcactatgtattgtcacttggcgctgtatttggcctgtttgccgggttctattactggttctctaaaatgaccggttatgaatacaatgagggtcttgccaagctgcacttctacgtcacctttatcggtgtg

SEQ ID NO: 225481 - DNA, 460 bp, Unknown
  Bacterial polypeptide expressing nucleotide sequence isolated from the Sargasso Sea
atgtatacacaaacagcatcacacgacgatcatcatactcccacaggttggaaacgttgggcatattctacaaaccacaaagatataggtacaatgtatttaatttttgcaattgttgcaggagttattggtacggcattttcagttttaatgagaatggaattgatgcatccaggcgatggtattctaggtggcaattatcacttgtataatgttttagttactggtcatggtctgataatgattttctttatggttatgccagctatgataggtggttttggtaattggtttgtaccaataatgattggtgcgcctgacatggcattccctagaatgaataatatttctttctggttattaccagtatcattaactttgttaattttatcaatttttgctgatggccctccaggacaaacaggagttggtggagggtggactatttatccgccgctat

SEQ ID NO: 225482 - DNA, 769 bp, Unknown
  Bacterial polypeptide expressing nucleotide sequence isolated from the Sargasso Sea
tatgacatcagaatcggcaacctcacagccttggcatgtccccgagcccagtccttggccaattgttggtacagtcgccgccttggccaccgctctaggattagtctggtttatgcatactgggtcaccttggttgcttggaataggcggaatattggtattatggacgatgattggttggtggcgccaagttatcttggaagcaaatgatagaacatcccacacatctccagtaaaggtcggtttgcgaataggaatgctgttatttattgcctctgaggttatgtttttctttgcgtttttctgggcatactttcattctagtttgccaattttaaacattgttgccggtccatggccaaatgagggtgttgaagcaattggggcagcagggatccccttgttgaacacattgcttttaatcacttcaagcctaaccgtaactatagctcaccatgcaattctggagaatgaacgggaaaaggttatattttggacaggaataacggcagttttgggaattattttcttaggagtacaaatatacgagtatcacgtgctgtctttcggtttaaaagacggcgtctatccgtctacattctatttagctacaggttttcatggttttcatgtttttgtgggaacaattttcttgataatttgttacttcagggctcgcgcaggacactttacaccagaggcgcatataggttatgaggcggcagcatggtactggcacttcgtggacgttgtgtggatatttttgtac

SEQ ID NO: 225483 - DNA, 717 bp, Unknown
  Bacterial polypeptide expressing nucleotide sequence isolated from the Sargasso Sea
aatgtcagctgaaaaaaaacatgattatcacttagtagatccaagtccttggcctatttacgtttcgttctcttgcttagtattagctataggtgctgtgtattatatgcattcagatgtttcatggggaatgtatcttggattagctcttttaatttatggcgcatatatgtggttcagagatgtggtcattgaagcagaacatcaaggtcatcataccccagtagtccaaattcatcaccgttatggaatgactttatttatcgcatctgaggtaatgttttttgttgcttggttttgggcttactttgacgttagtcttttcccaaatgattttgtaggaaacgtatggccacctaaagatattgtgacttttgatccttgggatatacctttaattaacacattagttttattattatcaggtacaacagtcacttggtctcaccattcattattagaaggtgatagaaaaggttttatacaaggattagtgctaacagtaattcttggagcattttttacagcacttcaagcatatgaatatcatcatgctacatttgctttttcagatcatatttatggttctgttttttacatggcaacaggctttcatggcttccatgttatagttggaacaatttttttagcagtatgtttatggagaggaaaattaggtcattttaccaaagaccatcattttggttttgaagcagc

SEQ ID NO: 225484 - DNA, 290 bp, Unknown
  Bacterial polypeptide expressing nucleotide sequence isolated from the Sargasso Sea
tgtaatcttaggtttcttttttacattattgcaagcttacgagtaccatcatgctacttttacctactcgggacatatttacggtgcagtattttatatggcaacaggttttcatggttttcatgtaataattggaacaatatttttggcagtatgtttgtggagaggaaaactcggtcatttcacaaaagatcatcattttggatttgaagcagctgcttggtactggcattttgttgacgtagtgtggctattcttatttgctgcaatctacatttggggaagttaat

SEQ ID NO: 225485 - DNA, 786 bp, Unknown
  Bacterial polypeptide expressing nucleotide sequence isolated from the Sargasso Sea
tttgataatgattttcttcatggttatgccagctatgataggagggttcggtaactggtttgttccaataatgattggagctcccgacatggcatttccaagaatgaataatatttcattctggttattacctacgtcatttattttgttaataatgtctatttttatggatggccctccaggacaaacaggagtaggagggggatggacaatttatccgccgttatcatctacagccggacaacctggtccagctatggattttgcaattttaagtttgcatttagctggtgcatcttcaattttaggtgccgttaattttattacaactattcttaatatgagaactccaggtatgacattgcacaaaatgccattgtttgcttggtcaattctagtgacagcatttttgttattactatcgttaccagttttagcaggagcaattactatgcttcttacagataggaactttggaacagctttcttcgatgcgcaaactggtggagacccagtgttgtttcaacatttattttggttctttggtcacccagaagtttacattttaattttaccaggttttggaatgatcagtcatattgtttcaacattttctagaaaaccagtttttggatacttgggaatggcttatgcaatggttgcaattggaatagttggtttcgttgtttgggctcaccacatgtatacagttggtttaagtacagatactaaagcatactttttagctgcaacgatgatcattgcggttccaactggtataaaaat

SEQ ID NO: 225486 - DNA, 745 bp, Unknown
  Bacterial polypeptide expressing nucleotide sequence isolated from the Sargasso Sea
gttgcaattggaatagttggtttcgtcgtttgggctcaccacatgtatacagttggtttgagcacagatacgaaagcatattttttagctgcaacgatgattattgcagttccaactggtataaaaatattttcatggatagcaactatgtggggtggttcgatttcatttaaaaccccaatggtttgggctctaggttttatatttttattcactgttggcggagttactggagtagttctagcaaatgctggagttgatacagcaatgcatgacacctattacgttgtggctcactttcactatgtattgtctttaggagctgtatttgcaatctttgcaggattttattactggtttggaaaaatgactggttacgattactcagagtggatgggtcaattacacttttggttaacttttataggagtaaacttagttttctttccacaacacttcttagggcttgcaggaatgccaagaagatatgctgactatccagatgcttttgcagggtggaattatatttcttcaattggttcttatatttctgtaattggattggtagtattttttataaaccttgcttatgcgttttataagaaaaaagctgcagcacaaaacccatggggagaaggtgctacaactttagaatggactgtgccatctccacctaattttcatacttttgaagaattgccaaagtttgaagttgaagagggtgttgaaaaatctaatagctaaa

SEQ ID NO: 225487 - DNA, 752 bp, Unknown
  Bacterial polypeptide expressing nucleotide sequence isolated from the Sargasso Sea
tcctagcccgtggccaatatttacttcatttgcatgtttaattttagcagtaggtgcggtttattattttcatactaaaactttatggctgttacttattggaactgcattgctaatctatgggtcttttatgtggtttagagatgtcgtagatgaagcagaaaggcaaggacatcatacaatggttgttcaaataactcatagatacggcatgacactctttattgcctctgaagttatgttttttgtagcttggttttgggcattttttaatgctagtctttttccaaccgaggctattggaaaaatatggcctcctgcagatgttaaaacttttgatccatgggacatacctcttataaatacattaattttgttattatctggtactactgtaacctgggcccaccatgctatgattgaaaatgatagaaaagctttagttaacggtctaattgcaactgtttttttaggatttattttctcttgttttcaagcatatgaataccatcacgctacatttaccatagatggaaatatatacggatcaactttttatatggcgacaggctttcatggttttcatgttataattggaacaatatttttggcggtttgcttatatagatcaattaaaggtcattttaaacctgatcaccattttggcttcgaagcagcagcttggtattggcactttgtagatgtcgtttggctatttctttttgctgcgatatatatttggggaagttaaa

SEQ ID NO: 225488 - DNA, 821 bp, Unknown
  Bacterial polypeptide expressing nucleotide sequence isolated from the Sargasso Sea
aatggcagacgcagccattcaaggtcacggccacgaagacgagcggagctttttcacccgctggtttatgagcacgaaccacaaggatatcggtatcctttacctgatcgtttcggcgctcaccggcttcatttccgtcgcattcaccgtctacatgcgactcgaacttatggatcccggtgttcaatacatgtgtatggaaggctttgcctccgacccctgtaccccgaacggccatctctggaacgtgctgattactggccacggcatcctgatgatgttctttgtcgtcatcccggccctgttcggcggtttcggcaactacttcatgccgttgcagatcggcgcgccggacatggcgttcccgcggatgaacaacctttcgttctggatgtatgttgccggtaccgcgctggcggtgtgctcggtctttgcaccgggtggcaacaaccagcttggctccggtgtgggctgggtgctgtatccaccgctttcggtcaaggaaggcggtttctcgatggatctggcgatcttcgccgtgcacgtctccggtgcctcctcgatcctcggcgcgatcaacatgatcaccaccttcctgaacatgcgtgcccccggcatgaccctgttcaaggtgccgctgttcagctggtcgatcttcgtcacctcttggctgatcctgctgtccctgcccgttctggcgggcgcgatcaccatgctcttgatggaccgcaacttcgggttcaccttctttgacccagcaggcggcggcgacccgatcctctatcagcacatcctgtggttcttcggccacccggaagtgt

SEQ ID NO: 225489 - DNA, 996 bp, Unknown
  Bacterial polypeptide expressing nucleotide sequence isolated from the Sargasso Sea
agcttttccgcattattagtaggtgcgttaatgatgactttagataacgtacttggtacgagttttttcatgccaacgatactaaaagctggtgaagtattagagtttggaggaggaagccctattctttttcaacatttattctggttttttggacacccagaagtttatatagttgcattacctgcgtttggaatagtctcagatttaatatctgttcatgcaagaaaaaatatatttggttatagaatgatggtttgggctatagttggaataggagcgctaagcttttttgtatgggctcatcatatgtatgttagcggaatgaatccatggtttggttttttctttgctaccacaacactaataatagcaatcccaactgcaatgaaagtttataactggattttaactctttggagaggaaacattcgacttaatacagtcatgttatggtgtttaggttttattgttacatttgttaatggtggaattacaggaattttcttaggaaatgtcagtgtggatgttccattgtcagatacttattttgttgttgcacactttcatatggtgatgggtattgcgccacttatggtaattatgggagctatttatcactggtttcctctagttgcaggaagatttttaaatgaaaaattaggaaaatggcatttctggttaacttttttaggtgcttattcaatttatttcccaatgcattatcttggatttattggggtacctagaagatattttgaaatgtatgatagtccatatatgacttcagctgtaggaatgaacgaatttataagtatggcagcttttatagtaggtgcagcacaatttcttttaatttacaatgttataaaaactctaaaaactggaaaacccgcaggacacaatccttggaaagcaaattctctagaatggctaactctttcagttcctccagaacatggtaactggggagaaaaacttccaacagttcataga

SEQ ID NO: 225490 - DNA, 856 bp, Unknown
  Bacterial polypeptide expressing nucleotide sequence isolated from the Sargasso Sea
tatgcgagctgaattagctgctccagggttggatgttgttgctgatggtcaggcttggaatgttatcattactgcgcatggacttttaatggtattttttgttgttatgcctgccttgattggtggatttggtaactggtttgtccctatcatgattggggcccctgatatggcctttcctagaatgaataattttagcttttgggttcttgtgccagctttagtacttttagttgtatctgcaacaattggaacaggtgccggtacaggttggacgatttatccgccactatctaataaacttggtcatgcaggcccgtctgttgacatggcaatttttgcattacatttagctggagcttcctcaatattaggtgctgttaatttcataacgacaattctaaatatgagaactcctggaatgactattcacaaaatgcctttatttgtatgggcaatgttaatcactgccttcttattgctattggcagtaccagttttagctggagcaattacgatgctcttaactgataggaattttggaactgcttttttcaatccagccggtggtggagacccagttttattccaacatttattctggttttttggacacccagaagtatacataatgatacttcctgcgtttggtattgtcagccaagttatttctacattctctagaaaaccaatatttggttatctcggtatggtctatgcaatggtatctataggctttattggttttatagtttgggctcatcatatgtttacagttggcctcagcgcagacctaagagcatatttcatgttagcaactataattattgctgtaccaaccggaataaaaatattt

SEQ ID NO: 225491 - DNA, 682 bp, Unknown
  Bacterial polypeptide expressing nucleotide sequence isolated from the Sargasso Sea
aatggggtatttcgtgggggaatgtatctttggtttagcattattaatttatggtgcatatatgtggtttagagatgtagtaattgaagctgaacatcaaggtcaccacactcccgttgttcaaattcatcacagatatggaatgactttatttattgcttcagaggtaatgttctttgttgcatggttctgggcttactttgatattagtttatttccaaatgaatttgttggaaatgtatggccaccaaaagatattgaaacatttgatccttgggatattcctttaataaatactttagttttattattatcaggaacaactgttacttgggctcatcacgctttattagaagatgatagaaaaggatttatacaaggtttaacattaacggttattcttggtttcttttttacattattgcaagcatacgaataccatcacgctacttttacttactcaggccatatttatggagctgtattttatatggcaacaggttttcatggttttcacgtcataattggaacgatatttttagccgtatgtttgtggagaggaagacttggtcattttactaaagatcaccattttggatttgaagcggctgcttggtactggcattttgttgacgtagtgtggttattcttatttgctgcaatttatatttggggaagttaa

SEQ ID NO: 225492 - DNA, 820 bp, Unknown
  Bacterial polypeptide expressing nucleotide sequence isolated from the Sargasso Sea
aatggcgcatgaaaaaaatcacgactatcatatattaaacccttctatatggcctttcattggttcgatcgcagcttttgtgatgctttttggggctgtagttttctttcatagcgacaacccttggatgtttattgcaggttttgtcagtgttttatttgttatgtatgtctggtggtcagacacagtaaaagaaaaccaagttggtgatcatacgccagtagttttgattggtttaagatacggcttcattctttttataatgtccgaagtgatgttctttctggcatggttttggagtttttttaaacatgctatgtatccaatgggtgacatgagcccattgcaggatggtcaatttcctcctgctggcatagaagtttttgatccttggcatctaccactaattaacactctaattttgttatgttctggagcagctgcaacttgggcacaccacgctattgctcatgatgaagatagaaaatctatggtgcaaggtcttgttattgcagttggattaggtgttttgttcacagttttccaagcttatgaataccagcacgcagcgtttggtttttcaggaaacatatacggagcaaacttttttatggccacaggttttcatggttttcatgtcatcgttggtacaattttccttgcgatttgtatgctgcgagcaatgcgtggacacttcaccaaggatcagcaccttggttttgaagctgcagcttggtattggcattttgtagacgttgtatggttatttttgtttgcagcgatttatgtctggggaagtgttggagcgacaattcactga

SEQ ID NO: 225493 - DNA, 320 bp, Unknown
  Bacterial polypeptide expressing nucleotide sequence isolated from the Sargasso Sea
aattaaagctttatggcttacagttggtttaggggttgcttttacattactgcaggcttttgaatactatgaagcattccatcattacttcaagtttacggatggaatttatccttctgttttttacatggcaacaggtttccatggttttcatgtcatggtaggcacagcatttttagcggtttgcttatttagagtttataaaaatcacatgacgcccgaaagacattttggattagaagcagcagcatggtattggcactttgttgatgtagtttggctttttttatatgtctgtgtttatatttggggtgcataaa

SEQ ID NO: 225494 - DNA, 940 bp, Unknown
  Bacterial polypeptide expressing nucleotide sequence isolated from the Sargasso Sea
ttctcgctctttttgctttttccagctcttattgtttcgtgcataatgatgactttagataatatacttggaacaagttttttcatgccagcaattgtagagtttggcgaacaaactgaatacagtggtggaagccctatattatttcaacatcttttttggttctttggccacccagaagtttatatagttgcattaccagcttttggaatcgtttctgatttaatttcagtacatgctagaaaaaatatttttggttatcgtatgatggtttgggcaattgttataattggtgcattaagttttgtagtatgggcgcaccacatgtatgttgcaggaatgaatccttggtttggttttttctttgccacaacaactttaattattgcagtaccaacagctcttaaggtttataattgggttataactctttggagaggtaatatacatttaacaataccaatgctattcgctttaggctttatagttactttcgttaatggtggaataactggtttatttttaggcaatgtaattgttgatgtgcccttatctgatacatattttgttgttgctcatttccatatggtaatgggtattgcaccagtacttgtagtatttggtgctatttatcattggtttcctctaattactggaagatttttacatgagggaatgggcaaatttcatttctgggtaacttttttaggttcttatgcaatatattttccaatgcattacttaggttttgttggagttcctagaagatattatgaaatgtatgatagtgaatttatggcagtttctactaattatttaaaccaattcataactgtagttgcattaattgtaggttttactcaaatactttttttatataatattattattagctctaaattagaaaaaaggctggaaaaaatcctggaaagcttgttcg

SEQ ID NO: 225495 - DNA, 765 bp, Unknown
  Bacterial polypeptide expressing nucleotide sequence isolated from the Sargasso Sea
aatgtcagcaggaaaaccaaaacacgattaccatttagttgacccaagtccttggccgatctatgtttcattcgctactttagtcttagcttttggagcagtttattatttccactcaaaagctctttggttattattaattggttttgcattagtagtttatggtgcatttatgtggtggcgggatgttatagaagaagcagaacatcaaggccatcatactcctgtagttcaaattggacataggtacggtatgacattatttatcgcctctgaggtgatgttttttgttgcatggttctgggctttctttaacgcaagtttatttccaccagattctataggaggtatatggccaccagcagatattaaaacttttgatccttgggatataccactaatcaacactctaattttattgttatcaggaactactgtaacctgggcgcatcatgcaatgttagaaaatgacagaaaaggattagtaaatggtttgatcgcaacagtatttttaggatttatattttcttgttttcaagcttatgagtatcatcacgcaacatttactttagatggtggaatttatggttccacattttatatgtcgactggttttcatggttttcatgtaattgtcggaacagtttttcttgcagtttgtttgtttcgatcaatgagaggccactcgacgccccaacaccattttggatttgaagcagcagcctggtactggcattttgttgacgtagtttggttattcttatt

SEQ ID NO: 225496 - DNA, 283 bp, Unknown
  Bacterial polypeptide expressing nucleotide sequence isolated from the Sargasso Sea
tgctttactcttcttcaagcatttgaatattatgaggcagttcatcattattttaaatttactgatggaatttacccttctgttttttatatggctaccggttttcatgggtttcatgtaatggttggaactatatttttaggcgtatgtttatttagagtctataaaaatcatatgacaccagatagacattttggtttagaagctgcagcttggtactggcactttgttgatgttgtgtggttattcttatacgtttgtgtctatatttggggtgcataaa

SEQ ID NO: 225497 - DNA, 349 bp, Unknown
  Bacterial polypeptide expressing nucleotide sequence isolated from the Sargasso Sea
tgcgctaaaaatgataacaagaaaagttttaatatttggcttggtgtaactgttacccttgcattgatatttgttggattgcaggcagctgaatactatgaagcatatgctcattatggtttaactcttaactctggaatatatgggtcaactttctttatgttgacagggttccacggctttcatgtcatgatgggtgggtttatgcttgctgtaatgttatctagatcagttttctacaatcactttgatcctcatagccattttggatttgaagcagcctcttggtattggcactttgttgatgtggtttgggtgatgctgtttctttttgtttatatactttaaa

SEQ ID NO: 225498 - DNA, 539 bp, Unknown
  Bacterial polypeptide expressing nucleotide sequence isolated from the Sargasso Sea
aatgtatacacaaacagcaacccataacgatcatcatactccaacaggttggaaacgttgggcatactctacaaatcataaagatattggaacaatgtatttaatttttgcaattgttgcaggagttatcggtacagcattctcagttttaatgagaatggaattaatgcacccaggtgatggtatcttaggtggaaactaccacttatataacgttttagtaactggtcatggtttgattatgatttttttcatggttatgccagctatgataggtggctttggtaactggtttgtaccaataatgattggtgcacctgatatggcatttccaagaatgaataatatttctttttggttattaccagtatcattaactttattaattttatcaatttttgttgatggccctccaggacagacaggagttggtggtggatggactatttacccacctttatcatctaaagcaggtcaaccaggaccagcaatggatttagcaattttaagtttacacttagctggtgcttcatcaattt

SEQ ID NO: 225499 - DNA, 411 bp, Unknown
  Bacterial polypeptide expressing nucleotide sequence isolated from the Sargasso Sea
aatggtagatgttaccccagatattatagatcattctcatgatcatcaccctactggatggaggagatatttgtattccaccaatcataaggatattggaactctctatttaatctttgcaattatagctggtgttattggcggtgtgatgtctgtgataatgcggatcgaacttatgtatcctggcgatggtattttaggaggtgatcataacctctataatgtattagttacaaaccatggcttaataatgattttcttcatggtgatgccagccatgatagggggttttggaaattggattgtaccacttatgataggtgcaccagacatggcttttcctagaatgaataatatatctttttggcttttgcccgctttcttcattttgttaattgcatcgttattcgt

SEQ ID NO: 225500 - DNA, 743 bp, Unknown
  Bacterial polypeptide expressing nucleotide sequence isolated from the Sargasso Sea
aatgttgattacagcttttttattattgcttgctgtacctgttttagcgggtgctataacaatgttactaactgataggaattttggaacagcattctttaatcctgctggtggtggagatccagttctgtttcaacatttgttctggttttttggacatcctgaagtttatattatgatacttcctgcttttggaattgtcagccaagttatttcaactttttcaaggaagcctatatttggctatcttggaatggtttatgcgatggtgtcaattggttttattggttttattgtttgggcacatcatatgtttacagttggtttaagcgcagatttaagagcttattttatgttagcaactattattattgctgttccaactggaataaaaatttttagttggattgcaacaatgtggggcggttcattaacttttgaaacgcctatgttattttccattggatttgttttcttatttactcttggtggagtaactggagttattttggctaatgctggaattgataccgtaatgcatgatacttattatgttgttgcacactttcactatgtattaagtatgggtgcaatgtttggtatctttgctggcatttattattggttcggaaagatgacaggtaagcagtacaatgaattttttggaaaattacatttttggttattttttattggagtgaatgtaacattttttcctcaacattttttagggattagcggga

SEQ ID NO: 225501 - DNA, 655 bp, Unknown
  Bacterial polypeptide expressing nucleotide sequence isolated from the Sargasso Sea
cttggggttagcactagttatttatggagcctatatgtggttcagagatgttgtgattgaagcagaacatcaaggtcatcatacccccgttgtgcaaattcatcaccgatatgggatgacattatttattgcatcagaagtgatgttctttgtagcttggttctgggcatattttgatatcagtttatttccaaatgagtttgttggaaatgtttggcctcctaaagatattgaaacatttgatccatgggatattcctctaattaatactttagttctattgttatctggaactacagttacttggtcccatcattcattgttagaaggtgatagaaaaggatttattcaagggttaacagcaacagttgttcttggtttctttttcaccttattacaagcatacgaatatcaccacgctacttttgattattcaggacacatttatggagcggttttttatatggctacgggtttccacggatttcacgtaatagttggaacaatatttttagctgtttgtttatggcgaggaaaattaggtcactttactaaagaccatcattttggatttgaagcagcagcttggtactggcattttgttgatgtagtttggttattcttatttgctgccatttatatttggggaagttaa

SEQ ID NO: 225502 - DNA, 918 bp, Unknown
  Bacterial polypeptide expressing nucleotide sequence isolated from the Sargasso Sea
gcgcagctggtccagaccaatcagtttactatgtcccggcccaaggttggtaccctgtctggttagcattcggttttatgctattggtcaccgggtttgcatcagtgctgaatatgcaaaaaacaggtggctccgcagattggacacagagtttgatcggttttgcaatagtggcttttgttttttttcgttggtttgccaaggtaatccaagaaaatgcagagggttacaacaacgcgcagcttaagaagagctacgtctgggggatgggctggtttattttttctgaggtaatgttttttgcagccttcttcggggcccttttttatgttcgaatgtgggtggtcccttggcttgggggggaaggttctaagggaatcgcaggtgattatctgtggccagagtttgaggctacttggccggtcgtttcaaaccctaatccggaaatttttgagaaccctggtcagtctatggcgcctccggctttgggatctgcgtggctcacgtatttgccgtttatgaatacggttattttgttgtcatctagcgttacagtacacatggctcacatggcgattaacactcaagagcgtgggaagttagctggctggttaggtttcacagttcttcttggcattatttttctaggcctgcaggtcttcgagtattatgaggcttatgctcacatggggctcacgttgtcgtctggcatatatgggtcaacgttctttattttaaccgggttccatggctttcacgtgacgatgggtacggtgatattgcttattcaattcttccgggttttgaagggtcatttcaaggagcatgactgttttggttttgaatcagccagttggtattggcattttgtcgacgtagtttgggtagggttgtttatcttcgtgtatgtgctttagc

SEQ ID NO: 225503 - DNA, 411 bp, Unknown
  Bacterial polypeptide expressing nucleotide sequence isolated from the Sargasso Sea
aatggcagatattacagcagatcaggtagacagtcacgatcatcacccaactggctggagacgatacctatactcaacaaatcataaagatattggaactctttatttaatatttgccgttatagctggtttagtaggtactggaatgtctgttctgatgagaatggagctaatgtatcctggagacgggatattgggaggtgaccataatttatataatgttctagttacaagtcatggtttactcatgattttctttatggttatgccagctatgattggtggttttggaaactggattgtgccgcttatgattggcgctccagatatggctttcccacgaatgaataatatctctttttggttatttgcagcatcactaatactgcttatcgcatcattatttgttga

SEQ ID NO: 225504 - DNA, 826 bp, Unknown
  Bacterial polypeptide expressing nucleotide sequence isolated from the Sargasso Sea
ctggtttgttccattaatgattggagctcctgatatggcttttccaagaatgaataactttagtttttggatactagttcctgccttagttttattagttgtttcggcaacaataggaactggtgctggtaccgggtggacaatatatccaccactatctaataaactcggacatgcaggcccttctgttgatatggcgatctttgctcttcatttagcaggtgcctcttcaattttaggtgcagttaattttataacaacaatactcaatatgagaactcctggaatgactctccataagatgcctcttttcgtatgggctatgttaattacagcattcttactcttattagcagtacctgttttagctggagcaattacaatgcttttaacagatagaaacttcggtacaacatttttcaatcctgcgggtggaggagatccagttcttttccaacacttgttttggttctttggtcatccagaagtttatattatgatattacctgcttttggaatcgtaagtcaggtcatttctactttttcaagaaagccagtatttggatatttaggaatggtctatgctatgatagcaataggatttataggttttatcgtttgggctcatcatatgtttacagttggtatgagtgcagatttaagggcatactttatgttagctacaatcattattgctgttccaacaggtattaaaatattcagttggattgcaactatgtggggaggatcactgacatttgaaactccaaatgttatttgcaattggatttgtttttttatttacacttgggggagttacaggagt

SEQ ID NO: 225505 - DNA, 903 bp, Unknown
  Bacterial polypeptide expressing nucleotide sequence isolated from the Sargasso Sea
tggtgcttgggaactggttggaccatatacccacctttaagttcgattacaggacacagtagtcctgcagtagatatggccattttttcacttcatttagcaggtgcctcatcaatacttggtgccgtcaactttattacaaccattttgaatatgagagcacctgggatgacaattcataaaatgcctctttttgtttgggcaatgttagttacagcatttcttcttttacttgctgttccagttcttggtggagctattacaatgcttttaacagatagaaactttggaacaactttttttgatcctgccggtggaggcgaccccgttctattccagcatttattctggtttttcggtcacccagaggtttacattatgattttaccagctttcggtatcgtctcacacattgtatccacattttcaaaaaaacctgtatttggatatttaggtatggcctatgcaatggttgctattggatttatcggttttgttgtttgggctcatcatatgtacacagtagggtttagcgcaaatgttagagcttattttatgcttgctacaatcgtcatagctgtacccacaggtgttaagatttttagttggatcgctacaatgtggggtggatctataacatttacaacccctatgttatttgctctaggattcatttttcttttcactctaggtggagtaacaggtgtaattttagcaaacgcaggtattgatgtcgttttacatgatacatactacgttgttgcccatttccactacgtattaagtatgggagcggtgtttgggatttttgctggaatttattattggtttggtaaaatgagcggaaaaaattactctgagttttttggcaagttacatttttggttgttctttttaggagtt

SEQ ID NO: 225506 - DNA, 660 bp, Unknown
  Bacterial polypeptide expressing nucleotide sequence isolated from the Sargasso Sea
tagctgcaacgatgatcattgcagttccaaccggtattaaaatattttcatggatagcaactatgtggggtggttcgatttcatttaaaactccaatggtttgggctttaggatttatatttttatttactgttggtggagttactggagtagtccttgcgaacgctggagtggatactgcaatgcatgatacttactacgttgttgctcactttcattacgtactatctttaggagctgtatttgcaatctttgcaggattttactattggtttggaaaaatgactggttatgagtactcagagtggatgggtcaattacacttctggttaacgtttattggagtaaacttggttttcttcccacaacactttttaggccttgcgggaatgccaagaagatatgctgactatccagatgcttttgcgggatggaattatatttcttcaattggttcttatatttctgtaattggattggtagtattttttataaaccttgcttatgcgttttataagaaaaaggctgcagcacaaaacccatggggggaaggcgctacaactttagaatggactgtaccatctccacctaattttcatacttttgaggaattaccaaagtttgaagatgaagagggtgttgaaaaatctactagctaag

SEQ ID NO: 225507 - DNA, 513 bp, Unknown
  Bacterial polypeptide expressing nucleotide sequence isolated from the Sargasso Sea
gtgtagtcttggcaaatgcaggtgtagatactgctatgcatgatacttattatgttgttgctcatttccattatgtgttatcgttaggagctgtgtttgcaatttttgcaggcttctattattggttttcaaaaatgtcaggttacgaatattctgaatggatgggccaattacatttttggttaacatttataggtgttaacttaattttctttcctcaacatttcttaggtttagctggaatgccgagaagatatgcagattatccagatgcgtttgcgggctggaattatatttcttcaataggttcttatattgctgttgctggattagttgtattttttgcaaatcttatttatgcttttgcaaaaaagaaagcagctgcgcaaaatccttggggagaaggagccacaactttagaatggactgtaccgtctcctccaaatttccatacatttgaggaattgccaaagtttgttgatgatcaagaaacagaaaaatcacacagctaaa

SEQ ID NO: 225508 - DNA, 487 bp, Unknown
  Bacterial polypeptide expressing nucleotide sequence isolated from the Sargasso Sea
catgagcccattgcaggatggtcaatttcctcctgctggcatagaggtttttgatccttggcatctaccactaattaacactctgattttgctatgttctggagcagctgcaacttgggcgcaccacgctattgctcatgatgaagatagaaaatctatggtgcaaggtcttgttattgcagttggattaggtgttttgtttacagttttccaagcttatgaataccagcacgcagcgtttggtttttcaggaaacatatatggagcaaacttttttatggccactggttttcatggttttcatgtcatcgttggtacaattttccttgcgatttgtatgctgcgagcaatgcgtggacacttcaccaaggatcagcaccttggttttgaagctgcagcttggtattggcattttgtagacgttgtatggctatttttgtttgcagcgatttatgtctggggaagtgttggagcgacaattcactga

SEQ ID NO: 225509 - DNA, 620 bp, Unknown
  Bacterial polypeptide expressing nucleotide sequence isolated from the Sargasso Sea
gtggttcagagatgtcgtaattgaagctgagcacaaaggtcatcacacacccgttgttcaaattcatcacagatatggaatgacattatttattgcatctgaggtaatgttttttgttgcatggttttgggcatactttgatgcaagtttgtttccaaatgaattcatgggaaatgtatggccgccaaaagatattgagacttttgatccatgggatatcccacttataaatactcttgtcttacttttatctggtacaacagtaacttgggcacaccattctttattagaggatgatagaaaaggatttataaatggtctaatttgtacagtaattttaggagcattctttacgttattgcaaatatatgaataccaacacgctacatttagtttttcaggccatatttatggagctacattctatatggccacagggtttcatggtttccacgttttagttgggactatttttttagcggtttgcttatggagaggtaaattaggacattttactaaagaacatcactttggtttcgaggctgctgcttggtactggcactttgttgacgttgtctggttattcttatttgcagctatttacatttggggaagttaat

SEQ ID NO: 225510 - DNA, 673 bp, Unknown
  Bacterial polypeptide expressing nucleotide sequence isolated from the Sargasso Sea
atgtttattttggtggagagatgttattaatgagtctacatttcaaaatgttcacacacctgttgttgagttaggattaagatatggaatggcattatttattgcctctgaagttatgttttttgttgcttttttttgggccttttttgatgctagtctaactcccaaacttccgattgaggaatacaccgaaatttttgaaacaaatggtgccgtaggcacttggcctccagagggaattaaaacttttgatcctttagatgttccttttttaaatacattaattttattaatgtctgggacaacatgtacttgggcacaccatgcagtacgtgagggtcacagagatcaagctattcaggctttgtggattactgtagggcttggccttttttttacatttatgcaaggagtagaatattatgaagcagctttgcattattttagttttactgatggaatatatccttcagtattttatatggctacgggcttccatggttttcatgtaatggttggaacagcatttttagctgtatgtttgtttagagtatataaaaaccactttaccccagatagacattttggtctggaggcagcagcttggtactggcactttgttgatgttgtttggttgttcctttttgtttgtgtttatgtttggggtgcataa

SEQ ID NO: 225511 - DNA, 559 bp, Unknown
  Bacterial polypeptide expressing nucleotide sequence isolated from the Sargasso Sea
ggtctgaggtacggcatgaccttgtttatcgcttcagaagttatgttctttgttttctggttttgggcttatttcaatgcaagtttattccctactgaacaaataggatctgtttggcctccggcagaaatacatttaatggatccttggcatataccattgataaatactcttatacttttgctatcaggtacaaccgttacatgggcgcaccacgcgctaacagagggaaatagaaaagagttgatccaaggtctctggtgtacagtaggacttggcattatttttacgggcttccaggtttatgagtatatgcatgctgacttcgctttttcaggacatatttatggagcaactttctatatggcaactggtttccatggttttcatgtattaatgggaacagtgatgctcattgtttgcttaggaagatcaattgcaggacactttaaggctgatcatcactttggttttgaagcagctgcatggtactggcactttgtagatgttgtgtggctatttttattcgctgcaatttatgtctggggatattattaaa

SEQ ID NO: 225512 - DNA, 625 bp, Unknown
  Bacterial polypeptide expressing nucleotide sequence isolated from the Sargasso Sea
gatcttgccagcatttggtatcacttcacaataatttcaacattttcaagaaaaccgctatttggacactcttcaatggtttatgcaatggtatctattgcggttctatcatttgtagtttgggcacatcatatgtttacagtaggtatgccgcttgttgctgaactgttttttatgtgggcaacaatgcttatagcaattccaactggggttaaagttttcaactggtgcgcaactatatttaaaggatcaatcacttatgaaacaccaatgttgttttcaattgcttttgtagttttattcactattgggggtttttcaggtttgatgctcgcaataacaccagcagatttccaatatcatgacacttactttgtggtagctcatttccactatgtattagtacctggagcagtattctcaataatggcagcagtttattactggttgccaaaatggaccggaaatatgtacgacgaaaaaatgggcagactgcatttctggctttcattcgctggtgtaaatatcacgtttttcccacaacacttcgttggtcttgcaaggatgcctagaagatatgcagattatgcattacagtttgctgagtggaacgctgtttcttcag

SEQ ID NO: 225513 - DNA, 829 bp, Unknown
  Bacterial polypeptide expressing nucleotide sequence isolated from the Sargasso Sea
atgggagcggctgggacgattaatgatttaggaaaaccagagagcaattccgtatacatcttatattctggttttgccatctttgcaataactttatacttttggttcagagcagtgataagagaacatattgctggcttggatagtgctcagcttcaaaaatcttttgtttttggtatgggttggtttattttttccgaagtaatgttctttgccgcattttttggagcacttttttacgtgagaaatttttcagtcccatggctcggtggcgatggcgagaaaggattggctaatatgttatgggaaggttttgaggcctcatggcctgtgatgtcaactcctgatgctggatcagcatttgttcttgccgataaaagcatgagctggccaggctggggtaatgcattaaagtggttgccattgtggaatacgattgtacttcttagttcaagtgtaaccgttcactttgcccatcttgctctcaaaaatgataacaaaaaaagttttaatacctggcttggcgttactgtaacccttgctctaatatttgttgggcttcaggccgctgagtactatgaggcttatgcacattatggtttaacacttaactctggaatatatggttcaactttcttcatgctaactggattccatggttttcacgttatgatgggtggatttatgcttgctgtgatgctttctagatcggttttttataatcactttgatcctcacaatcattttgggtttgaagcagcctcctggtattggcactttgttgatgtagtttgggtgatgttatttctttttgtttatatactttaaa

SEQ ID NO: 225514 - DNA, 487 bp, Unknown
  Bacterial polypeptide expressing nucleotide sequence isolated from the Sargasso Sea
tgctttacacgatacctactatgtagttgcccacttccattatgtattatcaatgggagcagttttcgccctattcgcaggattttattactggattgggaaaatctctggatatcaatacccagaagtttatggtcaaattcatttttggttatttttcattggagtaaatcttacgttctttccaatgcatttcttaggacttgccggaatgccaagacgtattcctgactatccagatgcttttgcagggtggaatgccgtttgtagttatggatcttatctttcaattttggcgagtgttttcttcttttatgttgtttaccttacacttactagtgaagagaaatgccctacaaacccatggaattttgatgacaatgagaaatctgtaccaactttagaatggacagtgacctcaccaccagctttccatacttttgaagaaatcccagctattaaatcacctcagcaattaacgaaataa

SEQ ID NO: 225515 - DNA, 517 bp, Unknown
  Bacterial polypeptide expressing nucleotide sequence isolated from the Sargasso Sea
atgagttacgcagattcagcaagccacgaccatcacgatcacaaaccaggttttataaaaagatggtttttttctaccaaccataaagatattggaactctttatataatattcgccatactagctggtttggttggtggtttcttttcattactaatgagagctgaattagctgccccaggcttagatgttgttgctgatggtcaagtttggaatgtaattatcactgctcatggtttgttaatggtattttttgttgtaatgccagcattaataggtggctttggaaactggtttgtcccattaatgattggtgcgcctgatatggcttttccaagaatgaataactttagtttttggatacttgttcctgcgctagttttattagttgtttcagcaacaataggaactggtgctggtactggatggacaatttatcctccactctcaaataaacttggacacgcaggaccctcagttgaaaaggcaatatttgctcttcatttagcaggtgctt

SEQ ID NO: 225516 - DNA, 819 bp, Unknown
  Bacterial polypeptide expressing nucleotide sequence isolated from the Sargasso Sea
tattactacaattttaaatatgagaacaccaggtatgacattacataaaatgccattatttgcttggtcaattttagttacagcatttttattattattatctttaccagtacttgctggagcaataactatgctactaactgatagaaattttggaactgcattttttgaagctcaaactggtggtgatccagttttatttcaacacttgttttggttttttggtcatccagaagtttatattttaattcttccaggttttggaatgattagtcatatagtttcaactttttctaaaaaaccagtttttggttatttaggtatggcatatgcaatggtagcgattggtatagtaggatttgttgtgtgggctcatcacatgtacactgttggtctaggcactgatacaaaagcatattttttagcggctactatgattatagcagtgcccacgggtataaaaattttctcttggatagcaacaatgtggggtggttcaatatcatttaagacacctatgatgtgggcacttggatttatatttatgtttactgtaggtggagtaacaggtgtggtgttggcaaatgctggagtagatactgcaatgcatgatacttattacgtagttgcacactttcattacgttttatctttaggtgcagtttttgcaatttttgcaggtttttattattggttttcaaaaatgtcaggctatgaatattcagaatggctgggacatttacatttttggttaacgtttgtaggtgtgaatttaattttctttcctcagcatttcttaggattagcaggtatgcctag

SEQ ID NO: 225517 - DNA, 142 bp, Unknown
  Bacterial polypeptide expressing nucleotide sequence isolated from the Sargasso Sea
gcagtgtgcctatttagatcaatgaaaggtcattcaacacctacacatcactttggttttgaggctgctgcttggtattggcactttgttgatgtagtttggttattcctttttgcagcaatttatatttggggaagctaaa

SEQ ID NO: 225518 - DNA, 739 bp, Unknown
  Bacterial polypeptide expressing nucleotide sequence isolated from the Sargasso Sea
gatgattggcataggagttattggttttgcggtatgggcgcatcatatgtttaccgtaggactaagtgctaatagtttagtttattttactgcggcgacaatgattattgctgtaccaactggtatcaaaatttttagttggattgccactatgtggggtggctctatagagcttaaaactccgatgttattttcaattggttttatatttttatttactgttggcggtgttacaggcgtagttttagctaattcagctattgatagggccttccatgatacttattatgtggttgcccactttcattatactatgtcacttggagcattatttggtttatatgcatcatattattattggattagtaaaatatctggtaggcaatatcctgaattttggggtaaagtacatttttggactacttttattggtgttaatttagtatttttcccacaacatttcttaggtcttgcagggatgccgcgtaggattcctgactatccggatgcttacgctcactttaataagatatcttcatatggtacttattttagcatggcttcagttggtttgtttatactaatagttatttatactagcttaaaaggcaagaaagttggcaataatccatggggtgaaggcgcaacaacattagaatggactgtaagctcccctcctccgtttcattgttttgaggatggtataccaaaagtgaagggagagcaatttagaggctag

SEQ ID NO: 225519 - DNA, 970 bp, Unknown
  Bacterial polypeptide expressing nucleotide sequence isolated from the Sargasso Sea
tcaattaatgtcgtggtcactattatgaatatgagagcaccaggcgtagacttaatgaaaatgcctttgttcgtatggtcatggctaattaccgcatatttattaattgcagtgatgccagttcttgctggtgctgtaacaatgatgttaatggatattcattttggaacaagtttcttcaacgctgctgggggtggagatccagttttatttcagcatatattttggttctttggtcacccagaagtatatataatgattttgcccgcctttggtattgtttcacatattattgaaacattttctaggaaacagctctttggatattcatcaatggtctgggcaatgctttcaattgccatactctcttttgtagtttgggcacatcacatgtttacagttggactgcctttggctgcagaaatattctttatgtgggcaactatgttgatagctgttccaacaggtgtaaaagtttttaattgggtagcaacgatgtttagaggctcacttacctttgaaacacccatgttatttgccatttcttttgttgttcttttcacaataggtggattgtctggcttaatgcttgcaattgttccggctgattttcaatatcacgatacttactttgttgttgcgcattttcattatgttcttgtaccaggagcaatattctctattatggctgctgtttattattggattccaaaatggtgtggcaatatgtatgacgaaagattgggaaaactacacttttggttgtcatttatcggagttaatgtaaccttttttcctcaacactttattggcttagcaggaatgccaagaagatatcctgattattctttaatatttgctgattggaatatggtttcgagcgttggagcatttttatttggtttctcacaattgctgtttttatttattgttattaaaactgtgatgggtggcaaaaaagcaactgatc

SEQ ID NO: 225520 - DNA, 292 bp, Unknown
  Bacterial polypeptide expressing nucleotide sequence isolated from the Sargasso Sea
cttgggagtgttttttacttttatgcaaggagtagaatattacgaggcagccttacactactttagtttcactgacggaatatacccttcagttttttatatggccactggctttcatggctttcatgtaatggttggaacagcatttttggccgtgtgtttatttagagtatataagaaccattttactccggatagacattttggtttagaggcagcagcttggtattggcattttgttgatgttgtttggcttttcctttttatatgtgtttatgtttggggtgcataa

SEQ ID NO: 225521 - DNA, 880 bp, Unknown
  Bacterial polypeptide expressing nucleotide sequence isolated from the Sargasso Sea
ttttggaattacttaattccattttatgtaggtgcgagagatatggcattcccaagattaaatgccgtagctttttggttaattcctccttcgggtttgatgctagtagcaagctattttgttgagggtgctgctcaggctggatggacggcttatccacctttgagcataactactcctcaatccggacaaattatttggattcttagcgttctattacttggaggcagttctatatttggtggaataaactttatcgcgaccattataaaattaagaaggccaggattaaaacttatgcaattgccaatgtattgttgggcaatgctggggacaagtctattagttgttttgtcaactcctgttttagcaggcactttaattctacttagcttcgatatcatcgctaatacaggttttttcaatcctgttttaggtggcaatgtggtagtttatcagcatttattttggttttattctcatccagctgtatacattatggttcttcctgcctttggtttagttagtgaaatacttcctgtgcatgctagaaaaccactttttggatatacaacaatggttttttcaataatggggatagtagttttaggtttagttgtctgggcgcatcacatgtttacgagtggaactcccccttggatgagattattcttcactattgccacagcatttattgctgttccaacaggtataaaatttttcaattgggttgcaacattatggggaggtaaaatttccataaatagtgcaatgctattctcttgcgggtttattataaattttgtttttggaggtattacaggagttgctttagcacaggtacctttcgatattcacgtacatgatacctatttcgttg

SEQ ID NO: 225522 - DNA, 637 bp, Unknown
  Bacterial polypeptide expressing nucleotide sequence isolated from the Sargasso Sea
tggtacaatgtatttaatttttgctatcgtagcaggactgattggttccgctttttcagttttaatgagaatggagctaatgtacccaggagatggcatccttggaggaaatcaccatctatataatgttttagtaacaggacatggactgatcatgatattttttatggtcatgcccgcgatgataggtggatttggaaattggttcgtccctattatgattggcgcgccagatatggcatttccacgaatgaacaatatttcattttggttgttaccagtttctttaatattattactcgcatcaatttttgttgatgggcctcctggccaaactggggttggaggtggctggactatttatcctccgttatcttctaagacaggtcaacctggtccagcaatggatttagcaatattaagtttacacatcgcaggtgcatcatcaattttaggagcaattaactttattacaacaattttgaatatgagaactcctggaatgactctacataaaatgcctttatttgcctggtcgattttagtcactgcgtttctacttcttttatctcttccagttttagcaggagctatcacaatgttactgactgataggaactttggaactgcatttttt

SEQ ID NO: 225523 - DNA, 341 bp, Unknown
  Bacterial polypeptide expressing nucleotide sequence isolated from the Sargasso Sea
tattttagctggacaacgatcacaagcattagttagtttatggattacaattgtcctagcagcggtttttactggattacaagtgatggaatatattgaagcaccgtttacaattactgatggagtttatggttcaacattttaccttgctaccggtttccacggtttccacgtatttgttggtacaatttttttatttgtttgccttgtgcgttcatataaaaatcattttacaataaaccatcattttggttttgaagcagctgcatggtattggcattttgttgatgttgtgtggttatttctttttgtcgcaatttattggtggggcggaaattaaa

SEQ ID NO: 225524 - DNA, 871 bp, Unknown
  Bacterial polypeptide expressing nucleotide sequence isolated from the Sargasso Sea
ggaatgaccattcataaaatgccgttatttgtgtgggccatgttaattactgctttcttattattactagcagtacctgttttagctggtgctatcacaatgcttcttacggatagaaactttggcacaacattttttaatcctgcaggtgggggtgatccagttttgtttcaacatctattctggttctttggtcaccctgaagtttatatcatgatacttcctgcctttggtatcgttagccaagttatttctactttctcaagaaaaccaatatttggctatcttggtatggtttatgcaatggtatcaattggttttattggttttattgtttgggcgcatcatatgtttactgtaggtatgagtgcagacctaagagcctattttatgttggcaacaattatcatcgctgttccaacaggaattaaaatatttagttggattgcaacaatgtggggtggttcacttactttcgagacacctatgttgtttgcgattggatttgtatttttatttacactaggtggtgtaactggagtaattttggcaaacgcaggaattgatacagtcatgcatgatacatattatgtggtcgcgcactttcattatgtattaagtatgggtgctatgtttggtattttcgcaggtatctattactggtttggtaaaatgactggaaagcaatataatgagttctttggcaaactccatttttggcttttctttattggagttaacgtaacgtttttcccacagcactttttaggtttagcaggaatgccaagacgtatacctgactatccagatgcatacgctggatggaatttgatttcttcttatggatcatacttatcctttggtgctacgc

SEQ ID NO: 225525 - DNA, 883 bp, Unknown
  Bacterial polypeptide expressing nucleotide sequence isolated from the Sargasso Sea
tatgagtactaatatagataaacttcatgacgatcaccatcatactccatctggtattatgagatggattactacaacaaaccataaggatatcggcacgttgtatctttggtttagccttctaatgttttttatcggtggttttatggcactagtcatacgtgcagaattgttccagcctggacttcaattggttattcctggttttttcaatcagatgacaacaatgcatgcactaataatgatttttggagcggtcatgcctgcctttgtaggattagccaattggcaaataccattaatgattggtgcgccggatatggcacttccgagacttaataattggagtttttggattctaccttttgcatttactatgatgataagtactctattttttgaaagcggcggaccagcagctggttggacattatatcctccattatctctgcagggtggagactcaatgccgtttgtcatcctttcgattcatatgcttggattatcatcaatattgggagctattaatgttattgcaaccatacttaatatgagagcgcctggtatgactttgatgaaaatgcctatctttgtatggacatggttaatcactgcatttttattaattgctgcaatgcccgttctggctggagctattacaatgttacttactgatagattttttggaacaacattttttacagcgtcaggtggtggcgatcctgttatgtttcaacatattttttggttttttggacacccagaagtatacatattaatattgcctgcatttggcataatctcaaccatcattccggctttctctaggaaaaaactatttggatatgactctatggtttatgctactgcgtcaatagcattg

SEQ ID NO: 225526 - DNA, 859 bp, Unknown
  Bacterial polypeptide expressing nucleotide sequence isolated from the Sargasso Sea
gttttattccagcacttattctggttttttggacatcctgaagtctacattcttattttacctggctttgggatcgtgagtcatgttgtagcaacattttctaagaaacctgtgtttggttatcttggtatggcttatgcgatggtttcaattggtttcctgggctttattgtctgggctcaccatatgtatactgttggcatggacgcagatgtaaaggcttactatatttttgcaactatggtgattgcagtacctaccggcatcaaggtattttcatggattgcgacaatgtggggtggttcagtagagcttaagactcctatgttatgggcaatagggtttattttcctatttactgtgggtggagttaccggagttgttctggccaatgcaggcatagatcactctttacatgatacgtactatgttgtcgcacatttccattacgtactatcaatgggtgcagtgtttgcaatcttcagtggtttttactactggtttggtaaaatgtttggaagtgattattctgaactattgggcaaattacatttttggttaacatttgtaggggttaatttaatcttcttccctcagcatttcttgggtcttgcaggcatgcctaggaggtatgtagattatcctgatgcttacgctggttggaactatatatcttcaattggctcatttgttactttgattggattagctgtattcttcataatgcttgttcatgcttttgtgagacagaaacaaacagctgacaatccttggggtgaaggagcaactactttagaatggacgttatcatctccaccacctttccatcaatttgaggagctaccagaagtaaagtagt

SEQ ID NO: 225527 - DNA, 859 bp, Unknown
  Bacterial polypeptide expressing nucleotide sequence isolated from the Sargasso Sea
aaaatgccattatttgcttggtcaatattagtaacagctttcttattattgttatcattaccagttttagcaggagccattacgatgcttcttacagataggaattttggaacagctttctttgatgcgcaaactggtggagacccagttctattccaacatttgttttggttctttggtcatccagaagtttatattttaatcttaccaggttttggaatgatcagtcatattgtttcaacattttctagaaaaccagtttttggatatttaggaatggcttatgcaatggttgcaattggaattgttggttttgttgtgtgggctcaccacatgtacacagtaggtttaagtacagatacaaaagcatactttttagctgcaacgatgatcattgcagttccaaccggtataaaaatattttcatggatagcaactatgtggggtggttcgatttcattcaaaaccccaatggtttgggctttaggatttatatttttattcacagttggcggagttacaggtgtagttcttgcgaatgctggtgttgatactgcaatgcatgatacatattatgttgttgctcattttcattacgttttatcattaggagctgtgtttgccatcttcgctggtttttattactggtttggaaaaatgactggttacgagtattcagagtggatggggcaattacacttctggttaacgtttattggagtaaacttagttttcttcccacaacactttttaggccttgcaggaatgccaagaagatatgctgactatccagatgcttttgcgggatggaattacatttcttcaattggttcttatatttctgtaattggattagtag

SEQ ID NO: 225528 - DNA, 679 bp, Unknown
  Bacterial polypeptide expressing nucleotide sequence isolated from the Sargasso Sea
aatgtcagcagaaaaaaaacacgattaccacttagttgacccaagcccttggccaatctacacatcctttgcatgcctagtattagccattggtgcaattttttatatgcataacggtatttcatggggaatgtatcttggtttagcattattaatttatggtgcatatatgtggtttagagacgtagtaatcgaagctgaacatcaaggtcatcacactcctgttgttcaaattcatcatagatatgggatgactttatttattgcttcagaggtaatgttctttgttgcatggttctgggcttactttgatataagtttatttccaaacgaatttgttggaaatgtatggccaccaaaagatattgaaacttttgatccttgggacattcctttaataaatactttagttttgttattatcaggaacaactgttacttgggctcatcacgctttattagaagatgatagaaaaggatttatacaaggtttaacactaactgttattcttggtttcttttttacattattgcaagcatacgaatatcatcatgctacttttacttactcaggccatatttatggagctgtattttatatggcgacaggtttccatggttttcacgtcataatcggaactatatttttagcagtatgtttgtggagaggaagacttggt

SEQ ID NO: 225529 - DNA, 884 bp, Unknown
  Bacterial polypeptide expressing nucleotide sequence isolated from the Sargasso Sea
cataaagacatcggaacaatgtatctaatttttgcttttgttgctggagttattggaactgcattttctgttttaatgagaatggaattaatgcatccaggcgatggaattttaggtggaaattatcatttgtacaatgtgttagtgacaggtcatggattaataatgattttctttatggtaatgccagccatgataggtggttttggaaattggtttgttccaattatgattggtgcacctgatatggcattccctcggatgaataatatttctttttggttattacccgtttcattaacgttattaatattgtcgatttttgctgatggtcctccaggacaaactggagttggaggtggatggacaatatatcctcctttatcgtcaaaagctggacaacctggtcctgcaatggatttagcgattttgagtttacacttggctggtgcttcatcaattttaggagcagttaattttatcacaacaattcttaatatgagaactcctggaatgactttacacaagatgccattatttgcttggtcaattctggtaacagcttttttattgttattgtctttaccagttctagcaggagcgataacaatgctattaactgataggaactttggaaccgccttttttgaagctcaaactggaggagacccagtattgtttcaacatttattctggttctttggccatccagaagtttatattttaattctaccaggatttggaatgattagtcatattgtttcaacattttctagaaaaccagtttttggctatttaggtatggcttatgcgatggtcgcaatcggaatagttggcttcgtagtttgggctcaccatatgtatactgttggattaagtacaga

SEQ ID NO: 225530 - DNA, 262 bp, Unknown
  Bacterial polypeptide expressing nucleotide sequence isolated from the Sargasso Sea
cttgaatattatgaagcttatgcacattatggccttaaattaaattctggaatatatggatcaacgttttttatgcttactggttttcatggcttccatgtgatgatgggcggttttatgttagctattatgcttgcaagatcagtctttgcaggtcactttgagcaacacgatcactttggctttgaagctgcatcatggtattggcattttgtagatgttgtctggctaatgctatttatatttgtttatattttataat

SEQ ID NO: 225531 - DNA, 398 bp, Unknown
  Bacterial polypeptide expressing nucleotide sequence isolated from the Sargasso Sea
tactctcatactattaatgtctggtactacatgtacatgggctcaccatgctgtaagagaaggacatagggatcaggcaattaaagctttatggcttacagttggattaggagttgcttttacattactgcaagcttttgaatactatgaagcattccatcattatttcaagtttacggatggaatttatccttctgttttttacatggcaacaggtttccatggttttcatgtcatggtaggtacagcatttttagcggtttgcttatttagagtttataaaaatcacatgacacctgaaagacattttggattagaagcagcagcatggtattggcatttcgttgatgtagtttggctttttttatatgtttgtgtttatatttggggtgcataaa

SEQ ID NO: 225532 - DNA, 811 bp, Unknown
  Bacterial polypeptide expressing nucleotide sequence isolated from the Sargasso Sea
agtgcaatcatgatgatacttgatcattcgataggaacaagcttctttatgcctgctatgatttcagcaggagaacagttgagctataacgatggtagcccaatactttttcaacatcttttttggttcttcggtcaccctgaggtatatatcgtagcgctcccagcatttggattggtatcggatgttttagcaactcatgccagaaaaaatatatttggatacaggatgatggtttgggcaatccttgctattggtggcctcagctttattgtttgggcgcatcacatgtatgtcagtggaatgaacccatacttcggtttcttcttcgcaacaacaacccttattattgctgttcccactgcattaaaggtatacaactgggttctaacattgtggcagggtaatcttcatctcagaacaccaatgttatttgcgattggttttatatttacctttattcatggggggctaacaggtttatttttgggtaatgtaaccatagatttacctctatcagatacctattttgtagtagcacattttcatatggttatgggtgtgtcacctgtattggtagtattcgcttctatctatcattggttcccattaatgtctggcaagatgtacaatgaaacacttggaaagtggcacttttggctcacgtttttaggtgcctatgccgtatatttaccaatgcattatcttggttttcaaggtgtacctagaagatacttttctttaggtaatactgacttccttccagaatcagcacatgcactaaacacgagcattacaatttcagccatca

SEQ ID NO: 225533 - DNA, 568 bp, Unknown
  Bacterial polypeptide expressing nucleotide sequence isolated from the Sargasso Sea
atgtctaaaacaaaacaatcccatccataccacttagtcgatcctagtccatggcctttgtctggtgcaatatctggtttagttattgccgtaggagcaataatgtatatgcatgagattaattatggttcatgggtttttggaatgggaggttttttagtaattgcaacaatgtttggatggtggagagatgttattagagaagcacaacatgaaggtcaccataatccaatcgtagtaatagggttaagatatggtatggccttatttatagcttctgaggttatgttttttgttgcttggttctgggctttttttgatgccagcatatttgcaaatgaagctatacagtatagtagagtaacatttactggtggagaatggccacctgtaggagtagaagtttttgatccatttcatttaccacttttgaatactgtaatacttttaacttcaggtactacatgtacttgggcccatcatgctttgatagaaggtaacagaaaaggacttgtatatggtttagttgctacaataggactaggagttctatttactttcgtacaag

SEQ ID NO: 225534 - DNA, 504 bp, Unknown
  Bacterial polypeptide expressing nucleotide sequence isolated from the Sargasso Sea
tattcacaattggtggcttttcgggtttgatgttagccataacccctgccgattttcaatatcacgatacttactttgttgtagcacattttcattacgtgctcgtacctggctcagttttttcaatcatggctgccgtttattattggctgccaaaatggtgcggaaatatgtatgatgagcgattaggccgattacatttctggttatcatttatcggtgtcaatgttacattttttccacaacattttattggtcttgctggcatgcccagaagaatacctgactatgcactgcaatttgctgactggaatatgatttcaactgccggtgcattcttattcggtgcatctcagatcttgtttttattcattgttgtcaagactgttatgggaggcaagaaagccacacctgaagtttgggaaggtgcgcagggattagagtggacagtagattctccacctccataccatactttttcaacaccaccattagttaagtaat

SEQ ID NO: 225535 - DNA, 727 bp, Unknown
  Bacterial polypeptide expressing nucleotide sequence isolated from the Sargasso Sea
gatgctcagcagcaagacacatattatgttgttgcccattttcattatgtattatttggtggcgcattacttggtctatggtctggaatttattattggtggccaaagtttacaggtaaattcctaaatgaaaaaatcggatatttgcacttcattattgtactaatcggatttaacattactttcttcccaatgcattggcttggcttagatggaatgccaagaagaatcgcaacataccctgaatctatggggtgggaagtttctaatcttgttgcgagcctaggaagttttattttaggttttggtgttttagttttcctttataacgtaatctattcaaggaaaggtccaaagattgctggaaatgatccgtgggacggcaggacgttagaatggtctataccatctccgcctcctcattataattttgaaacaatacctgaggttaaatatagagatgatttttggtataaaaaatatcctgaattagcaaatgaatctcacggtggaggttcaggcgtagaagaaaatagtcattcggatagccatgaggaaccacacatgccggacccatcatattatccattatttataagcctaggtatgacaataatgatcggtggatttataccatttacaggtcactggattgtatgtggaattggattggcgatttttacttgggcatttttgggatggtgttatgaaccagttaacgattaaa

SEQ ID NO: 225536 - DNA, 940 bp, Unknown
  Bacterial polypeptide expressing nucleotide sequence isolated from the Sargasso Sea
ctttctttatatttgcagtgcatattattgggcgcatcatcaatcatggggatcaattaatgtgattgtaactattatgaatatgagagcgcctggtatgacattgatgaaaatgccactttttgtttggtcatggttaataacagcatatctgttaatagcagtcatgccagttcttgcaggagcagtaaccatgatgctaatggatatccatttcggaacaagtttctttaacgctgccggcggcggagatcctgttttatttcaacacatcttctggttttttggccatcctgaagtttatattatgattcttccagcttttggtattgcatctcatatcattgaaacgttctcaagaaaacagctatttggctatgcttccatggtttgggcgatggcctccattgccattttatcatttgtcgtgtgggcgcatcatatgtttactgtagggcttccattagccgcagaattattttttatgtgggcaactatgttaatcgctgtcccaactggagttaaagtttttaattgggtaacaacaatgtttaaggggtcaatctcttatgaaacaccgatgctatttgcaattgccttcgtagttttatttaccataggtggtttctctggtttaatgcttgcgattactccagctgatttccaatatcacgatacgtattttgttgtcgctcattttcattacgttttagtaccaggatcaattttttcaatcatggctgcagtatattactggattccaaaatggacaggaaatatgtatgacgaaagacttggcaaacttcatttttggctatcattcattggggttaacgtaacatttttccctcaacattggataggtttagctggaatgccaagaagggtcccagattatgctctttcatttgctgattggaatatgatttcctcagttgga

SEQ ID NO: 225537 - DNA, 332 bp, Unknown
  Bacterial polypeptide expressing nucleotide sequence isolated from the Sargasso Sea
tttttggttaatgtttgtcggagttaatcttactttcttccctatgcattttttagggttacaagggatgcctagaaggtatgctgattatccagatgcatatgcgggttggaatgctatagcaacttatggctcttacatatcaggagttgcagtaatttggtttgttattattctttttaggacactgtactttggaaaacaatgtccagacaatccttggggaggagaacccgatactcttgagtggaagactagctcacctccaccttttcatacttacgatactcttcctagcattggtaaaaagagtaagaaggcaggacattaaa

SEQ ID NO: 225538 - DNA, 269 bp, Unknown
  Bacterial polypeptide expressing nucleotide sequence isolated from the Sargasso Sea
ttcttgttttcaagcttacgaatatcatcatgcaacatttactttagatggtggaatttatggttccacattttatatgtcgactggttttcatggctttcatgtaattgtcggaacagtttttcttgcagtttgtttgtttcgatcaatgagaggccattcgacgcctcaacaccattttggatttgaagcagcagcctggtattggcattttgttgacgtagtttggctattcttatttgctgcgatctatatttggggaagctaat

SEQ ID NO: 225539 - DNA, 298 bp, Unknown
  Bacterial polypeptide expressing nucleotide sequence isolated from the Sargasso Sea
aacggcaactgttgtgctaggtttcttttttacattattgcaagcgtatgaatatcatcatgctacttttgattattcaggtcatatttatggagctgttttttatatggctacaggttttcacggatttcacgtaattgtaggaacaatatttctagccgtttgtttatggcggggaaaattaggtcattttacaaaagatcatcattttggatttgaagcagctgcttggtactggcattttgttgatgtggtttggttatttttgtttgctgccatttatatttggggaagttaa

SEQ ID NO: 225540 - DNA, 923 bp, Unknown
  Bacterial polypeptide expressing nucleotide sequence isolated from the Sargasso Sea
tggagcccctgatatggcattgccaagaatgaacaatttaagtttttggatacttccatttgcattttttattttattgtcttctctattcatggagggcggagccccaaattttggctggacattttatgcgcctttatccacaacttatgctcctccaagcgtcacattttttattttttcagtccatattatgggagcctcttctattatgggctctattaatgttgtagtaaccattatgaatatgagagcgcctggcatgagtcttatgaaaatgcctttatttgtttggtcttggctaattacagcttatcttttaatagcagtcatgccagttcttgcaggagctgtaacaatgatgcttatggatattcactttggcaccagtttctttaatgctgctggtggcggagacccagttttatttcaacatattttttggttttttggccacccagaagtctatattatgattcttccagcttttggtatcgcctctcatatcatcgaaacattttcaagaaagcagttatttggatactcctctatggtttgggccatggcctcgattgcaattttatcgttcgttgtttgggcgcatcatatgtttacagttggccttcccttggctgcggaactatttttcatgtgggcaacaatgttaattgcagttccgacaggagttaaagttttcaattgggtcaccacaatgtttaaggggtcaattacatacgagacaccaatgctgtttgcaatagcttttgttgttttgtttaccataggtggtttttctgggctaatgcttgcaattacaccagctgatttccaatatcatgatacatactttgtagtggctcacttccattatgttcttgtgccaggatcaattttttcaattatggctgctgtctacttttgga

SEQ ID NO: 225541 - DNA, 816 bp, Unknown
  Bacterial polypeptide expressing nucleotide sequence isolated from the Sargasso Sea
aatgtcagcaacaactgcagatcacgagcatcatcataatccaacaggttggaagagatgggcttattcaactaaccataaagacattggaacaatgtatcttatctttgcaattgttgcaggtataattggatctgcgttttcagttttgatgagaatggaattaatgcaccctggagatggaattcttggaggtgattatcatttatataatgttttagtaactggtcacggtctaatcatgattttctttatggtcatgccagcgatgattggtggatttggtaattggtttgttccaattatgatcggtgcaccagatatggcatttccgaggatgaataatatttctttttggttattacctgttgcactcattttattattggtatcgatttttgttgatgggcccccaggcgcacaaggagtaggtggaggttggacaatttacccacctttatcatcaaaaactggtcaaccaggtccagcaatggatttagcaattttaagcttacatgtggctggagcttcttcaattttaggagcgattaactttataacgacaattttaaacatgagaactcctggcatgactttacacaaaatgccattattctcatggtcaattctagtaacagcatttttacttttattgtcactaccagttttagcaggagctataacaatgcttttaacagatagaaactttggaactgccttctttgaagcacaaacaggtggagatccagttttattccaacatttattttggttttttggtcacccagaggtatatattttaattttgccaggttt

SEQ ID NO: 225542 - DNA, 157 bp, Unknown
  Bacterial polypeptide expressing nucleotide sequence isolated from the Sargasso Sea
tggaacaatatttttagctgtatgtttgtggagaggtaaattgggtcattttacaaaagatcatcattttggatttgaggcagcagcatggtattggcactttgtcgatgttgtttggttatttttatttgcagctatttatatttggggaagttaa

SEQ ID NO: 225543 - DNA, 928 bp, Unknown
  Bacterial polypeptide expressing nucleotide sequence isolated from the Sargasso Sea
ggtcagccaggtccggctatggatttagcgattttaagtttacacttagcaggagcctcttcaattttaggtgctgtcaattttatcactacaattttaaatatgagaactccaggtatgacattacataaaatgcctctatttgcttggtcaattttagtaacagcatttttattgttgttatctctaccggtactagctggagcaattactatgttgttaactgatagaaattttggaaccgcattttttgaggctcaaacaggaggtgacccagttttattccaacatttattttggttctttggtcatccagaagtttatattttaattctgccaggctttggaatgattagccatattgtttcaacattttctagaaaaccagtttttggttatttaggtatggcatatgcaatggtagcaattggaattgtaggatttgttgtatgggcacaccatatgtacacagtaggcttaagcacagatactaaagcttattttcttgcagcaactatgattatagctgttccaacaggcattaagattttttcatggattgcaacgatgtggggtggatcaatatcatttaagacacctatgatgtgggcacttggatttatattcatgttcacagttggtggggtaacaggtgtagtattagcaaacgctggtgtagatactgcaatgcatgatacttattatgtggtagcacattttcattatgttttatctttaggtgcagtttttgcaatatttgcaggtttttattattggttttcaaaaatgtctggctatgaatattctgaatggctaggacatttacatttttggttaacatttgttggagtgaatttaattttctttcctcaacatttcttaggattagctggaatgcctagaagatatgcagattaccctgatgctt

SEQ ID NO: 225544 - DNA, 496 bp, Unknown
  Bacterial polypeptide expressing nucleotide sequence isolated from the Sargasso Sea
ttttgggcctatttcgatgcaagtctttttccaggtgaatttgtaggcaatgtttggcctccaaaagatattgaaactttcgatccttgggatattcctttaattaatactttagttttattgttgtcaggcacaacagtaacatggtcccaccatgctttacttgaagatgatagaaaaagttttattcaaggtttgtggctcacagttatattaggtgcctctttcacggcattacaaatttatgagtatcagcatgcgagctttaatttttctggtcatatatatggtgcaacgttttatatggcaaccggatttcatggtttccatgttttagttggaactatatttttagcagtatgtttgtggagaggtaaacttggtcattttaacaaagatcatcatttcgggtttgaggctgcggcttggtattggcattttgttgatgtagtttggctatttttatttgcagcaatatatatttggggcagttaat

SEQ ID NO: 225545 - DNA, 737 bp, Unknown
  Bacterial polypeptide expressing nucleotide sequence isolated from the Sargasso Sea
tggaatagtaggttttgttgtttgggctcaccacatgtacacagttggtttagacactgacactaaagcatatttcttagcagcaacaatgatcatcgctgttccaacaggaattaaaatattttcatggatagctacaatgtggggaggatctatatcatttaaaaccccaatggtttgggctttaggatttatatttttatttacagttggaggagtaactggtgttgtactagcaaacgctggagtagatactgcattgcatgatacttattatgttgtagctcacttccactatgtattatctttgggagctgtttttgcgatatttgcaggcttctattattggtttggtaaaatgtcagggtatgaatattctgagtggatgggacaacttcatttttggttaactttcataggagtaaacttagttttctttccacaacacttcttaggattagctggaatgccaagaagatacgctgattatccggatgcattcgctgattggaattatatttcttcaatcggttcatatatttctgtagttggcttagtggtatttttcgctaatttaatctacgcttttgcaaaaaagaaaaaagcagcacaaaacccatggggagaaggggccacaacattagagtggacagttccatcaccaccgaattttcatacttttgatgaactgccgaagtttgaagattatgaaggcactgaaaaatctagtagttagt

SEQ ID NO: 225546 - DNA, 383 bp, Unknown
  Bacterial polypeptide expressing nucleotide sequence isolated from the Sargasso Sea
tacaggttcatctcatgatcatcatggtgctccatcaggctttgtaaaaagatggttatattcaactaaccataaagacattggtactatgtatataatttttgctatagttgctgctttcattggcggagcgatgtcaatttacatgagaatggagcttatgaacccaggagtacaatacatggaagatggacatgtatggaatgttttcacaacagctcatggtttgattatggttttctttgtggttatgcctggattaattggcggttttggcaattggtttgttcctattatgattggggcaccagatatggcgtttccaagaatgaataacatatccttttggcttttacctccaagctttgttttgcttttttttt

SEQ ID NO: 225547 - DNA, 406 bp, Unknown
  Bacterial polypeptide expressing nucleotide sequence isolated from the Sargasso Sea
aatgtcagcaacaaccgcagatcacgaacatcatcttaatccaacaggttggaagaggtgggcttattcaactaatcacaaagatataggaactatgtatcttatctttgcgattatcgctggcttaattggatctgcgttttctgttttaatgagaatggaattaatgcacccaggagatggaattctcggcggcaactatcatttatataatgttttggttacaggtcatggtttaatcatgattttctttatggttatgccggcaatgatcggcggctttggtaactggtttgttccaataatgattggtgcaccagacatggcatttcctagaatgaataatatttctttttggcttttacctgtggcactaattttgttgctagtatcaatttttgttgat

SEQ ID NO: 225548 - DNA, 622 bp, Unknown
  Bacterial polypeptide expressing nucleotide sequence isolated from the Sargasso Sea
attattatcgcagtgccaacaggggtaaaaatttttagctggatagcgacaatgtggggaggatctctaacttttgaaaccccaatgttatttgctattggttttgtctttctttttacacttggtggagtaacaggagtaatactagctaacgctggaattgataccgtaatgcatgatacttattatgtcgttgctcatttccattacgttttaagcatgggcgccatgttcggaatatttgctggtatttattattggttcgggaaaatgtctggacgtaaatataatgaatttttgggaaaacttcatttttggttattctttataggagtaaatgtaacattctttcctcaacattttttaggacttgcaggtatgccaagaaggatccctgattatccagatgcatacgcaggttggaatttagtctctacttatggatcatacctttcatttgcagcaactctcatttttttctttgcaatagtttatgctttgttttttggtaaaaaagaagtttcaaatccttggggagaaggcgctgatacactagaatggactttatcttcaccaccaccttttcatcagtttgagaccttaccggaatttaaagaataaa

SEQ ID NO: 225549 - DNA, 713 bp, Unknown
  Bacterial polypeptide expressing nucleotide sequence isolated from the Sargasso Sea
ttggggtcaccatatgtttacaagtggccaatcaaaattagtgaatataattttctcagcgatcacttttggtgttgccataccaacggccattaaagtctttaattggatatggactatgtataaggggtctgttgaattgtccgcggcaatgctacattcattgggtttcatctttctttttacaattggtggacttactggactgcatctcgcagctcttgcagcagatatacacttacatgacacatattttgttgttgcccatatgcattacgttatggtgggcggcactttatttggaatattctcagcactccatttttggtatcccaaaatgtggggagtgatgtttgatgaattcaaagccaaaatagctttcgttcttctttttattggattcaatgtcactttctttcctcagtttataatgggaactttaggtatgccaagaagatattttaattacgatccagaatttaccttttatcaccaactctcgacaagtggaacatggttcttggcaataggatttattttgatgatatataatttcttcactcctatatcaaaagccccagctaatccttatggatcaaagtcattagaatggagcatgccttcaccgcctccaactttaaattttgacgaaattcctactgtaactgcatcaacatatgattacggaaataaaatagaggaagacgcataga

SEQ ID NO: 225550 - DNA, 661 bp, Unknown
  Bacterial polypeptide expressing nucleotide sequence isolated from the Sargasso Sea
aatgtatcttggtttagctttgttaatttatggtgcctacatgtggttcagagatgtagttattgaagctgagcatcaaggtcatcatactccagttgtccaaattcatcatagatatggaatgactttatttattgcttcagaggtaatgttctttgttgcatggttctgggcttactttgatataagtttatttccaaatgaatttgttggaaatgtatggccaccaaaagatattgaaacgtttgatccttgggacattcctttgataaatactttagttttgttattatcaggaacaactgtcacttgggcccatcactctttattagaagatgatagaaaaggatttattcaagggttaactttaacagtaatccttggtttcttttttacattattgcaagcatacgaataccatcatgctactttttcttactcaggccatatttatggggctgtattttatatggcaacaggttttcatggttttcacgttataattggaacgatatttttagcagtatgtttgtggagaggaagacttggtcattttactaaagatcaccattttggatttgaagcagctgcttggtactggcattttgttgatgtagtgtggttattcttatttgctgcaatttatatttggggaagttaa

SEQ ID NO: 225551 - DNA, 244 bp, Unknown
  Bacterial polypeptide expressing nucleotide sequence isolated from the Sargasso Sea
atcatcatgcacatttgcattttcagatcacatatatggttcagtattttacatggcaacaggatttcatggttttcatgtgatcgtaggtacaattttcttagctgtatgtttgtggagaggaaagttaggtcatttcaacaaagatcatcactttggttttgaggcagcagcctggtactggcactttgttgacgtagtttggctattcttatttgctgcgatctatatttggggaagctaa

SEQ ID NO: 225552 - DNA, 475 bp, Unknown
  Bacterial polypeptide expressing nucleotide sequence isolated from the Sargasso Sea
atgcttgcaatagctccagctgactttcaataccacgatacttattttgtcgtagcacattttcattacgttttagttccaggagccatctttggaataattgccggtgtttattattggttaccaaaatggaccggcaacatgtacgacgaagttctagggaagactcatttttggatgtctttcatttcggttaacattactttctttcccatgcattttgttggattagcagggatgcctagaagaattccagattacgctcttcaattcgcagattttaatatggtgatttctattggtgcattcatttttggtttaacgcaactcctcttcttgtttattattcttaagagtatttttgccggtaaacaggctacttcagaagtatgggaaggcgccaaaggactagagtggaccgttgcatcgccagctccgtatcacactttcgaaaccccgccagaagttaagtgaa

SEQ ID NO: 225553 - DNA, 774 bp, Unknown
  Bacterial polypeptide expressing nucleotide sequence isolated from the Sargasso Sea
agttacgcagattcagtaagtcacgaccatcatgatcataaaccaggatttataaaaagatggtttttttctaccaatcataaagatattggaactctctatataatattcgccatactagctggtttagttggaggtttcttttcgttattaatgagagctgaattagctgctccaggcttagatgttgttgctgatggtcaagtttggaatgtaattatcactgcccatggtttgttaatggtatttttcgttgttatgccagcattaataggtggctttggaaactggtttgtcccattaatgatcggtgcgcctgatatggctttcccaagaatgaataattttagtttttggatacttgttcctgctctagttttattagttgtttcggcaacaataggaactggtgctggtacggggtggacaatttatcctccactatcaaataaactcggacacgcaggaccctctgttgacatggcaatttttgctcttcatttagcaggtgcttcttcaatcttaggtgcagttaattttataacaacaatacttaatatgagaacgcctggaatgactcttcacaagatgcctctttttgtatgggctatgttaattacagcattcttacttttattagctgttcctgttttagctggagcaatcacaatgcttctaactgatagaaactttggtacaacattctttaatcctgcaggtggtggagatccagttcttttccaacacttattttggttttttggtcatcctgaa

SEQ ID NO: 225554 - DNA, 575 bp, Unknown
  Bacterial polypeptide expressing nucleotide sequence isolated from the Sargasso Sea
aatggcagacataacagcagatcaagtaaacagtcatgatcatcatccaacaggatggcgaagatatctatattctacaaatcacaaagatataggaactttatacttaatttttgcaattatcgccggtttagtaggaactggtatgtcagttttaatgcgaatggagttgatgtatcctggtgatggtatactaggtggcgatcacaatctttataacgttctggttacaagtcatggcttgttaatgatattttttatggtgatgccagcaatgatcggaggatttgggaactggatagttcctttgatgatcggtgctccagatatggcttttcctagaatgaataatatttcattttggttgttgccagcatctctaattttattaattgcttcactttttgtggatggtacatctggtggcccaggtgtcggaggtggctggacaatatatccaccgctttctgcaaatttaggctcaccaggtcctgcagttgatttagcaattttttctcttcacttagctggagcttcttcaattcttggtgcaatcaattttataactacgatct

SEQ ID NO: 225555 - DNA, 873 bp, Unknown
  Bacterial polypeptide expressing nucleotide sequence isolated from the Sargasso Sea
gcattcccaagattaaatgccgttgctttttggttaattcctccttcaggtttcatgctggttgcaagctattttgttgagggtgctgctcaggctggatggactgcttatcctccattgagcataactactcctcaatcgggacaaattatttggattctgagcgtcctattacttggaggcagttctatatttggtggaataaactttatcgcaaccattatcaaactaagaaggccgggattaaaacttatgcaattgccaatgtattgttgggcaatgcttgggacaagtcttttagttgttttgtcaactcctgttttagcaggcactttaattctacttagcttcgatatcatcgctaatacaggttttttcaatcctgttttaggtggcaatgtcgtagtttatcagcatttattttggttttattctcatccagctgtatacattatggtccttcctgcctttggtttagttagtgaaattcttcctgtacatgctagaaaaccactttttggatatacaacaatggttttttcaataatgggaatagtagttttaggtttagtcgtttgggcgcatcacatgtttacgagtggaacgcctccttggatgagattattctttactatcgccacagcatttattgctgttccgacaggtataaaatttttcaattgggttgcaacattatggggaggtaaaatttccattaatagtgcaatgttattctcttgcggatttattataaattttgtttttggaggtattacaggagttgctttagcacaggtacctttcgatattcacgtacatgatacctatttcgttgtagcccattttcattacatagtttatggagggactgtt

SEQ ID NO: 225556 - DNA, 726 bp, Unknown
  Bacterial polypeptide expressing nucleotide sequence isolated from the Sargasso Sea
catgagttcaaaaaattcaaattctcaccaatatcatttagtagatcctagtccatggcctctattggcgtctattggggctttagttttgtgttttggagctgttatatattttaggtcagacaatccttggataatgatactgggcttagcatccgtcatttatatcggttacatgtggtttcgtgacattattaaagaaggggaacatgatggtcaccattctgaagttgttcaattaggacttcgatatggtatgactttatttatcgcttcagaggtgatgttttttgttgcatggttttgggcttattttaatgcgtcattgtttcctacagaacaaattggctccgtatggccgccagcggatatccatttgatggacccgtggcatattcctcttataaatactcttatactattactatctggtacaacacttacttgggcacatcacgcacttcaagaaggtcatagaaaagaagttatccaaggactcattctcacaattatattaggtgttatctttacggggtttcaagtatatgagtatatgcatgcagaatttgaattttcaggtcacatatacggtgctacattttatatggcaaccggatttcatggtgctcatgttcttataggaacacttttcatagttgtttgtttaggaaggatgcttgctggccactttaaatctgatcaccattttgggtttgaggcatgtgc

SEQ ID NO: 225557 - DNA, 449 bp, Unknown
  Bacterial polypeptide expressing nucleotide sequence isolated from the Sargasso Sea
ccaatatcacgatacatattttgttgttgctcattttcattatgttttggttcctggagcaatattctctatcatggccgcagtctattactggattccaaaatggtctggaaatatgtatgacgaaagacttggtaaacttcatttttggctttcattcataggtgtaaacgtcacattctttccacaacattttattggtttagctggaatgccaagaagatatcctgattatgctctcatatttgctgactggaacatggtttctagtattggagcatttctatttgggttttctcaattactgtttttatttattgttatcaagactgtaatgggtggcaaaaaggcaacagatcaagtttgggaaggcgccaaaggacttgagtggacggttgcttcaccagctccgtaccatacattttcaacaccaccaaaggttgattgat

SEQ ID NO: 225558 - DNA, 424 bp, Unknown
  Bacterial polypeptide expressing nucleotide sequence isolated from the Sargasso Sea
tgatcctcttgatgttccttttttaaatacattaattttactaatgtcgggtactacttgtacatgggctcaccacgctgtgagagaaggccatagagatcaagctattcaagcattatggtgtactgttggccttggaattttcttctcaattatgcagggtgtagaatattacgaggcagctcatcattattttagttttacagatgggatatatccatcagtattttacatggcgacgggttttcatggatttcacgtaatggttggaacagcattcttagctgtttgtttgtatcgtgtttataaaaatcattttactccagataggcattttggattagaggcagcggcatggtattggcactttgttgacgtagtttggctgttcttgtttgtctgcgtttatgtttggggtgcataa

SEQ ID NO: 225559 - DNA, 892 bp, Unknown
  Bacterial polypeptide expressing nucleotide sequence isolated from the Sargasso Sea
atgagcgcgcaagcccacgcagaccacggtgctcctttaagtttcgttcgccgatggctgtactctacgaatcacaaagatatcggtacaatgtatctggtgtttgccatccttgctgccttcattggtgggggtatgtcgatctacatgcggatggaattgatgaacccgggagttcagtatatggacagcggtcatgtctggaacgtatttaccacagcacatggtttgatcatggtgttttttgtggttatgcctggcttgattggtggatttggtaattggttcgtaccaattatgatcggtgccccagacatggcgtttcctcggatgaataatatcagcttttggcttttgccgcctgcgtttgtgttgctgctgctctcagcagtgatggatggtggtgccggtgtaggttggactatctatccgccattgtcatcgacagctggatcacctggcatgtcaatggatttggcaattttctcgctccatttagctggtgtttcgtcaatcctcggggcggcaaacttcatcacaacgatctttaatatgcgcactccgggcatgacgcttcataaaatgccattatttgcgtgggcgatgttgataacagcatttttgttacttttggcggtgcctgtcttagcaggtgccattacaatgctattaaccgatcgtaattttggcactaccttttttattccagaaggtggcggcgaccctatcttgttcctgcacctgttctggttctttggtcatccagaagtgtatatcatgatattaccagcctttggcattgtcagccacatcatctcaacattctctaaaaagcctgtctttgggtatttgggcatggcttatgcgatggtggcaatccgggtttgtcggc

SEQ ID NO: 225560 - DNA, 796 bp, Unknown
  Bacterial polypeptide expressing nucleotide sequence isolated from the Sargasso Sea
gatgtatacacaaacagcatcacatgatgatcatcacactccaactggttggaaacgttgggcgtattctacaaaccataaagacataggaacaatgtatttaatttttgcaattgttgcaggagttattggcacagcattttcagttttaatgagaatggaacttatgcatcctggcgatggtattttaggtggaaattatcatttatataatgttttagtgacaggtcatggtttaatcatgattttctttatggtaatgccagccatgataggtggatttggtaactggtttgtgccaattatgattggtgctccagatatggcatttccgcgaatgaataatatttctttctggttattaccagtgtcattaactttattgatcttatcaatttttgctgatggtcctccaggacaaacaggagttggtggtggatggacaatatatccacctttatcttcaaaagcaggccaaccaggaccagcaatggatttagcaattttaagtttacacttagcaggagcttcatcaattttaggagcggtaaattttattacaacaattttaaatatgagaactccaggtatgacgttacataaaatgcccctatttgcttggtcaattttagtaacagcatttttattattactttctttacctgttttagcgggagcgattacgatgttgctaaccgatagaaattttggaaccgcgttctttgaggctcaaactggaggtgatccagttttatttcaacacttattttggttctttggtcatccagaggggtat

SEQ ID NO: 225561 - DNA, 212 bp, Unknown
  Bacterial polypeptide expressing nucleotide sequence isolated from the Sargasso Sea
ttatggagctgtattttatatggcgacaggttttcatggttttcacgtcataattggaacaatatttttagcagtatgtttgtggagaggaagacttggtcatttcactaaagaccatcattttggatttgaagcagctgcttggtattggcattttgttgatgtagtgtggctattcttatttgctgcaatttatatttggggaagttaat

SEQ ID NO: 225562 - DNA, 96 bp, Unknown
  Bacterial polypeptide expressing nucleotide sequence isolated from the Sargasso Sea
accatttcggctttgaggcggcggcttggtattggcatttcgtcgatgtggtttggctattcctattctgttgtatttattggtggggcgcttaat

SEQ ID NO: 225563 - DNA, 415 bp, Unknown
  Bacterial polypeptide expressing nucleotide sequence isolated from the Sargasso Sea
tgacccgtttgacttgcctctgatcaacacgctggtgctgctcttgtcaggttgtacagtgacctgggctcatcatgctatgcaacatgataaccgcaaggattttatgatgggccttggtctaactattattcttggggcccttttcacggctttgcaggcgcttgaatatagccatgcacctttcggctttacagacggtatttacccgtcggttttctacatggcgactggctttcacggctttcatgtccttgtagggactttattcctgtcagtgtgctggctgcgtggccgggctggtcacttcactgctgagcagcacttcggtttcgaggctgcagcatggtattggcattttgtcgacgttgtatggcttttccttttcgccgccgtttattggtggggtggttga

SEQ ID NO: 225564 - DNA, 724 bp, Unknown
  Bacterial polypeptide expressing nucleotide sequence isolated from the Sargasso Sea
gtatatataatgattttgcccgcctttggtattgtttcacatattattgaaacattttctaggaaacagctctttggatattcatcaatggtctgggcaatgctttcaattgccatactctcttttgtagtttgggcacatcacatgtttacagttggactgcctttggctgcagaaatattctttatgtgggcaactatgttgatagctgttccaacaggtgtaaaagtttttaattgggtagcaacgatgtttagaggctcacttacctttgaaacacccatgttatttgccatttcttttgttgttcttttcacaataggtggattgtctggcttaatgcttgcaattgttccggctgattttcaatatcacgatacttactttgttgttgcgcattttcattatgttcttgtaccaggagcaatattctctattatggctgctgtttattattggattccaaaatggtgtggcaatatgtatgacgaaagattgggaaaactacacttttggttgtcatttatcggagttaatgtaaccttttttcctcaacactttattggcttagcaggaatgccaagaagatatcctgattattctttaatatttgctgattggaatatggtttcgagcgttggagcatttttatttggtttctcacaattgctgtttttatttattgttataaaaactgtgatgggtggcaaaaaagcaactgatc

SEQ ID NO: 225565 - DNA, 611 bp, Unknown
  Bacterial polypeptide expressing nucleotide sequence isolated from the Sargasso Sea
ttgtgaactcggattaagatatggaatggctctttttatagcatcagaagtaatgttcttgtttgctttcttttgggctttctttgatgcaagtttaacccctaaactacctatagaagaattctcagaaacttttgacagtaatggtgctgttggcatttggccgccagagggtattaaaacatttgatcctcttgatgttccttttttaaatacattaattttattaatgtcgggtactacttgtacatgggctcaccacgctgttagagaaggccatagagatcaagctattcaagcattatggtgtactgttggtctcggaatttttttctcaattatgcagggcgtagaatattacgaagcagctcatcattatttcagttttacagatgggatatatccatcagtattttacatggcgacgggttttcatggatttcacgtaatggttggaacagcattcttagctgtttgtttgtatcgtgtttataaaaatcattttactccagataggcattttggattagaggcagcggcatggtactggcactttgtagatgtagtttggctgttcttgtttgtctgcgtttatgtttggggtgcataaa

SEQ ID NO: 225566 - DNA, 805 bp, Unknown
  Bacterial polypeptide expressing nucleotide sequence isolated from the Sargasso Sea
gtcccaatgatgattggagcaccagatatggcgctgccaagaatgaataacttaagtttttggatattaccttttgcattttttattcttctttcatccttattcatggaagggggagcacctaattttggttggacattttatgcccctctttcaacaacctatgcaccacccagcgtaacattctttatattttctgttcatataatgggtgcttcttctattatgggtgctattaatgttgtggtaacaattatgaatatgagagcacctggggtgactttaatgaaaatgcctttgtttgtttggtcatggttaataactgcatatttgttaattgctgttatgccggttttagctggtgctgtaacaatgatgttaatggatattcattttggaacaagtttctttaatgctgcaggtggtggagatcctgttctttttcaacatattttctggttctttggacaccccgaagtatatattatgattttaccggcctttggtattgtgtcacatataattgagacgttttcgagaaaacaattatttggatattcttcaatggtttgggcgatgctctcaattgcaattctatcatttgtggtttgggctcaccatatgtttactgttggcttgcccctcgcagcggaaatattttttatgtgggctactatgttaattgcagttccaactggagtaaaagtatttaattgggttgcaacaatgtttaggggttcattgacttttgaaaccccaatgttatttgccgttgcatttgttgtactttttacaattggaggat

SEQ ID NO: 225567 - DNA, 617 bp, Unknown
  Bacterial polypeptide expressing nucleotide sequence isolated from the Sargasso Sea
attttcatggattgctacaatgtggggaggatctatatcattcaaaaccccaatggtttgggctttaggatttatatttttatttacagttggaggagtaacgggtgtagttctagcaaacgctggggtagatactgcattgcatgatacttattatgttgtagctcacttccactatgtattatctttgggagctgtttttgcaatatttgcaggcttctattattggtttggtaaaatgtcagggtatgaatattctgagtggatgggacaacttcatttttggttaactttcataggtgtaaatttagttttctttccacaacatttcttaggattggctggaatgccgagaagatacgctgattatccggatgcatttgctgattggaattatatctcttcaatcggctcatatatttctgtagttggcttagtggtatttttcgctaatttaatctacgcttttgcaaaaaagaaaaaagcagcacaaaacccatggggagaaggggccacaacattagagtggacagttccatcaccaccaaattttcatactttcgatgaattaccaaagtttgaagattatgaaggtactgaaaaatctagtagttagt

SEQ ID NO: 225568 - DNA, 753 bp, Unknown
  Bacterial polypeptide expressing nucleotide sequence isolated from the Sargasso Sea
aatgtcagcaactactgcagatcacgagcaacatcataatccaacaggttggaagaggtgggcgtattcaaccaatcataaagatataggaacaatgtatcttatttttgcaattattgcaggtttaattggatccgcattttcagttttgatgagaatggaattaatgcatccgggagatggaattcttggaggtgattatcatttatataatgttttggtaactggtcacggtctaattatgattttctttatggtaatgccagcgatgattggtggctttggtaactggtttgttcctattatgatcggtgcaccagatatggcattcccaaggatgaataatatttcattttggctattaccggtcgctctaattttattattagtatcaatttttgttgatggacctccaggagcaaaaggagttggaggaggttggacgatttatccacctttatcatcaaaaactggtcaaccaggtcctgcaatggatttagcaattttaagtttacatgttgccggagcttcctcaattttaggtgcaattaatttcatcacgacaattttaaatatgagaactcctggaatgactttacacaaaatgcctttattttcatggtcaattctagttacagcatttttacttcttttatcattaccagtattagcaggagctataacaatgcttttaacagatcgaaattttggaactgctttctttgaagcacaaacaggtggagatccagttct

SEQ ID NO: 225569 - DNA, 767 bp, Unknown
  Bacterial polypeptide expressing nucleotide sequence isolated from the Sargasso Sea
aatgtcagcagaaaaaaaacacgattaccacttagttgatccaagcccttggccaatctacacatccttcgcatgcttagtattagcaataggtgcaattttttatatgcataacggtatttcttggggaatgtatcttggtttggctttgttaatttatggtgcctacatgtggttcagagatgtagttatcgaagctgagcatcaaggccatcatactccagttgttcaaattcatcatagatatggaatgactttatttattgcttcagaggtaatgttcttcgttgcatggttctgggcttactttgatataagtttatttccaaatgaatttgttggaaatgtatggccaccaaaagatattgaaacatttgatccttgggacattcctttaataaatactctagtattattattatcaggaacaaccgttacttgggctcatcatgctttattagaagatgatagaaaaggatttatacaaggattaacactaactgtaattcttggtttcttttttactttattgcaagcatacgaatatcatcatgctacttttacttactcaggccatatttatggagctgtattttatatggcgactggctttcatggttttcacgtcataattggaactatatttttagcagtatgtttgtggagaggaagacttggtcatttcacaaaagatcatcattttggatttgaagcagctgcttggtactggcattttcgtgacgtagtgtggctattcttatttgctg

SEQ ID NO: 225570 - DNA, 406 bp, Unknown
  Bacterial polypeptide expressing nucleotide sequence isolated from the Sargasso Sea
tatgtatacacaaacagtatcacacgatgatcatcatacaccaagaggttggaaacgttgggcattttctactaaccacaaagatataggtacaatgtatttaatctttgcaatcgttgccggtgtaattgggacagcattttcagttttaatgcgaatggaacttatgcatccaggtgatggtattttaggtggaaactaccatttatataatgttttggtaacaggtcatggtttgattatgattttctttatggtgatgccagcaatgataggtggttttggtaattgggtttgtacgataatgataggcgcaccagatatggcatttccaagaatgaataatatttctttttggttattacccgtatctttaactttattaattttatcaattttttgctga

SEQ ID NO: 225571 - DNA, 766 bp, Unknown
  Bacterial polypeptide expressing nucleotide sequence isolated from the Sargasso Sea
ttatcatttagtagacccaagtccttggcctatttatgtttcattttcatgtttagtattagcactaggatctgtttattatcttcacactgatgtttcttgggggatgtatcttggttttgctcttttaatttatggcgcttacatgtggtttagagatgttgttatagaagctgaacatcaaggtcatcacacacctgtggttcaaatccatcatagatatggtatgacactttttattgcatctgaggtaatgttcttcgtggcatggttctgggcatattttgatgtaagtttatttcctaatgattttgttggaaatgtttggccaccaaaggatattgaaacatttgatccttgggatattccattaattaatacattaattttattattatcaggaacaacagttacgtggtctcatcatgctctccttgaagatgatagaaaaagttttatacaaggtttatggttaactgttattttagggttttgcttcactcttttgcaaatatatgagtatcagcatgcgtcattttctttttcagatcatatttatggatcagttttttatatggcaacgggatttcatggtttccatgtacttgttggaaccatatttttagcggtatgtttgttcagaggtaaaaggggacattttaataaagatcatcattttggttttgaggcagcagcttggtattggcactttgttgatgttatttggttatttttatttgctgcaatttatatctggggaagttaa

SEQ ID NO: 225572 - DNA, 886 bp, Unknown
  Bacterial polypeptide expressing nucleotide sequence isolated from the Sargasso Sea
cctgtaataacagtagcgctaattcaattacagtttgacagattatatggaactcatttcttcaaccctgtaatgggtggagatccagtaatgtggcaacacatgttctggcttttcgggcacccagaagtgtatatacttattcttcctgcaatgggaatcgtttctgaagttttaccaactttctcaaagaaaccaatttttggatattcattcattgtattttctgggattggaataggttttcttgggtggtttgtgtggagtcatcacatgtttacagtcggattggggcctgctgcaaatgctgcatttagtatatcaacgatgctaattgctgttccgacaggtgtaaaaatatttaactggattggaactttatggggaggagcaataagagtaactcctgctttactattttcaattgcatttatagggatgtttgttatcggagggcttagtggcgtaactcatgcagcccctccttcagatgcgcaacaacaagacacatactatgttgttgctcacttccattatgttttatttggtggttcattacttggtctttggtcaggaatttattactggtggcccaaatttactggcaaatttcttaatgaaaaaatcggatatttacactttgcagttgtattaattggattcaatatcacattctttccaatgcattggcttggtttagatggaatgccaagaagaatagcaacatatccagaatcaatgggttgggaagtttccaacttggttgctagcttgggtagttttattctaggatttggagttttaatatttttctataacgtaatttattctagaaaaggtccaaagaatgcaggaaacgatccgtgggacggcaggacgctcgaat

SEQ ID NO: 225573 - DNA, 820 bp, Unknown
  Bacterial polypeptide expressing nucleotide sequence isolated from the Sargasso Sea
aatgccagtattcacatggatgacatttattacatctatattaatagtactagcattgccagttctgggtgtagcaggaatacagatgactgctgacagagtatatggaacaaatttctttaattcagaagcaggtggagatcctatcttctggcagcatatattttggctttttggtcatcctgaagtatatatattaatacttccagccatgggtattgtttcagaagttttgccaacattttcaaggaagcctttatttggatatacttttatagtattttctggagctattattggatttatggggtggtttgtatggagtcatcatatgtttacagtaggattaggcccagcggcaaatacagcttttactatttccacaatgcttattgcagtgcctactggtgtaaaaatatttaactggattgcaactttatggggaggatcaattaagtttacgacatctatgttattttctatcggctttattgctatgtttaccattggtggactttcaggagttacccatgcagtctcaccttctgatgcacagcaacaagatacatattatgtggttgcacatttccattacgttttgtttggtggagctatttttgcgattttttcaggtatatatttttggtggccaaaatttactggctggtttcttgatgaaaaaataggaaaaattaacttcgtgctgatgcttataggctttaatcttcaatttgctccaatgcactgggttggactagatggaatgcctagaagaatatatacatatgcagaaaatatgggatgggaattatctaattta

SEQ ID NO: 225574 - DNA, 285 bp, Unknown
  Bacterial polypeptide expressing nucleotide sequence isolated from the Sargasso Sea
ttttaggatttatttttacttgctttcaagcttatgaatatcatcatgctactttcacaatcgatggaaatatttatggctcaacattttatatggcaaccgggttccacggtttccacgtgatcgttggaacaatttttttagcagtttgtttatttagatcaatgaaagggcactccaattcagaacaccattttggttttgaagccgctgcatggtattggcattttgtcgatgttgtttggttatttttatttgcggcaatttatatatggggaagttaag

SEQ ID NO: 225575 - DNA, 673 bp, Unknown
  Bacterial polypeptide expressing nucleotide sequence isolated from the Sargasso Sea
ccggtggtggagatccagttcttttccacacttattttggttctttggtcatccagaagtttacatcatgatattaccagcttttggaattgtaagtcaggtcatctctactttctcaagaaaaccagtatttggatatctaggaatggtatatgctatgatatctataggatttataggctttattgtttgggctcaccatatgttcacagttggtatgagcgcagatttaagagcatattttatgctagctacaattattattgctgttccaaccggtataaaaatctttagttggatagcaactatgtggggtggatcacttacatttgaaactccaatgttatttgcaattggatttgttttcttatttacactcggaggagtaacaggagtcattctggccaatgctggaatagacactgtaatgcatgatacgtattatgttgttgcacacttccattatgttctgagcatgggagctatgtttggaatctttgcaggtatttattattggtttggtaaaatgtctggaagaaagtataatgaattcttaggcaaactacatttttggttattttttatcggggtaaatgttacatttttccctcaacatttcttaggacttgctggtatgccacgaagaattccagattacccagacgcttatgca

SEQ ID NO: 225576 - DNA, 769 bp, Unknown
  Bacterial polypeptide expressing nucleotide sequence isolated from the Sargasso Sea
aatgagtacagcaacattacacggtcacgaccaccatacaccaactggatggaaaagatgggcatattctacaaaccataaagatataggaacaatgtatttaatctttgcaattattgcaggggtaatcggaactgcattttcagttttaatgagaatagagttaatgcatcctggtgatggaattttaggaggtaactatcacttatataatgttctagttacaggacatggattgataatgattttcttcatggtgatgccagcaatgattggcggttttggtaattggtttgtgccaataatgatcggtgcacctgatatggcattcccaagaatgaataatatttctttttggttgctacctgtggcttttattttacttctagcttcaatatttgttgatggacctccaggggcacaaggtgttggaggaggttggactatatatccaccgttatcttcaaaagcaggtcaaccaggtccagcaatggatttggcaattttaagtttacatgttgcgggcgcgtcatctattttaggtgcagtaaatttcataactacaattttaaacatgagaacgccaggtatgacattacataaaatgccattatttgcttggtctatacttgttactgcttttttacttttgttatctttaccagttttagctggagcaataacaatgttattaacagacagaaattttggaacagcattctttgaggctcaatcaggtggtgatccaactttgtttcaacacttattt

SEQ ID NO: 225577 - DNA, 908 bp, Unknown
  Bacterial polypeptide expressing nucleotide sequence isolated from the Sargasso Sea
tcacgatcatggacatccgacaggatggaagcgatggttgttttcaactaatcataaagatataggaacaatgtacataatctttgcaatcgttgctggattagttggtcttgctatgtcattaacaatgagagcagaattagccgaaccaggcctacaagttttaggcggagatcatcaactttataatacacttgtctcaatgcacggattaatcatgatttttgcaatggttatgccttctatgataggaggttttggaaattggtttgtgcctattatgataggagctcctgatatggcatttccacgaatgaacaacattagtttttggttattaattccaggatttctatgtttaatgatggcctataaaaccggtatgggatctggctggacattttatccgccacttagttccaaaatcggacaccccggaaattctgtagattatttaattttaggagtacatattttaggtgcgtcttcaatcttgggtgcaataaatttcattactacaatttttaatatgcgtgcccctggtatgacattgcacaaaatgccattatttgtttgggcaatcttagtaaccgttttcttgttacttttatctcttcccgttttagctggcgctataacaatgttgttaacagataggaattttggaactagtttttttgatccagccggtggcggagatcctgtgttatttcaacatttattttggttttttgggcacccagaagtttatgttttaattatacctggttttggtgttatcagtcatatagttgcaactttttcaaaaaaaccaatttttggttatttaggaatggcctatgcaatggttgcaattggcgttgtaggatttgcagtatgggctcatcatatgtatacctctggtatgg

SEQ ID NO: 225578 - DNA, 713 bp, Unknown
  Bacterial polypeptide expressing nucleotide sequence isolated from the Sargasso Sea
tatgagtgaaaattcttcagtaggtcaaaaacatccttatcacttagttgatccaagcccacttccattcctatcctctattgcaggtctagctatggctgctggactagttttttatatgcattatgatactaagtggctattaattcttggaaccattggattactaacggtaatgtttctatggtggaaagatgtaattaaggaatcaacatttcaacaagttcacacccctgtagttgagcttgggttacgttatggtatggctctttttattgcatcagaagttatgttttttgttgcatttttctgggctttttttgatgcaagtttaacgcctaagttacctatagaagagttcgcagaaacttatgactctaatggagctgttggtatttggcctcctgagggtattaaaacatttgatccattagatataccattcttaaatacgttgatattattaatgtctggaacgacatgtacttgggcccatcatgcagttcgcgaagggcatagagatcaagcaattcaagctctttggctaactgttggtcttggtgtgtgtttcacgcttcttcaagcttttgaatattatgaagcagttcatcattattttaaatttactgatggaatttatccttctgttttttatatggcgacaggtttccatggttttcatgtcatggttggaactatttttttaggcgtat

SEQ ID NO: 225579 - DNA, 723 bp, Unknown
  Bacterial polypeptide expressing nucleotide sequence isolated from the Sargasso Sea
atgcaatggtatctattggtttcctaggtttcatcgtatgggctcaccacatgtacactgttggcatggacgcagatgtaaaagcttattatgtgtttgccacgatggtaattgctgtgcctaccggcattaaagtcttctcatggattgctactatgtggggtggttcggtagatcttaaaacaccaatgttatgggcaataggttttatttttctattcactgtaggtggtgtgacaggtgttgttcttgcaaatgcaggaattgaccattcgctgcatgatacttactatgttgttgcacattttcattacgttctgtctatgggagctgtttttgcaatatttgctggtttctattattggtttggtaaaatgtttggcagaaactactcagagtttttgggcaagttacatttttggttaacttttattggagtgaatataatattcttcccacaacacttcttaggtttagcgggaatgccaagacgttacgttgactaccctgatgcttacgctggatggaattatatttcctcaattggctcatttatatcagttcttggtttggcagtattctttgtaatgttagtacatgctctcatgaaagttagagattgtgccgacaacccatggggtgagggggccacaacacttgagtggacattgccttctcctccaccattccaccagtttgaggagctaccaaaagttaagtaga

SEQ ID NO: 225580 - DNA, 1385 bp, Unknown
  Bacterial polypeptide expressing nucleotide sequence isolated from the Sargasso Sea
tatgtacacacaaacatcatctcctgacgatcatcacataccaacaggatggaagcggtgggcttattcaacaaaccacaaagatattggaacaatgtacttaatttttgctattgttgccggagtgatcgggactgcattttcggttttaatgagaatggaattaatgcatcctggcgatggaattttgggaggaaattatcatttatataatgtattagtaacgggtcatgggttaatcatgattttttttatggttatgccagcaatgattggtggctttggtaattggtttgtgccgataatgattggtgcaccagatatggcatttccaagaatgaataatatttctttctggttacttccagtttcattaacattattaattctctctatttttgctgatggtcccccgggcgctcaaggagttggaggagggtggactatatatccccctttatcttctaaagcaggacaacctggaccagcaatggatttggcaattttaagtttacacttagctggagcttcctcaatactaggtgctgtaaattttataactacgattcttaatatgagaacaccgggcatgactttacataaaatgccgttatttgcttggtcgattttagtaacagcttttttattattactttctttaccagttttagcaggtgccataacaatgttattaacagatagaaattttggaactgccttttttgaggctcaaactggtggtgatccagttttatttcaacatttattttggtttttcggtcacccagaagtttatattttaattcttccaggttttggaatgattagtcatatagtttctacattttcaaaaaaaccagtttttggctatctgggaatggcttatgcaatggttgctattggagtagttggttttgttgtatgggctcatcatatgtacactgtgggattaggtacagacacaaaggcttactttttagcagcaactatgattattgcagtgccaacaggtattaaaatattttcatggattgcaacaatgtggggtggttctatctcatttaaaacaccaatgatgtgggccttaggatttatctttatgtttactgttggaggagtaacaggagttgttttggcaaatgctggagtagatactgcaatgcatgatacatattatgtagttgctcactttcactacgttttatctttaggggcagtttttgcgatttttgcaggtttttattattggttttctaaaatgactggttatgagtactcagagtggcttggtcaattacatttctggctaacattcataggagtaaacttaattttctttccacaaccattttttaggattagcaggtatgccaagaagatatgct

SEQ ID NO: 225581 - DNA, 493 bp, Unknown
  Bacterial polypeptide expressing nucleotide sequence isolated from the Sargasso Sea
aatgggttggaaaagatgggcatattcaacaaatcataaagatattggtacaatgtatttaatttttgccattgtagcggggttaattggttctgctttttcagttttaatgagaatggagttgatgtatccaggagacggtatcctcggaggaaatcaccatctgtataatgttttagtaactggacacggattaatcatgatttttttcatggtcatgcctgcaatgataggtggatttggtaattggttcgtccccattatgataggtgcacctgatatggcatttcctcgaatgaacaatatttcattttggttgttacctgtatctttaatattattacttgcttcaatttttgttgatggacctcctggtcaaactggagtaggaggcggttggactatttatcctcctttatcttctaagactggtcagcctggtccagcaatggatttagcaatattaagcttacatattgctggcgcatcctca

SEQ ID NO: 225582 - DNA, 1152 bp, Unknown
  Bacterial polypeptide expressing nucleotide sequence isolated from the Sargasso Sea
ctgcaatggattttgcaattttaagtttacacttagctggagcttcttcaattttaggtgctgtaaactttattactacaattttaaacatgagaacgcctggcatgacacttcataaaatgccattatttgcttggtcaattctagtaactgcttttttattattgttatcattaccagtgttagcaggagcaattacaatgcttttaacagatagaaactttggaacagctttctttgatgcacaaactggtggggacccagttttattccaacatctattttggttctttggtcacccagaagtttatattttaatcttaccaggttttggaatgatcagtcatattgtttcaacattttctagaaaaccagtttttggatacttaggaatggcttatgcaatggttgcaattggaattgttggtttcgttgtttgggctcaccacatgtatacagtgggtttaagtacagatactaaagcatactttttagctgcaacgatgatcattgcagttccaaccggtataaaaatattttcatggatagcaactatgtggggtggttcgatttcatttaaaactccaatggtttgggctttaggatttatatttttatttacagtcggtggagttaccggtgtagtccttgcgaatgctggagttgatactgcaatgcatgatacatactacgttgttgctcactttcattacgtactatctttaggagctgtatttgcaatctttgcaggattttactattggtttggaaaaatgactggttacgagtactcagagtggatgggtcaattacacttctggttaacatttattggggtaaatttggttttcttcccacaacactttttaggacttgcaggaatgccaagaagatatgctgattatccagatgcttttgcaggatggaattacatttcttcaattggttcttatatttctgtaattggattggtagtattttttataaaccttgcttatgcgttttataagaaaaaggctgcagcacaaaacccatggggagaaggcgctacaactttagaatggacagtaccatctccacctaattttcatacttttgaagaactgccaaagtttgaagatgaagagggtgttgaaaaatctactagctaaa

SEQ ID NO: 225583 - DNA, 787 bp, Unknown
  Bacterial polypeptide expressing nucleotide sequence isolated from the Sargasso Sea
atgagcggagatcaaaaacatcaatttcatctagttgaacctagtccttggccagcaataggatctgctgcaggttttactctggctttaggggccgcgatgtatatgcatgattatctttatagtggatatatacttattgcaggttttttaatgcttttaacagtaatgtttttctggtggagagacgttattagagaagctgagtttcaaggacatcatacacccatagttcaaataggaatgagatatggaatgatactctttatatcatctgaggttatgttttttgttgcgtttttttgggcattttttgattcaagtttgtatccagatactggagtttggccaccagaagatattaaaacttttgatccgtttgatttaccgttgataaatacaatgatattattactatcaggctgtacagtgacttggtctcaccatgccttgcaacatgataatagaaaagattttcttgtaggattgtttttgacaattcttttgggaattagttttactgcgcttcaggcttatgagtattcacatgcagcattcagttttactgatggtatatatgcttctactttttacatggcaactggatttcatggattccatgtgatagttggaacattatttttaattgtttgctattttagaggacttaagggtcattatacctcagaacatcactttgggttcgaagctgctgcatggtactggcattttgttgatgtggtttggttatttctatttgtatgtatttattggtggggtgcataga

SEQ ID NO: 225584 - DNA, 790 bp, Unknown
  Bacterial polypeptide expressing nucleotide sequence isolated from the Sargasso Sea
aatgtcagcagaaaaaaaacacgattaccacttagttgacccaagtccttggccaatctatacatcttttgcgtgcttagtattagctataggtgcaattttttatatgcataacggtatttcttgggggatgtatcttggtttggctttattaatctatggtgcttacatgtggtttagagatgttgtaattgaagccgaacatcaaggccatcacactcctgttgttcaaattcatcatagatatggaatgactttatttattgcttcagaggtaatgttctttgttgcatggttctgggcttattttgatataagtttatttccaaatgaatttgttggaaatgtgtggccaccaaaagatattgaaacatttgatccttgggatattcctttgataaatactttagttttattactatcgggaacaactgttacttgggcccaccactctttattggaagatgatagaaaaggatttatacaagggttaactttaactgttatcctgggtttcttttttacgttattacaagcatacgaataccatcatgccacttttacctactcgggccatatttatggagcagttttttacatggcaacaggttttcatggtttccacgtgattattggaacaatatttctggctgtatgtttgtggagaggaagacttggtcatttcacaaaggatcatcattttggatttgaagcagctgcttggtactggcattttgttgacgtagtgtggctattcttatttgctgcaatttatatttggggaagttaa

SEQ ID NO: 225585 - DNA, 1492 bp, Unknown
  Bacterial polypeptide expressing nucleotide sequence isolated from the Sargasso Sea
ttttttacggctctatttctaggtgggtttggtaattacttaattccattgatggttggagcaagggacatggttttcccttatgtgaatatgataagtttttggatgttctttattgcagtagcagttttaatggctagtttttttgttcctggagggccaacaggagccggatggacattatatcctcctcaaacaattctaccaggaacacctggcgctggtatgggaatattattgatgcttgtttctttatctttatttgtaataggattcactatgggtggattaaattatctaataacaatattacaagctcgtactagaggaatgactttaatgagaatgccattaactgtttggggtatctttacagcaactgtattagcgatgttagcttttccagcacttctagttagtgcaattatgatgactttagacaaaattttaggaacaagcttttttatgccaacaattattcaagcaggagaagtgcttgattatggtggtggaagtccaattctttttcaacatttattttggttttttggccatccagaggtttatattgtagcattacctgcctttggaatagtttctgatctaatttctgttcactcaagaaaaaatatatttggctacagaatgatggtttgggctattgttggaattggagctttaagcttttttgtttgggctcaccacatgtatgttagtggaatgaacccatggtttggatttttctttgcaacaacaacacttattattgcggttcctactgctatgaaagtatacaattggattttaactctgtggagaggtaatattagattaaatactgtaatgttatggtgtttaggttttatcgtaacttttgtaaatggagggattacaggaattttccttggaaacgtttctgttgatgttccattatctgatacgtactttgttattgcccacttccatatggttatgggtatagctccattaatggttattatgggtgcagtttatcattggtttcctttagtatcaggaaaattcttagatgaaaaattaggcaaatggcatttctggttaacttttttaggcgcttattcaatctatttcccaatgcactatttaggatttataggagtaccaagaagatattttgaaatgtatgatagtccttacatgacatctgcagttggaatgaatgaattcataagcatggctgcatttatagttggagctgcacaatttattttaatttataatattgttaaaactttaaaagtcggaaaaaaagcaggacacaatccttggaaagccaattctttagagtggttaacttcaacagttccacctgaacatggaaattttggtgaaagactacctgtagttcacagatggccatatgatttcagtgttcctggagcaaaagaagactatattacacaaacaacaccaccaagtgaagttgtgcatacagaggtagaaaaaacataaa

SEQ ID NO: 225586 - DNA, 1356 bp, Unknown
  Bacterial polypeptide expressing nucleotide sequence isolated from the Sargasso Sea
caagcttctttgtacctggaggaccaacaggagcaggttggaccttatatcctccgcaagcaatattacctggaacaccaggatctgaaatgggaatagtgcttatgttagtctctttatcattgttcgttattggttttacaatgggtggattaaattacgttataacaatacttcagtctagaactcgtggcatgactttaatgcgtatgccgttaactatttggggtatattcacggccacagttcttgcacttttagcttttcccgcactttttgtagcgtgcataatgatgacgcttgataatttattaggaacaagtttctttatgccagaaatttttacaatgggagaaaaactggaatatggaggcggtagtcctattttgtttcaacacctattctggttttttggtcatccagaagtttatatagtagctctacctgcatttggaattgtatctgatctaatttcagttcatgcaagaaaaaatgtttttggttacagaatgatggtttgggccatagtcattatcggagctcttagctttattgtttgggctcaccatatgtatgttagtggaatgaacccatggtttggtttcttttttgcgacaaccacattaattattgcagtccccacagcaattaaagtttataattgggtattaactctttggagaggaaatatccaccttactattccaatgttattttctttaggttttatagtaacttttgttaatggcggaattacaggattgtttttaggaaatgttattattgacgttccactttcagatacttattttgttgttgctcactttcatatggtaatgggaatagcacctctaatggtagtatttggtgcaatttatcactggtacccacttattactggacgacatctaaatcaaactttaggtaagattcatttctgggtaactttcgtcggtgcttacgcaatatattttcctatgcattatctaggttttattggtgtcccgcgtagatattttgaaatgtatgatagtccttatatgacttcgggagtaggcttaaatcaatttattacagtagcggctttaattgtaggctttactcaatttttatttttatacaatatttttacaagttggtataagggtgaaaaatctgaaagaaatccttggaaagcaaattctttagaatggcatactccagactatcctccaacgcatggaaatttcggcaaagaattgccagttgtctatcgttggccatatgattttagtgtgcctggatcagacaaagagttcatccctcaagatgtgccgccaagtcaagttccaacagcaaaggctgaacaaacgtgag

SEQ ID NO: 225587 - DNA, 1543 bp, Unknown
  Bacterial polypeptide expressing nucleotide sequence isolated from the Sargasso Sea
atggcagacataacagcagatcatattgatagtcacgatcatcatccaactggatggagacgttatctttattctacaaaccataaagatattggaactctttacttaatttttgcaattattgcaggtgtcgttggtggggtcatgtcggttgttatgagaatagaattgatgcaccctggtgacggtatattgggtggagatcacaacttatataatgttctagtaactaatcatggcttaatcatgattttctttatggtaatgcctgctatgattggtggatttggaaactggatcgtccctttgatgataggtgctccagatatggcgtttccaagaatgaataatatttcattttggcttttacctgcttcatttatattacttatagcctcactctttgttgagggaacttctggcggtaatggagttggtggtgggtggactatttaccctccattgtctgcctctctaggcgcacctggacctgcagtggatttagcaattttctctctacatattgccggagcctcttcaatccttggtgctattaattttataacaacaatatttaatatgcgagcgcctggtatgacattacataagatgcctctttttgtatggtcaattttagtaactgctttcttacttttactatcacttccagtattagctggagcaattacaatgcttttgacagatagaaattttggcacagctttttttgagccttcaatgggaggtgatcccgttctgtttcagcatttattttggttctttggtcacccagaagtttatatacttatacttccaggctttggaattattagtcatgtagtctcaaccttttctaaaaagccggtcttcggatatcttggtatggcttatgccatggtttcaattggatttcttgggtttatagtttgggcgcaccatatgtacactgtgggaatgagtgctgatgttaaggcatattatgtattcgctactatggttatagctgtccctacaggaattaaagttttttcttggattgcaacaatgtggggaggttcagttgaattaaagacaccaatgttgtgggctattggatttatatttctctttactgttggtggggttacaggagttgttttagcaaatgctggaatagatcattcccttcatgatacgtattatgttgttgctcattttcactatgttttatcaatgggtgcagtttttgcaatttttgctgcattctattactggtttggaaaaatgactggtagaaactattctgaatggttaggtaaattacatttttggttaacttttattggcgttaatattattttcttcccacaacactttctcggattagctgggatgcctagacgatatgttgactacccagaagcatatgcaggttggaattatgtatcctctattggttcatatttatcttcaataggcttacttgttttctttgtaatgcttatcaatgctttcatgaaggaaaaaaattgcgctgataatccatggggggagggagctacaa

SEQ ID NO: 225588 - DNA, 1281 bp, Unknown
  Bacterial polypeptide expressing nucleotide sequence isolated from the Sargasso Sea
tatgtcagacgaatacgaaaacaaaacaggatatcaagctcaatcttcagaaactatttcttcaggtagtggcggaggatcaagaactgcttccgacatagattatgtaagacccgcagaagtaacagatcaagatttatatcatggacatagttttattactaaatgggttttttgtcaggatgcaaaagttattggagtccaatattttcttttagctacttttacaggagttattggactgattttatcatggttaatgcgtttacaattaggttttccaggagcagctggttttatgacagcagagcattactatcagtttgttactatgcatggaatgattatggttgtttattttttaacagcacttttcttaggaggatttggtaattatttaattcctttgatggttggagcaagagatatggtttttccttatcttaacatggtaagtttttggtctttttttgtagctgttggtgttttattagcaagcttttttgttccaggaggacctacaggagcagggtggacactttatccacctcaaacgattttagaaggaacaccaggaagtggatggggaatattattgatgtgtatatctttaatcttatttgttgctggttttacgatgggtggacttaattatttaattacagttttacaagcacgtactagaggaatgacgttaatgagaatgcctcttactgtttggggcatttttacagcaacggttttagctatgttagcttttcctgcattattagtaggtgcattaatgatgactttagacaatgtgcttggaacaagctttttcatgccaactataatacaagcaggtgaaattttagaatactcaggaggaagtcctattctttttcaacatttattctggttttttggacaccctgaagtttatatagttgcgttgccagcatttggaatagtctcagacttaatatcagttcattctagaaaaaatatatttggttatagaatgatggtttgggctattgttggtatcggaggtttaagtttttttgtatgggcccaccatatgtatgttagtggaatgaatccttggtttggttttttctttgccactacaacacttataatagcaattcccactgcaatgaaagtttataactggattataactctttggagaggaaatataaggcttaatgttgtaatgttgtggtgtcttggttttatagtcacttttgtaaatggaggtatcacaggaattttcttaggaaatgttagtgttga

SEQ ID NO: 225589 - DNA, 1585 bp, Unknown
  Bacterial polypeptide expressing nucleotide sequence isolated from the Sargasso Sea
atgagcgcagttatagaaaatcaccacgacgatcatcatcatggtcctgcaaaaggaataacaagatggctgtatacaacaaaccataaagacataggaactctttatctttggtttagctttgccatgttcttaattggcggtgcgatggccatggtcataagagctgaattatttcaaccaggcatgcaaatagttgagcctgagttttataaccaaatgataactcttcatggactgataatgatatttggtggagtaatgcctgcattcgttggtcttgccaattggttagttccaatgatgattggtgcacctgatatggccttaccaagaatgaataatttgagtttttggattttgccttttgctttttttgttttgctttcttctttatttatggagggtggagcacctaactttggctggactttttatgctcctttatcaacaacatatgcaccaccaagtgtaactttctttatattttctgttcatataatgggagcttcatctatcatgggatcaattaatgttgtagttactataatgaacatgagagctcctggtatcactttaatgaagatgcctttgtttgtttggtcatggttgataacagcatatttattgattgcagtcatgcctgttttagctggcgctgtaacgatgatgttaatggatatccacttcggaaccagcttctttaatgctgcaggagggggagatccagtattatttcaacatattttttggttttttggtcaccctgaagtttacattatgatccttccagcctttgggattgtctctcacatcattgaaaccttctcaaggaagcaactttttggctattcttctatggtatgggcgatgttatccattgcaattctatcatttgtggtctgggcccatcatatgttcacagtaggtatgccgcttgctgcagagattttcttcatgtgggcaactatgctaattgccgtcccaaccggtgttaaagtatttaactgggtggcaactatgtttcgtggctcaataacatttgaaacgcctatgctatttgcagtttcatttgttgtactttttacaatcggtggtctatcgggcctaatgttggcaattgttccagctgattttcagtatcatgacacctattttgtagttgctcattttcactatgttttagtgccaggtgcaatattttcaattatggctgcagtctattactggataccaaaatggtgcggaaatatgtatgacgaaaggcttggaaagctgcatttttggttatcgtttattggtgtaaatgtaactttcttcccgcagcattttattggtttggctggaatgccaagaagatacccagattatgctctgcaatttgctgattggaatatggtttctagtgttggcgcttttttatttgggttctctcagcttttattcttgttcatcgttattaaaactgtaatgggtggaaaaaaagcaacatctcaagtctgggaaggcgcaaaaggtcttgaatggacagttgcatcgcctgctccttatcatacattctcaacaccacctaaggttgattaat

SEQ ID NO: 225590 - DNA, 1444 bp, Unknown
  Bacterial polypeptide expressing nucleotide sequence isolated from the Sargasso Sea
tatgtcagatgaatatgaccataaattagaagctaaatcagattatactgcggatgcatcttcagtcactgcaccagatatagatgctgttccagatgcagaattacctgatcaagaactttatcattcacacagttggtggacgacatacgtattttcacaagatgcaaaatatattggtatacaatatgctttaacagcagttggcacaggacttttagggctggtactttcatggctaatgagaattcaattagcttttcctggtcttggttggctggaccctgcttcttactaccagtttgtaacaatgcacggaatgataatggtagtttaccttctcacagcattatttttgggtggatttggaaatttattaataccgctaatgtgcggtgcaagagatatggcatttccatatgtaaacatgctcagctactgggcatttgttgttgcagttgtcgttttattagcaagcttttttgtacctggaggtcccaccggagcagggtggacgctttatcctccacaagcaataacagctggaacgccgggttacaatggtggaataatactaatgttaatttcactcattttatttgtagctggttttacaatgggtggattaaattacataattactgttttacaattaagagctagaggtatgactttaatgcgattacctcttacaatttggggaatttttacagcaactgtgcttgctatgtttgcgtttccagctttattagttggatgtttgatgatgactttagatagtttacttggaacaagtttctttatgccagcaatggtttcattaggagaaacgttaactcatgaaggtggaagcccgatacttttccagcacttattttggttttttggtcatccagaggtttacattgttgcactgcccgcatttggtatcgtatcagatttgctatccgtacactcaagaaaaactatttttggatatagaatgatggtttgggcaattgtcggaatcggtgctttgagcttttttgtatgggcccaccacatgtatgtaagtggaatgaacccgtggtttggtttcttttttgcaacaacaacattaataattgcagttccaactgccataaaagtttataactggattttaaccctttggagagggaatatacagttatctcttccaatgttgttttctctgggcttcatagttacatttttaaacggaggtttaaccggtctatttttaggaaatgttacagtggatgttcctttatctgatacttattttgttgtagctcatttccatatggtcatgggtattgctcccatacttgttatttttggagccatttatcattggtacccattaattaccggcaggatgatgaacgaaacattaggcaagatccatttttggataacatttttaggatcttatgcaatttat

SEQ ID NO: 225591 - DNA, 1588 bp, Unknown
  Bacterial polypeptide expressing nucleotide sequence isolated from the Sargasso Sea
catgagcacagtagttgaatcacacgatcacggacatcacggcccagctaaaggcctttctcgttggctttttaccactaatcataaagatataggcacactctatctatggtttagttttatcatgctcttcatcggcggcgctatggcgatggtcataagagctgagctttttcagccgggactacagatagttcagcctgagttctttaatcagatgaccaccaatcatggtcttataatggtttttggggtaataatgcccgcttttgtcggattggctaattggatgttacctatgcaaataggagctcctgatatggccctacccaggttaaataatcttagtttttggttattgccaatggcttttggtattttgatatcgacattattcatgcctgaaggtggacctaattttggttggacattctacgcacctctttctactacttatgcaccatctacggttaatttcttcatattttccgttcatgtcatgggtgtttcatcaattcttggatctataaatattattaccaccattttcaatatgagagctccaggtatgactttgatgaaaatgcctttatttgtatggagctggttaataacagcttatctccttatagccgtaatgcctgttttagctggcgttgtaactatgatgcttatggacataaattttggtaccagcttctttaatgccgccggtggtggagacccagtattgttccagcatgttttttggttcttcggacatccagaggtttacattatgatcctgcctgcttttggaattgtctctcatattattgagacattctccagaaagccaatttttggatactcttctatggtttatgccatggcatcgatcgcgattttatcttttgttgtctgggcccatcacatgttcactgttggaatgcctcttgcgggagaattattctttatgtactcgaccatgttgatagccataccaactggagtgaaggttttcaattgggtagcaacaatgtttaggggttcgattacttttgaaactccaatgctattctcgattgcctttgtagctctttttacaattggaggcttctccggactaatgcttgcaatcgttcctgcagacttccaatatcacgacacttattttgtagtagctcactttcactacgtcctagttcctggagcgctttttggaataattgctggagcttattattggttgcctaaatggacaggaaatatgtatgacgagaccttaggcaagctacatttctggctcacatttatttcagtaaatgtcacattcttccctatgcattttgtaggattagctggaatgcctagaaggtatccagactacgcacttcaatttgcagacttcaatgcattgataagcgtaggtgctttcatgtttggattaactcagcttttattcttattcatagttattaagacaataagatcgggtaaacaagcaaaacctgaggtatgggaaggtgctggtgatttaggcttagagtggactttgagttcgcctccaccttatcactcatttacagttcaaccacaagtaaagtag

SEQ ID NO: 225592 - DNA, 1165 bp, Unknown
  Bacterial polypeptide expressing nucleotide sequence isolated from the Sargasso Sea
tttcggatggactttttatgctcctctctcaacaacttatgcacctccaagtgttacattttttatattttcagttcacataatgggcgcctcatcaataatgggctcaattaatgttgtagtaacaattatgaatatgagagctcctggagtaggcctcatgaagatgccgctttttgtttggtcttggctaataactgcttatttattaatagctgttatgccagttcttgcaggcgcagtaaccatgatgctaatggatattcatttcggaactagtttctttaatgcagcaggcggaggggacccagtgctttttcagcatattttttggttctttggccatcctgaagtttatataatgatcttgccagcatttggaattgtttctcatattattgagaccttttctagaaaaccactttttggttatgcatcaatggtatgggcgatgctttcaatcgcaatattatcgttcgttgtatgggctcatcatatgtttacagttggtatgcctttagcagcagaaattttctttatgtgggcaacaatgttaatagctgttccaacaggcgttaaagtttttaactgggttgctacaatgtttagaggttctttaacatttgaaactcctatgttatttgcatgcgcttttgtagtgctttttacaataggtggtttatccggattaatgctggctattgttcctgctgactttcaataccatgatacatattttgttgtagcacattttcattatgttttagtcccgggagcaatattttcaattatggctgctgtttattattggatacctaaatggtgcggcaatatgtatgatgaaagattaggtaaattacatttttggctatcgtttattggagttaacgtaacattttttcctcaacactttattggactagcagggatgcctagaagatatcccgactatgcacttcaatttgctgactggaatatggtctctagtgttggggcatttttatttggattttctcagcttttattcttatttatagttattaaaactgtaatgggcgggaaaaaagcaactgaccaggtttgggatggggctaagggtcttgaatggacagtagcatccccagctccttatcatactttttcaacaccccctaaagtagactaa

SEQ ID NO: 225593 - DNA, 757 bp, Unknown
  Bacterial polypeptide expressing nucleotide sequence isolated from the Sargasso Sea
ttggtagaacccagcccatggccggcactaggtgctatgtctgggttcgtagcagccgtaggggctatcatgtttatgcacgataagccatttggcattccaataatgtcagcgggcttagttttcatcttaataacgatgtttttttggtggcgcgatgtaataagggaggcagaacatcaagggcatcataccccgatagtccagataggtatgcgatacggtatgattttgttcatagcgtcagaggtgatgtttttcctagcctttttctgggcgttctttgactcctccctgtatccggatacgggcgtatggcctccagccggagttgagacatttgatcccttcgatatccccttgatcaacacaatggttctattgttgtcgggctgtacatgtacttgggcgcacgctgcgttgcttgagaatgataggaagaactttatcttaggactaggcgtgacagtgcttttaggagccgcgttcacgggtttgcagatatacgaatatgaccacgcaacgtttggttttaaggatggtatttactcgtcgaccttctacatggccactggcttccacggttttcatgtattagtcggaacctgctttttggttgtctgttggtttaggggaagggcagggcacttcaacccggagcatcactttggatttgaggcggctgcatggtactggcattttgtcgatgttgtttggctctttttgttcatctgcatctattggtggggtggctgat

SEQ ID NO: 225594 - DNA, 835 bp, Unknown
  Bacterial polypeptide expressing nucleotide sequence isolated from the Sargasso Sea
aatgtcatctattacagcagattcacacagtcatacaccgacaggttggaaaaggtgggcgtactctactaaccataaagatattggtacaatgtatttaatttttgcaattgtagcaggattaattggttctgctttttcagttttaatgagaatggagttgatgcatccaggggacggtatacttggaggaaatcaccatctttacaatgttttagtaactggacacggattaatcatgatttttttcatggttatgcccgcaatgataggtggatttggtaattggtttgtccctattatgataggtgcacccgatatggcatttcctcgaatgaacaatatttcattttggttgttacctgtagctttaatattattactcgcctcaatctttgttgatggaccccctggtcaaactggagtgggaggtggttggactatctatcctcctttatcttctaagacaggccaacctggtcctgcaatggatttagcaatattaagtttacacatcgcaggtgcatcctcaattttgggagccattaactttattactacgattttaaatatgagaacaccaggtatgacattgcataagatgcctttgtttgcttggtcgattttagttacagcgttccttcttcttttatctcttccagttttagcaggagctattacgatgttgctaactgatagaaactttggaactgcattttttgaagcgcagaccggaggtgacccagttttgtttcaacacttattctggttttttggtcaccctgaagtgtacattttaattctacctggttttggaatgataagtcacattgtt

SEQ ID NO: 225595 - DNA, 1507 bp, Unknown
  Bacterial polypeptide expressing nucleotide sequence isolated from the Sargasso Sea
tttggaggttaagcctcaagatttatatcacgcaaatagttttataactagatggatcttttgccaagatgcaaaagtcataggcattcagtattctttaacagcgattgcaatcggattagtagcaatggttttatcctggatgatgagattacaacttggattcccagaaactttttctttcttagggcccgctgaatattatcagtttgtcacaatgcatggtatgattatggttatatatcttttaacagcattgtttcttggaggttttggaaattttttaattcctctgatggtcggtgcaagggatatggtatttccttatgtaaatatgattagtttttggatttattttctagcggtattaatattagttgctagtttttttgtccctggaggtccaacgggtgctggatggactctttatcccccacaagcaataacccaaggaacacctgggagcggttggggtataattttaatgctgatatctctttcagttttcgtagtaggttttactatgggcggattaaattatgtgatcacaattttacaagcaagaacacgaggaatgactctaatgagaatgcctttaactgtctggggaattttcactgcgacagttctagcgctttttgcttttcctgctttaattgtatcatgcataatgatgactcttgatagcttgcttggaacaagtttttttatgcctactatggtagaattaggagaaaaattagaatacggaggaggtagccctattctatttcaacatcttttttggttttttggacatcctgaagtttatattgttgcactcccagcttttggaattgtatcggacctaatttctgttcacgcaagaaaaaatatttttggttatcgaatgatggtatgggcgattgttttcattggagctcttagttttattgtttgggcccatcatatgtacgtcagtggaatgaatccttggtttggattcttttttgcaactactacacttatcattgctgttccaactgctataaaagtttacaattgggttttaacattatggagaggtaatattagacttactttacctatgttgtttgcattggcatttatagttacttttgttaatggtgggattacaggtctattcttagggaatgtaatcgtagatgttcctctttctgatacatactttgttgtagcgcattttcatatggtaatgggaatagcgcctgtattggtagtttttggagcaatatatcactggttccctctaataacaggacgttacttacatgaaggtatgggacagtttcatttttgggtaagttttttaggatcctatgcaatttattttccaatgcactatcttggatttatcggagttcctagaagatattatgagatgtacaatagtgaatttattccaacctcagctgaaggtttaaatcaatttattacaattgctgctttaactgtcggttttgctcaaaatagtatttttatataa

SEQ ID NO: 225596 - DNA, 730 bp, Unknown
  Bacterial polypeptide expressing nucleotide sequence isolated from the Sargasso Sea
aatggcctatgcaatggtttctattggagttattggttttgtagtctgggctcaccatatgtatactgttgggctttcagtagatacaagggcttattttaccgcagctacaatggttatagcagttcctaccggtataaaaatattttcatggattgctacaatgtggggcggctctattgtctttagaattcctatgtattgggcaattggttttatttttctatttactgttggcggtgttaccggtgttgttttagctaatgcaggcttagatgttgtacttcataatacttactatgtgattgcacactttcactatgtattatcattgggtgcagtttatggtctttttgcagctttttactattggtttgctaaaatgactggctatgaatatagcgaaggtttagcgaaacttcatttctgggttacctttataggagttaatctaacttttttccctatgcattttttaggtctcgctggaatgcctagacgttatgttgattatccggacgcattcgctggctggaacatggttgcgtctataggttcttatattggggctttgggagctgttatttttttagttgttatcattgaagcttttgttaaaaaacgtaaagctgataagaacccatggggctcttctgacaacacattagagtggactgtaccgtcaccaccagcatttcataccttttctgagatacctaaggtaaaataa

SEQ ID NO: 225597 - DNA, 1246 bp, Unknown
  Bacterial polypeptide expressing nucleotide sequence isolated from the Sargasso Sea
ctcgtgcttctggttcttcgggggtttgtgcaaggcggggccggtaccggctggacagcttatccaccgctatccaatgcagattaccatcccggcccagcggtagattttgctattctaagtctgcacctagcgggagcttcctctattcttggggccattaattttatcaccacaatacttaatatgcgtacaccgggaatgagttttcataaaatgccactatttatttgggcttcgcttgttacagcttttcttttattgttagcattgccagttttagctggcgcattaacaatgcttctcaccgaccgcaattttggcaccactttttttgaagcatcgggtggaggagatccaattttttggcagcacctcttttggtttttcggtcatcctgaagtgtatattatgatacttccggcattcggtattgtgagtgaggtggtttccactttttccaaaaagccaatttttggttacctaggtatggcttacgcgatggcgggaataggtgtggttggttttgtggtgtgggcccaccacatgtttacagttggatttaatgtagaaacccgagcttattttgtgctggctacaatggttattgccgtcccaacgggaataaagatttttagctggcttgctacgatgtggggtggatctatcgaattcaagacccctatgctctatgctatgggttttatatttctatttgttgttggtggagtaacgggtattacattggcgaatgccggcgttgatatggcttttcacgacacctactttgtaatagcccactttcattatgttttatctattgccacaattttcggaattttttgtggggtgttttattggttgccgaaaatgtgcgggaatatgtataacgaaactttaggtaagtggcagttttggataacttttattggggtcaatattctattttttcctcaacactttttaggaatggcgggtatgccgagaagaattcctgattatcctgatgcttatgcgggttggaaccttattagtagctttggtgcgttaatatctctagttggtgcccttatgtttatttatatcgtttgggttactattcgatctggagagaaagcacctgctaacccatggggggaaggagcaacaactttagagtggactgttgactccccagcgccattccatacccatgagcaggctcccgagctagagcctaaatcagctacacagccagctgagtagt

SEQ ID NO: 225598 - DNA, 859 bp, Unknown
  Bacterial polypeptide expressing nucleotide sequence isolated from the Sargasso Sea
atgagcggtcaaaaccagaccccgtactatttcgtgccgcatccgtcgcagcatccgatcagcgcggccatcggcctgctggtcatgctcggatcgacagcgctgtggatcaacggtcacgactgggcgccgtttacggcgctgctcggcctgctgtggttgctcttcacgctgtatcactggttcggcgacgcgatcgccgaatcggaaggcggtcattacggcaagaacgtcgacaagtcgtaccgctggagcatgagctggttcatcttctcggaagtcatgttcttcggcgcgttcttcggtgcgctgttctatgcgcgtgaaatcgcgctgcaccagctcggcagcctcgactacaagctgatctggccggacttctccgccgtgtggccgaacgaaggccccgccgcgctcgccggtcacttcaagacgatgggcccgtggccgatcccgacgctgaacaccgcgttcctgctgtcgtcgggcgtgacgctgacgatctcgcaccacgcgctgcgtgacgatcatcgcaagaaggcgatcgcctggctcgccgcgacgctcgtgttcggtatctgcttcctgttcctgcagggcttcgagtactaccacgcgtacaatgaactgaacctgacgctgaactcgggcgtgtacggttcgacgttcttcctgctgaccggcttccacggcttccacgtgttcctcggcggcacgatgctcgcagtggtgctggtgcggatgatccgcggccacttcaagcccgatcaccacttcgcattcgaaggcgccgcgtggtactggcacttcgtcgacgtcgtctggctcggcctgtacgtcgtcgtctactggctgtaaa

SEQ ID NO: 225599 - DNA, 1228 bp, Unknown
  Bacterial polypeptide expressing nucleotide sequence isolated from the Sargasso Sea
ccctccaggtgctcaaggtgttggaggtggttggaccatatatcctccattatcatctaaagcaggtcaacctggtcccgctatggatttagcaattttatctctacatatagcaggagcttcatcaattttgggagcagttaattttattactacaattttaaacatgagaactccaggaatgacattgcataaaatgccattatttgcttggtcaatattagttaccgcatttctcttgcttttatctttaccggtcttagcaggtgcaattactatgcttctcacagatagaaactttggtacagctttttttgatgcccaaactggaggagatccaacattatttcaacatctattttggttttttggtcatccagaagtttatattcttatacttccaggatttggaatgataagtcatatagtatcaacattctcaaaaaaacctgtgtttggatatttgggtatggcttatgcaatggtagcaattggaattgtaggttttgtagtttgggctcaccacatgtatacagtcggactcgatactgacactaaagcttatttcttggcagcaacattaataattgctgtacctacaggtataaaaatattttcgtggattgcaacaatgtggggtggctcaatttcctttaaaacccctatggtatgggctcttggctttatatttttatttactgtaggcggagttactggaattgttctcgctaacgcaggagtagataccgctttacatgatacgtattatgttgtggctcactttcactatgtactatcattaggggcagtttttgcaatttttgcaggtttctattattggtttagcaaaatgagcggttatgaatattcagaatggatgggacaacttcatttctggttaacatttattggtgttaacttagtatttttcccacaacattttttaggtttagctggtatgcctagaagatatgctgattatccagatgcttttgctgactggaactatatctcttcgattggttcatacatttcagttgttggactacttgtattttttgctaatttaatttactcattttctaagaagaaaaaagcagcacaaaatccatggggagaaggtgctactacactagaatggactgtgccatcacctccaaattttcatacatttgatgaattacccaagtttgaaaatattgagggtgtagaaaaatctggtagttag

SEQ ID NO: 225600 - DNA, 1636 bp, Unknown
  Bacterial polypeptide expressing nucleotide sequence isolated from the Sargasso Sea
tatgtatacacaaacagcatcacacgacgatcatcatacgcctactggttggaagcgttgggcttattcaaccaaccacaaagatattggaactatgtatctaatatttgcaattattgcaggtgtgattggtactgcattctcagttttgatgagaatggaattgatgcatccaggtgatggaattttaggtggaaactatcatctatataacgtgttggttactggtcatggtttgataatgatattctttatggttatgccggcaatgataggtggatttggtaactggtttgttccaataatgattggtgcacctgatatggcttttcctagaatgaataatatttcattctggttgctacctacatcttttattttattaataatgtcaattttcatggatggccctccaggtcaaacaggagtaggaggaggatggacaatatatcctccgttatcatcaacagcaggtcaaccaggtccagcaatggattttgcaattttaagtctacacttagctggagcctcttcaattttaggtgcagtaaactttattactacaattttaaatatgagaacacctggcatgacacttcataaaatgccattatttgcttggtcaatattagtaacagctttcttattattattgtcattaccagttttagcaggagcaattacgatgcttctaacagataggaactttggaacagctttctttgatgcacaaactggaggagatccagttctattccaacatttattttggttctttggtcacccggaagtttatattttaattttaccaggttttggaatgatcagtcatattgtttcaacattttctagaaaaccagtttttggatacttaggaatggcttatgcaatggttgcaattggaatagttggttttgttgtgtgggctcaccacatgtacacagtaggtttaagcacagatacaaaagcatactttttagctgcaacaatgatcattgcagttccaaccggtataaaaatattttcatggatagcaactatgtggggtggttcaatttcatttaaaactccaatggtttgggccttaggatttatatttttatttacagtcggtggagttacaggtgtagttcttgcgaatgctggtgttgatactgcaatgcatgatacatattatgttgttgctcattttcattacgttttatcattaggagctgtgtttgccatcttcgctggtttttattactggtttgggaaaatgactggttacgagtattcagaatggatgggtcaattacacttctggttaacgtttattggagtaaacttagttttcttcccacaacactttttaggccttgcaggaatgccaagaagatatgctgactatccagatgcttttgcgggatggaattatatttcttcaattggttcttatatttctgtaattggattggtagtattttttataaaccttgcttatgcgttttataagaaaaaggctgcagcacaaaacccatggggagaaggcgctacaactttagaatggactgtaccatctccacctaattttcatacttttgaagaattaccaaagtttgaagatgaagagggtgttgaaaaatctactagctaa

SEQ ID NO: 225601 - DNA, 790 bp, Unknown
  Bacterial polypeptide expressing nucleotide sequence isolated from the Sargasso Sea
aatgtcagcagaaaaaaaacacgattaccacttagttgatccaagtccctggccaatctatacatcttttgcatgcttagtattagctataggtgcaattttttatatgcataacggtatttcatggggaatgtatcttggtttagctttgttaatttatggtgcatacatgtggtttagagatgtagtaattgaagctgaacatcaaggtcatcacactcctgttgttcaaattcatcatagatatggaatgactttatttattgcttcagaggtaatgttctttgttgcatggttctgggcttactttgacataagcttgtttccaaatgaatttgttggaaatgtatggccaccaaaagatattgaaacatttgatccttgggatattcctttgataaatactttagttttattactatcaggaacaactgttacttgggcccatcactctttattggaggatgatagaaaaggatttatacaaggattaactttaactgtaatcctgggtttcttttttacgttattacaagcatatgaataccatcatgccacttttacctactcgggccatatttatggagcagttttttacatggcaacaggttttcatggtttccacgtgattattggaacaatatttttggctgtatgtttgtggaggggaagacttggtcatttcacaaaggatcatcattttggatttgaagcagctgcttggtattggcattttgttgacgtagtgtggctattcttatttgctgcaatttatatttggggaagttaa

SEQ ID NO: 225602 - DNA, 751 bp, Unknown
  Bacterial polypeptide expressing nucleotide sequence isolated from the Sargasso Sea
tatggcagacgcagccatccacggccatgagcatgaagatcaacgaagtttttttacccgttggtttatgtcaacaaatcacaaagatatcggtattttatatctcgtcgtgtcagcacttgtaggctttatagccgtatcattcacgatatatatgagactggaattgatgaacccgggcgttcaatacatgtgtatggaaggaatgcgcctaacagccgcaggaattggtgaatgtacaccaaacggccatctatggaatgtacttattactggtcatggcattctgatgatgttttttgttgtgattccagccctattcggcggttttggaaactactttatgcctctacaaattggatcaccagacatggcattcccaagaatgaataatttgtctttttggatgtatgtagctggaacgaccttagcgatatgttctgtgctgtctcctggaggtaacgatcaattggggtctggcgttggctggatactctatccaccgctttctgtaaacgagggtggtatgtcaatggatttggcgattttcgccgtccatgtttcaggagcgtcatctattttgggcgctataaatatgatcacgacctttctcaacatgcgagcccctggaatgacactgttcaaggtgccattgttttcttggtcaatttttgtgacggcatggttaatacttctagcacttccagttctagctggtgccataacaatgcttcttactgatagaaatttc

SEQ ID NO: 225603 - DNA, 793 bp, Unknown
  Bacterial polypeptide expressing nucleotide sequence isolated from the Sargasso Sea
atgtcagcggaaaaaccaaaacacgattatcatttagttgacccgagtccttggccgatttacgtttcattcgctactttagtcttagcttttggagcagtttattactttcactcaaaagccctttggttgctattaattggttttgctttagtagtttatggcgcatttatgtggtggagggatgttatagaagaagcagaacatcaaggtcatcatactcatgtagttcaaatcgggcataggtacggtatgacattatttattgcatctgaagtaatgttttttgttgcatggttttgggctttttttaacgcaagtttatttccatcagactctattggcggtatctggccaccagcagatattaaaacttttgatccttgggatataccattaattaacactctaattttattattatcaggaactacagtcacctgggcgcatcatgcaatgttagaaaatgacagaaaaggattagtaaatggtttgatcgcaacagtatttttaggatttatattttcttgttttcaagcttatgagtatcatcatgcaacatttactttagatggcggaatatatggttccacattttatatgtcgactggttttcatggttttcatgtaatagtagggactgtttttcttgcagtttgtttatttcgatcaatgagaggtcattcaacacctcaacaccattttggatttgaagcggcagcctggtactggcattttgtcgacgtagtttggctattcttatttgctgcgatctatatttggggaagttaat

SEQ ID NO: 225604 - DNA, 916 bp, Unknown
  Bacterial polypeptide expressing nucleotide sequence isolated from the Sargasso Sea
atgagtgggggaagttattacgttccagatcaaagcagatttccaatttttatggcggtttctttgtttctattggttatgggagcttcaagtacgataaataacttagatgacccaaccagcaactctgtatatatactatattcaggatttgcatgtttatttttgaccatgtttttttggttcagacaagtaataaaagagcatcttgctggactagattctaatcaattaaaacaatcttatgtatacggaatggcatggttcattttttctgaagtcatgttttttgctgcattttttggtgctttattttatgttagaactctagcagttccttggttagctggcgaaggatcaaaaggagcagcaattacagccattgaactatggccagcctttgagtcttcatggccggttatgaccacaccggatcaaggtaatgagtatgatttggctgacaagagcatggcatggccaggatggagtaaggctattttatggctgcctttgtggaacacaattgttcttttgagttcatcatggactgttcacttagcccaccttggtttaaaaaaaggaaatagaaaaaagtttaatgtatatcttggagttacagttcttttggctttaatttttgttggactgcaggctcttgaatattatgaagcttatgcacattatggccttaaattaaattctggaatatatggatcaacgttttttatgcttactggttttcatggcttccatgtgatgatgggcggttttatgttagctattatgcttgcaagatcagtttttgcaggtcactttgagcaacacgatcactttggctttgaagctgcatcatggtattggcattttgtagatgttgtctggctaatgctatttatatttgtttatattttataat

SEQ ID NO: 225605 - DNA, 1582 bp, Unknown
  Bacterial polypeptide expressing nucleotide sequence isolated from the Sargasso Sea
atgagtgcagtaatagagaatcaccatgacgatcacgatcatggcccagcaaaaggaatcactagatggttatacacaactaatcataaagatataggaacactatatttatggtttagttttgcaatgttccttataggcggagcaatggcgatgataataagagctgagcttttccagcctggcatgcaaatagttgagcctgaattttataaccaaatgataacgcttcatggtttgatcatgatatttggtggtgttatgccggcgtttgttggactcgctaactggttggttccaatgatgattggggcaccagacatggcattaccgagaatgaacaatttgagtttctggatattgccttttgctttctttattcttttatcatcccttttcatggagggcggagctcctaactttggatggacattttatgcaccactttcaacaacatatgcaccgccaagcgtaacgttttttatattttctgttcacataatgggagcttcttcaattatgggtgcaattaatgtggttgtaacaatcatgaatatgagagcaccaggcgtaaccttaatgaaaatgccattatttgtatggtcatggctaataactgcatatttgttaatagctgtaatgcctgttttggccggagcagtaacaatgatgttaatggacatccactttggaacaagtttctttaatgcagctggtggcggagaccctgttctctttcaacatattttttggttctttggccatcctgaggtttacataatgattttgccagcctttggtatcgtttcccacattatcgagactttttcgaggaaacaactatttggttattcttcaatggtttgggctatgctttcaattgcaattctttcttttgtagtatgggctcaccatatgtttacagttggcttgccattagcagctgaaatattttttatgtgggcaactatgttgatagccgtgcctactggtgtaaaagtatttaattgggtagcgactatgtttagaggatctctaacatttgaaacgcctatgctttttgcagttgcatttgttgttttatttactatcggaggattgtcaggattgatgctcgctattgttcctgctgatttccaatatcatgatacatattttgttgttgctcattttcattacgttttggttcctggagcaatattctctatcatggccgctgtttattattggattccaaaatggtctggaaatatgtatgacgaaagactcggcaaacttcatttttggctttcatttataggtgtaaacgttacattctttccacaacattttattggtttggctggaatgccaagaagataccctgattatgctctaatatttgctgactggaacatggtttctagtattggagcatttctatttgggttctctcaattactgtttttatttattgttatcaagactgtgatgggtggcaaaaaggcaacagatcaagtttgggaaggcgccaaagggcttgagtggacagttgcttcaccagctcccgtaccatacattttcaacaccaccaaaggttgat

SEQ ID NO: 225606 - DNA, 1177 bp, Unknown
  Bacterial polypeptide expressing nucleotide sequence isolated from the Sargasso Sea
tatgtatacacaaacagcatcacacgacgatcatcatacaccaactggttggaaacgttgggcttattcaactaaccacaaagatattggaaccatgtatttaatatttgcaattattgcaggtgtaattggtacagcattctcagttttaatgagaatggaattgatgcatcctggtgatggaattttaggtggaaactatcatttatataatgtcttagtcactggtcatggtttgatcatgatcttctttatggttatgccggcaatgataggtggatttggtaactggtttgttccaataatgatcggcgcacctgatatggcttttcctagaatgaataatatttcattctggttactacctacatctttcatattattaataatgtcaattttcatggatggccctccgggtcaaacgggtgttggtggtggatggactatttatcctcctttatcatctacagctggtcaaccaggtccagcaatggattttgcaattttaagtttacacttagccggagcttcttcaattttaggtgcggtaaactttattactacaattttaaacatgagaacgcctggcatgacacttcataaaatgcccttatttgcttggtcaatacttgtaacagctttcttattattattatcattaccagttttagcaggggcgattactatgcttctgactgatagaaactttggaacagctttctttgatgcgcaaactggtggagacccggtcctattccaacatttgttttggttcttcggtcacccagaagtttatattttaatcttaccaggttttggaatgatcagtcatattgtttcaacattttctagaaaaccagtttttggatatttaggaatggcttatgcaatggttgcaattggaatcgttggttttgttgtgtgggctcaccacatgtacacagtaggtttaagtacagatacaaaagcatactttttagctgcaacgatgattattgcagttccaactggtataaaaatattttcatggatagcaactatgtggggtggttcaatttcattcaaaactccaatggtttgggctttaggttttatatttttattcactgttggtggagttactggagtggttctagcaaatgctggagttgatacagcaatgcatgatacttactac

SEQ ID NO: 225607 - DNA, 1097 bp, Unknown
  Bacterial polypeptide expressing nucleotide sequence isolated from the Sargasso Sea
tatgagtacagtagtagaatcacacgaccacggacatcacggtccggcaaaaggcctttctagatggctttttacaacaaatcataaagatataggtactttgtatttatggtttagctttatcatgctctttattggcggtgccatggcaatggtaataagagctgagctttttcaaccaggactgcagatagttcagcctgaattctttaatcaaatgaccactaaccatggtctgataatggtttttggcgtaatcatgccagcttttgtaggacttgctaactggatgttgcctatgcaaataggagcacctgatatggctttaccaagattaaacaatttgagtttttggttgttgccaatggctttcggtatattaatttcaaccttgtttatgcctgaaggtggaccaaactttggatggactttctatgcacctctttcaacaacttatgctccctctaccgttaacttttttattttttcagttcacataatgggcgtgtcatcgatattaggctcgataaacatcattacaactatcttcaatatgagagcgcctggaatgactttaatgaaaatgcctctttttgtttggagctggttaataacagcttatttgctaatagcggttatgccagttttagcaggtgttgtaaccatgatgttgatggatataaattttggtacaagtttctttaatgctgccggcggtggtgatccagttttatttcaacatgtcttttggttctttggtcatccagaagtctatatcatgatcttaccagcttttggtattgtttctcatatcattgagaccttctctagaaagccaatttttggatactcttctatggtatatgccatggcttcaatagccattttatctttcgttgtctgggctcaccatatgtttacagtcggtatgcctctagcaggagagttattcttcatgtactcaacaatgctaattgctattcctaccggtgtgaaagttttcaattgggttgcaacaatgtttagaggctcaattacatttgaaacaccaaatgttattctcaaattgcttttgtggctttatttacaattggcgg

SEQ ID NO: 225608 - DNA, 679 bp, Unknown
  Bacterial polypeptide expressing nucleotide sequence isolated from the Sargasso Sea
catatgttcacagttggtatgactgctgatttaagagcatattttatgctagccacaattatcattgctgttccaactggtattaaaatatttagttggattgcaactatgtggggtggatcacttacatttgaaactccaatgttatttgcaattggatttgttttcttatttacacttggaggagtaacaggagtcattctggccaatgcaggaatagacactgtaatgcatgatacgtactatgttgttgcacacttccattatgttctgagtatgggagctatgtttggaatttttgcgggtatttactattggtttggaaaaatgtctggaagaaaatataatgaatttttaggcaaactacatttttggttattttttattggagtaaatgtaacatttttccctcaacattttttaggacttgcaggaatgcctagaagaattccagattatccagatgcttatgcaggatggaatcttgtatcaacttatggttcttacatctcttttgctgctaccttgatatttcttttcgcaattgtgtatgctttattttttggaaagaaagaagtcgcaaacccatggggagagggagctgatactcttgaatggacactttcttcacctccaccattccatcagtttgagactttacctaaattcaaaggataat

SEQ ID NO: 225609 - DNA, 847 bp, Unknown
  Bacterial polypeptide expressing nucleotide sequence isolated from the Sargasso Sea
atgagtgaaaattcttcagtaggtcaaaaacatccttatcatttagtcgatccaagtcctcttccttttttagcatctatagcgggcttagctatggctgctggattagtattttttatgcactatgatactaagtggttattaatccttggaaccataggaatattaacagttatgtttttgtggtggagagatgtaattaaagagtcaacatttcaacaagttcatacacctgttgttgaattaggacttcgttatggaatggctttgtttattgcatcagaagttatgttttttgtagcatttttctgggcattttttgatgcaagcttaacaccaaaacttccagttgaagaatttgttgaaacttatgacaccaatggggctgttggcgtttggcctcctgaaggtattaaaacctttgatcctttagatgtaccttttttaaatactttaattttactaatgtctgggacaacatgtacatgggctcaccatgcagttcgagaaggacatagagatcaagctattcaagctctatggttaactgttggactcggagtttgctttacactacttcaagcttttgagtattatgaagctttccatcattattttaaatttacggatggcatttatccttctgtgttttatatggcaactggcttccatggttttcatgttatagttggaactgcttttttagctgtttgtttattcagagtatataaaagccatatgactccagaaagacattttggtcttgaggctgctgcttggtattggcattttgttgatgtggtgtggctttttttatatgtttgtgtttacatctggggtgcataaa

SEQ ID NO: 225610 - DNA, 1099 bp, Unknown
  Bacterial polypeptide expressing nucleotide sequence isolated from the Sargasso Sea
ttatcctccactctcaaataaactcggacatgcaggaccttctgttgatatggcaatttttgctcttcatttagcaggagcttcttcaatcttaggtgcagttaattttataacaacgatacttaatatgagaacgcctggaatgactctgcataagatgcctctttttgtatgggctatgttaattacagctttcttacttttattagctgttcctgttttagctggagcaattacaatgcttctaactgatagaaactttggtacaacattctttaatcctgcaggtggtggagatccagttctttttcaacacttattttggttctttggtcatcccgaagtttacatcatgatattacctgcttttggaattgtaagccaagtcatctctactttctctagaaaaccagtgtttggatatctaggaatggtttatgctatgatagcaataggatttataggttttatcgtgtgggctcaccatatgtttacagttggtatgagtgcagatttaagagcatattttatgctagctacaattattattgctgttccaactggtataaaaatatttagctggattgcaactatgtggggtggatcacttacatttgaaactccaatgttatttgcaattggatttgttttcttatttacacttggaggtgtaacaggagtcattctggccaatgctggaatagatactgtaatgcatgatacgtattatgttgttgcacacttccattatgttctgagtatgggagctatgtttggaatttttgcgggtatttactattggtttggaaaaatgtctggaagaaaatataatgaatttttaggaaaactacatttttggttattttttattggggtaaatgtaacattttttcctcaacatttccttggacttgctggaatgcccagaagaattccagattatccagatgcttatgcaggatggaatcttgtatcaacttatggttcttacatttcttttgccgcaactttaatattccttttcgcgattgtatatgcattatttttcggaaagaaagaagtttctaacccttggggagaaggagctgacactcttgag

SEQ ID NO: 225611 - DNA, 1437 bp, Unknown
  Bacterial polypeptide expressing nucleotide sequence isolated from the Sargasso Sea
gttggagcagagatatggtcttcccttatgttaacatggtaagtttttggatgctttttgttgcagtaggagttttgatggcaagcttttttgttcctggcggacctactggatctggatggacgttgtacccaccgcaagctattttagaaggtacaccgggatcagggatgggtataattttaatgcttatgtctctgtctctctttgtcattggtttcactatgggtggactaaattatctaatcactgtcttacaagccagaactagaggaatgactttgatgagattacctttaacagtatggggtatttttacagcaactgttctagcaatgttggcctttccagcactactagtaagttcgataatgatgactttggacaagctgcttggaacaagtttctttatgccaacaattttaaaggcaggtgaggtattggaatatggtggtggaagtccaattctttttcaacatttattttggttttttggacatccggaagtttacatagttgcattgccagcgtttggaattgtttcagatttaatatctgttcactctagaaaaaatatatttggttatagaatgatggtttgggctatcgttgcgattggagctttaagcttttttgtttgggcacaccatatgtatgtaagtggaatgaacccatggttcggatttttctttgctacaacaacactgattattgcagttccaactgccatgaaagtttataactggattttgactttatggagaggaaatataagaaattacactgttatgctttggtgccttggatttattgttacatttgtaaatggaggtattacaggaatctttttaggaaacgttacagttgatgttccgttgtcagatacatattttgtgatagctcactttcatatggtgatgggtattgcaccattaatggtaattatgggcgctgtatatcattggtttcctttggttacaggtaggatgctaagtgaaaaattaggaaaatggcatttctgggctacatttttaggagcttattcgatttattttccgatgcattatctaggatttattggagtaccgagaagatattttgaaatgtatgatagtccatacatgacatctgcagttggtatgaacgagtttataagtacagcagcctttttagttggtgctgcacaatttattttaatatttaatattataaaaagtttaaaaactgggaagcctgcaggacacaatccttggaaagctaactctttagagtggctaacgccaacggttcctcctgaacacggcaactggggagaaagacttcctgtggttcatagatggccatatgactacagtgttcctggtgcaaaagaagattttatagtccaaactactccgccaagcgaagtagctcacacaaaagtagaaaaaacttaaa

SEQ ID NO: 225612 - DNA, 1633 bp, Unknown
  Bacterial polypeptide expressing nucleotide sequence isolated from the Sargasso Sea
tatgtatacacagactgcatcacacgacgatcacactccaactggttggaagcgttgggcttattcaaccaatcacaaagatattggaacaatgtatttaatttttgcaattattgcaggtgtaatcggtacagcattttcagttttaatgagaatggagttgatgcatccgggagatggtatcttaggtggtaattatcatttatataatgttttagtaactggtcatggattgatcatgattttctttatggttatgccagcaatgatcggtggttttggtaattggtttgtaccgattatgattggtgctccagatatggcgtttccaagaatgaataatatttcattttggttattacctacatcatttattttattaattatgtctatttttatggacggacctccaggtcaaacaggagttggaggtggttggactatttatcctcccttatcatcttctgccggacaaccaggtcctgcaatggattttgcaatcttaagtttacacttagcgggcgcttcatcaattttaggagcagtaaactttattacaacgattttaaatatgcgaaccccaggcatgactttacataaaatgcctttatttgcctggtcaattttagttacagcatttttattattgttgtctttacctgttttagcaggagcaattacaatgcttttaactgatagaaattttggaacagctttttttgatgcacaaactggtggagacccagttttattccaacatttattttggttttttggccatcccgaagtttatattttaattttgcctggttttggaatgataagtcatattgtttcaacgttttctaaaaaacctgtatttggatatttgggaatggcttatgctatggttgcaattggaattgttggttttgttgtatgggctcaccatatgtatacagttggtttaagcactgacacaaaagcatactttttagcagcaacaatgattattgcggttcctacagggataaaaatattttcatggattgcaacgatgtggggtggatctatctcatttaaaacaccaatggtatgggcattaggttttatatttttatttacagtaggtggagttacaggagttgtcttagctaatgcaggtgttgatacagcaatgcatgatacttattatgttgttgcacactttcactatgttttatctttaggggcagtgtttgcgatatttgcaggtttttattattggtttggaaagatgtctggatatgaatattcagaatggatgggacaattacatttctggttaactttcattggcgtcaatttagtatttttccctcagcactttttaggtcttgctggaatgccaagaagatacgctgattaccctgatgcttttgcaggttggaattacatatcatcgataggatcatatatttcagttctaggattagtggtattttttgctaatttaatttacgcattttcaaagaaaaaagctgcagcccaaaacccttggggagagggagctactactttagagtggactgtaccatcaccaccgaattttcatacttttgaggaattgccaaaatttgaagatgatgaaagcgttgaaaaatctataagttaa

SEQ ID NO: 225613 - DNA, 676 bp, Unknown
  Bacterial polypeptide expressing nucleotide sequence isolated from the Sargasso Sea
gatgtttcgtggggaatgtatcttggggttagcactagttatttatggagcctatatgtggttcagagatgttgtgattgaagcagaacatcaaggtcatcatactcctgttgtgcaaattcatcatcgatacggaatgacattgtttattgcatcagaagtgatgttctttgtagcttggttctgggcatattttgatgcaagtttattcccaaacgagtttgttggaaatgtttggcctccaaaagatattgaaactttcgatccatgggatattcctctaattaacactttagtgctattgttatctggaactacagttacttggtctcatcattctttactcgaaggtgatagaaaaggatttattcaaggattaacagcaacagttgttcttggtttcttttttacattactacaagcatacgaataccatcatgccacttttgattattcaggtcacatttatggagcagttttttacatggctacgggtttccacggatttcacgtaatagttggaacaatatttttagctgtttgtttatggcgaggaaaattaggtcactttactaaagaccatcattttggatttgaagcagcagcttggtactggcattttgttgatgtagtttggttattcttatttgctgctatttatatttggggaagttaa

SEQ ID NO: 225614 - DNA, 907 bp, Unknown
  Bacterial polypeptide expressing nucleotide sequence isolated from the Sargasso Sea
atggaatatcaaaaatattatgttcctgaatcgagcaaattccctatttttgctgctttttctttgttcattataataatcggcgcttcatcaacaattaattctcttgataaccctgaaagcaatgcaagcttaattctatatacaggcctagcttgtttttttgcaacattatttttttggttcaggcaggttgttaaagaaaacaatgccggcctagaaagtgcacaactttctcagtcttttgtttatgggatggcgtggtttatattttctgaagtaatgttctttgctgctttctttggagctttattttatgtaagatctttcgcagttccatggttggggggcgaaggagaaaaaggccttgccaatatgttatggcaagattttgaagctacgtggccactaataaatactcctgatggaggcaaagcttttgtcatagctgcaaaaagtatgagctttcccggatgggaaaatattagccactggctacctctatacaacactatcgtattgcttagctctagcgtaacagttcactttgcacatctaggtctaaagaagggaaacaaaaaaacattcaatatttggcttggcattacagttttactcgctctaatttttgttggccttcaagcagcagaatactatgaggcttatgagcattttggacttactctaaattcaggaatttatggatcaactttctttatgttgaccggattccacggattccatgtaatgttaggcggccttatgctcgcagttatgtttataagatctgtattttatggccactttaatgagcacaaacatttcggattcgaagccgcatcttggtattggcactttgtagatgttgtttgggttatgttgttcctatttgtttatattttataaa

SEQ ID NO: 225615 - DNA, 1300 bp, Unknown
  Bacterial polypeptide expressing nucleotide sequence isolated from the Sargasso Sea
atgtcagacgattacgaaaataaaacaggttatcaggctcaatcttcagaaactatttcttcaggtggaagcggaagatcaggaacagcctctgatatagattacgtaagacctgcagaaaatgcagaacaagatttatatcatggtcatagttttattactaaatgggttttttgccaggatgcaaaagttatcggagttcaatattttcttttagcaacttttacaggcgtcattggcttgattctttcttggttaatgcgtttacaattaggttttcctggagcggctggttttatgactgccgagcattattatcagtttgttactatgcacgggatgataatggttgtttattttttaactgcactttttttaggaggatttggtaattatttaattcctttgatggttggagcaagggatatggttttcccatatcttaatatggtaagtttttggatgttttttattgctgttggagttttattagcaagtttttttgttccaggaggcccaacaggagctggatggacactttatccacctcaaacaattttagaaggaactccagggtctggatggggaatactattaatgtgtatatcattaattttgtttgttgcaggatttaccatgggtggattaaattatttaattactattttacaagctcgtacaagaggtatgacattaatgagaatgcctttaacagtatgggggatttttacagcaactgttttagcaatgttagctttccctgcactattagtaggcgcgctaatgatgactttagataaagtacttgcaacaagcttttttatgccaactatattaaaagctggtgaagttttagaatatggtggaggaagtcctattctttttcaacatttattttggttttttggacacccagaagtttatattgttgctctacctgcatttggaatagtttcagatttaatatctgttcattctagaaaaaacatatttggttatagaatgatggtctgggctattgttgttataggagctctaagcttttttgtatgggcacaccatatgtatgttagtggaatgaatccttggtttggtttcttctttgcaactacaacacttataatagcaattccaactgctatgaaagtctataattggattttaactctttggagaggaaacattagacttaacgttgtgatgttatggtgtcttggctttatagtaacttttgtaaacggtggtattacaggaattttcctaggaaatgttactgtagatgtaccattgtcggatactt

SEQ ID NO: 225616 - DNA, 1624 bp, Unknown
  Bacterial polypeptide expressing nucleotide sequence isolated from the Sargasso Sea
tatgagtgaaaatacaaagcaaaattatttaaaccatccaaaaggaataatgtcctggttgcttacattggatcataagcgaattggtttaatgtacttatttagtggaatcttattcttctttttaggaggattgctagctctggtaatgagatttgagcttgcagctcctggaaacgatataatttcaaatgaagtttataacaatgcttatactttgcatggagcaataatgatatttctatttattattcctgcaattcctggagcattaggaaatattttacttccactaatggttggggcaaaagacgttgcttttcctagattaaatttagccagtttttatatttattcttttggggcattgtttgcaatgtatacaattattaatggtggtgttgatactggttggactttttacacaccatattccacgcaaagtacatcaaatgtagttccaatgactttgggaatctttattataggattctcatctattttgactggtttaaattttattgccactgttcataaaatgagaatacctggccttacttggtataagttgcctctgtttgtttgggctttatatggaacatccttagtacaaattactgccacacctgttctggcaattaccatggttttgttaatgcttgaaagatttttaggtataggtatttttgatcctgctttaggtggtgatccagttttataccaacatttcttttggttttattctcatccagcagtttacattatgattcttcctgcttttggtattataagtgaaatcattccagtgcattcaagaaagaaaatttggggatataaattcattgcttattcaactctatcaattgcatttattggatttttagtttggggtcaccatatgttcacttcaggacaatccgtcttttcacagattgttttttctttcattacatattttgtcggaataccaactggggtaaaaatctttagttggattttgacaatgtataaaggacaggtttcctttactcctccaatgttttatgcattagcattcttattcttgtttacaatcggtggattaactggaatatttttaggagcagttgcattagatattcatttacatgacacttattttgttgttgctcacttccattatgtaatgcagggtggaaccattgttgctttcctaggaggactacatcattggtggccaaaatcttttggagtaatgtacaatcaaactatagcaaatattgctgctttaggtgtgtttataggatttaatggaacattttttccacaatttttacttggtttaagaggaatgcctagaagatatgcaacttatgatgaacagtttgttgaattgcatagttattcaacattttggtcaggcatacttggtatttcaatttttatagctgtaatgaatttattttggtcatttattaaaaagaataaagttgatccaggttcaaatccatggggaggtatgacactagaatggacacatacttcatcaccacctcatcctcataattttgaagaagagccggtattgcagcatggtccatatgattatgataaggtaattgttgagaaaacatataagaaataa

SEQ ID NO: 225617 - DNA, 790 bp, Unknown
  Bacterial polypeptide expressing nucleotide sequence isolated from the Sargasso Sea
atgtcagctgaaaaaaaacacgattatcacctagtagacccaagtccttggcctatctatgtatctttctcatgcttagtattagcaataggaacaattttttacatgcacaacgatgtttcgtggggaatgtatcttgggttagcgctagttgtttatggagcctatatgtggttcagagatgttgtgattgaagcagaacatcaaggtcatcatactcctgttgtgcaaattcatcatcgatacggaatgacactgtttattgcatcagaagtgatgttctttgtagcttggttctgggcatattttgatgcaagtttattcccaaacgagtttgttggaaatgtttggcctccaaaagatattgaaactttcgatccatgggatattcctctaattaacactttagtgctgttgttatctggaactacagttacttggtcccatcattcattgttagagggtgatagaaaaggatttattcaaggattaacagcgacagttgttcttggtttcttttttacattgctacaagcatacgaatatcaccacgctacttttgattattcaggtcacatttatggagcagttttttacatggctacaggtttccacggatttcacgtaatagttggaacaatatttttagctgtttgtttatggcgaggaaaattaggtcactttactaaagaccatcattttggatttgaagcagcagcttggtactggcattttgttgatgtagtttggttattcttatttgctgcaatttatatttggggaagttaat

SEQ ID NO: 225618 - DNA, 1633 bp, Unknown
  Bacterial polypeptide expressing nucleotide sequence isolated from the Sargasso Sea
atgtatacacagactgcatcacacgacgatcacactccaactggttggaagcgttgggcttattcaaccaatcacaaagatattggaacaatgtatttaatttttgcaattattgcaggtgtaatcgggacagctttttcagttttaatgagaatggagttgatgcatccgggagatggtatcttaggtggtaattatcatttatataatgttttagtaactggtcatggattgatcatgattttctttatggttatgccagcaatgatcggcggttttggtaattggtttgttccaattatgattggagccccagatatggcgtttccaagaatgaataatatttcattttggttactacccacatcatttattttgttaattatgtctatcttcatggaagggcctccaggtcaaacaggagtcggaggtggatggactatttatcctcctttatcatcttcagctggacaacctggtcctgcaatggattttgctattttaagtttacacttagcaggtgcttcatcaattttaggagcggtaaactttattacaacgattttaaatatgcgaactccaggcatgactttacataaaatgcctttatttgcttggtcaattctagttacagcgtttttattattgttatctttaccagttttagcaggagcaattacaatgcttttaactgatagaaattttggaacagctttttttgatgctcaaactggaggagacccagttttattccaacatttattttggttttttggacaccctgaagtttatattttaattttacctggctttggaatgatcagtcatattgtttcaacattttctaaaaaacctgtatttgggtatttgggaatggcttatgctatggttgcaatcggaattgtaggttttgttgtatgggctcatcatatgtatacagttggtttaagcacagatacaaaagcatattttttagccgccacaatgattattgcagttccaactgggattaaaatattttcgtggatagcaacgatgtggggaggctctatatcatttaaaactccaatggtttgggcattaggttttatatttttatttacagtaggtggagttacaggcgttgtgctagctaacgcaggtgtagatacggcaatgcatgacacttattatgttgttgcgcactttcactatgttttatctttaggagcagtttttgcaatctttgcagggttttattattggtttggaaagatgtcaggatatgaatattcagagtggatgggacaactacatttttggttaacttttattggtgttaatttagtatttttccctcagcattttttaggccttgctggtatgccaagaagatatgctgattatccagatgcttttgcaggatggaattacatttcatcaataggatcatatatttcagttttaggtttagttgtatttttcgcaaacctaatttacgcattttcaaagaaaaaagcagcagcccaaaacccttggggtgagggagccacaactttagaatggactgtgccatcaccaccaaatttccatacctttgaggagttaccgaaatttgaagacgatgaaagtattgaaaaatctacgagttaag

SEQ ID NO: 225619 - DNA, 378 bp, Unknown
  Bacterial polypeptide expressing nucleotide sequence isolated from the Sargasso Sea
ttagtggtttgacagtcacatgggctcaccacggtctcaaagagggcaaaagaaatcagcttatcctaggattaatcgcgactgttcttttaggttttatatttgtaggttttcaagcctatgaatattctcatgcttataatgatcttaatttaaaaatgtcatcagggatttatggctcgacattttatatgttaaccggatttcatggtttccatgtcacactcggtgcaataatgttgactgttattttattcagatgtattcgaggacattttagtaatgagaaacattttggatttgaagccgttgcctggtattggcattttgtcgatgttgtttggcttggtttatttgtgtttgtctactggctttgat

SEQ ID NO: 225620 - DNA, 736 bp, Unknown
  Bacterial polypeptide expressing nucleotide sequence isolated from the Sargasso Sea
atgagtacaaatatcgatcacatcaaagaggaacatcatcatcagccatctggtttgatgaggtggattacgaccacaaatcataaagacataggatccctatatctatggttcagtttacttatgttttttattggtggatttatggcgctaattattcgtgcagaattatttcaaccgggtcttcagcttgtagttcctggctttttcaatcaaatgaccacaatgcacgctcttattatgattttcggtgcacttatgcctgcttttgtagggctagctaattggcaacttccgatgatgattggcgcccctgatatggcacttccaagactcaataactggagtttttggatattacctttcgcttttacaatgctactgagcaccttattttttgagagtggtggaccagcagcgggttggacattatatcccccattgtcattacagggcggaaattctatgccatttgtaatattttcgcttcatttattaggagcctcatcaattctcggtgctataaatgtcatagctacaattcttaatatgagagcgcctggcatgactctaatgaagatgccaatctttgtatggacatggcttataaccgcatttctacttattgccgctatgcccgtactagctggtgccattaccatgttattgacggacagattttatggaactagtttcttcacagctgccggtggtggagaccctggtttattccagc

SEQ ID NO: 225621 - DNA, 1597 bp, Unknown
  Bacterial polypeptide expressing nucleotide sequence isolated from the Sargasso Sea
aatgagttacgcagattcagcaagtcacgaccatcatgatcataaaccaggttttataaaaagatggtttttctctaccaaccataaagatattggaactctctatataatattcgccatactagctggtttagttggaggtttcttttcattattaatgagagctgaattagctgccccaggcttagatgttgttgctgatggtcaagtttggaatgtaattatcactgctcatggtttgttaatggtattttttgttgtaatgcctgcattaatagggggctttggaaactggtttgtcccattaatgattggtgcgcctgatatggcttttccaagaatgaataattttagtttttggatacttgttcctgctctagttttattagttgtttcagcaacaataggaactggtgctggtacggggtggacaatttatcctccactctcaaataaactcggacacgcaggaccttctgttgatatggctatttttgctcttcatttagcaggcgcctcctcaattttgggtgcagttaattttataacaacaatacttaatatgagaacgcctggaatgactcttcataagatgcctctttttgtatgggctatgttaattactgcattcttacttttattagctgttcctgttttagctggagcaattacaatgcttctaaccgatagaaattttggtacaacattcttcaaccctgcaggcggtggagatccagttcttttccaacacttattttggttctttggtcatccagaagtttacatcatgatattaccagcttttggaattgtaagtcaggtcatctctacattctcaagaaagccagtattcggatatctaggaatggtgtatgctatgatatcaattggatttataggttttattgtttgggcacaccatatgtttacagttggtatgagtgcagatttaagagcatattttatgttagctacaattattattgcagttccaaccggtattaaaatatttagttggattgcaactatgtggggtggatcacttacatttgaaactccaatgttatttgcaattggatttgttttcttatttacacttggaggagtaacaggagtcattctggccaatgcaggaatagacactgtaatgcatgatacgtattatgttgttgcacacttccattatgttctgagcatgggagctatgtttggaatttttgcaggtatttactattggtttggtaaaatgtctggaagaaaatacaatgaatttttaggtaaactacatttctggttattttttattggtgtaaatgtaacatttttccctcaacatttcttaggacttgctggtatgcctagaagaattccagattatccagacgcttatgcagggtggaatctagtatcaacttatggttcttacatttcttttgctgctaccttgatatttctttttgcaattgtgtatgctttattttttggaaagaaagaagtcgcaaacccatggggagagggagctgatactcttgagtggacactttcttcacctccaccattccatcagtttgagactttacctaaattcaaaggataa

SEQ ID NO: 225622 - DNA, 1090 bp, Unknown
  Bacterial polypeptide expressing nucleotide sequence isolated from the Sargasso Sea
ttggctggagcttcatcttttttaggtgcctcaaattttataactactatttttaatatgcgagctccagggatgacgttacataaaatgccgctttttgtttggtccatgttagtaaccgcatttttgttactattgtcattacctgttttggcaggtgcgataacaatgttattaactgaccgtaactttggaactgctttctttgtgcctgaaggtggtggtgatccaattttatttttacatctattttggttttttggtcatccagaagtttatattatgatattgcctgcatttggaattgttagtcagattatttcaactttcagcaaaaaaccagtttttggttatttgggaatggcatatgcaatggttgcgattggtgttgtaggtttcgttgtatgggctcatcatatgtatactgttggtatggatgtagatacaagagcttatttcacagctgctacaatggtgattgctgttcctacaggtataaaaatatttagttggatagcgactatgtggggaggttctattgaatttaaaaccccattgctctgggctttaggatttatattcctttttactgttggaggtgtaacaggtgttgttttatcaaatgctggactggatgtggtgttgcataatacttactatgttgtagctcattttcattatgttttatctttaggcgctgtatttggattatttgctggtttctattattggttttctaagatgactggctgtgactataatgaaaaacttgggcaacttcatttctgggtaacatttgttggtgttaacttaacatttttccctatgcactttcttggattagctggaatgccgaggagatatgttgattatccagatgcttttgcaggttggaatatggtggcgtcaataggttcacttataagtgttgttggtgttgtaattttcttcgtggtaattattgaagcttttaattcacggcgaaaggcggcaaatagcccatggggtgttggtggaaccacaattgaatggacaacaacttcacctccaccgtttcatacttttgatgaattacctaaagtaaaataat

SEQ ID NO: 225623 - DNA, 727 bp, Unknown
  Bacterial polypeptide expressing nucleotide sequence isolated from the Sargasso Sea
atgtcagcagaaaaaaaacacgattaccacttagttgatccaagcccttggccaatctatacatcctttgcatgcttggtattagctataggtgcaattttttatatgcataacggtatttcatggggaatgtatcttggtttagctttattaatttatggtgcatatatgtggtttagagatgtagtaatcgaagctgaacatcaaggtcatcatactccagttgttcaaattcatcatagatatggaatgactttatttattgcttcagaggtaatgttctttgttgcatggttctgggcttattttgatataagtttgtttccaaatgaatttgttggaaatgtatggccaccaaaagacattgaaacatttgatccttgggatatccctttaataaatactttagttttattattatcaggaacaactgttacttgggctcatcacgctttattagaagatgatagaaaaggatttatacaaggtttaacactaactgttattcttggcttcttttttacattattgcaagcatatgaataccatcatgcaacttttacctactcgggccatatttatggagcagttttttacatggcaacaggttttcatggttttcacgtcataattggaacgatatttttggcagtatgtttgtggagaggaagacttggtcatttcacaaaggatcatcattttggatttgaagcagctgcttggtact

SEQ ID NO: 225624 - DNA, 1840 bp, Unknown
  Bacterial polypeptide expressing nucleotide sequence isolated from the Sargasso Sea
atgtcggatgaactagaaaacaaatcaggttatcaagctcaatcttcagaaacagtgaatgagtattcaggatctgcagttggtgatgttgattatgtaagacctgctgaagtttctgaccaggatttatatcacggtcatagtttcataactaaatgggtattttgtcaggatgccaaagtaatcggagtgcagtattttttaactgcagtatttacaggaatagtagggttgatcttatcttggttaatgagattacaattaggatttcctggattggcaggattcatgacagcagaacattattaccaatttgttacaatgcacgggatgataatggtagtttactttttaacagctttatttctaggtggctttggtaattacttaattccattaatggttggtgctagagatatggttttcccatatgtaaacatgataagtttttggatgttctttgttgcagttgcagttttaatggcaagtttttttgttccaggagggcccacaggatctggatggacactttatccaccacaggcaatattagaaggaaccccaggatctggagcgggaatacttttaatgcttatttcgctatcactttttgtaattggatttactatgggtggattaaattatttaattacagttcttcaagcaagaacaagaggaatgactttaatgagaatgccactgactgtttggggtatttttacagcaactgtattagctatgctcgcattcccagctcttctagtaagttcaataatgatgactttagataaagtacttgaaacaagtttctttatgccaacaatcataaaagccggagaagttttaggatatggtggtggaagtccaattctttttcagcacttattttggttctttggtcatcccgaagtttacattgtagcattaccagcatttggaatagtatctgatttaatttcagtgcattctagaaaaaatatatttggttacagaatgatggtttgggcaatagtaggaattggagctttaagtttctttgtttgggctcaccacatgtatgtaagtggaatgaacccatggtttggattcttttttgcaacaacgactctaattattgcagttcctacagcaatgaaagtttacaattggatattaactttgtggagaggaaatattagaattaatactgtaatgctatggtgtttaggatttatagtaacgttcgttaacggaggtattacaggtatatttttaggaaatgtttctgttgatgtacctttatcagatacttacttcgtagttgctcactttcatatggttatgggaattgctccactcatggttataatgggtgctgtatatcattggtttccattagttgctggaagaatattagatgaaggacttggaaaatggcatttctggataactttcttaggagcttattcaatttatttcccaatgcattatttaggatttataggggtacctagaagatattttgaaatgtatgatagcccatacatgacatcaggtgttggattgaatgaatttataagtttagcagcatttattgtaggagctgcgcagttcatattaatatataatattattaaaacattaaaaaccggtaaacttgcgggtaaaaacccatggcaagctaattctttagaatggcaaacttcaacagttccaccagaacatggtaattttggagaaaaacttcctgttgttcatagatggccttatgactttagtgttcctggggcaaaagatgattttataccacaaactgtaccaccaagcgaagttattgacactgaggtagagaaaacttaaa

SEQ ID NO: 225625 - DNA, 1327 bp, Unknown
  Bacterial polypeptide expressing nucleotide sequence isolated from the Sargasso Sea
tatgagctcagtagttaatgaacaccatgacgatcatccatcagggataatgagatggataactacaacaaaccataaagacataggaactctatatctttggttttcactgataatgttttttattggtggtttaatggctttggttataaggtcagaattatttcaacctggtttacaatttgtagatcctcaattttttaattcaatgacaacaatgcatgccttggtcatgatatttggtgtcgttatgcccgcttttacaggacttgcaaattggttaataccaatcatggtcggaggtcctgatatggctcttccaagaatgaataacatgagtttttggatattaccttttgcattttcaatgttgctctcaactttgtttatggatggtggtgctccagcaggcggctggactctttatcctccattaagtctgcaaaccggtaacgcatttccatttcttatttttgccattcactttatgggtttatcatcaataatgggcgcaattaacgttgttgcaacaatattaaacatgagagctcctggaatgacattaatgaaaatgcctttatttgtttggacttggttaataacggcttttctattaatcgcagtcatgcctgtacttgctggtggcgtaacaatgttattgactgataaatactttggaacaagcttctttaatgctgccggaggtggcgaccccgttatgttccaacatattttttggttctttgggcaccctgaagtatatattttaattcttccatcatttggtgtagtttcatcgatcatcccaaccttttcaagaaagcctttatttggttatagctctatggtttatgctacagcatctatagcatttttatctttcattgtttgggcacatcatatgtttacagtcggcatgcctttgggtggagaattattttttatgtttgcaacgatgcttatagctgtgcctacaggtgttaaagtttttaactgggtaagtacaatgtggaagggagcaatgacttttgaaacccctatgctttttgccataggttttattgtgatgtttacaattggaggtttctcaggacttatgttggccattaccccagctgatttccaataccatgatacttatttcgtagttgctcattttcactacgtattagttcctggatctatatttgcaattatggcagccgtatattattggcttcctaaatggacaggacattattattcagagtttttaggtaagactcatttttggctttctacgatttttgtaaatttaactttcttccctatgcattttgttggtctt

SEQ ID NO: 225626 - DNA, 916 bp, Unknown
  Bacterial polypeptide expressing nucleotide sequence isolated from the Sargasso Sea
catgagtggcggaagttattacgtaccagatcaaagcagattcccaatatttatggcattttctttgttcgtccttgttatgggcgcttcaagtactataaataatttagataatcctgagagcaactctatttatatattatattcaggttttgcttgcttattcttaacgatgtttttttggtttagacaggtcatcaaagaacatcttgcagggttagattctaatcaattaaaacaatcatatgtatacggcatggcatggtttatattttctgaagttatgttttttgcagcattttttggggcattgttttatgtaagaacttttgcagttccatggcttgctggagatggcgcaaaaggagacgcaataacagcaattgagttatggcaaggttttgaatcaacttggccagttataacaactcctgatcagggatctgaatatgtgattgccgaaaaaagcatggcatggcctggctgggattacgctttaaaatggcttcctttgtggaatactattgtgttacttagctcgagcgtaaccgtgcacatagcacatcttgctttgaaaaatggcaacagaaagaaatttaacataatgcttggagttaccgttggacttgcacttatttttgtaggtctccaggcagcagagtattatgaagcttatgcacattacggactaactttgaattctggtatttatggatcgacattttttatgcttacaggtttccacggctttcatgtgatgatgggaggctttatgttagcagtaatgctggcacgttctgtttttgctggtcattttgaagaacatgaccactttggtttcgaagctgcatcctggtactggcattttgtagatgtggtatgggtaatgttatttttgtttgtatacattctttaa

SEQ ID NO: 225627 - DNA, 370 bp, Unknown
  Bacterial polypeptide expressing nucleotide sequence isolated from the Sargasso Sea
atcagggaccactgtaacatgggcacatcatgctcttctggaagacgacagaaaaggttttattcaaggtttatcatggactgtcttcctgggggtatgttttaccgcactacaagcttacgaatatgatcacgcaacatttgaattttctaatcacatttatggtgctactttttatatggcaaccgggtttcatggttttcatgtaatcataggaacaattttcttggcagtttgcttatggagaggaaaactgggacattttaataaagatcatcactttggatttgaggctgcagcgtggtactggcactttgtagacgtagtatggttgtttttatttgcagctatatatgtttggggtagttaa

SEQ ID NO: 225628 - DNA, 1142 bp, Unknown
  Bacterial polypeptide expressing nucleotide sequence isolated from the Sargasso Sea
tttatataatgttctagttacaagtcatggtttactaatgattttctttatggttatgccagctatgattggtggttttggaaactggattgtgccgcttatgattggcgctccagatatggctttcccacgaatgaataatatctctttttggttattgccagcatcactaatactacttatcgcatcattatttgttgagggaacatcgggcggtgcaggcgttggaggtggatggaccatatatccaccattgtctgctaacttaggttcgcctggccctgcagtggatttagcaatcttctcattacaccttgctggagcatcatcaattcttggcgcaattaactttataacaacaatttttaatatgagggctcctggcatgacccttcataagatgcctttatttgtgtggtcaattcttgtgacagctgtccttttactactttcattaccagtattggctggtgcaatcacaatgcttcttacagatagaaattttgggacaactttctttagtgccgctgaaggtggggacccagtactttttcaacacctattttggttctttggtcaccctgaggtttatatcttaattttaccaggttttggaattgtgagtcacgttgtagcaacattttctaagaagccagtctttggctatctaggaatggcttatgcaatggtatctattggtttcctaggtttcatcgtatgggctcaccacatgtacactgttggcatggacgcagatgtaaaagcttattatgtgtttgccacgatggtaattgctgtgcctaccggaattaaagtcttctcatggattgctacaatgtggggtggttcagtagatcttaaaacaccaatgttatgggcaataggctttattttcctattcactgtaggtggtgtgacaggtgttgttcttgcaaatgcaggaattgatcattcgctgcacgacacttattatgttgttgcacattttcattacgttctttctatgggagctgtttttgcaatatttgctggtttctattattggttcggtaaaatgtttggcagaaactactcagagtttttgggcaagctacatttttggttaacttttattggagtgaatataatttcttcccacaaca

SEQ ID NO: 225629 - DNA, 802 bp, Unknown
  Bacterial polypeptide expressing nucleotide sequence isolated from the Sargasso Sea
tatgagttcagaaaatacaaaaagaacacatgaataccatttagttgatccaagtccttggccccttcttgcatcgattggagctttaatcgcatgcgttggtgcggttgtttattttaggaccgatgacatgtggacaatgataattggtttagcaattgttatctatgtctcatacatgtggtttagagatgtgattatagagggcgaacatcaaggtcatcacaccccagttgttcaaattggccttagatacggcatgactttatttattgcatcagaagttatgttctttgttgcttggttttgggcatatttcaacgcaagtttattccctacagaacaaataggagctatttggcctccaccagatattcatctaatggatccatggcatatacctctaatcaacacgttaatcttgcttttatcaggaacaacagttacctgggctcatcatgcattgctagaaggcaatagaaaagagctaatacagggactatggtgcacggtaggacttggtgtcgtattcactggttttcaggtttatgaatacatgcatgctgatttttcattttctgggcacatctatggagcaactttttatatggcgactggctttcatggctttcatgttctaattggaacaatattcttaattgtttgccttggtagatcgattgctggccattttaaatctgaccatcattttgggtttgaggctgctgcttggtattggcattttgttgatgttgtttggttatttttatttgcagcaatttatgtttggggctcatattaa

SEQ ID NO: 225630 - DNA, 622 bp, Unknown
  Bacterial polypeptide expressing nucleotide sequence isolated from the Sargasso Sea
tatgaaccaacaaaaacacccttttcatttagtcgaccctagcccatggccatttcttgcgtcatttgcagctcttttaacaacatttggaggagttatgtatatgcatggttatattggtggggacggactagcactcactggatttttgatgatcctttatacaatgtttgtttggtggagagatattatccgcgaatcaacgtatcaaggccatcatactacaacagtccaagctggacttaaatctgggatggttttatttatcgtgtcggaaatcatgtttttccttgcatttttttgggcattttttcattcaagtttagcaccaactattgaaattggagctgtttggccacccaaaggaatcgatgtgttaaacccgtgggaaatcccgtttttaaacaccgttattcttttaacttctggcgcaacagttacatgggcacaccatgcaattttagctgggcaaaaaacacaaggcatggtaagtttggctgcaacaattatccttgcagcaatttttacagggtttcaagtaattgaatatattgaagcaccgtttactattacagacgggatttatgggtcaacattttttatggctactggattccatggg

SEQ ID NO: 225631 - DNA, 508 bp, Unknown
  Bacterial polypeptide expressing nucleotide sequence isolated from the Sargasso Sea
taccccaagttttattttaatggtcatcgcaatcccatcttttgctttattatattcaatggatgaaattgtggacccttcattaactttaaaagttattggtcaccaatggtactggacttatgaatactctgattacagtgtcaatgaagaggggtcaattgtttttgacagttacatgattcctgaagatgatttagaattgggccaactccgtttattggaagttgataatcgtgttgtcctacctgtgaatacacatatccgtattattattactgcagcagatgttctgcatagttgggcagtgcccgctttaggcattaagtgtgatgcagtacctggtcgattaaatcaaacttccttatttttaaaacgggaaggagttttttatggccaatgtagtgaaatctgtggtgcgaatcatggatttatgccaattgtggttgagggagttcaattaaatgattatttaaattgggtttcaaacaagttagaagacatgtaa

SEQ ID NO: 225632 - DNA, 1615 bp, Unknown
  Bacterial polypeptide expressing nucleotide sequence isolated from the Sargasso Sea
atgtctagcatcggacacgatgtaaccgcgggccacgagcacgtgcacggcgaccatgcccacgaaacgccgcatggctggcgtcggtggctgttcgcaaccaatcacaaggacatcggtacgctgtacctgatcttctcgttcaccatgttcctctccgggggcgtgatggcgctgatgatccgtgccgaactgttcgagccgggtctgcagatcatgcgccccgagttcttcaaccagttgaccaccatgcacggcctgatcatggtgttcggcgcgatcatgccggccttcgtcggcttcgcgaactggatggtgccgctgcagatcggcgcatcggacatggctttcgcgcggatgaacaacttcagcttctggcttctgccggtggctgcggtgttgctggtcggttcgttcttcgccccgggcggcgcgaccgccgcgggctggacgctgtacgcgccgttgtcgacgcagatgggcccgggcatggacttcgcgattttcgcggtccacttgatgggtgcctcgtcgatcatgggcgggatcaacatcgtcgtgacgatcctgaacatgcgcgcgcctggcctcacgctgatgaagatgccgatgttcgtctggacatggctgatcaccgcgtacctgctgattgccgtgatgccggttctggcgggcgcgatcaccatggtgctgttcgatcgccacttcggcacgtcgttcttcaacgcggcaggcggcggcgacccggtgatgtaccagcatattttctggttcttcgggcaccccgaggtgtacatcatgatcttgccggcgttcgggatcgtgtcgcaggtgatcccggcgttctcgcgcaagccgctgttcgggtatagctcgatggtgtacgcaacctcgtcgatcgcgattctgtcgttcatggtctgggcgcaccacatgttcgcgaccggcatgccggtgacgggtcagctgttcttcatgtacgcgacgatgctgatcgccgtgccgacgggcgtgaaggtgttcaactgggtcgcgacgatgtggcgcggttcgctgtccttcgaaacgccgatgctgttcgcggtgggcttcctgatcgtgttcacgttcggcggcctgtcgggactgatgctcgcaatggcgccgctggatatccagtaccacgggacttatttcgtggtggcccacttccactatgtgctcgttgcgggttcgctcttcgcgctgttctcagggtggtactactgggcgccgaagtggaccggctggatgtacaacgaaacgcgcggcaagatccacttctgggcgtcgatgttcttcttcaacctcgcgttcctgccgatgcacttcgttggcctcgcaggtatgccgcgtcgttatgccgactacccggcacagttcacggactggaaccaggtgatctcgatcggtgctttcggcttcggtttggcacaggtctacttcctgttcgcggttgcattgccggcctatcgtggcggcggtgaactcgaaaaggctggcgacaagccgtgggatggcgcaacgggcctcgaatggaccgtgccgagcccggctccgttccacacgttcgaacacccgccgaccgtcgagtaat

SEQ ID NO: 225633 - DNA, 1576 bp, Unknown
  Bacterial polypeptide expressing nucleotide sequence isolated from the Sargasso Sea
tatgagtacaaatgtagaaaatttacatgaccacgaacatacaccctcagggataatgagatggattacaactaccaatcacaaagacataggaactttatatctatggtttagtttacttatgttttttgttgggggttttatggctttgattatcagagctgaactcttcgagcctggtttacagttggtagttccaggattttttaatcagatgactaccatgcatgcgttaataatgattttcggtgcagttatgcctgcttttgtagggctagcaaactggcaaatccctcttatgatcggtgctcctgatatggcgttgccaagattaaataattggagtttttggatacttccttttgcttttactcttttaattagtactttatttttaagtagcggtggacctgctgctggatggacattatatcctcctttatcacttcagggtggtaattcgatgccgtttgttgtttttgctattcatttgttaggaatctcgtcaattcttggcgcaataaatgtaattgctactattttgaatatgagagcaccaggaatgacgttaatgaagatgcctatgtttgtatggacgtggctaattacggcttttctgcttatcgcagctatgccagtcttagcaggagcaataaccatgctattaaccgatagattctttgggactagtttcttcaccgcctctggtggaggcgacccagtgatgtttcaacacatcttctggttttttggacatcccgaagtctatatccttattcttcctgcttttggaatagtctctacaataattccagcattttcaagaaagaaactgtttggttatgattcaatggtatatgcaaccgcatctatcgctttactgtcgttcattgtttgggctcatcacatgtttactgttggaatgccactagcgggtgagatatttttcatgctaactacaatgttgatagccgtaccgaccggagttaaagtttttaattgggtagcaacaatgtggaaaggttcgatgacttttgaaactcctatgttgttttcattagcatttatcattttattcacaataggtggtttctctggacttatgttagctatgacgccagcagactttcagtatcatgatacctattttgttgttgcacactttcattacgtattagtaccaggcgcggtctttgcaataatagctgctgtgtattattggctaccaaagtggacaggaaaaatgtacagcgaatctctaggcaagcttcatttttggttaactactatttttgtcaacctaactttctttccaatgcattttgttggattagctggaatgccaagacgtattcctgattatcccgtccagtttgctgattttaatgcaatagcatctgttggcgcgtttggatttggcttgtctcagttacttttcgtctatatcttatataacacgttaaaaaaagatgtaacggttgatgataaagcatgggatggagctgagggactagaatggaccatatcttctccaccgccatatcattcgtttgagaaagcacctaaggtagattaa

SEQ ID NO: 225634 - DNA, 1282 bp, Unknown
  Bacterial polypeptide expressing nucleotide sequence isolated from the Sargasso Sea
cacggtctaattatgattttctttatggtcatgccagcgatgatcggtggatttggtaactggtttgttccgatcatgatcggtgcaccagatatggcctttccaagaatgaataatatttctttttggctattaccagtcgctctaattttattactagtttcaatttttgttgatggccctccaggtgcaaagggggtaggaggaggttggacaatttatccaccgttatcatcaaaaaccggtcaaccaggtccagcaatggacttagcaattttaagtttacacgtggctggcgcttcttcaatcttaggagcaattaactttattacaacaattttaaatatgagaactccaggtatgactttacacaaaatgccattgttctcatggtcaattctggtgacagcatttttgcttttattatctctaccagttttagcaggagctataacaatgcttttaacagatagaaatttcggaaccgctttctttgaagcacaaacaggcggagatccagttctattccaacatttgttttggttttttggtcatccagaggtgtacattttaattttgcctggttttggaatgataagccatattgtttcaactttttcaagaaagccagtgtttggttatctcggaatggcctatgcgatggtggctattggagttgttggtttcgttgtttgggctcaccacatgtacacggttggattagatacagatacaaaagcttattttttagcagcaacaatgattatcgcagtcccaactggaattaagattttttcttggatagcaacaatgtggggtggttctataagctttcaaactccaatgttatgggcaataggttttatatttctttttactttaggaggtgtaactggggttgtcttagcgaacgcaggtgtagataccgcgcttcatgacacttattatgttgtagcacatttccattacgtattatcaatgggtgctgtgtatgcaatttttgcaggattttactattggtttagcaaaatgacaggttatgaatattcggaatttttgggaaaactacatttttggttgacgttcataggagtaaacttaatatttttcccacaacatttcttaggattagcaggtatgccaagaagatatgccgattatccagatgcatttgctggttggaattatatttcttcaattggttcgtatatatccattatcggcttagcagtatttttattaaatcgttttgtatgctttcatgaaaaagaaaaaagctgaa

SEQ ID NO: 225635 - DNA, 1267 bp, Unknown
  Bacterial polypeptide expressing nucleotide sequence isolated from the Sargasso Sea
gatgaccgaaacattagtcgaagtccaaaaacaagaagtccacgggcacgaccacgaccaccacgatcaggggttcgtctcgaagtatatcttttcgaccgaccacaagatcatcgcgatgcagtacttgttcacgggcatgttgatgggcgtgatcggtggctacatggcgtatgtcttccgcatgcaactggcgttcccgggtatttcagttcctggctttggacaggtctcgccgggtgagtacaactcactgattacgaatcacggctcaatcatgatcttctgggttgcgatgccagtattgattgccgcctttgggaactacttgatcccgctcatgatcggtgcggatgacatggtgttcccccgcatcaatcgcctttcgttccaggtgttctttatcagttcggtggtcctgttgctctcattgttcgtcgagggtggtggcttcggtggtgcctggacgtcgtatcctccgctctcggcgagcggggattacaacttgacccagctgggtgcatccctctggcttaccgccgttgcgctggagtttgtggctttcctactgggcggtattaatttcatcactacgctgatgaattctcgagccccgggtatgaaggcgtatgatatcccgatggtttgctggatgattgtgattgcgagcatcctctttatgctctccgtcggccctcttctagctggtgcggtaatgctgctgtttgatcagaccctgaatacggggttttatgatcctgcgcgtggcggtgacccgatcctgtggcagcacctcttctggttcttcggacacccagaggtttacgtggttcttctgccagcgatcggaatcacggtagatgtcatggccactttctctaggaagaagctttttggatataagctggtcttgtacacggcagtagccacgggggtgttgagcttttttgtgtgggcgcaccatcagttcatagcgggtatcgacccgcggatggcgaacgtgtttacggtcactacgctgctgatttctgtgccgattgctgaaatgctattcgtgatgattgccacgctctatgggggatcgataacgctcactacgcccatgctatgggccttagcgtttttggctgagttcctgattgggggtgtgacgggaatcttccttggagcgagcggggcggacatctatttccacgacacatatttcgtcctagcgcacttccactacaccttcttccctatcgccatcataggcacgttctgcgcc

SEQ ID NO: 225636 - DNA, 358 bp, Unknown
  Bacterial polypeptide expressing nucleotide sequence isolated from the Sargasso Sea
tatgacaacaatcgcttcacaagatcattcacatcaccatccaacgggatggaaacgttgggcttattccacaaatcataaagatataggtacaatgtatttaatctttgcgattattgctggaataatcggaactgctttttcagttttaatgagaatggagttgatgcatccaggcgatggaatactaggtggcaactatcacttatataatgttttagttactggtcacggtttgataatgattttctttatggtcatgccggcgatgattggcggttttggaaattggtttgtaccaattatgataggggctcctgacatggcttttccaagaatgaataatatatctttttgg

SEQ ID NO: 225637 - DNA, 889 bp, Unknown
  Bacterial polypeptide expressing nucleotide sequence isolated from the Sargasso Sea
atgtctgattcacatggtgcatattatatcccagagccaagtcgttggccgattgttggaactttggctttgtttacgatatttgttggcggcggcatgatgttaaatggatatgtcggtagcggacaatatgtattgggccttggttttttagcgctcatctatttattttatggctggtttaaggatgtgatagatgaaagtttagcaggcaactataacgaacaagttgatattagttttcgttgggggatggcttggttcattttttccgaggtaatgtttttcgcagctttcttcggtgccctattttatataagagttttatcggtgccttggctgggcggagacagcgttactaatacttttgcatggcctgattttcaggccgcatggccattactcacaacaccagatatgagtgttgcaggattagagactaaatacatggcaatcaaagatgtgattccagcatggggcgtaccagcggcaaataccgctattctcttaacaagtggtgcgaccgttacatttgcacattgggcgcttaaaaaaggtagtcgctctggtttatgctggtggttggctgcaacggtggcattgggctttttctttgtttatttacaggccttagaatatggtcatgcttatcatgaattagatttaacacttgagtctggcgtgtatggctccaccttttttatgctgactgggtttcatggttttcatgtcaccatgggcgctacgatgttattaattattttatatcgatcaatgaagggacatttctcagcacacaatcattttgcgtttgaaggtgtcgcatggtactggcattttgtagatgtagtttggctaggattatttgtatttgtttattggatataat

SEQ ID NO: 225638 - DNA, 1051 bp, Unknown
  Bacterial polypeptide expressing nucleotide sequence isolated from the Sargasso Sea
tatgagctcagttattgaaagccaccatgatgatcatcatcacggccctgcaaaaggcttgatgagatggcttcttacaactaaccataaagatataggtacattatatctatggtttagttttgcaatgttcttaattggcggagcaatggcaatggttattagggccgagcttttccagcccgggatgcagatagtagaaccagaattctataaccagatgctcacacttcatggacttattatggtttttggagctgtaatgccagcctttgttggattggccaactggcttgtacccatgatggtcggggctccagatatggctctcccacgattaaataatttaagtttttggctacttccatttgcgtttggtattttactctcttcattatttatggaaggtggagcaccaaattttggatggacgttctatgcacctctctctacaacttatgcacctccgagtgtaaccttttttattttctcggttcatattatgggtgcgtcatcaattatgggatctattaacgtaatcgtaaccataatgaatatgagagctccaggaatggatttaatgaagatgccgctctttgtatggtcttggttaattactgcctatcttcttattgctgttatgccagttctagctggtgcagtgactatgatgttaatggatatccattttggcacaagcttctttaatgcagctggtggcggtgatccggtattattccaacacattttttggttcttcggccaccctgaagtttatattatgattttgccagcatttggaattgtctctcacattattgagactttctccagaaaaccgctatttggttattcatctatggtctgggcaatgttgtccattgcaattctttcttttgttgtttgggctcatcatatgtttacagttggtatgccattagcagctgagcttttcttcatgtgggcaacaatgctaatagctgttccaaccggagttaaagttttcaattgggttgcaacaatgtttaaaggatccattacatatgaaaca

SEQ ID NO: 225639 - DNA, 907 bp, Unknown
  Bacterial polypeptide expressing nucleotide sequence isolated from the Sargasso Sea
gatggaatatcaaaagtactatgttcctgagtcgagcaaatttccaatttttgctgccatttcacttttcatattaataataggcgcctcatccacaattaattctcttgataatcccgagagtaatgcaagtctaatactatataccggcttagcttgctttcttgcgacactattcttttggtttaggcaggtagtaaaagaaaataatgcaggtctagaaagtacacaactttctcagtcattcgtttatggaatggcgtggtttatattttctgaagtaatgttctttgctgctttttttggagctctattctatgtgaggacttttgcagtaccttggctgggtggcgaaggtgaaaaaggccttgcaaacatcctttggcaagactttgaagctacatggccattaattaatacccctgatggtggtaaagcatttgttattgctgcaaaaagcatgagttttccaggctgggaaaatattagtcattggttgcctatatacaatactattgtgttgcttagctcaagtgtaacagtacactttgctcatcttggcttaaaaaaagggaacaaaaaaacattcaatgcctggttagcaatcaccgttttactcgccttaattttcgttggccttcaagcgttagaatactatgaggcatatgctcattttgggcttaccctcaattcaggcatatatggatctacgttcttcatgctaacaggttttcatggcttccatgtaatgctgggcggcttaatgctcgcagttatgctcataagatctgtattttatggccactttaatgaacataagcacttcggattcgaagcagcatcctggtactggcactttgtagatgttgtttgggttatgttgttcctatttgtttatattttataa

SEQ ID NO: 225640 - DNA, 1867 bp, Unknown
  Bacterial polypeptide expressing nucleotide sequence isolated from the Sargasso Sea
aatgacaacaatttcatatccaacttttataagaaggcctaatgaatatgtatctggaatatggggatggctaactactgttgatcataaaaaaataggaaccatgtatggagtaactgcatttttatggtttatagtaggtgggattgaagcgttattaattagattgcaattagctcgacctgaagggacaatattaagtcctgaagtttataaccaagtattcacaatgcatggaactacgatgatctttcttgtggtaatgcctttaagtgctgcgttttttaactggatagttcctttacaaataggcgcaagggatgttgcatttcctaggttaaatgcttttagtttttgggctttcctatttggaggaatactattaaatctttcttggctaactggagatgccccaaatgcaggatggtttgcttatgcacctaatactgaacctcaatttaaccctagaaatggtgttacttattggatactaggtctacaaattttaggtattgcttctctagcggcaggatttaatttcctaacaaccataattaacatgagggctccaggaatgtcgttcatgaaaatgccagtgtttatatggatgactgcagtagtaaatgttctaattgtattagcctttcctataattacagtagctctaattcagcttcaatttgacaggttatacggaacacacttttttaaccctacaatgggtggtgatccagtaatgtggcaacatatgttctggttatttggtcaccctgaagtatatattttgatacttcctgctatgggaattgtatctgaagttcttcctaccttttctagaaaaccaatttatggatactcttttattgtattttcaggaattgcaattggattcttaggctggtttgtgtggagtcaccatatgtttactgttggattaggtcctgcagcaaatgcagcatttagtgtttctacaatggcaatagctattccgacgggagtaaaaatatttaactggataggcacattatggggaggatcgattaaaattaatactgcattattattttctgttgcattcataggcatgtttgttattggtggtctaagcggagtaactcacgcttctcctccttctgatgcgcagcaacaagatacatattatgtagtagcacactttcactatgttctctttggaggatctttgctggggttgtggtcaggagtatattattggtggccaaaatttactggcagatttttgaatgagaaaataggtctctggcactttgggattgtattctttgcattcaatctaacattctttcctatgcactggttaggattagatggcatgccaagaagagtagcaacttaccctgaagggatgggatgggatatatcaaatctagtttcaacaattggaagtctaatgctaggggttggggttctggttttcttatacaacgttgtatattcaaacttgagaatgcctaaaactgctagcaatgatccttgggatgggcgaaccctagaatggtcaataccttctccgccgccacattataattttgatgcaattccagacgttaaatatagagatgatttctggtacacaaaatatccagaactagcacataatacacatggaggagggtctgacttagagtcccaagaagatcatgatggtgaccatgcagatattcatatgccagatccatcttattatcctctattcttaggtttggggctagcagtaatgttgggaggttttattccttttactggtcactgggttgtatgtgctgtaggtttaataatttttatctggtcttttttgggctggagctatgagccggtgaatgggtaa

SEQ ID NO: 225641 - DNA, 525 bp, Unknown
  Bacterial polypeptide expressing nucleotide sequence isolated from the Sargasso Sea
gaggagttacaggaatcgttctttcacaggcaggtgtagatagagcatatcatgatacctactacgtggtagctcactttcattacgtgatgtcgttaggagctgtattctgcatatttgctggcatatattactggattggaaaaatgtcaggcagacagtaccctgaatgggcaggaaagttacatttttggacaatgtttatcggctccaacataacattctttcctcaacattttcttggaagacaaggtatgcctagacggtatattgactatccggaacagtttgcgttatggaactacgtatcttcaataggagcattcatatcctttggatcgtttatattcttctttggtgtgattttttatacattaatttggggtagaaagattgaagaaaatgcgtattggggagcacatgcagatactttagaatggacattgccaaacccacctccagaacacactttcgagacactaccaacacaagatatgtgggataaacagccagaaaatcattgag

SEQ ID NO: 225642 - DNA, 1627 bp, Unknown
  Bacterial polypeptide expressing nucleotide sequence isolated from the Sargasso Sea
tatgacaatatcaattgatccacaaaaaactaataatgaaagtcttcaacctaaaggctggcttagatactttagttttagccttgatcataaagtaattgggatacaatacttagtctgcggttttcttttctatttaataggcggaaccttagctagcgctataagaattgaactagctagtccgatgtctgactttatgccgagagatgtatataaccaagttttaaccctacacggaacaataatgatttttctatggatagtgcctgtagttaacggtgcttttggaaattatttaattccattttatgtaggtgcaagagatatggcattcccaagattgaatgctgttgctttttggttaattcctccttctggtttgatgctggtagcaagctattttgttgagggtgctgctcaggctggatggacggcttatcctcctttgagcataactactcctcaatcgggacaaattatttggattctgagcgttctattacttggaggcagctctatatttggtggaataaactttatcgcgaccattatcaaactaagaaggccaggattaaaacttatgcaattgccaatgtattgttgggcaatgcttggaacaagtctattagttgttttgtcaactcctgttttagcaggcactttaattctacttagcttcgatatcatcgctaatacaggttttttcaatcctgttttaggaggcaatgtcgtagtttatcagcatttattttggttttattctcatccagctgtatacattatggtgcttcctgcctttggtttagttagtgaaatacttcctgtacatgctagaaaaccactttttggatatacaacaatggttttttcaataatggggatagtagttttaggtttagttgtttgggcgcatcatatgtttacgagtggaacgccaccttggatgagattattctttactatcgccacagcatttattgctgttccgacaggtataaaatttttcaattgggttgcaacattatggggaggtaaaatttccattaatagtgcaatgttattctcttgcggatttattataaattttgtttttggaggtattacaggagttgctttggcacaggtacctttcgatattcacgtacatgatacctatttcgttgtagcccattttcattacatagtttatggagggactgtttttattattttctcttccatttatcattggtttcccaaagtaactgggaaaatgctcaatgaaaaattaggaattttacactttattattacttttattggatttaacttatgctttgcacctcaacattggcttggtttaaatggaatgccaagaagagttgcagaatatgatcctcaattccagttcgttaatcaaattagtagccttggggctcttttgatggctataagtacaattccttttttaattaacgtattccttagtgtgagaaatggaaaaaatgctggagataacccttggaatgctcttacacctgaatggttaacatcttctccacctccagttgaaaattgggaaggagaagctccattagttgaagaaccatatggttatggtaaagaaatttctgagcagaaataa

SEQ ID NO: 225643 - DNA, 907 bp, Unknown
  Bacterial polypeptide expressing nucleotide sequence isolated from the Sargasso Sea
atggaatatcaaaaatattatgttcctgagtcgagcaaattccctatttttgctgccttttctttgttcattttaataattggcgcttcatcaacaattaattctcttgataatcctgaaagcaatgcaagcttaattttatatacaggcttagcttgtttcttagcaacactatttttttggtttaggcaggttgttaaagaaaacaatgccggcctagaaagtacacaactttctcagtcttttgtttacgggatggcgtggtttatattttctgaagtaatgttctttgcagctttctttggagctttgttttacgtaagatctttcgcagttccgtggttagggggtgaaggagaaaaaggccttgctaatatgctatggcaagattttgaagctacgtggccactaataaatactcctgatggaggtaaagcttttgtcatagctgcaaaaagtatgagctttcccgggtgggaaaatattagccactggctacctctatacaatactattgtattgctaagttctagtgtgacagttcactttgcacatctgggacttaagaaaggaaacaaaaaaacattcaacatttggcttggtattacagttttacttgctctaatttttgttggccttcaagcagcagaatactatgaggcttatgaacattttggacttactctaaattcaggaatttatggatcaactttctttatgttgaccggattccacggattccatgtaatgttgggcggcctaatgctcgcagttatgtttataagatctgtattttatggccactttaatgagcacaaacattttggttttgaagccgcatcttggtattggcactttgtagatgttgtttgggttatgttgttcctatttgtttatattttataaa

SEQ ID NO: 225644 - DNA, 1585 bp, Unknown
  Bacterial polypeptide expressing nucleotide sequence isolated from the Sargasso Sea
atgagctcagttattgaaagccaccatgatgatcatcatcacggccctgcaaaaggcttgatgcgatggcttcttacaaccaaccataaggatataggtacattatatctatggtttagttttgccatgttcttaattggtggagcaatggcaatggttattagagccgagcttttccaacctgggatgcagatagtagaacctgaattctataatcagatgcttacacttcatgggcttattatggtttttggtgcagtaatgccagcctttgttggattggctaactggcttgtgcctatgatggttggagctccagatatggccctcccacgattgaataatttaagtttttggttacttccgtttgcctttggtatcttactctcttcattatttatggaagggggagcaccaaattttgggtggacattctatgcgcctctctctacgacgtatgcacctccgagtgtaactttttttattttctcagttcacattatgggagcgtcctcaatcatgggatctattaatgtaatcgtaaccataatgaatatgagagccccaggaatggatttaatgaagatgccactctttgtatggtcttggttaattaccgcttatcttcttattgctgttatgccggttctagctggtgcagtaactatgatgttaatggatattcattttggcacaagtttctttaatgcagctggtggcggtgatccggtattattccagcacattttttggttctttggtcatcctgaagtttatattatgattttgccagcttttggaattgtctctcacattattgagaccttctccagaaagcagttatttggttattcatctatggtttgggcgatgctgtctattgcaattctttcttttgttgtttgggctcatcacatgtttactgttggtatgccattagcagctgagcttttctttatgtgggcaacgatgcttatagcagtcccaaccggagttaaggtatttaactgggttgcaacaatgttcaaaggctccattacatatgagactccaatgctattcgcaatttcctttgtagttctctttacaattggtggattctcaggacttatgctttcaatagtacccgctgattttcaataccatgatacttattttgtggtggctcacttccattatgtcctagtgcctggatcaatattttcaataatggcagcagtttattattggataccaaagtggacaggtaacatgtatgacgaaagaatgggcagattgcatttctggctttcgtttgtgggagtaaatgtcacatttttccctcagcactggattggattggcaggaatgccaagaagatatccagactatgctcttcagtttgcagactggaacatggtttcaactgcaggagctttcttatttggagcttctcaaatcttattcttatttattgttctaaaaacagtaatgggtggaaagaaagctactcctcaagtttgggaaggagcaagaggtttggagtggtcagttgaatcacctgcaccctatcatacgttttcaacaccacctaaagtcaattaat

SEQ ID NO: 225645 - DNA, 907 bp, Unknown
  Bacterial polypeptide expressing nucleotide sequence isolated from the Sargasso Sea
aatggaatatcaaaaatattatgttcctgagtcgagcaaattccctatttttgctgctttttctttgttcattataataatcggcgcttcatcaacaattaattctcttgataaccctgaaagcaatgcaagcttaattctatatacaggcctagcttgttttttagcaacattatttttttggttcaggcaggttgttaaagaaaacaatgctggtctagaaagtgcacaactttctcagtcttttgtttatgggatggcgtggtttatattttctgaagtaatgttctttgcagctttctttggagccttgttttatgtaagatctttcgcagttccatggttagggggcgaaggagaaaaaggccttgccaatattctatggcaagattttgaagctacgtggccactaataaatactcctgatggaggtaaagcttttgtcatagctgcaaaaagcatgagttttccaggatgggaaaatattagtcactggctacctctctacaacactattgtattgcttagttctagcgtaacagttcactttgcacatctaggtctaaagaagggaaacaaaaaaacattcaatatttggcttggcattacagttttactcgctctaatttttgttggccttcaagcagcagaatactatgaggcttatgagcattttgggcttactcttaattcaggtatttatggatcaactttctttatgttgaccggattccatggattccatgtcatgttaggcggtcttatgctcgcagttatgtttataagatctgtattttatggccactttaatgaacacaaacacttcggattcgaagctgcatcttggtactggcactttgtagatgttgtttgggttatgttgttcctatttgtttatattttataa

SEQ ID NO: 225646 - DNA, 1306 bp, Unknown
  Bacterial polypeptide expressing nucleotide sequence isolated from the Sargasso Sea
catggcattcccacgactaaacaacatcagtttttggttgttgccaccttcactaattcttctattaagcagcgcactcgttgaagttggagtagggactggatggactgtatacccacctcttagtcacattacaagtcactcaggaggggctgtagacttagcaatttttagcttacacctttcaggggcttcaagcattcttggagcaattaattttattaccacaatttttaatatgcgtggccctggtttaagtatgcacagactcccactttttgtttggtctgttttaattacagcttttttattacttttatctcttcctgttcttgcaggagctattacaatgcttttaacggacagaaattttaatacttctttttttgatccagctggaggaggtgatccgattttatttcagcaccttttttggttttttggtcatccagaagtttatattcttattttaccaggatttggtattgttagtcatatcattagcacatttgcgagaaaaccaattttcggttatcttgggatggtttatgctatgttaagtattggtgttctaggatttattgtatgggctcaccatatgtttacagtaggtttagatgtagatactcgagcttattttactgcagctaccatgattattgctgtcccaacagggatcaaaattttcagttggatcgcaacagcttggggaggttctatttatttaagaactccaatgttatttgcagttggtttcatctttttatttactgttggtggcttaacaggggtaatgttagcaaatgcaggaattgatattgctttacacgatacctactatgtagttgcccacttccattatgtattatcaatgggagcagttttcgccctattcgcaggattttattactggattgggaaaatctctggatatcaatacccagaagtttatggtcaaattcatttttggttatttttcattggagtaaatcttacgttctttccaatgcatttcttaggacttgccggaatgccaagacgtattcctgactatccagatgcttttgcagggtggaatgccgtttgtagttatggatcttatctttcaattttggcgagtgttttcttcttttatgttgtttaccttacacttactagtgaagagaaatgccctacaaacccatggaattttgatgacaatgagaaatctgtaccaactttagaatggacagtgacctcaccaccagctttccatacttttgaagaaatcccagctattaaatcacctcagcaattaacgaaataa

SEQ ID NO: 225647 - DNA, 790 bp, Unknown
  Bacterial polypeptide expressing nucleotide sequence isolated from the Sargasso Sea
aatgtcagcagaaaaaaaacacgattaccacttagttgatccaagcccttggccaatttatacatcatttgcatgcttagtattagccatcggtacaattttttatatgcataatgatgtttcctggggaatgtatctaggtttagcgttattgatttatggtgcttatatgtggtttagagatgtagttattgaagctgagcatcaaggtcatcatactccagtcgttcaaattcatcatagatatggaatgactttgttcattgcttcagaggtaatgttctttgttgcctggttctgggcatactttgatataagtttgtttccaaatgaatttgttggaaatgtttggcctccacaagatatagaaacttttgatccatgggatattccgttaataaatacactggttttattattatcaggaactacagtaacttgggctcatcattcattattagaagacgatagaaaaggatttattcaaggattaacagcaactgttgcgttaggtttctttttcactttattgcaagcctacgaatatcatcatgctacatttaattattcgggacatatttatggtgcagtattttatatggcaacaggttttcatggtttccacgtaattgttggaacaatctttcttgctgtttgtttatggagaggaagattaggtcactttactaaagatcaccactttggttttgaggcagctgcttggtactggcattttgttgacgttgtttggttattcttgtttgcagctatttacgtctggggaagttaa

SEQ ID NO: 225648 - DNA, 1624 bp, Unknown
  Bacterial polypeptide expressing nucleotide sequence isolated from the Sargasso Sea
tatgagtgaaaatacaaagcaaaattacttaaatcatccaaagggaataatgtcttggttgatgacattagaccataagagaattggattgatgtatttatttagtggtattttatttttctttttaggtggtttaattgctctagtaatgagatttgaacttgcggctccaggtaatgatataatttcaaacgatgtatacaataatgcctatactttgcatggagcaataatgatatttctttttattattcctgcaattccaggtgctttaggtaatatcttactacctctcatggttggtgcaaaggatgttgcctttccaaggttaaacttagcaagtttttatatttattcatttggagctttattcgcaatgtatacaataattaatggtggagtcgatactggttggacattttatactccatattcaacacaaagtacatctaacgtagttccaatgacattaggtattttcataataggcttttcttctattttaactggattgaactttattgccactattcacaagatgagaatacctggtcttacttggtacaaattacctctatttgtgtgggcactttatggtacatctttagtgcaaattacagcaactcctgtattagcaataactatggttttgttgatgctagaaagatttcttggtatcggaatttttgatcctgcattaggtggggatcctgtattatatcaacattttttctggttctattctcatccagcagtatatattatgattttacctgcatttggaattattagtgaaatcattcctgttcattcaagaaagaaaatttggggttataaattcattgcctattcaactttatctattgcatttataggatttttagtctggggtcaccatatgtttacttcaggacaatctgtattttcacaaattgttttttcttttattacttattttgtaggtattccaacaggggtaaaaatatttagttggattttaacaatgtataaaggtcaagtttctttcactcctccgatgatgtatgcattatcattcttatttttgtttacgattggtggattaactggaattttcttaggtgctgttgcgctcgatattcatttgcatgatacgtattttgtagttgctcatttccattatgttatgcagggaggaaccattgttgcgtttttaggaggtttacatcattggtggcctaaatcctttggtgtcatgtataatcaaacagttgcaaacattgctgctcttggagtatttattgggtttaatggaactttctttccgcaatttttgcttggattaagaggaatgcctagaaggtatgcaacttatgatgagcaatttgttgagttgcatagttattcaactttttggtcaggaattttgggtatctcaattttcattgccgttatgaatttattttggtcatttattaagaaaaataaagtggacccaggttcaaatccatggggaggcatgaccttagagtggacacacacatcttcaccacctcatcctcataattttgaggaagatcctgtattgcagcatggtccatatgactatgataaggtgattgttgaaaaaacgtataaaaaatga

SEQ ID NO: 225649 - DNA, 1990 bp, Unknown
  Bacterial polypeptide expressing nucleotide sequence isolated from the Sargasso Sea
aatgacaaaaattatagaaccaaaaaaacaaaggaatattttttcaagaccctcctctgaagaaggtgtgtggagctggatcacaactgttgatcataaaaggattggcataatgtatggttatgctgcatttttctttttgctagtcggtgggcttgaagctcttttattaagaatccagttatcccaaccagataacaacttcttgagtgctgctgaatataatgcaatgtttacaatgcacggaacaacaatgatatttttagcaatcatgccgataagtgctgcattttttaattatcttttaccgttacaaattggagcaagagatgtggctttcccaagactaaatgcactttctttttggatatttattgcaggtggattgtttctatactcaacttttctttttggtacagccggtgctccagaaggaggttatctagctgaggaagtcagtcgattggcttcagcacctaatggtggctggtttggataccaacctaatgcagggcttaagtattcacctggtaccgcaatggactattgggcaatcggacttcagattctaggtattgcatccctcgtttcagcatttaatttcatcacaacaattcttaacatgagaactaaaggaatgagattaatgagaatgccagtatttacctggatgacatttgccgtttcattccttctcgctttttctttaccaataatcgcaattgcgttatttttcgtgacatttgatagacaatttgggacaactttctttctcactgaaggtggtggcgatccagtgttatggcaacatctattctggttatttggtcatccagaagtttatattcttatccttccagcttttgggatagtttcagaggtcctcccaactttttcaagaaaaccattatttggatatccagcaatagtgtttgctggatttggaattgcatttattgggtttggtgtttgggcacatcatatgtttgcatctgcaattagtcctgtggcacaggctggatttggcctatcaacaatgattatcgcagtacctacaggggttaaaatatttaattggcttgggacaatttggggaggaaggctaactcttaataccccaatgttatttgctttaggatttatagggatgtttgtaattggtggcttaagtggtgttacacattcagtggtgccagcagatacacaacaaacagatacatattatatagttgcacattttcactatgtactttttggtggtgctctttttggaattttttcaggactttatttctggtttccaaaagtatggggaagaatgtacaacgagacaatgggaaaaattcacttttggctaatgattattggttttaacttaacttttggaccaatgcattggttaggactacagggtcaagttagaagaacttgggtgtatgctgaagaaaccaatcttggattttggaatctaattgttacgattggtgcatttattctagccattgcaactcttgtttttatggcaaactggatatattcaagaagaaaaggtgaggttgctccttttgatccctgggacgcaagaacaattgagtggagtattccttctcctactccggtgtggaatttttcaaacgcacctgaagttaaatcgttagatgatttttggcatcaaaagtatggagaagatgaggatggtagagcagtaaggagagaaggtacggatgagttgttactacaacttgaggaagaaggactaaatccaaaagaggaaatacatcttcctagcccatcttattttccagtaattatggcttttggtcttccttttttgggatatgcaataatttacaagtcgataccactagcattgattggcgtaattatgctactgattggtggttttggttggggaaccgagcctctagaggaagagtttgaaagctcagaagaagagccagaatctggagagtctaaaaactatgagtga

SEQ ID NO: 225650 - DNA, 955 bp, Unknown
  Bacterial polypeptide expressing nucleotide sequence isolated from the Sargasso Sea
atgacaacaacaaaccacaaagatattggaacactttatctttggtttagctttttagcattcttagttggaggcgcatttgctatgggcataagagcagaactgtttgagcctggtcttcagcttatggacccaattagatataaccaattagtcacaatgcatgggctaataatgatttttggcggcgttatgccggcatttgtaggactagcgaactggttaataccaatgcaaataggcgcacctgatatggctttaccaagaatgaataacttaagtttttggttactgccaactgcttttgctattttgatgtcaacagcatttatggaaggaggaatgcctggttttggctggactttctatgcgccactctcaacaaattatccaaatgttgcattctttgtttttgctgtacacataatgggaatttcttcgatcatgggctcaattaacgtgatagtaactattatgaatatgagagctccaggcatgacgctaatgcagatgccattatttacatggtcttggctaattacagcttatttattaattgcagtaatgccagttcttgcaggtgcagtgactatgttgcttatggatgcatattttggaacttcattctttgatgccgccggtggaggagacccagttctctttcaacacatattttggttttttggacatcctgaagtttatataatgattcttccagcctttggtattacatcacacataatatcaacgttttcccgaaagccactttttggacatgcttctatgatatatgcgatgtcatcaatcgccatactttcatttgttgtttgggctcatcacatgttcactgttggaatgcctttagccgctgagctgttcttcatgtgggcgacgatgctaatagccattccaacaggtgttaaagtttttaattggtgcgccaccaatatttaaa

SEQ ID NO: 225651 - DNA, 703 bp, Unknown
  Bacterial polypeptide expressing nucleotide sequence isolated from the Sargasso Sea
atggctaataaatcaacaacagggcagaaacatccatatcacttagttgatccaagccctcttccatttttatcatcaatagctggtctagcaatggctgctggtcttgtattttatatgcattatggaacttcttggcttcttatccttggtacaattggtttgttaactattatgtttttatggtggagagacgtaattaaagagtcaacttttcaaaaggttcatacacctgttgtggaactgggactaagatatggaatggcgctttttattgcatcagaagtaatgttctttgttgcttttttctgggctttctttgatgcaagtttaacacctaaattacctatagaagaattctctgaaacttttgatagtaatggtgctgttggaatttggccaccagaaggtatcaaaacatttgatcctcttgatgttccttttttaaatacattaatattattaatgtcaggtactacttgtacatgggctcaccatgctgttagagaaggtcatagagatcaagccattcaggcattatggtgtactgttggtctcggaattttcttctcatttatgcagggtgtagaatattacgaagcagctcatcattattttagttttactgatggaatatatccgtcagtattttatatggctactggttttcatggatttcatgtaatggttggtacagccattt

SEQ ID NO: 225652 - DNA, 787 bp, Unknown
  Bacterial polypeptide expressing nucleotide sequence isolated from the Sargasso Sea
gatgagcggtggacatagtcattcttttcatcttgtagagccaagtccctggccggctttgggagccatggcgggttttgttgccgctattggtgcgattatgtatatgcacgaaaagccctttggtgcggcgataatgggggtcggttttgttgcaatactagcgaccatggcattctggtggagagatgtaattaaagaagcggaacatcaagggcaccatacaccgatagttcaaataggaatgcgctatgggatgatcttgttcatatgctcggaggtaatgttctttttagctttcttctgggctttttttgatgcatctttatatccggatacgggggtttggccaccggctgggatcgaaactttcagtgcctgggatattcctttaattaatacgatgatcttattgctgtctggttgcacagtcacatgggcacatgcggcgcttttgaagaatgatcgcgaaaatcttataaaaggactcgcttatacgatacttttaggtatagctttcaccgctttgcagatttatgaatatgatcacgcaacatttaaattcactgatggaatttactcgtcgacattttacttggcgaccggttttcatggctttcatgtttttgtgggaacctgtttcttaatagtctgctggtttagagctcgggctggccattttacaccagaacaccattttggatttgaggctgccgcttggtattggcatttcgttgatgttgtttggttatttcttttcatatgcatttattggtggggtggttga

SEQ ID NO: 225653 - DNA, 397 bp, Unknown
  Bacterial polypeptide expressing nucleotide sequence isolated from the Sargasso Sea
attaattaatacactggtactattactctcaggaacaacagttacatgggcacatcattctttattagaagatgacagaaagggttttatacagggattaactttaactgtaatcctaggtttcttttttacattattacaagcatatgaatatcatcatgctactttcacttattcaggccatatttatggagcagtgttttatatggcaactggttttcacggtttccatgtaataattggaacaatatttttagcagtatgtttatggagaggaagagtgggccattttactaaagatcatcattttggatttgaagcagctgcgtggtattggcattttgttgacgtagtatggctatttttatttgctgcaatttatatttggggaagttaa

SEQ ID NO: 225654 - DNA, 993 bp, Unknown
  Bacterial polypeptide expressing nucleotide sequence isolated from the Sargasso Sea
tatgtatacacaagcagcatcccacgacagccacactccaactggttggaaacgttgggcatactcaacaaatcataaagatataggaacaatgtatttaatttttgcaattgtcgcaggggttattggtacggcattttctgttttaatgagaatggagctaatgcatccaggtgatggaatcttaggtggtaactatcatctttataatgttttagtaactggtcatggattgataatgattttctttatggtcatgcctgccatgattggtggttttggaaattggtttgttccaattatgattggtgcaccagacatggcctttccacgaatgaataatatttctttttggttattaccagtttctctaactttattaatattatctgtttttgctgaaggccctccaggacaaactggggttggtggtggatggactatctatcctcctttatcttctaaagcaggtcaaccaggaccagcgatggatttggcaatattaagcttgcacttagctggtgcttcttcaattctaggagcggtaaactttattactacaattttaaatatgagaactcccggcatgacacttcacaagatgccgttatttgcttggtcaatcttagtgacagcttttttattattattatctctaccagttctagcaggagcgattacaatgttattaactgatagaaatttcggaactgcattttttgatgcacaaactggaggagacccagtattgtttcaacatttgttttggttctttggtcacccagaagtttatattctaattcttccaggatttggaatgattagtcatgtggtgtcaacgttttcaaaaaaaccagtttttggatacttaggcatggcatacgcaatggttgcaataggcatagtaggttttgttgtttgggctcaccatatgtatacagttggattaagtacagatacaaaagcttatttcttagccgcaactatgattat

SEQ ID NO: 225655 - DNA, 793 bp, Unknown
  Bacterial polypeptide expressing nucleotide sequence isolated from the Sargasso Sea
aatgtcatcaggagaaaaaaagcacgattaccacttagtagatcccagtccgtggccaatattcacttcatttgcttgtttggttctagcaattggagcagtttattattttcatactaaagctttgtggttgttattaatcggaacagcgttgttaatttatggatcttttatgtggttcagagacgttgttgatgaagcagaaaaacaaggtcatcacactatggtagttcagataacccatagatacggaatgacactttttattgcttcagaagtcatgttttttgttgcttggttctgggcattttttaatgcaagcttattcccaacagaagcgattggaaaaatatggcccccagcagacataaaaacttttgatccatgggacatacctctgataaacacattaatcctattactttcaggtacgacagtaacctgggcacatcatgcaatgattgagaatgatagaaaagctttagttaatggtttaattgcaactgtttttttaggttttgttttttcctgctttcaggcatatgaataccatcatgcttcattcacgatagatggaaatatttatggatcaactttttatatggccacaggtttccatggttttcacgtaattataggaacaatttttttagcagtgtgcctttacagatcaattaaaggtcactttaaaccagaccaccactttggatttgaggcggcagcttggtattggcattttgtagatgtcgtttggttatttctttttgctgcaatctatatttggggaagttag

SEQ ID NO: 225656 - DNA, 907 bp, Unknown
  Bacterial polypeptide expressing nucleotide sequence isolated from the Sargasso Sea
atggaatatcaaaaatattatgttcctgagtcgagcaaattccctatttttgctgccttttctttgttcattgtaataattggcgcttcatcaacaattaattctcttgataatcctgaaagcaatgcaagcttaattttatatacaggcctagcttgtttcttagcaacactatttttttggttcaggcaggttgttaaagaaaacaatgctggtctagaaagcgcacaactttctcagtcttttgtttatggcatggcgtggtttatattttctgaagtaatgttctttgcagctttctttggagctctgttctatgtaagatctttcgcagttccatggttaggaggcgagggagaaaaaggtcttgctaatatgctatggcaagattttgaagctacgtggccactaataaatactcctgatggaggtaaagcttttgtcatagctgcaaaaagtatgagctttcctggatgggaaaatattagccattggctgcctctttacaacactatcgtattgcttagttctagtgtcacagttcactttgctcatctagggctgaagaaaggaaacaaaaaaacattcaatatctggcttggtattacagttttactcgctctaatttttgttggtcttcaagcagcagaatactatgaggcttatgagcattttggacttactctaaattcaggaatttatggatcaaccttctttatgttgaccggattccacggattccatgtaatgttaggaggccttatgctcgcagttatgtttataagatctgtattttatggacactttaatgagcacaaacattttggtttcgaagccgcatcttggtattggcactttgtagatgttgtttgggttatgttgttcctattcgtttatattttataaa

SEQ ID NO: 225657 - DNA, 1591 bp, Unknown
  Bacterial polypeptide expressing nucleotide sequence isolated from the Sargasso Sea
atgagtacagtagtagaaacacacgatcacgacggacatcacggaccagcgaaaggattatctcgctggctttttaccaccaaccacaaagatataggaactctgtatttatggtttagctttattatgctatttattggtggcggaatggctatggttattcgagcagagctttttcagccaggcttgcaaatagttcaacctgaattctttaatcaaatgacaacaaaccatggtctaataatggtttttggggtaattatgcccgcatttgtgggtctcgctaactggatgttacctatgcaaattggagctccagatatggccctgcccagattaaataaccttagtttctggcttttacctatggcatttggaattttaatatccaccctttttatgcctgaaggcggacctaactttggatggactttctatgctccactatcaaccacttatgctccttctacagtgaacttttttatattttctgttcacattatgggtgtctcttctattctcggttcgataaacataattacgactatcttcaatatgagagctcccggtatgacgttaatgaaaatgcctttatttgtttggagctggttaattactgcctatttactaatagcagttatgcctgttttagcaggagttgtaacaatgatgttaatggacatcaactttggtactagcttctttaatgctgcaggtggtggagatccagttttatttcaacacgtcttttggttttttggtcaccctgaagtttacatcatgatccttccggcatttggaatcgtttcccatataattgaaacgttctctagaaaaccaatttttggctattcatcaatggtctatgcaatggcatcaatagccatattgtctttcgttgtctgggctcaccacatgtttacggttggaatgcctcttgcgggagagctcttctttatgtattcaactatgttgatagccataccaacaggagtaaaagtttttaactgggttgcaactatgttcaaaggttcgataacttttgaaactcccatgctgttttctattgctttcgtggctttattcacaataggaggtttttcaggcctcatgttagctatagtgcctgctgatttccaataccatgatacttattttgtagtagctcatttccactatgttcttgttccaggagcactgtttggaataattgctggagcctattattggctgccaaagtggacaggctacatgtacgatgaatttttaggaaagcttcatttctggctcacttttatatctgtaaatgttacttttttcccgatgcactttgtagggttagcgggaatgccaagaagatatcctgattatgcactgcagtttgcagactttaacgctctaatcagtgtgggtgcgtttatgtttggtttgactcaacttctcttcttgttcatagtcattaaatctataagaactggaaagaaagctaagccggaagtatgggaaggtgcaggagaacttggattagagtggactttaagttccccgcctccttatcactcatttactgttcaaccacaagttaagtaga

SEQ ID NO: 225658 - DNA, 458 bp, Unknown
  Bacterial polypeptide expressing nucleotide sequence isolated from the Sargasso Sea
aaagaaaagcatggcctggcctggatgggataatgctcttaaatggctgcctctttggaatacgattgtgctattaagttcatcttggactgttcatcttgctcatcttggtttgaaaaagggcaatagaaaaaagtttaatggttatcttggtttaacagtgtttctagctctaatttttgttggattacaagcacttgaatattatgaagcttatgcgcattacggtcttactttaaattctggtatttatggttcaacattttttatgttgactggatttcatggttttcacgttatgatgggtggttttatgttagcaatcatgctagcaagatcagtttttgctggtcactttgagcagcacgatcattttggctttgaggctgcctcatggtattggcattttgttgatgttgtttggctgatgctgtttatatttgtttatattctttaat

SEQ ID NO: 225659 - DNA, 1762 bp, Unknown
  Bacterial polypeptide expressing nucleotide sequence isolated from the Sargasso Sea
atgacctacgcgcacaccgaccacgtcccgcacagcttctggacccgctacgtgtggagccaggaccacaaggtcatcgccgtgcagtacgcgctgacggccatcgcgatcggcctggtcggcctcgtattgtcggacctgatgcggctgcagctcggctttccgggcaagtttgcgttcatcgacgcgaaccactactaccagttcgtcacgatgcacgggatgatcatggtgatctacctgctgacggcactgttcctcggcggcttcggcaactacctgatcccgctgatgctcggcgcgcgcgacatggtgtttccgtttctcaacatgctgagctactgggtctacctgctggccgtgctggtgctggtggcgagcttcttcgtgccgggcgggccgaccggcgcgggctggacgctgtatccgccgcaggcgattctgccgggcacgccgggcgtggaatggggcatcgtgctgatgctcgtgtcgctggcgatcttcatcgtcgcggccacgatgggcggcctgaactacgtgaccaccacgctgcaggcgcgcacgcgcggcatgacgctgatgcgcatgccgctcacggtgtggggcatcttcatcgcgaccatcatggcgctgctggcgtttccggcgctgttcgtgtcggcggtgatgatgctgttcgaccggacgctcggcaccagcttcttcatcccggccgtggtgtcgatggggcagacgctcaagcacgccggcggcagcccgttgctgttccagcacctgttctggttcttcgggcatccggaggtctatatcgtcgcgctgccggccttcggcatcgcgtcggatctcatcagcacgcacgcgcgcaagagcatcttcggctaccggatgatggtatgggccatcgtcatcatcggcgcgctgagcttcgtggtctgggcgcaccacatgttcatcgccggcatgaatccgtacttcggcttcttcttcgctaccacgacgctcatcatcgccgtcccgaccgccctcaaggtctacaactgggtgctgacgctgtggcgcggcgacatccacctgaccgtgccgatgctgttcgcgatcggcttcgtcagcaccttcgtgctgggcgggctgaccgggctctacctcggcaacgtgagcgtggatatcccgctgtcgaacacgtatttcgtggtcgcgcacttccatatggtgatggccgtgtcgccgatcctcgtggtgttcggcggcctgtatcactggtacccgaaggtgaccggccgcatgctcgacgacacgctcggtcgcgcgcacttctggatcaccttcgtcggcacctatgcgatctatttcccgatgcactatctcggcatcctgggcatgccgcggcggtattacgcgtatcagggctacagcttcatcccgcattcggcgcagacgctcaacacgttcatcacgatcgtcgcgctgatcgtcgcggcggcgcagttgctgttcctgttcaacctcgcatggagcctcgggcacggccggcgcgcggacggcaacccgtggcgggccaccacgctcgaatggcagacgccgcaaacgccgcccgtacacggcaactgggggccgacgcttcccgtcgtctaccgctgggcatacgaatacagtccgccggggcaagaggaagacttcgtgccgcagaatcagccgccggcgacggcgcccgaagccaaagcggctcatccgacgctgcatccgggcgaggcacaagaatgac

SEQ ID NO: 225660 - DNA, 1402 bp, Unknown
  Bacterial polypeptide expressing nucleotide sequence isolated from the Sargasso Sea
ttgatcatgatcttctttatggtgatgccagcaatgataggtggctttggtaactggtttgttccaataatgattggtgcacctgatatggcctttcctagaatgaataatatttcattttggttgttacccacatcattcattttattaataatgtcaatttttatggatggtcctccaggtcaaacaggtgttggtggtggatggactatttatcctcctttgtcatctacagcaggtcaaccaggtcctgcaatggattttgcaattttaagtctacacttagctggagcttcttcaattttaggtgcagttaattttattacaacaatcttaaacatgagaacgcctggcatgacacttcataaaatgccattatttgcttggtcaattttagttacagcgttcttattacttttatcacttccagtattagcaggagcaattacgatgcttcttacagatagaaactttggaacagctttctttgatgcacaaactggtggagacccagttttatttcaacacttattctggttctttggtcacccagaagtttatattttaattttaccaggttttggaatgattagtcatatcgtttcaacattttctagaaaaccagtttttggatacttaggaatggcttatgcaatggttgcaattggaatagttggttttgttgtgtgggctcaccacatgtacacagtaggtttaagtacagatacaaaagcttacttcttagccgcaacgatgatcattgcagttccaaccggtataaaaatattttcatggatagcaactatgtggggtggctcgatttcatttaaaactccaatggtttgggctttaggatttatatttttatttactgtcggaggagttactggtgtagttcttgcaaacgctggagttgatacggcaatgcacgatacctattatgttgttgctcactttcattacgtattatctttaggagctgtatttgcaatctttgcaggattttactattggtttggaaaaatgactggttatgagtactcagagtggatgggtcaattacacttctggttaacgtttattggagtaaacttagttttctttccacaacactttttaggccttgcaggaatgccaagaagatatgctgactatccagatgcttttgctggatggaattatatttcttcaattggttcttatatttctgtaattggattagtagtattttttataaacctagcttatgcgttttataagaaaaaggctgcagcacaaaacccatggggagaaggcgctacaactttagaatggacagtaccatctccacctaattttcatacttttgaagaattgccaaagtttgaggatgaagagggtgttgaaaaatctacaagctaaa

SEQ ID NO: 225661 - DNA, 1312 bp, Unknown
  Bacterial polypeptide expressing nucleotide sequence isolated from the Sargasso Sea
tatgagcgctaatatagataaactacatgatgatcatagtcatactccttcaggaataatgagatggataacaactacaaaccataaagatataggtacgatgtacttatggtttagtttaattatgttctttatcggtggcttgatggctttagtcatcagggcagagttatttcaaccaggtttacaattagttgtgcccggattttttaatcaaatgactacaatgcatgccttagtaatgatttttggtgcagtcatgcctgcttttgttggtttggcgaattggcaaataccaatcatgataggcgcacccgacatggctttacctaggctgaataattggagtttctggatattgccttttgcatttacaatgatgttgagtactttgttttttgaaagtggaggaccagcagctggttggacgttatatccccctctatcactacaaggcggtgattctatgccgttcgttattttgtctattcacctattaggattatcctcaatattaggtgcgatcaatgtcattgcaactatacttaatatgagggcaccaggaatgactcttatgaagatgccaatttttgtatggacttggttaatcacagctttcctattaattgcatcaatgcctgtattagctggtgcgatcacaatgttattaacagatagattcttcggaacaagcttttttactgcttccggcggtggagatccggttctatttcagcatatcttttggttctttggtcatcctgaagtatatattttaattttgcctgcatttggtattgtatcgactattatcccagctttttctagaaaaaaactttttggttatgactctatggtttatgcaactgcatctattgctcttctatcttttatagtttgggctcaccatatgtttacggttggaatgcctctagcaggagagctattcttcatgtttacaaccatgttaatcgctgttccaacaggggtaaaagtttttaattgggttgccacaatgtggagaggatctatgacttttgaaactcctatgttatttgctattgcattcatagttctatttactgtaggtggtttttctggattgatgcttgctatggtgccagcagattttcaatatcatgatacgtattttgtagtagcacattttcattatgttcttgttccaggagctgtatttgcaattatagcagccgtttattactggttgcctaaatggactggaaaaatgtataacgaaagtttaggtaagttgcatttttggttaacaactttttttgtcaatctaacattt

SEQ ID NO: 225662 - DNA, 784 bp, Unknown
  Bacterial polypeptide expressing nucleotide sequence isolated from the Sargasso Sea
tatgtatacacaaacggcatcacacgacgatcaccatacaccaactggttggaaacgttgggcttattcaactaatcacaaagatattggaacaatgtatctgatatttgcaattattgcaggtgtgattggtactgcattctcagttttaatgagaatggaattgatgcatccaggtgatggaattttaggtggaaattatcatttatataacgtcttagttactggtcatggtttaataatgattttctttatggttatgccagcaatgataggtggctttggtaattggtttgttccaataatgattggtgcacctgatatggcttttcctagaatgaataatatttcattctggttattgcctacatctttcatattattaataatgtcaattttcatggatggccctccaggtcaaacaggagtaggaggaggatggacaatatatcctccattgtcatctacagcaggtcaaccaggtccagcaatggattttgcaattttaagtctacacttagctggagcttcttcaattttaggtgcagtaaactttattactacaattttaaacatgagaacacctggcatgacacttcataaaatgccattatttgcttggtcaatacttgtaacagctttcttattgttattatcattacctgttttagcaggagcaattacgatgcttctaacagatagaaactttggaacagctttttttgatgcacaaactggaggagatccagttctattccaacatttattttggttctttggtcac

SEQ ID NO: 225663 - DNA, 1600 bp, Unknown
  Bacterial polypeptide expressing nucleotide sequence isolated from the Sargasso Sea
ttcagcttcagcgtcgatcacaaggtgatcggcctgcaatacctggtctgcggctttctcttctacctgatcggaggagccctcgccggggcgattcgtacggaactggccagtccggtctcggacttcatggccagggacgtttacaaccaggtcctcaccctgcacgggaccgttatgatctttctgtggatcgtgccggtggtgaatggcgccttcggcaactatttgattcccttttatgtgggtgcccgggacatggcattcccacgactcaacgcggtggcgttctggctgattcccccagcggggctgatgctgatcaccagctatttcctcactggcgctgcacagtccggctggaccgcctatcccccgttgagcatcaccactcctgccacaggtcagatcatctggattctgagtgtgcttctgctggggggaagttccatctttggcggcattaatttcatcgcgacgattctcaaactgcgtcgcccggggctgaaattgatgcaattgccgatgtactgctgggcgatgctgggtaccagcattttggtggttctttcaacccctgtgctggcgggaacactggtgttgctcagtttcgacatcgtggcccacaccggctttttcaacccgacactggggggcaacgttgtcgtttatcaacacctgttctggttttattcccacccggcggtttacatcatggtgctgcctgccttcggcctggtgagtgaaatcctccccgttcacgcccgcaagcccctgttcggctacgtgacgatggtctattcgatcatggccatcgtggttctcggcctcgtcgtctgggcccaccacatgttcaccagcggcacaccgccttggatgcggttgttcttcaccatcgccaccgccttcatcgccgtaccgacggggatcaaattcttcaactggctggccaccctctggggcgggcgcatcaccctgaacagcgccatgttgttttcctgcgggttcatcgtcaatttcgtgctggggggaatcaccggtgtggcactggctcaggtgcctttcgacattcatgtgcatgacacctacttcgtggtggcccatttccactacatcgtcttcggtgggtcggtgttcgtgatcttcgcctcggtttaccactggtatccgaagttcacgggccgcatgctcaatgaagacctggggcggctccactgcgccctcaccttcatcggcttcaacctctgctttggtccgcagcactggctcgggctgaatggcatgccacgtcgtgtcgccgaatacgacccgcagttcaccctgatcaatcagatcagttccgtcggggcactgctgatggccatcagcaccctgccattcctctggaacgtggtgcagagcgccctcagcggcaaacctgccggagacaacccctggaatgccctgacaccggaatggctcaccagctcaccaccaccggtggagaactggatcggtgaagcgcctctcgtggaggagccctacggctacggcgttcccatggatcaacttgacctgaccgccaccagcggtcgcgacctctggagcagcggcaaatgac

SEQ ID NO: 225664 - DNA, 1351 bp, Unknown
  Bacterial polypeptide expressing nucleotide sequence isolated from the Sargasso Sea
taattatcacttatataatgtactagtaaccggtcatggcttaattatgattttcttcatggtaatgcctgccatgataggtggatttggaaattggtttgtcccaataatgattggtgctcctgatatggcatttccaagaatgaataatatttctttttggctattacctgttgctttaattttattaatcgcatcaatttttgttgatggccctccaggcgcacaaggtgttggaggtggctggactatttacccaccattatcgtctaaaactggtcaaccaggtcctgctatggacttagcaattttaagtttacacgtagctggggcttcttcaattttaggagcaataaattttattacaacaattttaaatatgagaacaccaggcatgaccttgcataagatgcctttattttcttggtctattttggttacagcatttttgcttttattatctttaccagtcttagcaggggcaataactatgttgttaactgatagaaattttggaactgctttctttgaagcacaaaccggaggagatccagttttatttcaacacttattttggttttttggtcacccggaagtttatattctgattcttccaggttttggaatgataagtcatatcgtttcaaccttctctaaaaaacctgtatttggttatttgggtatggcttatgccatggttgcaattggtgtagtaggttttgttgtttgggcacatcatatgtacacagtaggactagacacagatactaaagcatatttcttagcagctacaatgattattgctgttcccactggtattaaagttttttcttggattgctacaatgtggggtggatcaataagttttaaaaccccgatgttatgggccataggatttattttcttatttacattaggaggtgtaacaggagtagtgctagctaacgctggagtagataccgctctacacgatacttattatgtagtagcacattttcattacgtactatcaatgggagcggtattcgcaatttttgcaggattttattattggtttagtaaaatgagcggatatcaatactcggaatttttaggaaaactgcacttttggttaacgcttgttggagtaaatttaattttctttcctcaacactttttaggattagcaggtatgccaagaagatatgctgattatccagatgccttcgccggatggaattatatttcatctattggctcttacatatctgtagtcggtctagcagttttcttgataaatctcttatacgctttcgcgaaaaagaaaaaagcagaacaaaacccgtggggagagggagcaactactctggaa

SEQ ID NO: 225665 - DNA, 1372 bp, Unknown
  Bacterial polypeptide expressing nucleotide sequence isolated from the Sargasso Sea
ccagatcaagacttatatcatggccattcttttataactaaatgggttttttgtcaggatgccaaagttataggagtacaatattttctattagcaacatttacaggaatagttggtcttattctttcatggttaatgcgtttgcaattaggctttccaggtttagcaggcttcatgactgctgaacattactatcagttcgttactatgcatggaatgataatggtagtatattttttaacagcactcttccttggaggttttggtaattatttaattcctttaatggtaggcgcaagggacatggtttttccgtatgttaatatgataagtttttggatgttttttgttgcagttgcagttttaatggcaagtttttttgttccaggaggaccgacaggttctggctggacactttatccacctcaagcaatcttagaaggaactccaggatcgggcatgggtattcttttaatgcttatttcattgtcacttttcgttattggtttcactatgggtggtttaaattatttgatcacagttttacaagctcgaactagaggtatgacattaatgagaatgccattaactgtatggggaattttcacagcaacagtattagcaatgctggcttttcctgcattgttagtaagttcaataatgatgacgttagataaagtattgggcacaagttttttcatgccaacaattttaaaagcaggtgaggttttagaatatggaggaggaagccctattcttttccaacatttattttggttttttggtcatccagaagtctatattgttgctttacccgcatttggaatagtttcagatttaatctcagttcattctagaaaaaatatttttggttatagaatgatggtttgggcaatcgtagcaattggtgctttaagcttttttgtttgggcacaccacatgtatgttagtggaatgaacccttggttcggatttttctttgcaacaactactcttataatcgccgtgccgacggcaatgaaagtatataattggattttaactctatggagaggaaatattagaattaatactgtaatgttatggtgtcttggttttatagttaccttcgtaaatggcggaataactggaatcttcctaggaaatgtttcagtcgatgttcctttatctgatacatattttgtaattgctcacttccatatggttatgggaattgcacctcttatggtaattatgggggcagtctatcattggtttcctttagttgcgggcagaatgttaagtgaaaaattaggtaagtggcatttttggacaacttttataggagcatactcaatatatttcccaatgcactacttaggttttattggag

SEQ ID NO: 225666 - DNA, 790 bp, Unknown
  Bacterial polypeptide expressing nucleotide sequence isolated from the Sargasso Sea
tatgtctgctaacaaaaaacacgattatcatttagttgatccaagcccatggccaatttattgctctttctcatccttaatcttggcgctaggtgcagtatattattttcatacaaaaaccctttggctgcttctagtaggtacagcacttttgatttatggatcatttatgtggtttagagacgttatcgatgaggctgaaaaacaaggtcatcacacattagtagttcaaattggtcatcgatatggcatgacactttttattgcatctgaagtcatgttttttatagcttggttctgggctttctttaatgctagcctatttccaacagaagcagtaggaaaagtttggccgcctgccgatattaaaacatttgatccatgggacatcccattaattaatactctaattttgttgctatctggtacaactgctacatgggcacaccacgcaatgttagagaatgatagaaaaggtttagttaacggcctaataactacagtttttttaggttttatttttacatgttttcaggcttatgaataccatcatgcagcgttcactatttcacaaaacatttatggttcaactttttatatggcgaccggttttcatggttttcacgtaattataggaacaatttttttagcagtatgtttgtatagatctatcaaaggtcattttaaacctgatcaccattttggatttgaagctgcagcttggtattggcattttgttgatgtcgtttggctattcttatttgcagctatatatatttggggaagttag

SEQ ID NO: 225667 - DNA, 1636 bp, Unknown
  Bacterial polypeptide expressing nucleotide sequence isolated from the Sargasso Sea
tatgtatacacaaacagcatcacatgacgatcatcatacaccaacaggttggaaacgttgggcttactcaactaatcacaaagatataggtacaatgtatttaatctttgcaattgttgcaggggttattggaacggcattttcagttttgatgagaatggaattgatgcatcctggtgatggtatcttaggtggaaattatcatttatacaatgtgttagtaactggtcatggtttaatcatgattttctttatggtgatgccagcaatgataggtggctttggtaattggtttgttccaattatgattggcgccccagatatggcatttccaagaatgaacaatatttctttttggttgttaccagtttcattaacactattaattttatcaatttttgttgatggccctccaggtcaaacaggtgtgggtggtggatggactatttatcctccattgtcatctaaagcaggtcaaccaggtccagctatggatttagcaattttaagtttacatttggcaggagcctcttcaattttaggtgctgtgaattttattactacgattttaaatatgagaactccaggtatgacattacataaaatgcctctatttgcctggtcaattttagttacggcatttttattattgttatctttaccagtacttgctggagcaattactatgttattaactgatagaaattttggaactgcattttttgaagctcaaacaggaggtgacccagttttattccaacatttattttggttctttggtcatccagaagtttatattttaattcttcctgggtttggaatgattagtcatattgtttcaacattttctagaaaaccagtttttggttatttaggcatggcatatgcgatggttgcaattggaattgtaggatttgttgtatgggctcaccatatgtacacagtaggtttaagcacagatacaaaagcttatttccttgccgcaactatgattatagctgttccaacaggtattaaaattttttcatggattgcaacgatgtggggtggatcaatatcatttaaaacacctatgatgtgggcacttggatttatatttatgttcacagttggtggagtaacaggtgtagtattggcaaatgcaggagtagatactgcaatgcatgatacttattatgtggtagcacattttcattatgttttatctttaggtgcagtttttgcaatatttgcaggtttttattattggttttcaaaaatgtctggctatgaatactctgaatggttaggacatttacatttttggttaacatttgttggagtgaatttgatcttctttcctcaacatttcttaggattagccggaatgcctagaagatatgcagattatcctgacgcttttgctggatggaattatatatcttcagttggctcgtatgttgcggtagcaggtttggcagtattttttgtaaatctaatttattcatttgcaaagaaaaaagcagctgcccaaaacccttggggagtaggagcgactactttagaatggactgtaccatctccaccaaattttcatacatttgatgaattgccaaaatttgaggatgatcaggaagcacaaaaaacacatagctaa

SEQ ID NO: 225668 - DNA, 700 bp, Unknown
  Bacterial polypeptide expressing nucleotide sequence isolated from the Sargasso Sea
gggtgcagtttattattttcattctaaggctctttggctcttgttagttggttttgcattagttatttacggagcctttatgtggtggagagatgttattgaggaagcagagcaccaaggtcatcatactcctgtagtacaaataggtcatcggtatggaatgacactttttatagcttcagaagttatgttttttgttgcgtggttttgggcatattttaacgcaagtttatttccaacagagtctattggaggaacttggccaccacctgatataaagacatttgatccttgggatataccattaattaatactcttattttattattatctggaacaacagtaacttgggctcaccatgcaatgttagagaatgacagaaaaggattggtgaatggattgatagcaactgtttttttaggatttatattttcatgctttcaagcctacgaatatcatcatgccacttttactctagatggaaatatttatggttccacattttatatggctacaggctttcatggctttcatgtgatcgttggaacaatcttcttagcagtgtgtctatttagatcgatgaaaggtcattcaacaccaactcatcattttggttttgaagcagctgcctggtattggcattttgtcgatgtagtttggttattcctttttgctgcaatctatatttggggaagttaa

SEQ ID NO: 225669 - DNA, 716 bp, Unknown
  Bacterial polypeptide expressing nucleotide sequence isolated from the Sargasso Sea
tatgtacacacaatcagcatcacacgacgatcatcatacaccaacaggttggaagcgttgggcttattcaactaaccataaagatattggtacaatgtacttaatatttgcaattgttgcaggtgttataggtacagcattttcagttttaatgagaatggaattgatgcatccaggtgatggaattttaggtggtaattatcatctatataatgtgttagttactggtcacggcttaatcatgattttctttatggtaatgccagcaatgattggtggttttggtaactggtttgttcctataatgattggtgcacctgatatggcttttccaagaatgaataatatttcattctggttattacctacttcatttattttgttaataatttctatatttgtggatggccctccaggtcaaacaggagttggtggtggttggactatttatcctcctttatcttctaaagctggacagccaggacctgcaatggattttgcaattttaagcttacacttagcaggagcttcttcaattcttggagcagtaaacttcattactacaatcttgaacatgagaactccaggtatgacattgcataaaatgcctttatttgcttggtctattttagttactgcatttttattattattatcattgccagttttagcaggtgcaatcacaatgttattaacagacagaaattttggaaccg

SEQ ID NO: 225670 - DNA, 1831 bp, Unknown
  Bacterial polypeptide expressing nucleotide sequence isolated from the Sargasso Sea
aatgtcagatgaatacgaacataaattagaagccaagtcagatattgtttctgatgcatcttcagttggaacacccggtatcgacgcagttcctgaggcagaaataccagatcaagaattataccactcgcatagttggtggaccacttatgttttttctcaagatgcgaaatacattggagtacaatatgctttaacggcagtaggaactggacttctaggtttagtgctatcctggttaatgcggattcaactcgcttggcctggtttaggttggcttgaaccggctgcttattatcaatttgttactatgcatggaatgataatggtaatttatcttcttacagctttattcctaggaggatttggaaatcttttaatacctttaatgtgtggatcgagggatatggcatttccatatgttaatatgctcagttactgggcttttgttgttgctgttttagttttgcttgctagtttttttgttccaggtggtccgacaggtgctggctggactttatatccaccacaggcaataaccgcaggcacaccaggaagcaacatgggaatcatattaatgttggtatcgcttattttatttgtggcaggttttacaatgggtggccttaattacataattactgttttacagcttagagctagaggaatgactttaatgagaatgcctcttacgatttggggaatatttacagccacagttcttgcgctattagcattccctgcacttctagttggttgtttgatgatgacgcttgatagcatgttaggaacaagtttcttcatgccggccatggtttccctaggagaaaaattatcttacgatggcggaagtcctatattatttcaacacctattttggttttttggacatccagaagtttatatagttgctcttcctgcgtttggaattgtatctgatttactttctgtacatgctagaaaaaatatttttggttatagaatgatggtttgggcaatagtaggaattggagctttaagtttctttgtatgggctcaccacatgtatgttagcggaatgaatccttggtttggtttcttttttgcaactacgactttgattatagccgttcctacagcgattaaagtttataactggatcataactctctggagagggaatattcaattatcactaccaatgttgttttctctagcatttatagtgacattcctaaacggaggtttaaccggattgtttttaggaaacgtaaccgtggatgttcctttgtctgacacttattttgttgtagcacactttcatatggtgatgggtattgctccgatattagtagtttttggagccatatatcactggtatcctttaatcacaggtagaatgctaaatgagacgctcggaaaaattcacttttggataacctttgttggatcttacgcaatttattttccaatgcattaccaaggctttgtaggcgttccaagaagatattttgaaatttatgaaagcccgtatattgaaacttcaactttgcttttgaaccagtttattacaatagcagctttaatagtgggcgcagctcaattgctctttttatataatattatcgttagtgcccgtttaggaaagaaagctgaaaaaaatccttggaaagcttgctcactagaatggcaaactcctcaaatgccacctgagcatggaaactggggaaaagagactccaaaggtttatagatgggcatatgattttagtgttcctggagcaaaagaggattatattccacaaaatgtcccaccaagcgaggtgatgggagcgaaagttgaaaaaacgtga

SEQ ID NO: 225671 - DNA, 1495 bp, Unknown
  Bacterial polypeptide expressing nucleotide sequence isolated from the Sargasso Sea
atacttaatttatgcaatcgtagctggtgtagtaggtggcgccctttcagtcattatgagaatggaattatctgaacctggtatgcagtttgtggctgatggacaaatgtggaatgtaattatctcagctcatggattacttatgatcttttttgttgtaatgcctgcattgatagggggctttggaaattggtttattccacttatgattggtgcacctgatatggcttttccaagattgaataatattagtttttggttattggttcctgcattatttttaattgcaggttcgatgtttgttgggagtggtgctggaacgggttggaccatttacccacctttaagttcgattacagggcacagtagtcctgccgtagacatggcaattttttcactccatttagcaggggcttcatcaatacttggtgcagtcaactttattacaactattttgaatatgagagcaccggggatgacaattcataaaatgcctctttttgtatgggcaatgttagttacagccttccttcttttactagctgtaccagttctaggcggagctattacaatgcttttaacagatagaaactttggaacaactttttttgatcctgccggtggaggggaccccgttctattccagcatttattctggtttttcggtcacccagaggtttacattatgattttgccagctttcggtatcgtctcacatattgtatccacattttcaaaaaaaccagtatttggatatttaggtatggcttatgcaatggttgctataggatttatcggttttgttgtttgggctcatcatatgtacacagtaggatttagtgcaaatgtcagagcttattttatgcttgctacaattgtcatagctgtacccacaggtgttaagatttttagttggatcgctacaatgtggggcggatctataacatttacgactcctatgttatttgctttaggatttatttttcttttcactctaggtggagtaacaggtgtaattttagcaaacgcaggtattgatgtcgttttacatgatacatactacgttgttgcccatttccattacgtattaagtatgggagcggtgtttggaatttttgccggaatttattattggtttggtaaaatgagcggaaaaaattactctgagttttttggtaagttacatttttggttgttctttttaggagttaacttaaccttctttcctcaacactttttaggattagcaggtatgcctagacgtattccagattatccagatgcttatgctggatggaatattatatcctcaattgggtcatatatatcttttgcttcatttattctatttattttcataatagtttacgcattatttaaaggtaaaaaagcagaagcaaatccatggggtgagggtgcgaaaacacttgagtggacattaccgtctcctccaccttatcaccagtttgatacattacccgaagtaaaaaattaa

SEQ ID NO: 225672 - DNA, 673 bp, Unknown
  Bacterial polypeptide expressing nucleotide sequence isolated from the Sargasso Sea
catgtatacagttggtttagacacagataccaaagcatatttcttagctgcaactatgattattgcagtaccaacaggaataaaagttttctcttggattgcaacaatgtggggtggatctataagttttaaaacaccaatgttatgggcaataggttttatattcttattcactttaggaggagttactggagtagtcttagctaacgctggtgtagatactgccttgcacgatacatattatgtagttgcacactttcattatgtactctcaatgggagcggtattcgcaatatttgctggcttttattactggtttagtaaaatgagcggatacgagtattcagaatttttaggaaaactgcacttttggttaacgcttgttggagtaaatttaattttctttcctcagcatttcttaggactagcagggatgccgagaagatatgctgattatccagatgcgtttgcaggatggaattatatttcttcaataggatcatatatttctgtcgtaggtttagcagttttcttaattaatcttttatatgcttttgctaaaaagaaaaaagcagaacaaaatccatggggagaaggagcaacaactttggaatggacagtatcttcgccgccgccgttccatacttttgaagagctgcctaaagtaaagtaa

SEQ ID NO: 225673 - DNA, 1612 bp, Unknown
  Bacterial polypeptide expressing nucleotide sequence isolated from the Sargasso Sea
tatgaaacagaattatttaaatcacccaaagggaattatgtcttggctattgacattagatcataaaagaattggtctgatgtatttagttagcggtattctatttttctttttaggtggattattagctttggttatgcgatttgaattagcagctcctggcaatgatattatctcaaatgagatatacaataatgcatatactcttcatggagcaataatgatatttcttttcattattcctgccataccaggtgctcttggaaatattttactccctcttatggttggtgctaaagatgtcgcctttccaagacttaacttagcaagtttttatatttattcttttggggcattatttgctttatacaccataattaatggtggtgttgatactggttggactttttatacaccatactccactcaaagttcatccaatgtagttccaatgactttaggtatatttattatagggttttcatctattctaactggtttaaattttattgccactgttcataaaatgagaattccaggccttacatggtataaattacccttatttgtgtgggcattatatggtacatccttagttcaaattactgctacacctgtattagcaattactatggttttattaatgcttgaaagattcctaggaattggtatttttgatcctgctttaggcggtgatccagttttatatcagcacttcttttggttttattcgcacccagcagtatatattatgattcttccagcttttggtattattagtgaaatcataccagttcattcacgaaagaaaatttggggatataaattcatagcttattcaactttatcaatcgcgtttattgggtttttagtttggggccatcatatgtttacttcagggcaatctgtcttttcacagattgttttttcctttattacatattttgttggaattccaactggtgtaaaaatctttagttggattttaacaatgtacaaagggcaggtatcttttacccctccaatgttctatgccttagctttcttgtttttatttactattggtggattaactggaatatttttaggtgcagttgcattagatattcatttgcatgacacttactttgttgttgctcattttcactatgttatgcagggaggaacaattgttgccttcttgggtggattgcatcattggtggccaaaatcttttggtgtaatgtataatcagactgtagctaacattgctgctctgggtgtttttataggatttaacggaacatttttcccacaatttttgcttggtttgagaggaatgccaagaagatatgctacttatgatgaacagtttgttgaattacatagttattctacattttggtccggtatattaggaatttcaatctttatagctgtaatgaatttattttggtcatttattaaaagaaataaagttgatccaggttcaaatccttggggaggtatgacattagaatggacacatacttcatcgccacctcatccacataattttgaagaagaaccagtattgcagcatggaccatatgattatgacaaggtaattgttcagaaaacatataaaaaatga

SEQ ID NO: 225674 - DNA, 778 bp, Unknown
  Bacterial polypeptide expressing nucleotide sequence isolated from the Sargasso Sea
ttctcatatcattgaaactttctcaaggaagcatttttttggctattcttctatggtttgggcgatgttgtccattgcaattctatcatttgtggtctgggctcatcatatgtttacagtaggtatgccgttggctgcagaaatatttttcatgtgggcaactatgctaattgcggtcccaaccggtgttaaggtgtttaactgggtagcaactatgttccgtggctcaataacatttgaaacgccaatgttattcgctgtttcatttgttgtactttttacaatcggcggtctctccggattaatgttggcaattgttccagctgactttcaatatcatgacacctattttgtagttgctcattttcactatgttttagtgccaggcgcaatattttctattatggcagctgtctattactggataccaaaatggtgtggaaatatgtatgacgaaaggcttggaaagctgcatttttggttatcgttcattggtgtaaatgtaactttcttcccgcagcattttattggtttggctggaatgccaagaagatacccagattatgctctacaatttgctgattggaacatggtctctagcgttggcgctttcctatttgggttctctcagcttttattcttattcatcgttattaaaactgtaatgggtggaaaaaaggcaacacctcaagtttgggaaggtgcaaaaggccttgaatggactgttgcatcacccgctccttatcatacattctcaacaccacctaaggttgattaa

SEQ ID NO: 225675 - DNA, 1204 bp, Unknown
  Bacterial polypeptide expressing nucleotide sequence isolated from the Sargasso Sea
aaataatcatttatataatgtgttagtgacaggtcatggtttaatcatgattttctttatggttatgcctgctatgataggtggttttggtaactggtttgtaccaattatgattggggcaccagatatggcatttccacgaatgaataatatttctttttggttattgccagtttctcttacattattaattttatcaatttttgtggatggacctccaggtcaaacaggagtaggaggtggatggaccatttatcctccattatcatctaaagctggacagcccggccctgcaatggatttagcaattttaagtttacacttagcaggagcttcctcaattctgggtgcagttaattttattactacaattttaaatatgagaactccgggtatgacattacacaagatgccattgtttgcatggtcaattttagtaactgcatttttgttattgttatctttacctgttcttgctggcgcaattaccatgttattgacagatagaaactttgggacagccttctttgaggctcagactggtggggatccagttttatttcaacacttgttttggttttttggtcatcctgaagtttatattttaattcttcctggttttggaatgataagtcatatagtttcaacattttctagaaaaccagtttttggttacttaggaatggcctacgcgatggtagcaatcggtatagttggttttgttgtttgggctcaccatatgtatacagtaggattgagtactgacacaaaagcctatttccttgcagctacaatgattatagcagttccaacaggaattaaaattttctcttggatagcgactatgtggggtggatcaatatctttcaaaacgccaatgatgtgggcactaggttttatatttatgtttactgttggtggggtaacaggtgtagttttagcaaatgcaggtgttgatactgctatgcatgacacatattacgtagtagctcattttcattacgttctttctttaggagcagttttcgcaatttttgcaggcttctattattggttttcaaaaatgagtggttatgagtattcagaatggatgggtcatttgcatttttggctaacgtttattggagtgaacttaatcttttttcctcaacattttttaggattagcgggtatgccgagaagatatgcagattatccggatgca

SEQ ID NO: 225676 - DNA, 226 bp, Unknown
  Bacterial polypeptide expressing nucleotide sequence isolated from the Sargasso Sea
tttactgatggaatatatccgtcagtattttatatggctactggttttcatggatttcatgtaatggttggaacagcatttctagctgtttgtttgtatcgtgtttataaaaatcattttactccagatagacattttggattagaggctgcagcatggtactggcactttgttgacgttgtttggttgttcttgtttgtctgtgtttatgtttggggtgcataaa

SEQ ID NO: 225677 - DNA, 890 bp, Unknown
  Bacterial polypeptide expressing nucleotide sequence isolated from the Sargasso Sea
tatgtatacacaaacagcaacacatgacgatcatcatacaccaacaggttggaagcgttgggcgtactctactaatcataaagatataggtacaatgtatttaatttttgcaattgttgcaggagttataggtacggcattttcagttttgatgagaatggaattgatgcatcctggtgacgggattttaggtgggaattatcatttatataatgtcttagttaccggtcatggtttaatcatgattttctttatggttatgccagccatgataggtggttttggtaattggtttgtgccaattatgattggtgcacctgatatggcatttcctagaatgaataatatttctttttggttattaccagtttcattaactttattaattttatcaatttttgctgacggccctccaggacaaacaggagttggtggtggttggactatctatccacctttatcatccaaagcaggtcaaccaggaccagcaatggatttagcaattttaagtttacacttagcaggggcttcgtcgattttaggagcagtaaactttataacaacaattttaaatatgagaactccaggcatgacattgcataagatgccattattcgcttggtcaatcttagttacagctttcttattattattatctttaccagttttagctggagcaattactatgttgttaacagatagaaactttggaaccgcctttttcgaggcgcagactggtggggatccagttctgtttcaacatttgttttggttctttggtcatccagaagtttatattttgattttaccaggatttggaatgattagtcatattgtatcaacattttcaagaaaaccagtttttggttatttaggaatggcatatgcta

SEQ ID NO: 225678 - DNA, 631 bp, Unknown
  Bacterial polypeptide expressing nucleotide sequence isolated from the Sargasso Sea
atgtcagcaacaactgcagatcatgctcatcatcataatccaacaggttggaaaaggtgggcttattcaactaatcataaagatattggaacaatgtatcttatttttgcaattattgctggtttaattggatctgcgttttcagttttaatgagaatggaattgatgcacccaggagacggaattcttggtggagactatcatttatataatgttttggtaactggtcatggtcttatcatgattttctttatggtaatgccagctatgatcggcggttttggcaattggtttgttccaatcatgattggcgcacctgatatggctttcccaaggatgaataatatttctttttggctattaccagttgctctaattttattgttagtgtcaatttttgttgatggccctccaggcgcaaaaggagttggaggtgggtggacgatttatccaccattatcatcaaaaactggtcaaccaggtccagcgatggatttagccatattaagtttacatgttgccggagcttcctcaattttaggagcaataaactttattacaacaattttaaatatgagaactcctggtatgactttacataaaatgcctttgtctcttggtcaattctagt

SEQ ID NO: 225679 - DNA, 778 bp, Unknown
  Bacterial polypeptide expressing nucleotide sequence isolated from the Sargasso Sea
atgagtacggtaattgaaaatcatcatgaccatcatcacggcccggcaagcgggctaatgcgttgggtaacaacaacaaatcataaagatattggaactttatatttatggtttagttttgctatgtttcttattggtggggcaatggcaatggtcattcgtgctgaacttttccaacccggcatgcagattgtccaaccagagttttataatcaaatgcttaccttgcatggtttgattatggttttcggtgctgttatgcccgcatttgttggacttgcaaattggttagtgccgatgatgataggtgcccctgatatggcacttccaaggttaaataatttaagtttttggctattaccttttgctttcgggattttgctctcgtcattgtttatggaaggaggagccccaaactttggatggactttttacgctccgttgtccacaacatacgctccaccaagtgttaccttcttcattttttcagtccacattatgggggcatcatcaataatgggatctattaatgtcatcgtaactattatgaatatgagggcaccaggaatggatttaatgaaaatgcctttatttgtatggtcctggttgattacggcttatctacttatagcagtgatgcccgttttagctggagcagtgacaatgatgctaatggatattcattttggtacaagtttttttaatgctgccggtggtggagacccagtcctttttcagcacatattttggttttttggtcatccagaagtttatatca

SEQ ID NO: 225680 - DNA, 1636 bp, Unknown
  Bacterial polypeptide expressing nucleotide sequence isolated from the Sargasso Sea
aatgagtacagcaacattacacggtcacgaccaccatacaccaactggatggaaaagatgggcatattctacaaaccataaagatataggaacaatgtatttaatctttgcaattattgcaggggtaatcggaactgcattttcagttttaatgagaatagagttaatgcatccaggtgatggaattttaggaggtaactatcacttatataatgtcctagttacaggacatggtttgataatgattttcttcatggtgatgccagcaatgattggtggttttggtaattggtttgtgccaataatgattggtgcacctgatatggcattcccaagaatgaataatatttctttttggttgctacctgtggcttttattttacttctagcttcaatatttgttgatggacctccaggggcacaaggtgttggaggaggttggactatatatccaccgctatcttcaaaagcaggtcaaccaggtccagcaatggatttggcaattttaagtttacatgttgcgggagcgtcatctattttaggtgctgtaaatttcataactacaattttaaacatgagaacgccaggtatgactttgcataaaatgccattatttgcttggtctatacttgttactgcttttttacttttgttatctttaccagttttagctggagcaataacgatgttattaacagacagaaattttggaacagcattctttgaggctcaatcaggtggtgacccaactttgtttcaacacttattttggttttttggacatcctgaagtctatattttaattttaccaggttttggaatgataagtcatatcgtttctactttttccaaaaaacctgtgtttggatatttaggtatggcatatgcaatggttgcaataggaattgttggatttgtggtatgggctcatcatatgtacacagtaggtcttgatactgataccaaagcatactttttagctgcgactatgataatagccgtcccaactggaataaaaattttttcttggatcgcaactatgtggggtggatcaatatcatttaaaaccccaatggtttgggcacttggtttcatatttttatttacagtcggtggagtaacaggagttgttttagcaaacgctggagttgatacagcattacatgatacatattatgttgttgctcatttccactatgttctatcgcttggagctgtttttgcaatctttgcaggtttttattattggtttggaaaaatgtcaggttatgagtattcagagtggatgggacaacttcatttttggcttacattcattggtgtaaatatagtatttttcccacaacactttttaggtttagcaggtatgccaagaagatatgcagattatcccgatgcatttgctgactggaattatatttcgtccatagggtcatatatatcgatcgtaggattagcagtattttttgcaaacttaatttatgcatttgcgaaaaagaaaaaagcagctcaaaacccatggggcgagggggcaaccactctagagtggacagttccatcaccgcctaattttcatacttttgaagagcttcctaaattcgaaaacgttgagggtgcagaaaaatctagtagttag

SEQ ID NO: 225681 - DNA, 793 bp, Unknown
  Bacterial polypeptide expressing nucleotide sequence isolated from the Sargasso Sea
tatgagctctaaagatcaaaaacatgactaccacttagttgatccaagtccgtggccaatctatacatcttttgctactttaattactgctgtgggatcagtttactattttcactcaaaagttatgtgggctatgctacttggtttcgctcttttaatttatggggcatacatgtggttcagagatgttgttaatgaagctgaacatcaaggtcaccatacaccagttgttcagatacatcatcgttatggaatgacattgtttatagcatctgaagtaatgttttttgttgcttggttttgggcttactttgatgccagtttgtatccaagcgcttttgttggtggagtttggccgcctaaagatattgaagtttttaacccgtgggacattccattaatcaacactctagttttattattgtccggaacaactgttacatgggctcaccactcattattagaagatgacagaaaaggttttatacaaggtctttgggcaacagttctactaggtttcttttttacgcttcttcaaatttatgagtaccaacatgcgagttttgatttttcagggcacatttacggtgcaacattttatatggccacaggctttcatggctttcatgtggtaattggaactatctttttagctgtttgtttgtggagaggaaaacttggtcattttaataaagatcatcattttggatttgaagctgcagcatggtactggcattttgttgatgtagtttggttgtttttatttgcagcaatctacgtttggggaagctaa

SEQ ID NO: 225682 - DNA, 1435 bp, Unknown
  Bacterial polypeptide expressing nucleotide sequence isolated from the Sargasso Sea
aatggctatggggataagagccgagctttttgaaccaggtttacaacttatggatcctattaggtataaccaattagttactatgcacggactaataatgatattcggagcagtgatgccagcatttgtaggtttagctaactggcttattcctatgcaaattggagcaccagatatggcattgccaagaatgaacaatctgagtttttggttacttccttcggcatttataattcttctttcaactgcttttatggaaggaggtatgcctggttttggttggactttttacgcacctttatcaacaaattaccccaatatcgcttactttgtgtttgccgttcacataatgggagtttcttcaataatgggttcaattaatgtaattgtcacaattatgaatatgagggcacctggaatgacattaatgcaaatgccgttgttcgtatggtcttggttaataacagcatatttgcttatagctgttatgccagttctagctggtgcagtaacaatgctattaatggatgcatattttggaacatcattcttcgatgctgcaggtggaggagatccggttttatttcagcacgtcttttggttttttggccatcctgaagtttatattatgattcttcctgcatttggtattacttctcatattatttccactttctcaagaaagcctttgtttggacactcatcaatggtttatgcaatggtttcgattgctgtactttcatttgtagtttgggctcaccatatgtttacagttggaatgccactcgctgcagaattattttttatgtgggcaacaatgatcattgctattcctaccggtgttaaagtttttaactgggttgcaactatttttaaaggatcaataacttatgaaacacctatgctatttgcaatagcctttgttgttttatttacaataggtggtttatctggcctcatgttggcgatcacacctgcagattttcaatatcatgatacttattttgttgtagcgcactttcattacgtgttggtaccaggtgcaattttctcaataatggctgctgtttactattggcttccaaaatggacaggaaatatgtatgacgaaaaaatgggtaagcttcatttttggctatcatttattggtgttaatgtaactttcttcccgcaacactttgtaggtttagctggaatgcctagaaggtatgctgactacgctttacagtttgcagaatggaatgcagtttcatcgattggagcatttctgtttggtttatcacagctacttttcctttacattgttatcaaggctgtttttgcaggcaaaaaagcaactgcacaggtttgggatggcgcagaaggattagagtggactgtagactctcctgctccgtatcatacatttgaaaccccaccaaaagtaaatggctaa

SEQ ID NO: 225683 - DNA, 799 bp, Unknown
  Bacterial polypeptide expressing nucleotide sequence isolated from the Sargasso Sea
tatgagttcacgtaatccaaattctcatgagtatcatttagtagaaccaagtccttggccacttttagcctcaattggtgcgctcatcttgtgtattggggctgtaatttattttagaactgatgacttatggttaatgcttattggattagctattgtaatttatgttacatacatgtggtttagagacattattattgaaggagaacaccagggccatcatacgcctgtagttcagattggtctgaggtacggcatgaccttgtttatcgcttcagaagttatgttctttgttgcctggttttgggcttatttcaatgccagtttattccctactgaacaaataggatctgtttggcctccggcagaaatacatttaatggatccttggcatataccattgataaatactcttatacttttgctatcaggtacaaccgttacatgggcgcaccacgcgctaacagagggaaatagaaaagagttgatccaaggtctctggtgtacagtaggacttggcattatttttacgggcttccaggtttatgagtatatgcatgctgacttcgctttttcaggacatatttatggagcaactttctatatggcaaccggtttccatggttttcatgtattaatgggaacagtgatgctcattgtttgcttaggaagatcaattgcaggacactttaaggctgatcatcactttggttttgaagcagctgcatggtactggcactttgtagatgttgtgtggctatttttattcgctgcaatttatgtctggggatattattaa

SEQ ID NO: 225684 - DNA, 1792 bp, Unknown
  Bacterial polypeptide expressing nucleotide sequence isolated from the Sargasso Sea
atggctgctgatagttatgatgatgttgcaaaaaataaagattcaattcctgaattagaagtagcgcctcaagacctttatcatgcaaaaagtttttggacgaaatatattttttgtcaagatgctaaagtaatagggattcaatatgctttaacggcagcagctattggtatggttggtttggtttcttcatggttaatgagaatgcaaattgcatttccaggagtaattcctatggatccagctgcttattatcaacttgtcacaatgcatggaatgataatggttgtatatcttttaacagctttatttttaggaggctttggtaattatcttatacccttaatggtaggagcgcgcgatatggtgttcccatatgttaacatgattagtttttgggtatttttcttagcagtagtgattctagctgcaagttattttgttcctggaggacctacgggagcaggttggacattgtatccaccgcaggccataacctcaggtacgcctggtggtgacggcttaggtattgtacttatgttagtatcactggctgtgtttgttattggttttacaatgggtggtttaaattatgtaattacaattttacaagcacgaacacgaggaatgactttaatgagacttcctcttactgtttggggcattttcacagcaactgtattggctctatttgctttcccagctcttttcgttgctggcatcatgatgaccttagacaacatgcttggcactagtttttttatgccagctattgtagaatttggtgaacgtttatcatatgatggtggaagtccaatattattccagcatctattttggttttttggtcatcctgaagtatatattgttgcattgcctgcttttggtatcgtatcagatttaatctctgttcatgcgcgaaaaaatatttttggataccgtatgatggtttgggcaatcgttattattggtgctttaagttttgtagtttgggcacatcacatgtatgtagcaggtatgaatccatggtttggatttttctttgctacaaccactttaataattgccattccaacagcaattaaagtctataactgggttcttactctttggagaggaaatattaaattgactattccaatgctattttcgatagcttttattattacttttgttaatgggggattaacgggattgtttttaggaaatgtggctgttgatgttccattatcagatacttattttgttgtagcacattttcatatggtaatgggtatagctcccgttctggttattcttggatcaatttatcattggttccctctaattactggccgttttttgaatgaaaaacttggaagaattcatttctgggtaacgtttattggctcttactccatatacttccctatgcattacttaggttttatgggcgtaactagaagatattttgaagtttttgaaggtgataattttacttactctataactggcattaatcaatttataactgttgcagctttaataactggtgcagcacaatttgtgtttttttataatataattacaagttctaaatttggtaaaaaagcaggaaaaaatccatggaaagcatgttctttagaatggcaaacagcagatgttccacctactcatggaaattttggtaaagaacttcctgttgtttatagatgggcttatgattacagtgttccaggagcggatcaagattatattacacaagatacacctccaagcgctgttgctaatgcgagagcagagcaaacatgag

SEQ ID NO: 225685 - DNA, 939 bp, Unknown
  Bacterial polypeptide expressing nucleotide sequence isolated from the Sargasso Sea
aatgagtgcagtagttgaaaataacgaccatcatgatgatcatcatgggccaagaaaaggcatctggagatggatgacaacaacaaaccacaaagatattggaacactttatctttggtttagctttttagcgttcttagttggaggcgcatttgctatgggcataagagcagaactgtttgaaccaggtcttcaacttatggacccaatcagatacaaccaattagtcacaatgcatggactgataatgatttttggtggtgttatgccagcatttgtagggttagcaaactggctaataccaatgcaaataggagcacctgatatggctttaccaagaatgaataacttaagtttttggttactaccaactgcttttgctattttgatgtcaacagcatttatggaaggaggaatgcctggttttggctggaccttctatgcaccactctcaacaaattatccaaatgttgcattctttgtatttgctgtacacataatgggaatttcttcgatcatgggctcaattaacgtgatagtaactattatgaatatgagagctccaggcatgacgctaatgcagatgccattatttacatggtcttggctaattacagcttatttattaattgcagtaatgccagttcttgcaggtgcagtgactatgttgcttatggatgcatattttggaacttcattctttgatgccgctggcggaggagatccagttctctttcaacatatattttggttttttggacatcctgaagtttatataatgattcttccagcctttggtattacatcacacataatatcaacgttttcccgaaagccactttttggacatgcttctatgatatatgcgatgtcatcaatcgcgatactatcatttgttgtttgggctcatcacatgttcactgttggaatgcctttagc

SEQ ID NO: 225686 - DNA, 905 bp, Unknown
  Bacterial polypeptide expressing nucleotide sequence isolated from the Sargasso Sea
catattttggacatcattcttcgatgctgcaggtggaggagatccggttttatttcagcacgtcttttggttttttggccaccctgaagtttatattatgattcttcctgcatttggaattacttctcatattatttcaactttctcaagaaagcctttgttcggacattcatcaatggtttatgcaatggtttcgattgccgtactttcgtttgtagtctgggctcaccatatgtttactgttggaatgccactcgctgctgaattattttttatgtgggcaacaatgataattgctattcctactggggttaaagtttttaactgggttgcaactatttttaaaggttcaataacatatgaaacaccaatgctatttgcaatagcttttgttgttttatttacaataggaggtctatctggtctcatgttggcgatcacacccgctgattttcaataccatgacacttattttgttgtagcacactttcattatgtgttggtaccaggagctattttttcaataatggctgctgtatattattggctcccaaaatggacaggaaatatgtatgacgaaaaaatgggcaagcttcatttttggctatcatttattggtgttaatgtaactttcttcccgcaacactttgtaggtttagctggaatgcctagaagatatgctgactacgctttacagtttgcagaatggaatgcagtttcatcgattggagcatttctatttggtttatcgcagctacttttcctatatattgttattaaggctgtttttgcaggtaaaaaagcaactgcacaagtttgggatggtgcagaaggactagagtggactgtagattctcctgctccatatcatacatttgaaaccccaccaaaagtaaatggctaag

SEQ ID NO: 225687 - DNA, 1099 bp, Unknown
  Bacterial polypeptide expressing nucleotide sequence isolated from the Sargasso Sea
aatgagcgcaaatatagatcatttaaaagaggaacatcatcagccatcaggtttgatgagatggataactacaactaatcataaagatataggatcactatacttgtggttcagtttgttaatgttctttgtgggtggcctaatggcattaatcattcgtgctgaactatttcaacctggtctacagtttgttgtacctggatttttcaatcaaatgactaccatgcatgctttaataatgatattcggtgcagtaatgcctgcttttgtagggctagctaattggcaattaccaatgatgattggtgcacctgatatggcattgccgagattgaataactggagtttttggatcttgccatttgcatttacgatgctactaagcactttattttttgaaagtggtggaccagctgctggctggacactatatccgccattatctttacaaggtggaaactcgatgcctttcgttatattttcacttcatctactaggagcatcatcaattcttggagctattaatgttattgctaccattcttaatatgagagcacctggtatgactttaatgaaaatgcctatttttgtatggacatggttaataacagcatttttattaattgcatctatgcctgtattagccggagcaataacaatgcttctgacagatcgtttctatgggactagtttctttactgcagcaggcggcggagatccagttttatttcaacacattttttggttctttggtcatcctgaagtatatatcttaattcttcctgcttttggaattgtttctacaatcatacctgctttttcaagaaagaagctcttcggttatgattcaatggtttatgctacagcatccatcgcacttctttcatttatagtatgggcacatcatatgttcactgtaggtatgccgcttgcaggagaaatattctttatgtttacaacaatgttaattgctgtacctactggagtaaaagtatttaattgggttgctaccatgtggaaaggctccatgacgttcgagacacctatgctgtttgctcttgcctttataattctatttacaataggggatctcagggta

SEQ ID NO: 225688 - DNA, 973 bp, Unknown
  Bacterial polypeptide expressing nucleotide sequence isolated from the Sargasso Sea
actgcattttttacttttgttgtcattaccagttttagccggtgctataacgatgcttttaacagatagaaattttggtaccgcattttttgaggcacaaactggcggtgacccagttctttttcaacaccttttttggttctttggacatcccgaagtttatattttgattcttccaggttttggtatgattagtcatattgtttcaactttttctaagaaaccggtttttggatatttagggatggcttatgcaatggtggcaataggagttgtaggttttgttgtttgggctcaccatatgtatacagtaggattagacactgatactaaagcttattttttagcagctacaatgattattgcagtgcctaccggtataaaaattttttcctggattgcaacgatgtggggtggttctataagttttaaaactccgatgctttgggctataggttttatttttttatttactttgggaggagtaaccggagttgtactagctaatgcaggtgtagacacagcattgcatgatacttattatgttgttgctcatttccattatgtattatctttaggtgcagtatttgcaatttttgcaggttggtattattggttcagcaaaatgacgggctatgaatactctgaatttttaggcaaactacatttttggttgacttttataggggtgaatttaattttctttcctcaacatttcctaggtttagcagggatgccaagaagatatgctgattatccagatgcttttgcaggatggaactatgtgtcgtcaataggatcttatatttctattataggtcttgctgtctttttattaaatcttctgtattctttcttaaaaaaaagaaaagcagaacaaaatccttggggagaaggtgctacaacactggaatggactgttacttcaccaccaccatttcacacatttgaagagctgcctaaagtaaaataa

SEQ ID NO: 225689 - DNA, 1021 bp, Unknown
  Bacterial polypeptide expressing nucleotide sequence isolated from the Sargasso Sea
atgtacacacaaacaatatcacacgacgatcatcatacaccgacaggctggaagcgttgggcgtactctactaatcataaagatataggtacaatgtatttaatttttgcaattgttgcaggagttataggtacagcattttcagttttaatgagaatggaattgatgcatccaggtgatggtatcttaggtggtaactatcatttatataacgtattagttactggtcatggtttgatcatgattttctttatggttatgccagctatgattggtggttttggtaattggttcgtaccaattatgattggtgcacctgatatggcatttcctagaatgaataatatttctttctggttgttaccagtttcattaactttattaattttatcaatttttgctgacggccctccaggacaaacaggggtaggtggtggttggactatttatccacctttatcatctaaagcaggtcaaccaggacctgcaatggatttagcaattttaagtttacacttagcaggtgcttcatcaattttaggagcggtaaactttataacaacaattttaaacatgagaactccaggcatgacattacataagatgccattatttgcttggtcaatcttagttacagctttcttattgttattatcattaccagttttagctggtgcgattacaatgttattgactgacagaaattttggaaccgccttttttgaggcacagaccggaggagatccagtactgtttcaacatttattttggttctttggtcatccagaagtttatattttgattttaccaggatttggaatgattagtcacatcgtatctacattttcaagaaaaccagtttttggttatttaggtatggcatacgcgatggttgctattggaatagtaggttttgttgtatgggctcaccatatgtatacagttggattaagcacagatacaaaagcatactttttggctgcaacaatgattattgctgtaccaaccaggtataaaaatt

SEQ ID NO: 225690 - DNA, 1520 bp, Unknown
  Bacterial polypeptide expressing nucleotide sequence isolated from the Sargasso Sea
tatgtatacacaaacagcatctcacgaagatcaccatacaccaactggttggaaacgatgggcttattcaaccaaccacaaagatattggaactatgtatctaatatttgcaattattgcaggtgtgattggcactgcattctcagttttaatgagaatggaactgatgcatccaggtgatggaattttaggtggaaattatcatttatataacgtcttagttactggtcatggtttaataatgattttctttatggttatgccagcaatgataggtggatttggtaactggtttgttccaataatgattggtgcacctgatatggcttttcctagaatgaataatatttcattctggttactgcctacatctttcatattattaataatgtcaattttcatggatggccctccaggtcaaacaggagtaggaggaggatggacaatatatcctccattatcatctacagcaggtcaaccaggcccagcaatggattttgcaattttaagtctacacttagctggagcttcttcaattttaggtgcagtaaactttattactacaattttaaatatgagaacacctggcatgacattgcacaaaatgccattatttgcttggtcaatattagtaactgctttcttattattgttatcattaccagttttagcaggagcaattacgatgcttcttacagataggaactttggaacagctttctttgatgcacaaactggaggagatccagttctattccaacatttattttggttctttggtcacccggaagtttatattttaattttaccaggttttggaatgatcagtcatattgtttcaacattttctagaaaaccagtttttggatatttaggaatggcttatgcaatggtcgcaattggaatagttggtttcgttgtttgggctcaccacatgtatacagttggtttaagcacagatactaaagcatactttttagctgcaacgatgatcattgcagttccaaccggtataaaaatattttcatggatagcaactatgtggggtggttcgatttcattcaaaactccaatggtttgggctttaggatttatatttttatttactgttggtggagttactggagtagtccttgcgaacgctggagtggatacagcaatgcatgatacttactacgttgttgctcactttcattacgtattatctttaggagctgtgtttgcaatttttgcaggattttactattggtttggaaaaatgactggttatgagtactcagagtggatgggtcaattacacttctggttaacgtttatcggagtgaacttggttttcttcccacaacactttttaggccttgcgggaatgccaagaagatatgctgactatccagatgcttttgcaggatggaattacatttcttcaattggttcttatatttctgtaattggattagtggtattttttataaaccttgcttatgcgttttataagaaaaaggctgcagcacaaaacccat

SEQ ID NO: 225691 - DNA, 535 bp, Unknown
  Bacterial polypeptide expressing nucleotide sequence isolated from the Sargasso Sea
aatgttgtgggctgtgggctttattttcttattcactgtgggtggagtaacaggagtggttctcgcaaacgcaggaattgaccattcacttcatgatacctactacgttgttgcccatttccactatgtattatcaatgggtgcagtcttctcaatatttgcagcattttattattggtttggaaaaatgacaggttacaattattctgaattgctcggcaaactacacttctggttatccttcattggagtaaatttagtcttctttcctcaacattttttaggtctcgctggtatgcctagacgttatgtagattaccctgaggcttatgctggttggaattatatatcttctgttggtagctttatatctctagctggattagctgttttcttcattatgcttgttcatgcatttacaagaaaagaaagttgtgcagacaatccatggggagaaggtgccactacattagaatggacagtttcatctccaccgccattccatacatttgaggatttgcccgaagtaaagtag

SEQ ID NO: 225692 - DNA, 1840 bp, Unknown
  Bacterial polypeptide expressing nucleotide sequence isolated from the Sargasso Sea
aatgtcagaagaatttaacgataataaaacaattcatgcacagtcttcagaaactatttctgggggaggctcaggagttgcacctgatatagattatgtaagacctgctgaagtacctgaacaagatttgtatcatggacacagctttattactaaatgggttttttgccaagatgctaaagttataggtgtacaatattttcttcttgcaacatttacaggaattgttggtcttattctttcatggttgatgcgtttgcaattaggatttccaggagcggctggttttatgactgcagagcactattaccagtttgttactatgcacggaatgattatggtagtttattttttaactgcactctttcttggaggttttggaaattacttaattccattaatggttggagccagagatatggtctttccgtatcttaacatggtaagtttttggatgttttttattgcagttttagttttattagcaagtttttttgttccaggaggaccaacaggagccggatggacactttatccaccacaaaccattttagagggaactccaggatctggtgcaggaatattattaatgtgcttatctttaattttatttgtagctggatttactatgggaggactaaattatttaattactgttttacaagctcgtactagaggaatgacattaatgagaatgcctttaacggtttggggtatttttacagcaactgttctagcaatgttggcttttccagcgttattagtaggagcgctaatgatgagtttagataaggtacttgggacaagtttttttatgccaacaatattaaaagctggtgaagttttagaatatggaggtggaagtccaattctttttcaacacttattttggttttttggacatccagaagtttacattgttgcattgcctgcgtttggaataatttcagatttaatttcagttcattcaagaaaaaatatatttggttatagaatgatggtttgggctatcgttggtattggaggtctaagcttttttgtttgggcgcaccatatgtatgttagcggaatgaatccttggtttggatttttctttgcaactacaactcttattatagcagttcctacagcaatgaaggtttacaattggattttaactctttggagaggaaatattagaatgaatactgttatgctttggtgtcttggttttatcgtcacctttgtaaacggaggtattacaggtattttcttaggaaatgtttctgtggatgtaccattatcagatacatattttgttattgcgcactttcatatggttatgggtattgcgcctcttatggtaattatgggagcagtttatcactggttccctctagttgcgggaaaatttttagatgaaaaattaggaaaatggcacttctggcttacttttttaggagcttattcaatttatttcccaatgcactacctaggatttattggagtacctagaagatattttgaaatgtatgatagtccatacatgacttcagccgtaggaatgaacgagtttataagccttgcagctttcttagtcggcgctgcacaattcatattaatttataatattataaaaacattaaaggtaggaaagcctgctggacataatccttggcaagcttgttctttggaatggcttactccaacagttcctcctgaacatggtaattggggtgataggcttccagtagttcatagatgggcttatgactatagtgttcctggagcaaaggaagattttattactcaaaccacagcaccaagtgaagttgtgaacacaggagtagaaaaaacttaa

SEQ ID NO: 225693 - DNA, 1249 bp, Unknown
  Bacterial polypeptide expressing nucleotide sequence isolated from the Sargasso Sea
taacctaagcttttggcttttgcctatggcctttggtattttaatatcaaccttatttatgccagagggcggacctaattttggttggactttctatgctccgttatccacaacttatgcgccttcaaccgttaactactttatattttcagttcacgttatgggcgtgtcttctattttgggctcaataaatattattaccacaattcttaatatgagagctcctgggatgacgctaatgaaaatgccattatttgtatggagttggttgataacagcttatttattgatagcagttatgcctgttcttgccggagttgtgacaatgatgttaatggatattaatttcggaacaagtttctttgacgcagccgggggcggcgatccggttttattccaacatgttttctggttctttggacatccagaggtttatataatgattcttcctgcttttggtattgtctcccatataattgaaactttttcaagaaagccaatttttggatactcctcaatggtctatgctttggcttcaatcgcaattttatcttttgttgtttgggcccatcacatgtttacagtcggaatgcctctagcaggagaacttttctttatgtattcaaccatgctcatagccatacctacaggagtgaaagtatttaattgggttgcgactatgttcaggggttcaatgacctttgaaacaccgatgttattttcaataggctttgtaacactgtttactataggtggtttttcaggattaatgcttgcaatagtgccagctgactttcaataccacgatacatatttcgtggtggctcatttccattatgttctagtgcctggggctttatttggaataattgcaggagcttattattggttacctaaatggactggatacatgtatgacgaaacattaggtaagctccatttttggcttactttcatctctgtaaatataactttctttcctatgcactttgttggcttggcaggtatgcccagaagatatccagattatgctcttcaatttgctgacttcaatgcgatgataagcatgggagcgttcatgtttggaatcactcaattattgtttttgttcatagttgttaaatgcataaaatcaggaaagcaagctaaaccagaagtttgggaaggtgctggagaattaggtttagaatggaccttaagctcacctcctccttaccactcttttactgttcaaccagaagtcaaatag

SEQ ID NO: 225694 - DNA, 958 bp, Unknown
  Bacterial polypeptide expressing nucleotide sequence isolated from the Sargasso Sea
atgagctcagttattgaaagccaccatgatgatcatcatcacggccctgcaaaaggcttgatgagatggcttcttacaactaaccataaagatataggtacattatatctatggtttagttttgcaatgttcttaattggcggagcaatggcaatggttattagagccgagcttttccagcctgggatgcagatagtagaacctgagttctataatcagatgcttacactgcatggacttattatggtttttggtgccgtaatgccagcctttgtcggattggccaactggcttgtgcctatgatggttggagctccagatatggccctaccacgattaaataatttaagtttttggctacttccatttgcctttggtatcttactctcctcattatttatggaagggggagcaccaaattttggatggacattctatgctcctctctctacgacgtatgcgcctccaagtgtaaccttttttattttctcggttcacattatgggagcgtcatcaatcatgggatctattaacgtaatcgtaaccataatgaatatgagagctccaggaatggatttaatgaagatgccactctttgtatggtcttggttaattactgcttaccttcttattgctgttatgccagttctagctggtgcagtaactatgatgttaatggatatccattttggaacaagcttctttaatgcagctggtggtggtgatccggtattattccagcacattttttggttcttcggtcaccctgaggtttatattatgattttgcctgcatttggaattgtctctcacattattgagactttctccagaaagccgctatttggttattcatctatggtttgggcaatgttgtccattgcaattctttcttttgttgtttgggctcatcacatgtttacagttggtatgccattagcagctgagctttcttcat

SEQ ID NO: 225695 - DNA, 907 bp, Unknown
  Bacterial polypeptide expressing nucleotide sequence isolated from the Sargasso Sea
tatgagttatcaaaagtactatgtaccagaggatagtaaatatccaatatatatcgcaacagcactttttctattagtgatgggagcagctgggacgattaatgacttaggaaaacctgagagcaactccgtgtatatcctatattctggttttgctatttttgcaataactttatttttttggtttagagcggtgatcagagaacatattgctggcttggatagtgctcagcttcaaaaatcttttgtttttggtatgggttggtttattttttctgaagtaatgttctttgccgcattttttggagcacttttctacgtgagaaatttttcagtcccatggctcggtggtgatggcgagaaaggattggctaatatgttatgggaaggttttgaggcctcatggcctgttatgtcaactcctgatgctggatcagcatttgttcttgccgataaaagtatgagttggccaggctggggtaatgcattaaagtggttgccattgtggaatacgattgtacttcttagttcaagtgtaaccgttcactttgcccatcttgctctcaaaaatgataacaaaaaaagttttaatacctggctaggcgttactgtaacccttgctctaatatttgttgggttacaggctgctgagtactatgaggcgtatgcacattatggtttaacacttaactctggaatatatggctcaactttcttcatgctaactggattccatggttttcacgtcatgatgggtggatttatgcttgctgtgatgctttcaagatcagttttttataatcactttgatcctcataatcattttgggtttgaagcagcctcctggtattggcactttgttgatgtagtttgggtgatgttatttctttttgtttatatactttaa

SEQ ID NO: 225696 - DNA, 1709 bp, Unknown
  Bacterial polypeptide expressing nucleotide sequence isolated from the Sargasso Sea
agttttttctcaagatgcaaagattattgggatacaatatttttgtacagctacagctatgcgtttaattggtttagttttatcttggtttatgaggatgcaaattggttttcctggtttatcaattattagtgaaggtttctattatcaagccataactatgcatggcatgataatggtagtttatttcctaaccgctttatttcttggaggcttcggtaactatttgattcctctaatggttggggcaagagatatggtatttccttatttaaatatgataagttattggacctttttattggcttgtttagttttagttgccagtttctttacacctggaggacctacaggcgctggatggacgctttatcctcctcaagcaatattgggtggaactcctggtcaagagagtggaattattcttatgttagtctccttatctatatttattgttggtttcacaatgggtggtttgaattatattgtaaccattcttcaagcaagaactagaggtatgacacttatgcggatgccgctcgcagtatggggtattttcacagctacggtgttggctatgtttgcattcccagctcttcttgtaagtgcgataatgatgattttagacaagacacttatgacaagtttctttatgcccgcattagtagagatgggcgaacaattaagttatggtggtggtagcccaatcttattccaacatttattttggttctttggccatcctgaagtatatattgttgcccttcctgctttcggaatagtttctgatgttttatcagttcattcaagaaaaaatatttttggataccgtatgatggtatgggcgattgtcgcaattggggcattaagtttcattgtttgggctcatcatatgtatgttagtggtatgcatccatattttgggtttttctttgcaaccacaacattaattatagccgttccaacagccataaaagtttacaattgggtactaacactttggaaagggaatatttctctaacagttccaatgctattttgtatatcttttataataacattccttaatggaggtttgactggcttattcctcggcaatgttattgttgatgttcctttatcagatacatattttgttgttgcacattttcatatggtaatgggcattgctcctgttcaagttgtttttgctgcaatatatcactggtttcctctaatgactggccggatgtacaatgaaacacttggaagattacatttctggttcacctttctagggtcatatttaatttatttcccaatgcattacctaggattgattggagtgcctcgaaggtattatgagatgggtcaaacagaagccctatatactcaatctgcagcagatttaaatatcttcattacattaaccgctctggtaacaggctttgcacagatctttttctttataaatattttctggagtagaaaatatggcgtacctgctgagaaaaacccttggcaagcaaattcactagaatggagaactcctactatgcctcctggacatggtaattttggtaaagagcttccggttgtttatagatggccttatgattttaatgttccaggcgcaaaagatgattttgttccacaagatgtaccaaattcagatgttgaactagctgaaggttttgagggtacagaaataaaggctgaaaaaacatgag

SEQ ID NO: 225697 - DNA, 916 bp, Unknown
  Bacterial polypeptide expressing nucleotide sequence isolated from the Sargasso Sea
atgagtggcggaagttattacgtaccagatcaaagcagatttcctattttcatggctttttctttatttcttcttgttatgggcgcatcgagcacgattaacaatctagacgaccccacaaataattctgtatatatattgtatacaggatttggatgtttatttttaacaatgtttttttggttcagacaagtaattaaagagcatcttgcaggattagactctaatcaattaaaacagtcttatgtatttggcatggcatggtttattttctctgaggtaatgttttttgctgcattttttggtgctttattttatgtaagaacttttgcggttccatggttggctggagagggagcaaaaggtggggcaattgaagcaattgagttatggcagggctttgaatcaacttggcctgttatgtctacacctgatcaggggaatgagtttgtcttagcagataaaagcatggcttggccaggctgggaccatgctcttgaatggctgccactttggaatacgattgttttacttagttcaagtgtaactgtgcatattgcgcatttaggtttaaaaaatggaaatagaagaaaatttaatatttttctcggaatcactgttactttagctcttatatttgttgggctccaagctgcagaatattacgaggcttatgctcattacggattaacattaaattctggaatatacggctcaacattttttatgttaactggcttccatggattccacgttatgatgggtggatttatgctagcagttatgttggctaggtcagtttttgcaggtcattttgaagaccatgatcattttggttttgaggctgcctcatggtattggcattttgttgatgttgtttgggtaatgttatttttatttgtttatatactttaat

SEQ ID NO: 225698 - DNA, 1585 bp, Unknown
  Bacterial polypeptide expressing nucleotide sequence isolated from the Sargasso Sea
atgagcgcagttatagaaaaccatcacgatgaccatcatcatggaccagctaaaggtataaccagatggttatatacaaccaatcataaggatataggaactttatatttatggtttagttttgcaatgttcttaattggtggagccatggcaatggttataagggctgaattattttcaccaggaatgcaaattgtagaaccagaattctacaatcaaatgattactctacatggcctaataatgatctttggtggagttatgcccgcttttgttggtctagccaactggcttgttccaatgatgattggtgcgcctgatatggctcttccaagaatgaataatttaagtttttggatactcccttttgccttctttattttattatcatctttatttatggaaggaggcgctcctaattttggctggactttttatgcaccactttcaacaacttacgcgccaccaagcgttacgttttttattttttcagttcatatcatgggggcttcatcgataatgggatcaataaacgttgttgtaactataatgaacatgagagctcctggagttggtcttatgaagatgccgctctttgtttggtcatggctaattactgcttatttattaattgctgttatgccagttttagctggagcagtaacaatgatgttaatggatattcattttggaactagcttttttaacgcagctggcggaggagatccagttctttttcaacatatattttggttctttggacatcctgaagtttatataatgatcttgccagcatttgggatagtttctcatataattgaaaccttttctcgtaagcctttatttggatatgcttcaatggtttgggcaatgttatcaattgcaatattatcttttgtagtatgggcgcaccatatgtttacagttggcatgccattggcagctgagattttctttatgtgggcaacgatgctgatagcagttccaactggagtaaaagtttttaattgggttgcgacaatgtttagaggctctataacatttgaaactcctatgttatttgcatgcgcctttgttgtgctttttacaattggaggattatctggcttgatgcttgcaattgttcctgcagattttcaataccatgatacatattttgtagttgcgcactttcattatgttttagttccgggggctatattctctataatggccgcagtttattattggatacctaaatggtctggaaatatgtatgacgaaagattgggcaaattacatttttggctttcttttattggagttaatgtaacattcttcccacaacactttattggtcttgcaggaatgcctagaagatatccggactatgccctgcaatttgcagattggaatatggtttctagtgttggagcatttttatttggcttttcccagcttttatttttatttatagtagttaaaactgtaatgggtggtaaaaaagccactgatcaagtttgggaaggagcaaaggggcttgaatggactgttgcttcccctgcgccttatcacactttctctacaccaccaaaagttgactaat

SEQ ID NO: 225699 - DNA, 477 bp, Unknown
  Bacterial polypeptide expressing nucleotide sequence isolated from the Sargasso Sea
ttgatagtaatggtgcagttggaatttggccgccagaaggtattaaaacctttgatccacttgatgttccttttttgaatacattaatattgttaatgtcaggtaccacttgtacatgggctcaccatgctgttagagaaggtcatagagatcaagctattcaggcattatggtgtacagttggtcttggaattttcttttcctttatgcagggtgtagaatattacgaggcagctcatcattattttagttttactgatggaatatatccatcagtattttatatggctactggttttcatggatttcatgtaatggttggaacagcattcctagctgtttgtttgtatcgtgtttacaaaaatcattttaccccagatagacattttggtttagaagcagcagcatggtactggcactttgttgacgtagtttggctattcttgtttgtctgcgtttatgtttggggtgcataaa

SEQ ID NO: 225700 - DNA, 1006 bp, Unknown
  Bacterial polypeptide expressing nucleotide sequence isolated from the Sargasso Sea
aatgaaaatgccactatttgtttggtcatggctaattactgcctatcttcttattgctgttatgccagtgttagctggcgcagtaaccatgatgttaatggatattcactttggaactagtttttttaatgcagccggtggtggtgatccagtattattccagcacattttttggttcttcggccaccccgaagtttatattatgattttgccagcattcggcattatttctcacatcattgagacttttgcaaggaagcaactatttggttatgagtccatggtttgggcaatgttgtccatagcaattctttctttcgttgtttgggctcatcacatgtttacagttgggatgccacttgcagcagagctcttctttatgtgggcaacaatgctgatagctgttccaacaggagtaaaagttttcaactgggttgcaactatgttcaaaggctctatttcatttgagacgccaatgttgttcgcgattgcttttgttgttctttttacaattggtggattctcaggacttatgctttcaatagtgcctgctgattttcaatatcatgatacttattttgtggtagctcatttccattatgtactagttcctggatcaatattttcaataatggcagcagtttattactggataccaaagtggacaggcaacatgtatgacgaaagaatgggtagattacatttttggctttcgtttgttggtgtaaacgttacgtttttcccacaacattggatcggattagccggaatgccaaggagatatcccgactatgccctccagtttgctgattggaatatggtttcaaccgctggagcatttttgtttggagcgtcccaaatcttattcttatttattgtcctaaaaacagtactgggtgggaaaaaagctacacctcaagtttgggaaggagcaagagggttggagtggtcagttgagtcaccagctccttatcatacgttttcaacaccacccaaagttaactaa

SEQ ID NO: 225701 - DNA, 1417 bp, Unknown
  Bacterial polypeptide expressing nucleotide sequence isolated from the Sargasso Sea
attcccttatgtaaacatgattagtttttggatgttctttattgcagttgcagttttaatggctagcttttttgttccagggggtccaacgggagcaggatggacactatatcctccacaaacaatattagaaggaacaccaggtcatggtatgggaatacttttaatgcttgtatcattgtctctgtttgtaattggatttacaatgggaggattaaattaccttattacagtattgcaagcgcgaaccagaggaatgacactaatgagaatgccattaacggtttggggaatttttacagctacagttttagcaatgttggcttttccagctttattagttagcgcaattatgatgactttggataagattctcggaacaagtttttttatgccaactatcttgaaagcaggtgaagtcttggaatatggtggcggaagtcctattctttttcaacatttattctggttttttggccatcctgaagtttacattgtagcattaccagcatttggaattgtttcagatttgatctcagttcattcaagaaaaaatatatttggatacagaatgatggtttgggccatcgttggaattggcgctttaagcttttttgtttgggcacaccatatgtatgttagtggaatgaatccttggtttggatttttctttgcaacaacaacactaattatcgctgttccaacagctatgaaagtttacaattggattttaactttgtggagaggaaatatcagacttaatacagtgatgctttggtgtcttggatttatagtgacatttgtaaatggaggtattactggaattttcttaggaaatgtttcagtagatgttccactttctgatacatattttgttatagcgcacttccatatggtaatgggtatagcaccattaatggttattatgggagccgtatatcattggtttccacttgtagcaggaaaactgttagatgaaggacttggtaaatggcatttttggatcacttttttaggagcatactcaatatatttccctatgcactatctaggattcattggagtcccgagaagatattttgaaatgtatgatagtccgtatatgacctcagctgttggcatgaatgaatttattagcatggcagcatttatagttggagctgcacaatttattttaatttataatattataaaaactttaaagacaggaaaaaaagcaggacaaaatccttggaaggcaaactctttagaatggtacacttcaacagttccaccagaacatggtaacttcggtgaaagacttccagttgtacatagatggccttatgatttcagtgttccaggtgctaaagatgattttattccacaaacaacacctccgagtgaagtaattcatacaaaggtagaaaaaacttaa

SEQ ID NO: 225702 - DNA, 1332 bp, Unknown
  Bacterial polypeptide expressing nucleotide sequence isolated from the Sargasso Sea
aatgacaaaaattattgagccagataaacaaaccaatatattcagaagaccttcttcagagtatggaatctggagttggataactacagtagatcataaaaaaattgggataatgtatgggtatgctgcatttttctttttattaattggaggattagaagctttagttcttagaatacaacttgcccaaccagataataattttttaagtgcggctgaatacaatgcaatgttcaccatgcatgggaccacaatggttttcctagcaataatgccaattagtgctgcattcttcaattatctcctccctcttcaaataggagctagggatgttgctttcccaagattgaatgctcttagtttctggatttgggtttttggaggacttttcttatattcaacattcgtatttggaacagcaggagcacctgaaggaggatacctagctgaggaagttggatggcttggcaatgctccaaatggtggttggtttggatatcaacctaatgcaggttttaaatattcaccagggactgcaatggactattgggcaatcggcttacaaatacttggaatttcttctcttgtatcagcatttaatttcatcgtaacaatattaaatatgaggactcaaggaatgagattgatgagaatgcctgtatttacctggatgacttttgctgtggcttttcttcttgccttttcattaccaataattgcaattgctctcttttacgtaacttttgatagacaatttggtactactttcttcttgactgaaggtggaggagatcctgttttatggcagcatttattctggctatttggtcaccccgaagtatatattcttattcttcctgcttttggaattgtttctgaaatactacctacattttcaaggaaacctctcttcggttatcctgcaatagtttttgcaggttttggtattgcgtttatcggattcggagtctgggctcaccatatgtttgcttccgcaatcagccctgttgcgcaagctgggtttggtatctcaactatgatcatcgctgttcccacaggggtaaaaatatttaattggttaggaacaatatggggaggtaagttaaatctaaaaacccctatgttgtttgctcttggttttataggaatgtttgttattggtggtttaagtggagtaacccactcggttgttccagctgatacacaacaaactgatacgtattatattgttgcccactttcattatgttctgttcggtggtgcaatgtttgggatttttgctggtttatattattggtttccaaaaagtctggggaaaaaatgtataacgaa

SEQ ID NO: 225703 - DNA, 916 bp, Unknown
  Bacterial polypeptide expressing nucleotide sequence isolated from the Sargasso Sea
atgagcggcggaagttattacgtaccagatcaaagcagatttccaatatttatggcattttctttgtttgttcttgttatgggcgcttcaagtacaataaataatctagataatcctgagagcaactctgtgtatatattatattcaggctttgcttgtttatttttgacaatgtttttttggtttagacaggtcatcaaagaacacctcgcaggattagattctaatcaattaaaacaatcatatgtttatggcatggcatggtttatattttccgaagtcatgttttttgcagcattttttggtgcattgttttatgtaagaacttttgcagttccatggcttgctggagatggcgctaaaggagacgcaataacagcaattgagctatggcagggttttgaatcaacttggcctgttataacaactcctgatcagggatccgaatatgtgcttgctgaaaaaagcatggcatggcccggatgggatcatgccttaaagtggctacctctatggaatactattgttttactaagttctagtgtgactgtacacatagcacaccttgcattgaaaaatggcaacagaaagaaatttaataccatgcttggagtaactgttggattggctctaatttttgtgggtcttcaggctgcagagtattacgaagcatatgctcattatggattaaccctaaattctggcatttatggatctacattttttatgcttacaggctttcatggttttcatgtaatgatgggaggttttatgttagcagtaatgcttgctcgttctgtttttgctggccattttgaagaacatgatcactttggttttgaagcagcatcctggtattggcattttgtagatgtagtttgggtgatgttatttttatttgtttacattctttaag

SEQ ID NO: 225704 - DNA, 889 bp, Unknown
  Bacterial polypeptide expressing nucleotide sequence isolated from the Sargasso Sea
cagcttctttatgctgctggaggaggagatccagttttatttcaacatattttttggttttttggtcaccctgaagtttacattatgatcctccctgcttttgggattgtttcacacataattgaaaccttctcaaggaaacaacttttcggctattcttctatggtatgggcaatgctttcaatcgcaattttgtcatttgtcgtctgggctcaccatatgtttacggtagggatgccgctggctgcagagatattctttatgtgggcaactatgttaattgccgtcccaacaggagttaaagtctttaactgggtggcaactatgttccgtggctcaataacatttgaaacacctatgttatttgctgtttcatttgttgtacttttcacaattggtggattatccggattaatgctggcaattgttccagctgactttcagtaccatgatacctattttgtagttgcgcattttcactatgttttagtcccaggtgcaatattttctattatggctgccgtttattactggataccaaaatggtgcggaaatatgtatgacgaaaggcttggaaagcttcatttttggttatcgttcataggcgtaaatgtaacttttttcccgcagcattttataggtttggctggaatgccaagaagatatccagattatgcacttcaatttgctgattggaatatggtttctagtgttggagcattcttatttggattctctcagcttttattcttattcatcgtcattaaaactgttatgggtggaaagaaggctacatctaaagtttgggaaggtgcaaaaggtcttgaatggacagttgcatcacctgccccttatcatacattctcaacaccacctagggttgattaat

SEQ ID NO: 225705 - DNA, 189 bp, Unknown
  Bacterial polypeptide expressing nucleotide sequence isolated from the Sargasso Sea
ctacaggtttccacggatttcacgtaatagttggaacaatatttttagctgtttgtttatggcgaggaaaattaggtcactttactaaagaccatcattttggatttgaagcagcagcttggtactggcattttgttgatgtagtttggttattcttatttgctgcaatttatatttggggaagttaat

SEQ ID NO: 225706 - DNA, 1006 bp, Unknown
  Bacterial polypeptide expressing nucleotide sequence isolated from the Sargasso Sea
atgacaaaaataattgagccgaataaacaaagtaatatttttaaaagaccctcttctgaaacaggtatttggagttggataacaactgttgaccacaaaagaattggaataatgtatggttacgcagcgtttttctttttattaattggtggtcttgaggcgttaattttgagaattcagctttcacagcctgataacaattttttaacagctgcagaatataacgcaatgtttacgatgcatggaactacaatgatttttttggcaattatgccaatcagcgcagctttcttcaattatttgcttcctcttcaaattggagccagagatgttgcctttccaaggcttaacgctctttccttttggatatttatatttgggggagcttttctttattctacttttatttttggaactgcaggagctccggaaggtggatatcttgctgaggaagttggttggcttggatctgctcccaatggtggttggttcggttaccaaccaaatgctggactgaaatattcacctggaacagcaatggattattgggcaattgggctccagattctgggaatcgcatcactcatatccgcatttaatttcattacaacaattatcaacatgagaacaaaaggtatgagatttatgaggatgccagtatttacatggatgacttttgctgtttcgttcctacttgcattctctttgccaatcattgcaattgcacttttttatgtaacatttgatagaaaatttggcactactttcttcctcacagaaggaggtggagatccagtgctatggcaacatttgttttggctttttggtcatccagaggtatacattcttattcttccagcgtttggtatagtttctgaggttctacctacttttgctagaaaacctttgttcggttatgcagctattgtttttgcgggttttggaattgccttcataggttttggagtatgggcacaccatatgtttgcatctgcaattagtcctg

SEQ ID NO: 225707 - DNA, 1444 bp, Unknown
  Bacterial polypeptide expressing nucleotide sequence isolated from the Sargasso Sea
aatgtcagaagactttaacgataacaagacaatacaggcgcaatcatcagaaacaatttctggaggtggttcaggtttatccccagatattgattatgtaagaccagcagagataccggaacaagatctttatcatggacatagctttattactaaatgggttttttgtcaggatgcgaaagttatcggagttcagtattttcttctagcaacatttacaggaataatcggacttattctatcttggttaatgcgtttacaattagggtttccaggtcttgcaggttttatgactgcagaacactattatcagtttgtcacaatgcacggaatgataatggtagtttattttttaactgctctttttttaggtgggtttggcaattatctaattccattaatggttggtgctagagatatggtttttccatatttaaacatggtaagtttttggtcattttttgttgcggttggagttttattagcgagcttttttgttccaggaggaccgactggtgcaggatggactctttatccacctcaaaccatattagatggaacgccgggatcaggttgggggatattactgatgtgtgcatctttaatattattcgttgctggatttacaatgggtggactaaactatttaatcactgttttgcaagctcgtactagaggtatgacattaatgagaatgcctttaacagtatggggtatttttaccgcaacggttttagcaatgttggctttcccagcattattagtaggtgcactaatgatgactttagataatgtacttggaacaagtttttttatgccaacaatattaaaagctggcgaagttttagagtatagcggaggaagtcctattcttttccaacacttattttggttttttggacacccagaagtttatatagttgcattaccagcatttggaataatttcagacttgatttctgttcatgctagaaaaaatatatttggatatagaatgatggtttgggctattgttggaataggagctctaagcttttttgtatgggctcaccacatgtatgttagtggaatgaatccttggtttggattcttctttgcaaccaccactcttataatagctgttcctacagcaatgaaagtttacaattggatcctaaccctttggagaggaaacatccgacttaatactgttatgctatggtgcttaggctttatagtaacttttgtgaatgggggaattacaggaatttttttaggaaatgttagtgtggacgttccattgtcagatacttattttgttattgcgcactttcatatggttatgggtatcgctcctcttatggtaattatgggagctgtttatcactggtttcctcttgtagctggaaaatttttagatgaaaaattaggtaaatggcatttctggcttacttttttaggagct

SEQ ID NO: 225708 - DNA, 880 bp, Unknown
  Bacterial polypeptide expressing nucleotide sequence isolated from the Sargasso Sea
atttaattggttaggaaccttgtggggcggaagtattagattcaatacagcaatgttattttctttaggatttatagcaatgtttactataggaggccttagtggtgtaatgcacgcttctccgccaacagatgctcaacaacaggatacttactttgttgttgctcacttccattatgtcctttttggaggtgcactacttggtatatttagtggtatttatttttggtggccgaaattcacaggatacttcctaaatgaaaaaatcggaaagttaaatttcatttttatgctagtaggttttaacatacagtttggcccaatgcactggctaggtatggatggaatgccaagaagaatttatacttatgctgaaaatatgggatgggaaggttcaaacctagcagcaactataggtggctttattctgggtattggagttctgctatttatttataatgttatttactctatgattcataaagaggttgcgggtgcagacccatgggatggaagaacacttgagtggtccacttcgtctcctcctccagagcatgattttgatgagatacctcaagtaaaatttagagatgacttttggttcaaaaaatatccagaaacaataaaagaatactatgaacatggagaaatagaagaagatactgaagataaactttctgaaaagtctaaccatgaagatgaaatacatctacctgatatgtcttactatccttttatacttggtgtaggtatagcaattttaggagcaggatttttatctaacatatatgtaatagccattagtgtaccaatcatgatatggggcatgttgggctggtctatggagcctgttaatgaccctcatccagataatcactaa

SEQ ID NO: 225709 - DNA, 298 bp, Unknown
  Bacterial polypeptide expressing nucleotide sequence isolated from the Sargasso Sea
tggtgtcacaatccttctcggagctgcgtttacagggctgcagatatacgaatatgaccacgcaacttttggttttaaagatggcatatattcgtcgacgttctacatggctacaggcttccatggctttcatgtcttggttggaacatgcttcttggttgtatgctggtttagagcgagggccggacacttcactccagagcatcactttggatttgaggcggctgcatggtattggcattttgttgacgttgtttggctctttttgtttatctgcatctattggtggggtggctga

SEQ ID NO: 225710 - DNA, 1990 bp, Unknown
  Bacterial polypeptide expressing nucleotide sequence isolated from the Sargasso Sea
aatgacaaagattattgaaccaaaaaaacaaaggaatattttttcaagaccatcatctgaaactggtatatggagctggataacaactgttgatcataaaagaattggaataatgtatggctatgcggcattcttctttttattagttggtggacttgaagcattattattaagaattcaactatctcaaccagataataattttttgagtgcagccgaatataatgccatgtttacaatgcatggaacaacaatgatctttttggcaattatgccaatcagcgcagctttctttaattacctcttaccattacaaattggagctagggatgtagcttttccgagattaaatgcattatctttttggatattcattgccggtggaatattcctatattcaacatttctttttggtactgctggtgcgcctgaagggggataccttgacgaagaagttagcagactagcctctgctccaaatggtggatggtttggctatcaaccaaacgcaggacttaaatattctcctgggacggccatggactactgggcaattggtttgcagatcttaggaatcgcctcccttgtatctgcttttaacttcataacaacaattttaaatatgaggactaaaggcatgagattaatgagaatgccagtatttacttggatgacatttgctgtgtcgtttcttctcgctttctctttaccaataattgcaatcgcactgttcttcgtaacatttgacagacaatttggaactaccttttttcttacagaaggcggcggagatcctgttttatggcaacatcttttttggttatttggtcatccggaagtttatattttaattcttcctgcttttggaattgtttcagaagttctacctaccttttctagaaagccgttatttggatacccagcaatcgtgtttgccggattcggaattgcatttataggatttggtgtatgggcgcaccatatgtttgcatctgcaataagtccagttgctcaagcaggatttggtctttcaacaatgattattgctgttccaacgggagtgaaaatatttaattggctagggacaatttggggaggaaagctaacactcaacactccaatgttatttgcacttggctttataggtatgtttgttattggtgggttaagtggagtcacccactctgttgtaccagcagacacccaacagacagatacttattacatagtggcacattttcattatgttctttttggtggagctctattcggtatcttttcaggattgtatttctggtttcctaaggtgtggggaagaatgtataacgaaacaatggggaaaatacacttttggctaatgcttattggatttaatgtgacttttggaccaatgcattggctagggctgcaaggacaagtaagaaggacatgggtttatgcagaggaaacaaatcttggattttggaatttaattgtcactatcggtgcgttcatacttgctgttgcaatattagtatttatggcaaattggatatattctcgaagaaagggtgaaaaagctccttttgatccatgggatgcaagaacgattgaatggagtattccttcgcctacacctgtctggaatttttcaaaagcacctgaaataaaatctttggatgacttttggcatcaaaaatatggggaagatgaagatggaagagcagtaagaagagaaggcacggatgaattattgctaaaacttgaagaagaaggcttaaacccagatgaggaaattcatttaccaagcccatcttatttcccattaatacttgcctttggactcccatttttaggttatgcaataatttataaatctgttccacttgctttagttggcgtaattcttcttcttataggaggttttggttggggtacagaaccacttgaggaagaatttgaaacttcagaagaaaaccctgatgccaaggaatcttctacctatgagtga

SEQ ID NO: 225711 - DNA, 181 bp, Unknown
  Bacterial polypeptide expressing nucleotide sequence isolated from the Sargasso Sea
catggctttcatgttctaattggaacaatattcttaattgtttgccttgcaagatcgattgctggccattttaaatctgaccatcattttgggttcgaggccgctgcttggtattggcattttgttgatgttgtttggttatttttatttgcagcaatttatgtttggggctcatattaat

SEQ ID NO: 225712 - DNA, 409 bp, Unknown
  Bacterial polypeptide expressing nucleotide sequence isolated from the Sargasso Sea
aatgtatacacaaacagcatcacacgacgatcatcatacaccaacaggttggaaacgttgggcttattctacaaatcataaagacataggaacaatgtatttaatttttgcaatcgttgcaggagttattggaactgcattttcagttttaatgagaatggaattgatgcatccaggagatggaattttgggtggaaattatcatttgtataatgtgttagtgacaggtcacggattgataatgattttctttatggtaatgccagctatgattggtggctttggaaattggtttgttccaattatgattggtgcacctgatatggcattcccgagaatgaataatatttctttttggttattacctgtttcattaacattactgatattatcaatttttgctgatggc

SEQ ID NO: 225713 - DNA, 1585 bp, Unknown
  Bacterial polypeptide expressing nucleotide sequence isolated from the Sargasso Sea
tatgagtgcagttatagaaaatcatcatgacgaccaccatcacggtcctgccaaaggtataacaaggtggttgtacacaaccaaccataaagatataggaacactctacttatggtttagttttgccatgttcttaattggtggagctatggcaatggtcatcagagcggagcttttccaaccaggcatgcagatcgttgaaccagaattttataaccaaatgattacattgcatggcttgattatgatttttggtggagtcatgcctgcttttgttggtttggcaaattggctggttccaatgatgattggtgcgccagatatggcactacctagaatgaataacttaagtttttggatattgccttttgcgttttttattcttttatcttctttatttatggaaggaggagcacctaattttggctggactttttatgctccactttcaacaacatatgcaccacctagtgtgacgttctttattttttctgttcatataatgggagcttcctcaataatgggagcgataaatgttgttgtaacaattatgaacatgagagctccaggtgtttcattaatgaaaatgccactttttgtttggtcatggttaatcactgcatacttattgattgctgtgatgcctgttttggctggtgctgtgacaatgatgttaatggatattcactttggtacaagcttctttaacgcagctggaggaggagatccagttctttttcaacatatattttggttctttgggcacccagaagtttatataatgatattgccggcttttggaattgtttctcacataatcgaaactttttctagaaaacaactctttggatattcctcaatggtttgggctatgctctctattgcaattctctcttttgttgtttgggcacatcatatgtttacagtaggacttcctttagctgcagaaatattttttatgtgggcaacaatgcttattgctgttcctactggtgtaaaagtttttaattgggtagctacaatgtttagaggctcattaactttcgaaactccaatgttgttcgcgatagcattcgtcgttctatttacaatcggtggattatcaggattaatgcttgctattgttccagcagattttcaatatcatgatacttattttgttgttgcgcacttccactatgtattagtacctggagctatattctccattatggcagcagtttattattggatacctaaatggtctggaaacatgtatgacgagagattaggtaaacttcatttttggttgtcattcattggtgttaacgtgacttttttcccacagcattttatcggtttggctggcatgccaagaagatatccagattacgctttagtttttgctgattggaatatggtttcaagtgttggagctttcctatttggcttctctcaattacttttcctttttattgttattaaaactgtgatgggtggtaaaaaagcaactgatcaagtttgggatggagcgaaaggacttgaatggacagtagcttcacctgctccttatcatacattttctactccacctaaggttgattaa

SEQ ID NO: 225714 - DNA, 916 bp, Unknown
  Bacterial polypeptide expressing nucleotide sequence isolated from the Sargasso Sea
aatgagtgggggaagctattacgttccagatcaaagcagatttccaatatttatggccttctctttgtttctacttgtcatgggcgcatctagcacaattaataatttagatgatccaactagtaattcggtatacatactatatacaggttttgcatgtttgtttttgacattgtttttttggttcagacaagtaataaaagaacatcttgctggactagattcaaatcaattaaaacaatcttatgtgtatggcatggcttggttcatattttctgaagtaatgttctttgctgctttttttggagctttattttacgtaagaacattcgcagtaccttggttggctggagatggagctaagggtggagcaataacagcaattgagttatggcctgcgtttgaatctgcttggcctgttatgacaaccccagatcagggaaatgaatatgatttagctaagaaaagcatggcatggccaggctggaatcatgctctacagtggttaccactttggaatacaattgtgctcctaagctcttcatggactgttcatcttgctcatcttggtttaaaaaaaggaaacaggaaaaagtttaatgcttatctcggagtgactgtattattggcactgatttttgttggactccaggctctggaatattatgaggcttacgcacattatggccttacattgaactctggtatctatggctcaaccttctttatgctgacgggttttcatggtttccatgtaatgatgggaggcatcatgttagctgttatgcttgctagatcagtttttgcaggtcattttgaacaacatgatcattttggttttgaagctgcttcttggtattggcattttgttgatgtagtttggctgatgctttttttatttgtctatattctataa

SEQ ID NO: 225715 - DNA, 793 bp, Unknown
  Bacterial polypeptide expressing nucleotide sequence isolated from the Sargasso Sea
atgtccagcaaagatcaaaaacacgattatcacttagttgacccaagtccttggccaatttatacatcttttgcaacattaataactgccgttggttcagtttattattttcatagcaaagtgatgtgggcgatgattttaggttttgtattactcatctatggagcttacatgtggtttagagatgtggtgatcgaggcagagcatcaaggtcatcatacacctgtagttcaaatacatcatagatatggaatgactctatttattgcctcagaagttatgttttttgttgcttggttctgggcatattttgatgcaagtttgtttccatcagaatttgttggaaatgtatggccacctaaagatattgaagtttttgatccttgggacatccctttaataaatacactagttttacttttatcaggcacaacagtaacatgggctcatcatgctttacttgaggacgataggaaaagctttattcaaggtttaagcttaactgtttttttaggattatgttttaccgcacttcaagcttacgaatatcaccatgcaacatttagcttctcaggacatatctatggagcaactttttacatggcaacaggatttcatggctttcatgttgttgtaggaacaatttttttagcagtgtgtttgtggagaggaaaattaggacattttaacaaagatcatcattttggatttgaagctgctgcttggtattggcattttgttgatgtagtttggctattcttattcgcagcaatttatatttggggtagttaaa

SEQ ID NO: 225716 - DNA, 1162 bp, Unknown
  Bacterial polypeptide expressing nucleotide sequence isolated from the Sargasso Sea
atatcctccattgtcaacaagattgggcatgcaggtccttctgtagatttggcaatatttgctcttcacctagcaggagcctcttcgatattaggtgctgtcaattttattacaacaatactaaatatgagaactccaggaatgacactccataaaatgccgctatttgtttgggcaatgctgattacagctttcttattgcttttggccgtaccggttttagcaggcgcaataactatgttacttacagatagaaattttggtactacatttttcaatccagctggaggaggtgatccagttttatttcaacatttattttggttttttggacatccagaagtttatataatgatactaccagcattcggtattgtaagtcaggttatttcaactttttctagaaagcctgtttttggttatttaggaatggtatacgcaatggttgcaattggtttcattggttttattgtatgggcacaccacatgtttaccgtcggaatgagtgcagatttaagagcatatttcatgcttgctacaataattattgcagtaccaaccggtgtaaaaattttcagttggatagcaacaatgtggggtggatctctaacctttgaaacaccaatgttatttgctattggttttgtatttctttttacacttggaggggtaactggagttattctagctaatgctggaatagatactgttatgcatgatacatattacgttgttgcgcacttccattatgttttaagtatgggagcaatgtttggaatatttgctggtatttattattggttcggtaaaatgtctggtcgaaaatataatgaattcttcggtaaacttcatttttggttattctttattggagtaaatgtaacattttttcctcaacatttcttaggtctagctggtatgcctagaagaattccagattatccagatgcatatgcaggttggaacttagtttcaacttatgggtcatatatttcatttgcctcgacactaatatttttctttgcaatagtttatgcactgttttttggtaaaaaagaagtgtctaatccttggggagaaggagcagatacactcgaatggaccttgtcatccccaccaccttttcaccagtttgagactctacccaaatttaaagaataaa

SEQ ID NO: 225717 - DNA, 850 bp, Unknown
  Bacterial polypeptide expressing nucleotide sequence isolated from the Sargasso Sea
tatgtctgataactcttcatcaacaggacaaaaacatccttatcatttagtagatccaagtcctttaccattcctatcttcaattgcagccttagcaatggctgctggactggttttctatatgcactacgaaacaacttggttgctaatattaggtactattggattattaactatcatgtttatttggtggagagatattatcaatgagtcaacttttcaaaaagttcatacacctgtggtagagttaggattaagatatggaatggctctattcattgcctctgaagttatgttctttgttgcattcttttgggctttctttgatgcgagtctaactccaaaacttccgattgaggaatatacagaaatttttgatacagacggagctgtaggtgtctggcctcctgaaggaataaaaacatttgatccactggatgttccttttttaaatacattaattttattaatgtctggaacaacatgcacatgggcacatcatgcagtacgtgaaggtcatagagatcaagcaattcaggctttatggatcacagttggcttgggagtgttttttacttttatgcaaggagtagaatattacgaggcagccttacactactttagtttcactgacggaatatacccttcagttttttatatggccactggctttcatggctttcatgtaatggttggaacagcatttttggccgtgtgtttatttagagtatataagaaccattttactccagatagacattttggtttagaggcagcagcttggtattggcattttgttgatgttgtttggctattcctttttatctgtgtttatgtttggggtgcataa

SEQ ID NO: 225718 - DNA, 1840 bp, Unknown
  Bacterial polypeptide expressing nucleotide sequence isolated from the Sargasso Sea
atgtcagatgaattaaatataaataaaaagagaaacaatcaaataaaaacaaaatcttctactgcttcaggtagaggagaaacagatattgattatgtaaggccttcagaaataccagaacaagacctctatcatggacatagttttataactaaatggattttttgtcaggatgctaaagttataggagttcagtatactcttactgcagtattcactggagtagtgggtttaattttgtcttggatgatgcgtatgcaacttggttttccagaactatttccttttttaacagctgaaacatattatcaaatggtaacaatgcacggaatgataatggtagtgtacttattaactgctctatttcttggagggtttggaaattatttaattcctttaatggttggagcaagggacatggtgtttccttacgtaaacatgataagtttttggatgttttttgtagctgttgtggttttgatggctagcttctttgtaccaggaggaccaacaggatcaggatggactttatatcctcctcaggcaattttagaaggcactccaggttcaggttatggaattttattaatgttaatatctttatctttatttgtaattggttttaccatgggaggtttgaactatgtaattactattttacaggcaagaactagaggaatgagcttgatgagaatgcccttaactatttggggaatttttactgcaactgttttagctttattagctttcccagctttgctcgttagttcaattatgatgacattagataaagttttagaaacaagcttttttatgccaactattattaaagcaggggaggcactttcttacgatggtggtagccctatacttttccaacacttgttttggttttttggtcatcctgaagtttacatcgttgcattacctgcttttggaatagtctctgacctgatttcagtacactctagaaaaaatatttttggatacaggatgatggtttgggcaattgttggaattggtgcactaagcttttttgtatgggctcaccatatgtatgtaagcggtatgagtccttggtttggtttcttttttgcaactactacacttattatagctgtacccaccgctttgaaggtctacaactggatacttacactttggagaggaaatataagaataaatactgtgatgcttttctgtctaggttttatagtcacttttgtaaatgggggtataacaggtattttcttaggaaatgttgctgtagacgttccattgtctgatacctatttcgtaatcgctcactttcatatggtaatgggaatagctcctcttatggtaatttttggagccatttatcattggttccctttagttactggaagactaatggatgaaaaattgggtaaatggcatttttgggtaacttttttaggggcttactctatttattttccaatgcactatttaggtttcattggtgtaccaagaagatactttgaaatgtatgacagcccatacatgacttcagctataggaatgaatgaatttataagtgttgcagcttttatagtgggagcggctcaatttatcttcttttataaccttgtaaaaagcttgagattaggcaagccagcaggtaagaacccatggaaagccaactctttagaatggcttacacctgatgttccacctacacatggtaactggggtgaaaaacttccggtagttcacagatgggcatatgattatggtgtacccggagcaaaagaagactatattcctcaaacaactgcaccaagtgaagtaaaagatgcagaagtagaaaaaacttaat

SEQ ID NO: 225719 - DNA, 754 bp, Unknown
  Bacterial polypeptide expressing nucleotide sequence isolated from the Sargasso Sea
aatggctaataaatcaacaacagggcagaaacatccatatcacttagttgatccaagcccacttccatttttatcatcaatagctggtcttgcaatggctgctggtcttgtattttatatgcattatggaacttcttggcttctcattctaggtactattggtttactaactattatgtttctatggtggagagacgtaatcaaagagtcaacttttcaaaaggttcacacacctgttgtagaacttggattaagatatggaatggcactttttattgcttcagaagttatgttctttgttgcttttttctgggctttttttgatgcaagcttaacacctaaattacctatagaagaattttcagaaacttttgatagtaatggtgcagttggaatttggccaccagaaggtattaaaacctttgatccacttgatgttccttttttaaatacattaatattattaatgtcaggtactacctgtacatgggctcaccatgctgttagagaaggtcatagagatcaagccattcaggcattatggtgtactgttggtcttggaattttcttctcctttatgcagggcgtagaatattacgaggcagctcatcattattttagttttactgatggaatatatccgtcagtattttatatggctactggttttcatggatttcatgtaatggttggaacagcatttcttggctgtttgtttgtatcgtgtttacaaaaatcattttactccagatag

SEQ ID NO: 225720 - DNA, 1084 bp, Unknown
  Bacterial polypeptide expressing nucleotide sequence isolated from the Sargasso Sea
catgcataaaatgccactttttgtgtggtctgttttagtaaccgcttttttattacttttgtcccttcctgttttagcaggagcaataacaatgttgcttacagacaggaacttcggaacgacattttttgaccctgcgggtggcggtgatccaattcttttccaacatcttttttggttttttgggcatcctgaggtttatattctgattcttcccggttttggcatggttagccatattatatctactttttcaaaaaaacctgtatttggttatttgggtatggcatatgccatggttgcaattggtcttataggttttattgtatgggcgcatcacatgtatacggttggtttaagtgtaaacacacaagcatactttgtcgcggcaacaatgatcatcgcagttccaacaggaattaaaatcttttcgtggattgcaacaatgtggggtgggtcaattgaatttaagactcccatgttgtgggcgattggtttcatctttctcttcaccattggaggtgtaactggagtagttctggctaatgccggtgttgatagatcttttcacgatacatattatgttgtagctcacttccactatgttctctcaatgggtgcggtgtttgcaatttttggtgcatggtactattggtttccaaaaatatctggctacatgatatctgagtttgttggtaaaacgcatttttggctgacttttattggtgttaatttaatatttttcccacagcatttcttaggattagcgggtatgccgagacgttatgtagactatccagatgcatttgcaggttggaattttgtatcatcaatgggttcatacatttcatcatttgcagtcttagtttttctatttggagtgtatctcgcatttgcaaggaaggtacctgcaggtgataacccctggggtgagggagtgtcaaccttggagtggacattgtcttcgccaccaccatttcatcagttcgaggatttacctgaaccagttgatttcggttctttcatggcgccagactcaccgcttcagaaagcatcagctattaccagggatgctgatcattag

SEQ ID NO: 225721 - DNA, 1210 bp, Unknown
  Bacterial polypeptide expressing nucleotide sequence isolated from the Sargasso Sea
ttttttgttcaggaggaccccaggttctggctggacactttatccacctcaagcaattttagaaggaacaccaggatcaggtgctggtattcttttaatgcttatttcattgtcactttttgtaattggtttcaccatgggtggattaaattatctaataactgttttacaagctcgtactagaggaatgacattaatgagaatgccattaacggtgtggggaatttttacggcaacggtattagcaatgctggcttttcctgctttattagtaagctcaataatgatgacattagataaagtattgggcacaagtttttttatgccaacaattttaaaagcaggagaggttttagaatatggaggaggaagccctattcttttccaacatttattttggttttttggccatcctgaagtctatattgttgctttacccgcatttggaatagtttcggatttaatctcagttcattctagaaaaaatatttttggttatagaatgatggtttgggcaattgtaggtattggagctctaagttttttcgtttgggcacaccacatgtacgttagcggaatgaatccttggtttggatttttctttgcaacaacaactcttataatcgcggtaccgacggcaatgaaagtatataattggattttaactctatggagaggaaatattagaattaatactgtgatgctatggtgtcttggttttatagttacttttgtaaacggtggaataactggaattttcttaggaaacgttactgtcgatgttcctttatctgatacgtattttgtaattgctcacttccatatggtgatgggaattgcacctcttatggtaattatgggggcggtctatcattggtttcctttagttgctggcagaatgttgagtgaaaaattagggaagtggcatttttgggtaacttttttaggagcatactcaatatatttcccaatgcattacttaggttttattggagttcctagaagatattttgaaatgtacgatagtccatatatgacttctgctgtaggtatgaatgaatttataagtcttgcagcatttttggttggagcagctcaatttattttaatttacaatataattgtgagtttaaaaatgggtaaaccagctggaaaaaatccttggaaagcaaattcactagaatggcatacatctactgttcctcactag

SEQ ID NO: 225722 - DNA, 1630 bp, Unknown
  Bacterial polypeptide expressing nucleotide sequence isolated from the Sargasso Sea
aatgagcaaagcaactgaagttatttcgccagatacctctgcgcctcatgacggtcacctacatgatgaccatgaacaccacgatcatattcctaaagggataacgcgttggttgtttaccactaaccacaaagacataggcacactttacctgtggtttgcctttattatgtttttagttggtggtgcgatggccatggtgatccgcgctgaactattccaacccggtctacaaattgtagagccaaacttctttaaccaaatgactacggtacacgggcttatcatggtatttggtgcagtaatgccagcctttactgggctcgcaaactggcttattcccatgatgatcggagcccctgacatggcgttaccgcgcatgaataactggagcttctggattttaccaggcgcctttctcattctattgagctcgctctttatggaaggcggcggccctgcttttggatggactttctacgcgcccctttcaacgacttacagtggcgattcgacagcgttgtttgtgttctctgttcacatcatgggtatttcatccattatgggtgcgattaacgtgattgtgaccatctttaatatgcgtgcgccaggcatgacctggatgaaaatgccgctgtttgtatggacgtggcttatcacggcattcttgctgattgcggtaatgccagtgctcgccggtgcggttaccatggtgttaactgataagttctttggcacgagcttttttgatgctgctggtggcggcgacccggttatgttccagcatattttctggttcttcgggcaccctgaagtgtacattatgatcttgcccgctttcggcattatctcgcaaattgttcctaccttctctcgaaagcagctgtttggatacgcgtctatggtgtacgccacggcgtcgattgcgctgctctcttttgttgtatgggctcaccatatgttcaccacgggcatgccggtgtacatggaaatgtttttcatgtttgccaccatgcttatctcggtgcctactggcgtgaaagtgtttaactgggtagcgaccatgtggcgcggctcactgagcttcgaaatgccaatgatgttcgctattgcctttattgtgctgttcaccattggtgggttgtcagggctaatgttggcgatcacgcccgtggacttccaatatcacgacacttacttcgttgtagcccatttccactatgtactggtaactggcgcggtcttttccatcatggctgcggtgtattactggttgcctaaatggacgggaaaaatgtatgacacaaccttagctaaatggcatttctggtgctcattggtatcggtcaatgtgttgttcttccctatgcactttgtgggtttggctggtatgccacgccgtattcctgactatgcattgcagttcgctgattttaataaatggataagcctgggtggttttgcattcggtttatctcagctcatctttcttgccctgcttatcaaggcatgcaaaaagcaaggtgagccggtatcagcgcaagtttgggacggcgcagaaggattggaatgggaaattccatcacccgctccttatcacacgtttgaaacgccacctgtcgttaagtaa

SEQ ID NO: 225723 - DNA, 648 bp, Unknown
  Bacterial polypeptide expressing nucleotide sequence isolated from the Sargasso Sea
cgtggtttatattttctgaagtaatgttctttgcagctttctttggggctttgttttacgtaagatctttcgcagttccgtggttagggggcgaaggagaaaaaggccttgctaatatgctgtggcaagattttgaagctacgtggccactaataaatactcctgatggaggtaaagcttttgtcatagctgcaaaaagtatgagttttccagggtgggaaaatattagccactggctacctctatacaacactattgtattgctgagttctagtgtgacagttcactttgcacatcttggcctgaagaaaggaaacaaaaaaacattcaatatttggcttggtattacagttttactcgctctaatttttgttggccttcaagcagcagaatactatgaggcttatgagcattttggacttactctaaattcaggaatttatggatcaactttctttatgttgaccggattccacggatttcatgtaatgttaggcggccttatgctcgctgttatgtttataagatctgtattttatggccactttaatgagcacaaacatttcggctttgaagccgcgtcatggtattggcattttgtagatgttgtttgggttatgttgttcctatttgtttatattttataaa

SEQ ID NO: 225724 - DNA, 1102 bp, Unknown
  Bacterial polypeptide expressing nucleotide sequence isolated from the Sargasso Sea
aatgctagcatttccagctcttttggtgagctcaataatgatgaccttagacaaggttcttggaacaagtttttttatgccaacaattttaaaggctggcgaagttttagaatatggtggaggaagccctattttatttcaacacttattctggttctttggtcatcccgaagtttacattgttgcacttccagcttttggaatagtttctgacttaatttcagttcatgctagaaaaaatatttttggctatagaatgatggtttgggcaattgtaggaattggtgcgttaagtttcttcgtgtgggcacaccatatgtatgttagtggtatgaacccttggtttggtttcttctttgcttcaacaactctaattattgcagtaccaacagccatgaaagtctacaactggatattaactctttggagaggcaacattagaattaatacggttatgttatggtgtcttggatttatagttacttttgttaatggaggaattacaggaatattcctaggaaatgtgactgtagatgttccattgtctgatacttactttgtagttgctcactttcatatggtaatgggaatagctccacttatggttatcatgggcgcagtatatcattggtttccactagtatcaggaagactgttaagtgaaaaattaggtaagtggcatttctggttaactttcttaggagcttactcaatatacttcccaatgcactacttgggctttattggggtgcctagaagatattttgaaatgtatgacagcccatatatgacttcagcggttggtatgaatgaatttataagtttagcagcgtttatagttggtgctgctcagttcattttaatttttaatgtaataaaaactttaaaaaatggaaaaaaagcaggaaaaaatccttggcaggccaactctttagaatggcatacatcaacagttccacctgaacatggaaactttggggatagattaccggttgttcacagatgggcgtatgactacagtgtgcctggagcaaaagaggactatatacctcaaactacaccaccaagcgaagtagctcatactgaggtagaaaaaacttaa

SEQ ID NO: 225725 - DNA, 1498 bp, Unknown
  Bacterial polypeptide expressing nucleotide sequence isolated from the Sargasso Sea
atgtatagtcaaacagcagctcacgatcatcatactccgaccggatggaaaagatgggcctattctacaaatcacaaagacattggaaccatgtatttaatctttgcaatcattgctggattaattggaacagctttttcagtgctaatgagaatggaattaatgcatccaggcgatggtattttaggtggcgattatcatctttataatgttcttgttactggacacggactaattatgattttttttatggtgatgccggctatgattggtgggtttggaaattggtttgtaccaattatgattggtgcgcctgatatggcattcccaagaatgaataatatttcgttttggttattaccagtctcttttattttattattatcatctatttttgtagatggacctcctggagctcaaggagtgggtggtggatggacaatttaccctcctttatcatctaaaactggacaaccaggaccagcaatggatttggcaattttaagtcttcacatagcaggagcttcatcaattttaggtgcagtaaattttataacaactattttaaatatgagaactccaggtatgacacttcataaaatgccattgtttgcttggtcaatattagtaacagcttttttattgttattatctttacctgttctagcaggagcaattacaatgttattgactgatagaaatttcggcacagctttttttgaggcacaatctggtggtgatccaatgttatttcaacatttgttttggttttttgggcaccctgaagtttacattttaatccttcctggttttggaatgattagccatattgtttctactttctcaagaaaaccagtttttggatatctaggaatggcttatgcaatggttgcaataggaattgtaggttttgttgtgtgggcacatcatatgtatactgttggattaaatacagatacaaaagcgtacttcttagcggctacaatgattatagcagtgccgaccggcattaaaattttttcttggatagcaacaatgtggggtggatccatttcttttaaaaccccaatggtttgggcattaggttttatctttttattcacggtaggtggtgtaacgggtgttgtgcttgcaaatgctggagttgatacagcacttcatgatacctactatgtggtagcacactttcattacgttctttctcttggagcagtatttgcaatatttgcaggtttctactattggtttggaaaaatgtcaggctatgaatactcagagtggttaggacagttgcatttctggcttacttttataggtgtaaacttaattttctttccacaacactttttaggattagcgggtatgcctagaagatatgcggattatccagatgcttttgcagattggaattatatatcatctgtagggtcctacatttcaattgttggactaggagtatttttaattaatttgatttacgctttcgcaaaaaagaaga

SEQ ID NO: 225726 - DNA, 1261 bp, Unknown
  Bacterial polypeptide expressing nucleotide sequence isolated from the Sargasso Sea
atgagcacaatagtagaaacacatgatcatggacatcatggaccagctaaaggattaactcgctggttatttacaactaatcacaaagatataggaactctttatctttggtttagttttattatgttattcataggcggcggaatggctatggttataagggctgagctttttcaacctggccttcagatagtgcagcctgaattctttaatcagatgaccacaaatcatgggttgattatggtttttggtgtcatcatgcctgcttttgtggggctagctaattggatgttgcctatgcaaatcggtgctccagatatggccttacctcgtctaaacaatcttagtttttggttattaccaatggcttttggtatcttaatatcaactctttttatgccagaaggaggacctaactttgggtggactttctatgctccactatccactacttatgctccctcaacagtcaatttctttatattttctgtccatataatgggcgtgtcttcaatacttggatctataaatattattacaactatttttaacatgcgagctcccggcatgacgttaatgaaaatgcccttgtttgtatggagctggttaataaccgcttatttactcatagctgttatgcccgttttggcgggagtagtaactatgatgttaatggacatcaatttcggaactagcttctttaacgcagcaggtggaggggatccagtactgtttcagcatgtattctggttttttggacaccctgaagtttacataatgattcttccagcttttggtattgtttctcatataatagaaacattctctagaaaaccaatttttggctattcatctatggtttatgcaatggcctctatagccatcttatctttcgtggtttgggcgcaccatatgtttactgttggtatgccgcttgctggacagttattctttatgtactcaactatgttgatagctataccaacaggagtgaaggtatttaattgggtagcaaccatgttcaggggctcaataagttttgaaactccaatgttattttctattgcttttgtagcattatttacaataggaggattttctggactaatgctagctatagtgccggctgatttccaatatcatgatacatattttgtagtggcacactttcattacgttcttgttcccggagcattgtttggaataatagctggagcttactattggctgcctaaatggactggtaatatgtatgatgaat

SEQ ID NO: 225727 - DNA, 2014 bp, Unknown
  Bacterial polypeptide expressing nucleotide sequence isolated from the Sargasso Sea
atggccgcccccaccgtgtcacccgcgcaagccgacccgttacgcctgtcgcgcacgttgcgcgtcggccgtatcgaagcaggcagtgctgaggagaagcgcttgcgggagctatgggaagcgcggccgggctggcgcggctggttctcgacggtcgatcacaagaccattggtctacgctatctggtgaccgcctttctgttcctgctggcgggcggcattgaagcgctgctgatgcgtctgcaactggcgcgccccaacgcgacgctgctcacgcccgaacaatacgaccagctgtttacgatgcacggcgtgacgatgattttcctgtacgcgctgcccgtgctgtccggcttctcgaactatctgtggccgctgattctcggcgcgcgcgacatggcgtttccacgcctcaatgcattttcctattgggtgtttgtgttcgcgggcctgtttctctatgcgagctttccacttggcgaagcgccgaatgcgggctggttcaactacgtgccgctatccggcctcgagtacaacacgggacccaacatcgacgtgtatgcgctcgggatggtgctgctcggcatttcgaccaccgtcggttcgatcaactttgtcgtcacgctgctgcgaatgcgtgcgccgggtatgtcgctcgaccggctgccggtgctggtgtggggcacgttgaccgcgtcgggcgccaacctgctggcagttccttcggtcagcctggcgttttttctgctttggctggaccggcgcgtagggacccatttctttgacgtgctcaacggcgggcggcctttgctctggcaacacctgttctggattttcgcgcacccatgggtgtacgcggttgtgttgccggcaatgggtatcgtctccgacgcgttgccggtgttttgccgcagaccgctggtcggctacgggccggtggcgatctccactgtggcgaccatgctggtgggttttgtcgtgtggatccatcatatgtttgcaactggcattccgccgctcgcgctgtcatttttcggctcggccagcatggtgatcgcggtgcccagcgcggtcgcgacattcgcatggatcgcgacgatctggacgggcaggccggtcatgcgtgtgccgttcctgttcttcgccggctttgtattgctgttcgtcgtgggcggcgtgtcgggcgtgatgacggccgccgtgccgttcgactggcaactgaccgatacgtatttcgtggtcgcgcatctgcactacgtgctgctcggcattaacgtgtttccggtgattggcggaatctacttctggtttccgaaattcaccggccggatgatgagcgagcggcttggcaagatcggcttctgggtgatgttcgtcggtttcaacgtggcgttttttccaatgcatatcgccgggctgttgggtatgccgagacgcatctatacctatccgcccgatatgggctggaataccgtgaacatggtgacgtcgctcggttcgttcgtgttcgcgttcggcgtgctgattttccttgtcgatctgttgtatagcatcaggcatggtgcgattgccggcgacaacccgtgggatgcgccgacgctcgaatggtccgtttcgtcgccgccgccgccgtataacttcgcggtgctgccgttcgtcgcgagccggcacccgctgtgggaagggcgcatggaggaggggacggccggcgaggcgccacgtcaacgttcgaagctcgatgaagggttcctgctaggcgaaggccgcgaggcgctcggcaccacggcgctggaaggcagaccggatgtgattctgaaaatgccggacgactcgtatgcgccgttctggctcggcctgttcgcgacgctggtgttcgccgggctcgcgctgcgcgccgggatttttaccgcggcggcgctgctcgcctgtgcggtcaccatcgtcgtgtggttgtggcccgaacgcgcgctgatccagcgcgagccgcagaccgtgatcgacgcgggagactgac

SEQ ID NO: 225728 - DNA, 793 bp, Unknown
  Bacterial polypeptide expressing nucleotide sequence isolated from the Sargasso Sea
atgtcagcagaaaaaccaaaacacgattaccatttagttgacccaagtccttggccgatctatgtttcatttgcaactttagtcttagcttttggagcagtttattactttcactctaaagccctttggttacttttgattggttttgcgttagtagtttatggtgcatttatgtggtggagagatgttatagaagaagcagaacatcaaggtcatcatactccagtagttcaaattggacacaggtacggtatgacattatttatcgcctctgaagtaatgttttttgttgcttggttctgggctttctttaacgctagtttatttccacctgactctataggtggtatatggccgccagcagatataaaaacttttgatccttgggatatcccattaatcaatactctaattttattgttatcaggaactactgtaacttgggcgcatcatgcaatgttagaaaatgacagaaaaggattagtaaatggtttgatcgcaacagtatttttaggatttatattttcttgttttcaagcttacgaatatcatcatgcaacatttactttagatggtggaatttatggttccacattttatatgtcgactggttttcatggttttcatgtaattgtcggaacagtttttcttgcagtttgtttgtttcgatcaatgagaggccactcgacgccccaacaccattttggatttgaagcagcagcctggtactggcattttgttgacgtagtttggttattcttatttgctgcgatctatatttggggaagttaat

SEQ ID NO: 225729 - DNA, 1606 bp, Unknown
  Bacterial polypeptide expressing nucleotide sequence isolated from the Sargasso Sea
atgtcagcaacaactgcagatcacgagcatcatcaaaatcctacaggttggaaaagatgggcttactcaacaaatcataaagatataggaacaatgtatcttatctttgcaattatcgctggaataattggatctgctttttcagttttaatgagaatggaactaatgcatccaggtgacggaattcttggaggtgattatcatttatataatgtgttagtaactggccatggcttaatcatgattttctttatggtaatgccagcaatgattggtggatttggaaactggtttgttccaattatgataggcgcaccagatatggcgttcccaaggatgaataatatctctttttggctattaccagtcgccctaattttattgttagtatcgatttttgtcgatggccctccaggcgcaaaaggagtgggaggaggctggacgatttatccacctctgtcatcaaaaactggacaaccaggcccagcaatggacctagcaattctaagtttgcacgttgcaggagcttcatcaatcctaggagcaattaactttatcacgacaattttaaatatgagaactcctggcatgactttacacaaaatgccattattctcttggtcaatcttagtgactgcatttttacttttattatcattgccagttttagcaggggctataacaatgcttctaacagatagaaattttggaactgctttttttgaagcacaaacaggtggagatccggttttattccaacacttattttggttttttggacatccagaagtatatattttaattttaccaggattcggaatgattagtcatattgtttcaactttttcaagaaagcctgtatttggttatctaggaatggcttatgcgatggtggctattggagtagttgggttcgttgtttgggctcaccacatgtacactgttggacttgacacagatacaaaggcctatttcttagcggcgacaatgattattgcagtcccaaccggaattaagattttttcttggatagcaacaatgtggggtggctcgataagctttcagactcctatgctttgggctattggctttattttcttattcactttaggaggagtaactggagtagttctggcaaatgcaggtgttgatacagcacttcacgatacttattatgttgttgcgcatttccactacgtattatcaatgggcgctgtgtatgcaatctttgcgggattttattattggtttagtaaaatgacaggttatgaatactcagaatttttgggaaaactacatttttggctgacgttcataggggtaaacttaatattcttcccacaacatttcttaggattagcaggaatgccaagaagatacgctgattatccagacgcatttgctggttggaactatatatcttcaattggttcatatatatctattataggtttagcagtatttttattaaatctattgtatgcctttatgaaaaagaaaaaagcagaaccaaatccatggggagaaggagcaacgactctagaatggacagtgtcatcaccgccaccattccatacttttgaagagctacctaaagtaaagtaaa

SEQ ID NO: 225730 - DNA, 804 bp, Unknown
  Bacterial polypeptide expressing nucleotide sequence isolated from the Sargasso Sea
taatacttcctgcattcggtattatatcgactataattcctgcattctctagaaaaaaactgtttggatacgactcaatggtatatgcgactgcttcaattgctttactatcatttattgtttgggcgcaccatatgtttacggtcggaatgccacttgccggtgaaatattttttatgttcacaacaatgctcatagctgtgcctactggtgtaaaagtttttaactgggttgcaacaatgtggagagggtcaatgacttttgaaacacccatgctgttttcactagcttttattattctattcaccattggaggtttctctgggttgatgcttgcaataactcctgcggatttccaataccatgacacatactttgtagtggcacattttcactacgttcttgtccctggtgcgatatttgctgttatagcagcagtatattactggattcctaaatggacgggaaaaatgtacaacgaaacacttgggaaagttcatttctggatgacaacaatatttgtgaatattaccttcttccctatgcacttcgttggattagctggtatgccacgaagaatacctgattacgctgttcagtttacagacttcaatatgattgcatctataggtgcatttggctttggattatcccaacttcttttcgtgtacatactatttcaaacacttagacagcctgtatcagcagctgataaatcttgggaaggcgctgagggattagagtggacattaccttctccagcaccatatcattcatttgatacaccacctaaggttgattaat

SEQ ID NO: 225731 - DNA, 1147 bp, Unknown
  Bacterial polypeptide expressing nucleotide sequence isolated from the Sargasso Sea
tgccacttacgattttgggctatcttcatagcaacgatactcgctttattggcgtttccagcactgttagtaagcgcaatcatgatgttgttggaccgacttcttgagactagtttctttatgcctgcgatcatctctgctggcggccagaccgattacgatggtggtagcccggtgctattccaacacctattttggttcttcggacaccctgaggtgtatatcgtagctcttcctgctttcggtcttgtctctgaaatattgagtgttcatgcacgaaaggcgatatttggataccgaatgatggtttgggcgatcgtagcgattggcgcattgagcttcatagtatgggcgcaccacatgtatgtgagtgggatgaatccttattttggattcttttttgcgacgacaacgctgattattgcggtgcctactgcgattaaagtttataactgggtattgaccttatggcggggcaacatcaagttgactgtccccatgttgttcgcaattggcttcattttcacattcattaatggtggtttgactggtttgttcttgggtaatgtcaccatcgacttgccgctttctgacacctactttgtggttgctcatttccatatggttatggcggtctcgccagtcttggttgtttttggggcaatctatcattggtatccaaaaatcactggacgcatgtttaatgacaagctaggtagaattcatttctggttcaccttcgtgggctcctatgcgatttattacccgatgcactacctcggcctagaaggcatgccaaggcgttatttctcttacggagacactgagtttatctctgcgtcatctgcagacttgaatgtggcgatttccatcgcggcaatttttgttgcagcttcgcagatcttctttttctggaatatgatccatagcctctttaaaggcgaaaaggcagaccctaacccgtggggtgcgaccactttagagtggcgaactcctcagactcctccaggtcatggaaacttcgatgagcttccattggtttatcggtgggcatacgattacagcgttccaggatacgagcaggattttattcctcaagacgtgtcgccggctgaagccgaaaaaatggccaaacgggttgaataga

SEQ ID NO: 225732 - DNA, 1786 bp, Unknown
  Bacterial polypeptide expressing nucleotide sequence isolated from the Sargasso Sea
aatgtctgatgctataatcccagaaagagaagttgaggagcaggaactctatcatgctaagagttggtggactgaaaaggttttttctcaagatgcgaaaataattggtatacaatatttttgtactgctacagctattgctttaattggtttagttttatcatggtttatgagaatgcaaataggttttcccggcctctcaatcgttagtgaaagtttttattatcaagctataactatgcatggaatgataatggttgtttatttcttaacagccctatttcttggaggatttggtaattatctaattccacttatggttggcgcaagagatatggtttttccttatttgaatatgataagctattggacctttttattggcttgtttagttctagttgctagtttcttcactcctggcggcccaactggcgctggatggactttatatcctcctcaagcaattttgggaggaacacctggtcaagaaagtggtattattcttatgctgatttctttatcaatttttattgttggttttactatgggaggtctaaattatattgtaaccatacttcaagctaggacaagaggaatgacacttatgagaatgcctttggcagtttggggtattttcactgcaacagttttggctatgtttgcctttcccgcacttcttgttagcgcaataatgatgatattagataaaaccctgatgacaagtttctttatgccatcattggtggaaatgggagaacaattaagttatggtggtggaagcccaattcttttccaacatttattttggttctttggacatcctgaagtctatatcgttgcacttcctgccttcggtttggtgtctgatattctctctgttcatgctagaaaaaatatctttggttatcgtatgatggtttgggcaatagtagcaatcggcgctctaagttttattgtatgggcccatcatatgtatgttagtggaatgcacccctattttggatttttctttgctacaacgacattgataatagccgtacccacagctattaaagtatataattgggtactaactctttggaagggtaacataacattaaccgtgccaatgttattttgtatatctttcattataacttttttgaatggtggtctcacaggtctatttcttggaaatgttatagtggatgtacctctttctgatacatattttgtagtagctcattttcatatggtaatgggtattgcgccggttcaggttgtttttgcagctatttatcattggtttcctctaatgactggtcgtatgtataacgaaacgctgggaaggttacatttttggtttactttcttaggatcttatttgatttatttcccaatgcattatcttggattaattggagttccaagaaggtattacgagatgggtcaaacagaagctttgtatacccaatccgcagctgatttgaatattttcataactttgaccgctcttgttacaggttttgcacaaatcttcttcttcattaatatgttctggagtagaaaatatggtgttcctgcagaaaaaaatccatggcaagcaaattcacttgaatggcgaacaccttcaatgcctccaggacatggaaattttggtaaagaacttccagttgtttaccgatggccttatgactttaatgttccaggggcgaaagatgattttgttcctcaggatgttcccaattcagaggttgagttagccgaaggttatgaagggacggagattaaggctgaaaaaacatga

SEQ ID NO: 225733 - DNA, 1060 bp, Unknown
  Bacterial polypeptide expressing nucleotide sequence isolated from the Sargasso Sea
agaactccaggcatgactttacataaaatgcctttatttgcttggtcaattctggttacagcgtttttattattgttgtctttacctgttctagctggagcaattacaatgcttctaactgatagaaattttggaacggctttttttgatgcgcaaactggtggagacccagttttatttcaacatttattttggttttttggtcaccctgaggtatacattttaattttacctggctttggaatgatcagccatattgtttcaacattttctaaaaaacccgtgtttggatatttaggaatggcttatgctatggttgcaattggaattgttggtttcgttgtatgggctcaccatatgtatacagttggtttaagcacagacacaaaagcatattttttagcagcaacaatgattattgcggttcctacagggattaaaatattttcatggattgcaacgatgtggggtggatccatctcatttaaaacaccgatggtttgggcattaggttttatatttttatttacagtgggtggagttacaggagttgtcttagctaatgcaggtgttgatacagcaatgcatgatacttattacgttgttgcacactttcactatgttttatctttaggtgcagtgtttgcaatatttgcaggtttttattattggtttggaaaaatgtctggatatgaatattcagagtggatgggtcaattacatttctggttaacattcattggtgttaatttggtatttttcccacagcactttttaggtcttgctggaatgccaagaagatatgctgattacccagacgcttttgcagggtggaattatatatcatcgataggatcatacatctcagttttaggattagtggtattttttgctaatctaatttatgcattttataagaaaaaagctgcatctcaaaacccttggggagagggagctacaactttagagtggactgtaccatcaccaccaaattttcatacttttgaggagctgccaaaatttgaagatgatgaaagtgttgaaaaatctacaagttaat
